United States Patent Application Publication US 2011/0252501 A1 - sequence listing, part 5

SEQ ID NO: 18682 - protein, 394 aa, Saccharomyces cerevisiae
MAESTTLETIEIHPITFPPEVLARISPELSLQRHLSLGIRPCLRKYEEFRDVAIENNTLSRYADAGNIDTKNNILGSNVLKSGKTIVITSITGGIIEETSASIKDLDDFGEEELFEVTKEEDIIANYASVYPVVEVERGRVGACTDEEMTISQKLHDSILHSRILPKKALKVKAGVRSANEDGTFSVLYPDELEDDTLNETNLKMKRKWSYVLYAKIVVLSRTGPVFDLCWNSLMYALQSVKLPRAFIDERASDLRMTIRTRGRSATIRETYEIICDQTKSVPLMINAKNIAFASNYGIVELDPECQLQNSDNSEEEEVDIDMDKLNTVLIADLDTEAEETSIHSTISILAAPSGNYKQLTLMGGGAKITPEMIKRSLLLSRVRADDLSTRFNI

SEQ ID NO: 18683 - protein, 135 aa, Ralstonia metallidurans CH34
MRLLHTMLRVGDYQRSIDFYTRVLGMTLLRESDNPEYKYRLAFVGYGPETETAVIELTYNYGVDKYDLGTAYGHIALEVPSAAEACERIRSAGGKVTREAGPVKGGTTVIAFVEDPDGYKIELIERHSTRDAARP

SEQ ID NO: 18684 - protein, 990 aa, Synechocystis sp. PCC 6803
MVAQIDSQQQYEQATQAIAKELLAQTREKRSLWDKIGDNLRLDDKLLDWTMGHPGLRVQLFKFIDCLPALQSNSEIANHLQQYMSEEEVELPEALKKLLNFADAHSTPAQIAAGTVSKATEQLAFKYIAGETIAQVIKTVERLRKEKMGFTIDLLGEAVITESEAAEYWQNYLDLMAQLSQQAKSWSKVPQIDQADGEILPQVQVSVKLTAFYSQFDPLDPAGSKAKVCERIRELLRRAQELGVAVHFDMEQYHYKDLILNILKELLVEEEFRSRTDVGITMQAYLRDSTEDLEALIPWAKHRGYPVTVRLVKGAYWDQETIKAQQNHWQIPVYVEKAQTDANYERMTRLLLENHEYLYAAIGSHNVRSQALACAIAEELNIPKRRYEMQILYGMGEPLARAIVKRGHRVRVYAPYGRLLPGMAYLIRRLLENTANSSFLRQNLEERPIEELIAPPQVKGINDLPTKGYGNAPDTDYADADLRQQAFQALTRVKQQLGKTYLPYINGEYVETANYIDSVNPCRPSQAIGKVGLISVEQADHALEIAKAAFPAWKKTPVRERCGILRKAADIMEERRHELNAWICLEVGKIIPQADAEVSEAIDFCRYYADEMERLDQGVNLDIPGETNRYFYQPRGIALVISPWNFPMAIAVGMTVAALVTGNCTLLKPAETSTVIAAKIAEILIAAGVPPGVFQYVPGKGSVVGSHMVNHPDVHLIAFTGSREVGCRIYADAALVQPGQKHLKRVIAEMGGKNAIIVDESADLDQAVAGAVYSAFGYTGQKCSACSRVVVLSPVHDAFVERFVEATRSLNVGPTDDPSTQVGPVIDAKAQARIQEYIEQGKAECELAIACDAPSEGYFVGPTVFKNVDRHATIAQEEIFGPVVTIIRAANFDEALEIANGTDYALTGGLYSRTPDHINRAAAEFEVGNLYINRTITGAIVSRQPFGGFKMSGVGSKAGGPDYLLQFLEPRHVTENIQRQGFAPIEGADQ

SEQ ID NO: 18685 - protein, 476 aa, Bacillus cereus ATCC 14579
MQNKIIVMFQKDFRLYDNPALFEAVQSGEVLPVYIQDETFSIGSASKWWLHHAVIDVKKQLEALGSTLIIRKGRTEEEILSLIEQLDITAVYWNICYDPDRLQSNQKMKMMLEDKGIICKEFNSHLLLEPWIIKKKDNTEYKVFTPFYNAFQKQVIPKPFSRVQSIKWGNSLPASLSVSELQLLPIIPWTSHMEVIWDPTEEGAYKTFKKFFSSKLVSYSEGRDFPGQNVHSMLAPYLSFGQISVKLMFHYLINKSTERQCSLFEKQVNSFIRQLIWREFSYYLLYHYPFTVYKPLNKSFENFPWDKEEELLRVWQKGKTGYPFIDAGMRELWQTGFMHNRARMAVASFLVKHLLIPWQEGAKWFMDTLLDADIANNTMGWQWVAGSGADASPYFRIFNPITQGEKFDKNGEYIRRWVPELRDIPNKYIHKPWEAPEHILQKSNIKLGDTYPFPIVDHKAARERALCAYKSMKEFV

SEQ ID NO: 18686 - protein, 372 aa, Leifsonia xyli subsp. xyli str. CTCB07
MRPITAEHYTARLRRGAAQAREAGFDGLLVSPGPDLAYFAGYLPVATTERITLLVIPAADEIEPTMLVPILERTSAADTIAAGSFRLLDWRDGDDEYAPAAELLRPGGRYAVSDATWAMHLLALQAKLPAVRFEAFSTALPMLRAVKGMDEIDRLAAAGAAADATFEDILGVRFAGRTENEVAADLARLLRAHGHSQVDFTIVGSGPNGANPHHETGERTILEGDMVVLDFGGIMDGYGSDTTRTVHVGEPTDEEHEVFEVVKRAQQTAFDTVTAGVPCQKIDRAARAVIREAGYGDHFIHRVGHGIGTTTHEPPYLVEGEERPIEAGMCFSIEPGVYLPGRFGIRIEDIVVADVDGAHRLNNTSRELHIVQ

SEQ ID NO: 18687 - protein, 202 aa, Oligotropha carboxidovorans
MEAIDAAGADWIHCDVMDGHFVPNISFGPDVIKAIRPRTKKVFDVHLMIAPVDPYLEAFAKAGADVITVHAEAGPHLDRSLQAIRNLGKKAGATICPATPENVLANVLDRLDLILVMSVNPGFGGQQFISSQLDKIRRIRAMIGERPIRLEVDGGVNVETAAQVAAAGADTVVAGAAVFKGGTQSAYATNIAAIRAAAGTAR

SEQ ID NO: 18688 - protein, 273 aa, Candida glabrata CBS 138
MVSRHEKELMKTFQSLTSCTDEGKAKRYLSANNWNINYALNEYYDKEVGGFTEDHMIRHQFKYPDELVSLFGHYAALIEEDGTQSITPDGLIDYIQDLGYNLEDLVTISLAHFLQCKNLENPITEKQFLYFWYNEGCYTLEQMRHYLEDCERKLCNDWKYFTTIYNYSFDLNASKQGVVETDIAIEYWKLFFEENRTKLSGIIKVDQAHLDLWCKFLQDEHKKLIHKDTWQMLLLFFKKFPSLDAIKTEYNEADAWPYTIDEFYEYLEERNVL

SEQ ID NO: 18689 - protein, 595 aa, Kluyveromyces lactis NRRL Y-1140
MRVGNSNSIKKNVSECLSPNPVYYRNPITFKKANEFNNGKRERPLALLGDSIHADSKNSRQQLDDTVDNRLVIHWFRGDLRVRDNTGLAYALNQSKSGSVEALYVINEHDWIAHMESGWKLKFQLDALRSLSRELAKLGVRLHVKYFIPESPCLSNSREYAQWFSHIIEEIAASKNYDGNSKDDTKDDTDADEPALKKRKKDNDENQKGGSPNILVTANLQYEVDELYRDLKICRLQTQSSNSANFTLKLFHDMCIIEPGILKTGKGSQYTIFTPWYKKWVSFLEANQKDKHTICIEASIPQSSNREKVNPEEIKYQLPDKFMSEMPEQTLNIPKADEETALKKLTEFISKRASKYNNDKDLLDLTGTSLLSCYVTSGVISARTILNQSYQANNSRLMNKDIKKNNSLETFIKEVAWRDFYKHAISYWPFLSMDLPFKFETLNIKWENDVFLFEKWCYGETGIPIVDAIMLKMLKTGYINNRSRMITASFLAKNLLIDWRWGERWFRKHLIDYDTASNVGGWGFCASTGIDCQPYFRVFNMKLQSEKYDPEGKFIRHWLENDENDSDNVHEPKPNAIVDLRDSRERVLERFREVM

SEQ ID NO: 18690 - protein, 411 aa, Dehalococcoides sp. CBDB1
MSPKDLRPNLADTAGAAINKKPAVGDDILLERYTDNTEAHKYVNKPSELASEDKARILESGVILDDLKERSGTYIQMDNHPVHFSAQQDGIEIMSTSEAAKKYDWLKDYWWKAVSVDADKYTAHVELNQADGYFIRALPGVKTEFPVQSCMYMAKNQSIQNVHNIIIAEEGSELHIITGCTSAHRTETGLHLGVTEFYIKKGAKVTFTMIHTWSPDIAVRPRTGAIVEENGVFLSNYVIMKTVKNLQSYPVAYLNGENAVARFNSVMVCPPGSKMDVGSRVFLNAKHTRTELITRALTTGGEIISRGYIEGKVPDCKGHLECRGLILGDKGIIYAIPELMGRVSGVDLSHEAAVGKIAEEEVEYLMARGLNKDEATAAIVRGFLNVDIEGLPPLLKEEMDKAIKLGDQEGM

SEQ ID NO: 18691 - protein, 331 aa, Thermus thermophilus HB27
MKVGINGFGRIGRQVFRILHERGVEVALINDLTDNKTLAHLLKYDSTYGRFPGAVGYDEENLYVDGKAIRATAIKDPREIPWKQAGVGVVVESTGVFTDGEKARAHLEAGAKKVIITAPAKNEDITVVLGVNHEQYDPAKHHIISNASCTTNSLAPVMKVLEEAFGVEKALMTTVHSYTNDQRLLDLPHKDLRRARAAALNIIPTTTGAAKATALVLPSLKGRFDGMALRVPTPTGSISDITALLKREVTAEEVNAALKAAAEGPLKGILAYTEDEIVLRDIVMDPHSSIVDGKLTKAIGNLVKVFAWYDNEWGYANRVADLVELVLKKGV

SEQ ID NO: 18692 - protein, 307 aa, Helianthus annuus
MANFPVINMENLNGSERGVTMEKINDACENWGFFELVNHGIPHDLLDKVEKMTKDHYKKCMEQRFKEMVAAKALEGVKAEVTDMDWESTFFLRHRPTSNISEIPDLVDEYRELMKDFAGKLEKLAEELLDLLCENLGLEKGYLKKAFYGSKGPNFGTKVSNYPPCPTPDLIKGLRAHTDAGGIILLFQDDKVSGLQLLKDGEWIDVPPMRHSIVINLGDQIEVITNGKYKSVMHRVIAQTDGTRMSIASFYNPGNDAVIYPAPTLLEKEPTEKEQSYPKFVFDDYMKLYAGLKFQAKEPRFEAHESS

SEQ ID NO: 18693 - protein, 109 aa, Brassica napus
MSGVWVFKNGVIRLVENPNQSGGVTHGRRNVLVYLPTGEVVSSYSSLEQILMSLGWERYFSGDSDLIQYHKRSSIDLISLPRDFSKFNSVYMYDIVIKNPNTFHVREFH

SEQ ID NO: 18694 - protein, 805 aa, Oryza sativa
MEAEDDERAEAEAEARREKEAGNAAYRKLYLETAVRHYTRGALLDPRDISFLTNRAAAYLLMSKYKECVRDCDEAVEKGRELRADNKLVARALARKASALLKLAACAADYDPAIRALQQSLAEHYSEETLAKLGEAEEARKEIEERERLDQEAADHHRDRGNDFFKQKRYQEAAMHYTEAMKKNPKDPRVFSNRAQCHIYLGALPEGLEDADKCIALDPTFLKGYLRKAKVQLLMGNYEIALATYVEGLKCDPNNLEVLDGLRRCAACIKRANGGDSRAEDLREILGDLHLNDDLCNKLQKSMDEAAVLKKEASDERLKRIESERLARTLEDLYLSQVQQRKETEESLSRVQQEFEQLKIQQDEVTVELQRVNEQNENLLGQLSDSREHFEWLLSEHDQLLRERDNAVREVEELRQKRGQMLSVLVTAMHCEFSSSEVESATENFSNSLKIGEGGFGCVYKGILRNMTVAIKVLRPDSLQGQSQFEQEVSILSRVRHPHLVTLLGACSESSTLVYEFLPNGSLEDFLMCSDKRQTLTWQARIRIIAEICSALIFLHKNKPHPVVHGDLKPANILLGVNLVSKLSDFGISRLLIQSSTNNTTLYRTMHPVGTPLYMDPEFLSTGELTPQSDVYSFGIVVLRLLTGKPPVGIKNIVEDAMEKGDLNSVIDTSVGEWPHLHIEQLAYLALRCTELSRRCRPDLSGEVWAIVEAIRDAALSSPSSSRSAQDQNSPPSYFICPISQDIMDDPHIAADGFTYEAEAIRSWLCNGHDTSPMTNLLLEHEELIPNRALRSAIQEWLQQHSMSL

SEQ ID NO: 18695 - protein, 135 aa, Zea mays
MAAAAKIAPSMLSSDFANLASEAERMVRLGADWLHMDVMDGHFVPNLTIGAPVIESLRKHTKAYLDCHLMVTNPSDYVEAFGKAGASGFTFHIEVARDNWKELTQSIKAKGMRPGVSLKPGTPVEDVFPLVEAET

SEQ ID NO: 18696 - protein, 289 aa, Oryza sativa
  misc_feature (41)..(41): Xaa can be any naturally occurring amino acid
MASGSEAEKSPEVVLEWPKKDKKRLLHAVYRVGDLDRTIKXCFGMKLLRKRDVPEEKYTNAFLGFGPEDTNFALELTYNYGVDKYDIGAGFGHFAIATEDVYKWAEKIKSSCCCKITREPGPVKGGSTVIAFAQDPDGYMFELIQRGPTPEPLCQVMLRVGDLDRSIKFYEKALGMKLLRKKDVPDYKYTIAMLGYADEDKTTVIELTYNYGVTEYTKGNAYAQVAIGTEDVYKSAEAVELVTKELGGKILRQPGPLPGLNTKIASFLDPDGWKVVWLLSSCSTIFYYC

SEQ ID NO: 18697 - protein, 498 aa, Bifidobacterium adolescentis
MEGEIMTAVQTSNPVHDAEGAVEAGIHEVGATIDAVEREVGRGVSTRFPLNSAFIFTFGALGGMLFGFDTGIISGASPLIESDFGLSVAQTGFITSSVLIGSCAGALSIGALSDRFGRKKLLILAAILFLLGSGMCAGSTGFLMMVVARIILGLAVGAASSLTPAYLAELAPKERRGSLSTLFQLMITFGILLAYASNLGFLGHNIAGIRDWRWMLGSALVPAALLLIGGLLLPESPRYLVSRGRDREAFKVLTLIRKDVDQTQVQLELDEIKAVAAQNTKGGVRELFRIARPALVAAIGIMLFQQLVGINSVIYFLPQVFIKGFGFPENHAIWVSVGIGVVNFVATIAATLIMDKFPRKKLLIFGSVTMTIALAVLAVLNFTGDVATLAVPTMVLIACYILGFALSWGPIAWVLIGEIFPLSVRGIGSSFGSAANWLGNFVVSQFFLMLLAMFGNNVGGPFTIFGVFSALSIPFVLRFVPETKGKSLEQIEEEMVRR

SEQ ID NO: 18698 - protein, 470 aa, Dechloromonas aromatica RCB
MKKEKALVWFRRDLRDHDHAALSAALAEAQQVYCAFVFDSEILDPLPTRHDRRVHFIRESLVELDAALRARGGGLIIRHGQAVDEIPALARRLGVSAVFTNRDYEPSAKRRDAQVARQLRNDDIAFHGVKDQAIFDGDEVLTQAGKAFSVFTPYKNAWLKRLTTADYAAWPCDGRLAGQELAGIPTLEEIGFTPTDLAELGIQPGMSGAKGLWDDFSRDRIERYGSLRDFPAVKGVSYLSVHLRFGTISIRQLVRQALAHQADTWLSELIWRDFYFMILDHFPHVAGHAFKPEYDAIQWASRPEAFAAWCEGCTGYPLVDAAMRQLNFSGWMHNRLRMVVASFLTKDLGIDWRLGEKYFAEQLNDFDLSANNGGWQWASSSGCDAQPYFRIFNPVTQSEKFDAEGKFIRRYVPELAKVHDKYIHAPWKMGRIEQEALGVVIGRDYPSPIVDHATARDETLARYAVVKKQA

SEQ ID NO: 18699 - protein, 109 aa, Triticum aestivum
REAAIYDRQIRLWGLDAQQRIGKAHILIASVRALSNEVCKNLALAGVASITLLDHEIVKEHDLGSQFLLHEDDIGKNRAESAARNIQLLNPRVHVYVDTEDISEKPDSY

SEQ ID NO: 18700 - protein, 305 aa, Zea mays
MSFTPATACCRLPWRWHRGRHPAELFTPPVPRTLGSLGAGRGPPHYNSTPRKAQQSNAKPTPLQCYSERASCLPLRANDSNAYTPMAATVMASMSPLASATPGARRAFPVRLLLQASALAPRRRALAVTVRAQSDDAEAEPKEEAAAATTPAPKSKAAATASPGLWDALAFSGPAPERINGRLAMVGFVSALAVEASRGGGLLSQAGSGSGLAWFAATAAVLSVASLVPLLRGDSAEARSGAVMSADAELWNGRFAMLGLAPGLGAGAAAQGRQRRGQERRRHERQRRALERPLRHARPRRARLH

SEQ ID NO: 18701 - protein, 286 aa, Zea mays
MAQGINFPDFIGAVGGHDGGVDFGGNFCDMAFYQKLGEGTNISVDSLNSMQTSMHGGSIAMSVDNNSSVGSNSDSRTGMLGHPGLKGPAIVGSYSVGHSIFRPGRVSHALSEDALAHALMDNKFPTETLKDYEEWTIDLGKLHLGMPFAQGAFGKLYRGTYNGMDVAIKLLERPEADPEKAQLLEQQFVQEVMMLATLRHHEYCQVHCKRQNRSVPLKLAVKQALDVARGMAYVHGLGFIHRDLKSDNLLISGDKSIKIADFGVARIEVKTEGMTPETGTYRWMAP

SEQ ID NO: 18702 - protein, 494 aa, Pseudomonas putida
MSASSKFNVDPAGFRNRNLIGGQWKGSISGETITVENPATEEIIAHIPQGRHEDIDEAVRVARATFESPAWRKIRPIDRGRILENVARKIEEHADELAYLESLDTGKALTFAKAIDLPSTIDVFRYMGGWCSKLGGTTPPISFDGREYHTYTRREPIGVVGAITPWNYPLALGSWKIASALAAGCTMVLKPTELTPLSTLRLAELCLEAGLPEGALNIVNGHGHEAGEALARHPGVDKITFTGSTVVGKKIVEYALGNMKRVTLELGGKSPSIVFADADLDQVGLGAALAVFFNSGQICFAASRLFVQDSVYDQVVEAVAAAAAQFKVGNGLDPDTLLGPLVSRKQQERVMGYVQSGIEQGARLVCGGKSVGEKGYFLQPTVFADAAPSMRIAQEEIFGPVVSVIRFKDEAEAIRMANDTAYGLAANIWTRDIKKAHRVAHRLQAGSVWINCHGVIDPAAPFGGFKQSGWGREVSEEGLSAYTETKTVCALLDD

SEQ ID NO: 18703 - protein, 858 aa, Gibberella zeae PH-1
MALLQRFVAPSARGALRQSPAITLMITRKASNASPPKLKDPSLFKQDVCYVNGKWVKAKSGKTFKVNDPSTGDLIGTCPEFDSKDAQLAIRAAADAFPSFRNKTGRERSKLLRAWYEQMTANAEDIAKLITWENGKPMADAKGETTYAANFLEWFSEEAPRVYGDTIPSSVPGNRVWTLKEPVGVCGLITPWNFPAAMITRKIGPALAAGCTVVAKAPAETPFTSLALAELAHRAGIPKGVVNVVTSHENTPELGELLTSDPTIRKVSFTGSTNVGKLLMKQSAGTLKKLSMELGGNAPFIVFDDADADAAVAGAITSKFRSSGQTCVCANRIYVQRGIYDEFVSKFTEKVKSFNVGHGFDQGVTHGPLIHDKAIEKVEAHVKDAEKKGGKVTIGGKRLSDLGSNFYAPTVIRDMTPEMDMASQETFGPVAGLFPFETEEEVVKMANNTEVGLAGYFFSRDLERVHRIAEALEVGMVGVNTGLISDAAAPFGGVKESGFGREGSLYGISEYQITKMITYGVYYGEGSNEYNIHTLNHENVVVITFALQIIERAKCRRFEPCHDQRNFDLYLDPRNAQNRFNHNTLFEMAFSLANAPLRTCLRQLVRSKGPAPLRSIAASPRAFSTSHVLLKKRKISAPANSPNTATAKAAAGSMNKAEYDTAKVPAPDPEDPLDFTAVIAAYAPIDAHFKTQLAGMIHGGRFNPTNLGSLPVTIKDEEGADATFPLRELAQVVPRSGRAISLLVNDKEYIKPIMSAVQSSREFNQQPQRSEDNELELLLKVELERKDDVERRVKEAVQQWKDRIRNARSRHEKTLKDWKKNGTVLPDIVKKAEKELQKVQDKKMKEIDQEEAQTIRQL

SEQ ID NO: 18704 - protein, 124 aa, Zea mays
  misc_feature (98)..(98): Xaa can be any naturally occurring amino acid
MAAPKLATLALAVLLAATVVAPPAAVRAAMSCSTVYSTLMPCLPFVQMGGAMPPQPCCGGIRSLLQQANNTPDRRTICGCLKNVANGANGSGTYISRXAAALPSKCGVALPYKISTNVNCNTIN

SEQ ID NO: 18705 - protein, 383 aa, Glycine max
  misc_feature (84)..(84): Xaa can be any naturally occurring amino acid
  misc_feature (109)..(109): Xaa can be any naturally occurring amino acid
  misc_feature (257)..(257): Xaa can be any naturally occurring amino acid
  misc_feature (347)..(347): Xaa can be any naturally occurring amino acid
FYPFPILSLSAPSSSTLTLTLIPSSSSCLPPLSYPSPSPSAFMTSREKLDVARQLAKLGVDIIEAGFPAASMDDCKVVKMIAQXVGNAVDDGYVPAICGLSRCNEKDIXTAWEAVKYAKRPRIHTFIATSALHMEYKLRMSKDKVVDIARNMAKFARSLGCDDVEFSPEDARRSDREFFYEILGEVIKVEATTLNIPDTVGITKSSEFGKLIADIQANNPGIENVIISTHCQNDLGLSTANTIEGARAGARQLEVTXINGIGERARNASLEEVVMASRCEAHVNGNLYTGINAKHIFLTSRMVEEYTGLRVQPHKALVGANAFAHESGIHWLCQNTYILVYLCNRTXTLDGMLKHKGTYEIISPEDIGLERTNEVGIVLGKLS

SEQ ID NO: 18706 - protein, 493 aa, Pseudomonas syringae pv. syringae B728a
MSNPMSPALERAHHALEEGLSQLIHDYRPGYHLAPPAGWMNDPNGVVFFRGEYHVFYQHHPFDAKWGPMYWGHAKSADLVHWQHLPIALAPGDDFDRDGCFSGSAVVCGDTLALIYTGHIWLGDVGDERFIRQVQCLATSTDGISFVKHGAVIDTPPQDEMIHFRDPKVWRQDGHWYLIAGARLGDKPLLPLYRSKDLHAWEFVSYVSSGEEGDGYMWECPDLFGLNERDVLLYSPQGMPAQRYERLNRFHTGYRVGQVDSQWQFTGGPFIELDSGHDFYAAQTLVAADGRRLLWAWIDMWESPTPTEAHHWRGMLGLPRELEVRENRLCVHPARELTALRDASLPGTAWWSDAGSQWLTDIHGDMLEIHVQLDLLDCIEGHLGVALRCSPDGQEQTLLYYDASLKRLILDRTQSGTHVSGQRSVAIDPQQNQLELRIFLDRSSIEVFEQNGSFSFSSRLYPQTDSLGVKLVANGTGGRVCIANAWQLSSGYL

SEQ ID NO: 18707 - protein, 335 aa, Candida albicans SC5314
MSSIFPKLSFQEWYQVLYGLWPSNPQFTEKDISSNTLKDKVVVITGGNSGIGYETAKVLAGNTEARIYIWARNRQKSIEAIEKIKLEVAEKHSKDVGDRLQFIQIDLSDLNSIEPAVKEFLQREQRLDIIYHNAGVMESPSDQKTKQDYQMELGVNCIGPQLLQTLLDPLFIKTAEKNPPNLSRIVWVSSTAHMLSPIGGMYLRDPEFKSIDVELKTKYDQSKAINLIQARQWNIHHPGANAISLSLCPGYLKTGIQRHVTGLTKLAYNLFFHDQKMGVYTLLFAGLSPEITTKNKGDHVISFGKLGLIRPDLKDDENGKKVWDYLQDKIKSYVR

SEQ ID NO: 18708 - protein, 394 aa, Rickettsia prowazekii
MAKAKFERTKPHVNIGTIGHVDHGKTSLTAAITIILAKTGGAKATAYDQIDAAPEEKERGITISTAHVEYETQNRHYAHVDCPGHADYVKNMITGAAQMDGAILVVSAADGPMPQTREHILLAKQVGVPAMVVFLNKVDMVDDPDLLELVEMEVRELLSKYGFPGNEIPIIKGSALQALEGKPEGEKAINELMNAVDTYIPQPIELQDKPFLMPIEDVFSISGRGTVVTGRVESGIIKVGEEIEIVGLKNTQKTTCTGVEMFRKLLDEGQSGDNVGILLRGTKREEVERGQVLAKPGSIKPHDKFEAEVYVLSKEEGGRHTPFTNDYRPQFYFRTTDVTGTIKLPSDKQMVMPGDNATFSVELIKPIAMQEGLKFSIREGGRTVGAGIVTKINN

SEQ ID NO: 18709 - protein, 486 aa, Polaromonas sp. JS666
MTSEYVQDHQLNAMRLAGRKLGAERSGERAIQVFNPYTEALIGTVPKATLEEVRETFARAHAYKPQLTRYERAAILNRAAAIIQSRLDEVANLITAESGLCLKDSMHEAGRVSDVLLFGASEALRDDGQIFSCDLTPHGRKRRVYTQRSPLLGVITAITPFNHPMNQVAHKVVPSIASNNRMVLKPSEKVPFSAILFADILYEAGLPPEMLSVVTGDPREIADELITNPLVDLVTFTGGVAIGKYIASKAGYRRVVLELGGNDPIIVMEDADIDEASTLAVQGSYKNSGQRCTAIKRLLVHEAVAGQFVEQVLAKTLAWKYGDPTDRANDMGTVIDEAAAMLFESRVNEAVAQGAKLLAGNQRRGALYSPTLLDHVLPQMTVAREETFGPVSPVIRFKNIDEAIQISNGTAYGLSSAVCTNRMDYITRFVSELQVGTVNVREVPGYRLELTPFGGIKDSGLGYKEGVQEAIKSFTNLKTYSLPWSG

SEQ ID NO: 18710 - protein, 420 aa, Streptococcus pyogenes MGAS8232
MTKEKLVAFSQAHAEPAWLQERRLAALEAIPELELPTIERVKFHRWNLGDGTLTENESLASVPDFIAIGDNPKLVQVGTQTVLEQLPMALIDKGVVFSDFYTALEEIPEVIEAHFGQALAFDEDKLAAYHTAYFNSAAVLYVPDHLEITTPIEAIFLQDSDSDVPFNKHVLVIAGKESKFTYLERFESIGNATQKTSANISVEVIAQAGSQIKFSAIDRLGPSVTTYISRRGRLEKDANIDWALAVMNEGNVIADFDSDLIGQGSQADLKVVAASSGRQVQGIDTRVTNYGQRTVGHILQHGVILERGTLTFNGIGHILKGAKGADAQQESRILMLSDQARADANPILLIDENEVTAGHAASIGQVDPEDMYYLMSRGLDQETAERLVIRGFLGAVIAEIPIPSVRQEIIKVLDEKLLNR

SEQ ID NO: 18711 - protein, 831 aa, Rhodobacter sphaeroides f. sp. denitrificans
MTLTRRDLIKAQAAATAAAAAGLPVSALAQPVTGGAEALRIRWSKAPCRFCGTGCGVMVGTRDGQVVATHGDTQAEVNRGLNCVKGYFLSKIMYGEDRLTTPLLRMKDGVYHKEGEFAPVSWDEAFDVMAAQAKRVLKDKGPKAMGMFGSGQWTIWEGYAASKLMRAGFLSNNLDPNARHCMASAATAFMRTFGMDEPMGCYDDFEAADAFVLWGSNMAEMHPILWSRLTDRRLSHEHVRVAVLSTFTHRSMDLADTPIIFRPGTDLAILNYIAHHIISTGRVNRDFVDRHTNFALGATDIGYGLRPEHQLQLIAKGAADAGAMTPTDFETFAALVSEYTLERAAEISGVEPALLEELAELYADPDRKVMSLWTMGFNQHVRGVWANHMVYNLHLLTGKISEPGNSPFSLTGQPSACGTAREVGTFAHRLPADMVVTNPEHRAHAEEIWKLPAGLLPDWVGAHAVEQDRKLHDGEINFYWVQVNNNMQAAPNIDQETYPGYRNPENFIVVSDAYPTVTGRCADLVLPAAMWVEKEGAYGNAERRTHFWHQLVEAPGEARSDLWQLMEFSKRFTTDEVWPEEILAAAPAYRGKTLFEVLFANGSVDRFPVSDVDPDHANHEAALFGFYPQKGLFEEYAAFGRGHGHDLAPFDTYHEVRGLRWPVVEGEETRWRYREGYDPYVKPGEGLRFYGKPDGRAVILGVPYEPPAESPDEEFGFWLVTGRVLEHWHSGSMTLRVPELYKAFPGAVCFMHPEDARSRGLNRGSEVRVISRRGEIRTRLETRGRNRMPRGVVFVPWFDASQLINKVTLDANDPISRQTDFKKCAVKIEAV

SEQ ID NO: 18712 - protein, 295 aa, Ralstonia metallidurans CH34
MNDPYPSSKPANHKQTDRPRSLLERLSDFISPEPDTRAELLEVLQDAHERNLIDADSLSMIEGVFQVSELTARDIMVPRAQMDTVNIADAPETFIPYMQQTAHSRFPVYEGNRDNIIGILLAKDLLRYYTDPNFDLRETLRPAVFIPESKRLNILLREFRINRNHIAIVVDEYGGVAGLVTIEDVLEQIVGDIEDEFDLDEDHDNILPTADGAWRVHGLTEIEQFNETFGTAFPDDDVDTVGGLLTNHVGHVPHRGEIITLPPMQFEVLRADARQVHLLLVRREAPAEPALVAEA

SEQ ID NO: 18713 - protein, 944 aa, Yarrowia lipolytica CLIB122
MSEYLPPPPPLSPFSEWFEFGDTDLQIDKLQLAPDQSTATAPSTAGTTSASAPTQPPPPPPAPFISARESSMNVGPQHLPRDMGRPPQPTHSQSQPSHSQIHTQIPKHAPPPIPTLKKPPPPIRHYSSPSNGSSAANAIPGANHPPPQAQSQHSQAAQAAQQAHAALHAAQSASAPVSAVSPVSNTPLVTSWDKTKVAEWLRSLKCAEYIPMFEQNEICGEVLLEIDQKLLKDMGVVKVGDRVRINVAIKDLRSQHRKTTLQNQQPTPHQRSQHRTGKTLSYLDEQCVSPFASHGLGISSSSGTPVTPDRASSAGSDFSSHLRPQTARAPSSTTSTGDVKGILSMDQVRQGTVKFIYTMGQSKTVNISGCFNAESIIRTALKKFAIKDSPNNWCIHVSDNAFATSTRIVSDNELVTICHSPSRAERRRLMLCLNDMPPTQKQFAKSQSVLLESVDTNTNSSSSSGNYSANQPTISQLSGDYFSSDPQKMAPLPRSNLPHNSRRLQRFGHRPPSELISSNLAEYFPQAGSKVLEQTIRNSIRFSNRMSRMSTSTASNYHYNRMSIATISSFMNNEGGIGSENDSDNIPAVPEIPSDLSMPQTLTRESMQPSRTQSSSQVERGSSLRKSTASIPATLETLSQQEEAASAAASATASLVDPPHSATPSEDDMSDEQIIAMQSEAPKNWIKGTLIGQGSFGCVHLGMNSLTGELMAVKQVSLGDFSKTSHKQAMVDALQREMNLLRDFQHDNIVQYLGSSSDEEYLNIFLEYVPGGSVSSMLTKYGQFEEPLVKHFVRQILKGLDYLHSRNIIHRDIKGANVLVDNKGNVKISDFGISKKIEASSSNRQSLQGSVYWMAPEVVKQTSYTLKADIWSLGCLIVEMLTGSHPFPQFSQMQAIFKIGTSGRPDIPENCSEDTKDMLRQTFEQDYNKRPSAAELLAHEFLNT

SEQ ID NO: 18714 - protein, 302 aa, Synechocystis sp. PCC 6803
MKWHKESKVLLQGVHHPLGLTYLEQMRSCGTKLVAGVSPGHGGELIGDLPVFDLVDLAVKTVGPVDISLILNPPYRVLDAALEAIAAGIRQLVIVSAGVPPLDMITLLREAQATHTLILGSGSQGIMIPQQFSVGTLDPNCYLPGPIGIISHCDRLTDDIAQTLSAAGLGQSMVISLGTDGLNGSNFEQWLQVLEEDEQTATILLLGQPNSNGEMRAADYVASAIEKPVVAYLAGRGAKIKRHFGDSLTIVANQLSHKRPLLTSVEQTVQAFENANIPVAEAPWELPIFLPLAMESRHLGTD

SEQ ID NO: 18715 - protein, 917 aa, Pseudomonas chlororaphis
MLKKLGIKGRVLLLTLLPTSLMALVLGGYFTWMQQSDLQTQLLQRGEMIAEQLAPLVAPALAHQNTALLERIATQSLEQQDVRAVSFLAPDRTPLAHAGPSMLNQAPTGNGSQMLQRTGSDATRYLLPVFGRHRNLAGDLIPDESDRLLGWVELELSHNSMLLRGYRSLFASLLLITAGLICTGLLALRMGRTINNPLSQIKQAVTQLKDGNLETRLPLLGSQELDELASGINRMAGTLQNAQEELQHSIDQATEDVRQNLETIEIQNIELDLARKEALEASRIKSEFLANMSHEIRTPLNGILGFTHLLQKSELTPRQLDYLGTIEKSADSLLGIINEILDFSKIEAGKLVLDSIPFNLRDLLQDTLTILAPAAHAKQLELVSLVYRDTPLSLVGDPLRLKQILTNLVSNAIKFTREGTIVARAMLEEEHEDSVQLRISIHDTGIGLSNQDVRALFQAFSQADNSLSRQPGGTGLGLVISKRLIEQMGGEIGVDSTPGEGSEFWISLRLPKTRDDAEDLPAPPLLGRRVAVLENHELARQALQHQLEDCGLEVTPFNTLEALTNGVTGVHQTEQAIDLAVLGITTNDMPPERLNQHIWDLEHLGCKVLVLCPTTEQTLFHLSVPNPHSQLQAKPACTRKLRRALADLVNPKAVRSEPSEPIASRPPRVLCVDDNPANLLLVQTLLEDMGAKVLAVDSGYAAVKAVQNESFDLVMMDVQMPGMDGRQSTEAIRQWESERNCTPLPVIALTGHAMANEKRALLQSGMDDYLTKPISERQLAQVVLKWTGLALRNQGPERTGEPSGNGHELQVLDHDEGLRLAAGKADLAADMLAMLLASLEADREAIRAARAANDHNALIERVHRLHGATRYCGVPQLRAACQRSETLLKQEDIKAFAALDELERAINRLATEARINA

SEQ ID NO: 18716 - protein, 511 aa, Lycianthes rantonnei
MVLLLISELCASAIIFIIVHIIISKLIATGWGRRQRLPPGPMGWPVIGALPLLGTMPHVALAKMAKKYGPIMYLKVGTCGMVVASTPNAAKAFLKTLDINFSNRPPNAGATHLAYDAQDMVFAHYGPRWKLLRKLSNLHMLGGKALEDWANVRANELGHMLKSMFDASRVGGRVVVADMLTFAMANMIGQVILSKRVFVEKGAEVNKFKDMVVELMTVAGYFNIGDFIPQLAWMDLQGIEKGMKCLHKKFDDLLTKMFDEHKATTNERKGKPDFLDVVMANRDNSEGERLSTNNIKALLLNLFTAGTDTSSSAIEWALAEMMKNPQILKKVQQEMDQIIGKNRRLIESDIPNLPYLRAVCKETFRKHPSTPLNLPRISNEPCMVDGYYIPKNIRLSVNIWAIGRDPDVWENPLEFNPERFLSGKNVKIDPRGNDFELIPFGAGRRICAGTRMGIVMVEYILGTLVHSFDWKFSNDVKEINMEESFGLALQKAVPLEAMVTPRLPFDVYYTN

SEQ ID NO: 18717 - protein, 291 aa, Xanthomonas axonopodis pv. citri str. 306
MSVLINKNTKVIVQGFTGQQGTFHATQMVEYGTQVVGGVTPGKGGTTHINLPVFNTVADAVEATGADASVIYVPPPYAADAILEAAAAGIKVIVCITEGIPVLDMLRVKNVLTRSHPDTVLIGPNCPGVITPGECKIGIMPGHIHKPGKIGIVSRSGTLTYEAVKQTTEVGLGQSTCIGIGGDPINGLNFVDCLKLFNEDPQTEGIIMVGEIGGDAEEAGAEYIKNHVKKPVVGFIAGASAPAGKRMGHAGAIASGGKGTAEGKFAAMEAAGVKTVRSPGDLGAAIAALVK

SEQ ID NO: 18718 - protein, 445 aa, Eremothecium gossypii
MLRSIARSPLLKRSIATQAAPKAEITELSNGLVVATEPNSNAGSASVGIVFGSGAAAENPYNNGVSHVLSSAFKSINGAAAAKEGFSLSTAVERDFQSYILDTEAANAGRALDFLQSKLFAPVSDGAFASVRDATLKRVAAFEEQEHAERVLEHLHATAFQNTPLSLPKRGTVESIETLEKSDMESFAKSHFVASNAVVVGSGNISHEALVKAVESQLSLAGGSKPVSKKVSSFLGSEIRLRDDTLPKAWISIAAEGEPISSPNYYVAKVAAQIFGSYVASEPASNLQGVKLLDTVKEYHLADSFNHFSLSYKDAGLWGFSTEISNIHQIDDLMHFALKEWNRLSVSITETEVARGKALLKLNLATAASSNAAAATALGAQTLATGSKLALTEVFAKIDAITAKDVKKWANERLWDQDIAIANTGQIEGLLDYMRMRNDMSMMRW

SEQ ID NO: 18719 - protein, 999 aa, Erythrobacter sp. NAP1
MKHHPALSAMAMSAPALAPTAQPTDDTAEQANALGGLPASGAVDFRTLMAGLAAGIGFFILGLACLNLSRFDAALASVWLPNACAVAMLLLVRAHNEIPLYAGIAAASVAANVVAGTPLANSLVFTAANLAGIMLVTGLTRAKCGARPDMTELAHLGRFLQYGGAVGPLVASAIAAFAIPLGGQPVWVGALTWFLADALGMILVVPAALLVADAVRTATAPKTTALFKRAVFTAVALVAVWLVFRQDIYPLLFLVPPITLLVAFRGGGIGTVLFVPMIAGVASWMTVAGYGPIVNSSKSALDAVFVLQAFVAANFLTGLPIAAILAGRERMTEELARGRGELGLLAETITDAVLRLDRDRVCIYASPSVEDVMGRPPEDLVGHPIASRGPEDAHARIESALDSLLSGQSDKERITYRRLLDDEEGTPVFIEADCAIVLDPITGERDGVVVSARDVTERVELELLLTRARRHAENAARAKSEFLANMSHEIRTPMNGVLGFAELMLQGDLEPDNRRHTEMIVESGRSMMLLLNDILDLSKIEAGQIAIDSQPVDLVSTLAECVQLHLPNAEGKGLRLNFTASDAVKLGGEGARENPWVATDALRLRQIVLNLIGNAVKFTEKGSVDVQLSIQAEQFRVDVKDTGIGIGAKRVQTIFAPFTQGENDTSRRFGGTGLGLTISRQLAELLGGQIEVCSEVGIGSTFSLILPAHYVEPEVPALSQAAEASPADLPEASRILLVEDHDVNRMLGTEMLERCGQCVATAHDGNEAIAMVIDSVMRGSHYDLVLMDIQMPGCDGYAATRAIRAEGISPADLPIIALTANAFPEDISAARDAGMQGHLAKPLVFADLARMLQRWLPTRIVEDQSVEHAAPVAKAVNRGEQEAPSPAGQSETAGGHSPTLLKRWNQRRSEAIEAVRGALEQGHLGGESAAEENRDELARLVHKLAGTAAMFGEAELGDQAAALERALRMGLDAETQASLAFELLSVADDPADAPGAAAS

SEQ ID NO: 18720 - protein, 568 aa, Oenothera mexicana
MASPALISETEAWKDLKAHVEDIKRTHLRELMGDTERCQSMMVEFDNIFLDYSRQQASPDTINKLYKLADAAHLKQKIDRMYNGDHINSTENRSVLHVALRAPRNSAICSDGKNVVPDVWNVLDKIKDFSERVRNGSWVGATGKELKDVIAVGIGGSFLGPLFVHTALQTDPEASKNARGRELRFLANVDPIDAARNISGLDPETTLVVVVSKTFTTAETMLNARTLREWISSALGPSAVAKHMVAVSTNLPLVEKFGIDPNNAFAFWDWVGGRYSVCSAVGVLPLSLQYGFAVVEKFLQGAHNIDQHFSSAPFEKNIPVLLGLLSVWNVSFLGYPARAILPYSQALEKLAPHIQQVSMESNGKGVSIDGLPLPFESGEIDFGEPGTNGQHSFYQLIHQGRVIPCDFIGVVKSQQPVYLKGEVVNNHDELMSNFFAQPDALAYGKTPEQLKKENVSEHLIPHKTFTGNRPSVSILLPTLDAYRIGQLLAIYEHRVAVQGFIWGINSFDQWGVELGKSLATQVRKQLHASRVKGESVEGFNFSTKTLLTRYLEATSDVPAAPSTLLPKI

SEQ ID NO: 18721 - protein, 533 aa, Dehalococcoides sp. CBDB1
MQVKLYDTTLRDGSQREGISFTVADKLKIAQKLDDLGIHYIEGGWPGSNPKDSEFFTQAKSLKLKNAKMVAFGSTRRPKVKADADTTLKQLIDSGTEYVTLVGKSSARQVTQVLETTLEENLAMITESIEYLRSKCIKVFLDAEHFFDGYKDNPEYSIQVLQAAEKAGAEGVVLCDTNGGTLPEEITQAVKTVKEALNICVGIHAHNDTEMAVANSIAALKAGASQVQGTINGFGERCGNANLCSIIPILKLKMDIDCISDNQLKLLTETSHYISELANLVSEPFLPYVGSSAFSHKAGLHVSGLSKWSGSYQHIEPELVGNHQRLLVSELAGRSNIVQRAKAIGINLAPDSKEVKDLLQQVKKMESLGFQYENAEASFDLLVNRTQTGYIAPFELIDFMVVVEKQRRPSAMRNQDEMMAEGIVKVRVDGDIMHTVAEGNGPINALDAALRKGLCQFYPELSAVHLSDYKVRILEQTSGTDALVRVLIESSDGENTWHTVGASPNIIEASWLALSDSFEYWLITKKCKNCKKQ

SEQ ID NO: 18722 - protein, 365 aa, Dehalococcoides sp. CBDB1
MDFKLTVLPGDGIGPEVMDEGLKVLNAVAKKYKHTFKYQYGLIGGCCIDKEGVALSPAALAMCKKSDAVLLAAVGDPRFDDPKLPVHPEDGLLALRKGLGLFANIRPVKVAPSLVNSTPIKAEIVKGTDFIFIRELTGGVYFAKPKKRWTTPAGIRKATDSMTYSENEIERIVRVGFELAKNRKKKLVSVDKANVLLSSRLWRQIVIEVAKDYPEVKVEHVLVDACAMKLILAPTYFDVIVTENLFGDILTDEASMLAGSMGMLPSASLAGIPAKGTKIFGLYEPIHGSAPTIAKQNIANPIATILSIAMMLRYSCGLETEAVEIESAVDKVLAAGYATIDIFKEGNTKLGTAEMGNQITKMIGG

SEQ ID NO: 18723 - protein, 113 aa, Haemophilus somnus 2336
MMKKIEAIIKPFKLDDVRESLADIGITGMTVTEVRGFGRQKGHTELYRGAEYMVDFLPKVKMEIIVPDEIVEQCIEAIIETAQTGKIGDGKIFVYDVNRVIRIRTREENEEAL

SEQ ID NO: 18724 - protein, 320 aa, Streptomyces viridochromogenes
MAALAYITALNQALHDEMARDDRVCVFGEDVRIGLTQVAKGLHERFGDGRVVDTPLSEQAFTSLATGAAMAGQRPVVEYQIPSLLYLVFEQIANQAHKFSLMTGGQVEVPVTYLVPGSGSRSGMAGQHSDHPYSLFAHVGIKTVLPATASDAYGLLLSAVRDPDPVAVFAPSALMGTVEEVSGELGPVPLGSARIHRTGEDVTVVATGQCVHVALAVAEAMADEASIEVVDPRTIYPVDWETIRASAEKTGRLVVIDDANRMCGFGGEVLATAAEQFDLTARPRRVTRPDGAVIPYALVLDQALLPDAAQLTDAIRAVLK

SEQ ID NO: 18725 - protein, 507 aa, Thermosynechococcus elongatus BP-1
MKLRSILRRGFRLQHPLTQILYLPTRRTLLTFAVMIGVLSATAALGQDTAASAAVPEKVQVALNTLWVILAGVLVFFMNAGFGMLETGFCRAKNAVNLLSKNLIVFALASISYWAIGFALMFGDGNGVLGSSGFFLLGADNSPATGEAYRGVYSSLSWAAVPLSAKFFFQLVFAGTAATIVSGAVAERIKFYAFFIFSLLLVGISYPITGHWIWGGGWLQQLGMWDFAGSTVVHSVGGWAALMGAALLGPRLGRFLPDGSVAAIPGHNFAIATLGCLILWLGWFGFNPGSTMAADPGAIAHIAVTTNMAAAFGGVTATVVSTLYFGKPDLSMIINGILAGLVAITASCAFVTIESAALIGAIAGTIIVFSVVTIDRLKIDDPVGAISVHLVNGVWGTLAVGLFADGPGRFYEAGAGPLKGLLWSGDFTQFGYQLVGVLAVGGFTVAFSTAVWLLLNATIGIRVSPEEEIEGLDIGEHGMEAYAGFLLREEVKGFVDLLKRMSGSGRS

SEQ ID NO: 18726 - protein, 340 aa, Burkholderia sp. TH2
MSSYNIALNFEDGVTRFVTCKAGEKVLDAAFRARINLPMDCSDGVCGTCKCRAESGRYDLGDDYIEDALTEDEKETGLVLTCQMVPQSDCVIAVPASSTVCKTEQSRFAATVAKIDQHNDAAVVLELDVDAAAPVFLAGQYINIDVPGSGQYRSYSFSSAPGESKISFLIKKIPGGVMSTWLESAQQGNKVELVGPLGSFYLRTVERPLLFLAGGTGLAPFLSMLEVLARADSQQTVHLIYGVTRDLDLVQVDAIEAYKAKLPNFSYDTVVADADSNHPRKGWVTQHMPAEILNEGDVDVYLCGPPPMVDAVRKYFDDNGMKPNSFHYEKFTPNAAPRTV

SEQ ID NO: 18727 - protein, 327 aa, Prochlorococcus marinus str. MIT 9312
MAGTLLFNALKEAIDEEMANDVNVCVMGEDVGQYGGSYKVTKDLYEKYGELRVLDTPIAENSFTGMAVGAAMTGLRPIVEGMNMGFLLLAFNQISNNMGMLRYTSGGNYKIPAVVRGPGGVGRQLGAEHSQRLEAYFHAVPGIKIVACSTPTNAKGLMKAAIRDDNPVLFFEHVLLYNLSEELPEGDYTCALDQADVVKEGKDITLLTYSRMRHHCLKAVEELEKKGIDVELIDLISLKPFDIETISKSIRKTNKVIIVEECMKTGGIGAELIALITEECFDDLDARPIRLSSQDIPTPYNGNLENLTIIQPHQIVEKVEQLISGSI

SEQ ID NO: 18728 - protein, 407 aa, Bradyrhizobium sp. BTAi1
MRRVVITGMGIVSSIGNNTQEVLASLYEAKSGISRAEKYAELGFRSQVQGAPTLNPADVVDRRAMRFLGEGAAWNHVAMEQAILDAGLEPSDVSNVRTGIIMGSGGPSTRTQVEAADITRTKGPKRVGPFAVPKCMSSTASATLATWFKIKGVNYSISSACATSNHCIGNAYEMIQYGKQDMMFAGGCEELDWTLSVLFDAMGAMSSKHNDTPATASRPYDVTRDGFVIAGGAGVLVLEELEHAKARGAKIYGEIVGYGATSDGYDMVAPSGEGAERCMQMALSTVRTKVDYINPHATSTPAGDPPEIEAIRKVFGSGEKCPPIAATKALTGHSLGATGVHEAIYSLLMMKNGFICESAHITELDPMFADMPIVRKRIDNAKLGTVLSNSFGFGGTNATLVFKHVDA

SEQ ID NO: 18729 - protein, 277 aa, Lotus japonicus
MCEALKSQYQLCEEIGRGRFGTIFRCFHPISTDTFAVKLIDKSLLADSTDRHCLENEPKYMSLLSPHPNILQIFDVFEDDDVLSMVIELCQPLTLLDRIVAANGTSIPEVEAAGLMKQLLEAVAHCHRLGVAHRDVKPDNVLFGGGGDLKLADFGSAEWFGDGRRMSGVVGTPYYVAPEVLMGREYGEKVDVWSCGVILYIMLSGTPPFYGDSAAEIFEAVIRGNLRFPSRIFRNVSPAAKDLLRKMICRDPSNRISAEQALRHPWFLSAGDTVNVT

SEQ ID NO: 18730 - protein, 300 aa, Bacillus cereus ATCC 14579
MSVLVNKDTKVIVQGITGSQGLFHTKQMIEYGTKIVGGVTPGKGGTDIEGVPVFDTVEDAVKATGANASVVYVPPAFAADAIMEAVDAEIDLVVCITEGIPVLDMVNVKRYMAGKHTRLLGPNCPGVITPDECKIGIMPGYIHKKGHVGILSRSGTLTYEAVHQLTQEGIGQSTAVGIGGDPVNGTDFIDALKAFNEDEETHAVIMIGEIGGTAEEEAAEWVKANMTKPVVGFIGGQTAPAGKRMGHAGAIISGGKGTAAEKIKTMEACGIKVAETPAVMGETLISVLKEKGLFETCKNY

SEQ ID NO: 18731 - protein, 961 aa, Lotus japonicus
MANRNLEKMASIDAQLRQLAPAKVSEDDKLIEYDALLLDRFLDILQDLHGEDLKETVQEVYELSAEYERKHDHEKLEELGKVITSLDAGDSIVVAKSFSHMLNLANLAEEVQISRRRRNKLKKGDFADENNATTESDIEETLKKLVFKLKKSPQEVFDALKNQTVDLVLTAHPTQSVRRSLLQKHARIRNSLSQLYAKDITPDDKQELDEALQREIQAAFRTDEIKRTPPTPQDEMRAGMSYFHETIWKGVPKFLRRVDTALKNIGINERVPYNAPLIQFSSWMGGDRDGNPRVTPEVTRDVCLLARMMASNLYYSQIEDLMFELSMWRCNDELRVHADELHRNSNKDEVAKHYIEFWKKVPPNEPYRVVLGEVRDRLYKTREHSRILLAQGYSDIPEEATFTNVEEFLEPLELCYRSLCDCGDRAIADGSLLDFLRQVSTFGLSLVRLDIRQESDRHTDVMDAITKHLEIGSYQEWSEEKRQEWLLGELSGKRPLFGPDLPQTEEIRDVLDTFHVIAELPSDNFGAYIISMAIAPSDVLAVELLQRESHIKNPLRVVPLFEKLDDLEAAPAALARLFSIEWYRNRINGKQEVMIGYSDSGKDAGRFSAAWQLYKAQEDLIKVAKKFGVKLTMFHGRGGTVGRGGGPTHLAILSQPPDTIHGSLRVTVQGEVIEQSFGEEHLCFRTLQRFTAATLEHGMNPPFSPKPEWRALMDQLAVIATEEYRSIVFQEPRFVEYFRLATPELEYGRMNIGSRPAKRRPTGGIETLRAIPWIFAWTQTRFHLPVWLGFGAAFRQLIEKDVRNLHTLQEMYNQWPFFRVTIDLVEMVFAKGDPGIAALNDRLLVSEDLWPFGEQLRNKYEETKKLLLQVAGHKEVLEGDPYLKQRLRLRDSYITTMNVFQAYTLKRIRDPNYDVKHISKEKSKPADELVRLNPTSEYAPGLEDTLILTMKGIAAGMQNTG

SEQ ID NO: 18732 - protein, 967 aa, Lotus japonicus
MANRNLEKMASIDAQLRQLVPAKVSEDDKLVEYDALLLDRFLDILQDLHGEDLRETVQEVYELSAEYERKHEPQRLEVLGNLITSLDAGDSIVVAKSFAHMLNLANLAEEVQIAHRRRIKLKKGDFADEGNATTESDIEETFKKLVGEMKKSPQEVFDELKNQTVDLVLTAHPTQSVRRSLLQKHGRIRNCLTQLYAKDITPDDKQELDEALQREIQAAFRTDEIRRTAPTPQDEMRAGMSYFHETIWKGVPKFLRRVDTALKNIGINERVPYNAPLIQFSSWMGGDRDGNPRVTPEVTRDVCLLARMMAANLYYSQIEDLMFELSMWRCNDELRVRAEELTSSSNKDAVAKHYIEFWKNIPPSEPYRVVLGEVRNRLYQTRERSRHLLANEYSDILEEHTFTNVEEFLEPLELCYRSLCACGDRAIADGSLLDFLRQVSTFGLSLVRLDIRQESDRLTDVLDAITKHLGIGSYLEWSEEKRQQWLLSELSGKRPLFGPDLPQTEEIKDVLDTFHVIAELPSDNFGAYIISMATAPSDVLAVELLQRECHVKNPLRVVPLFEKLADLETAPAALARLFSVEWYRNRINGKQEVMIGYSDSGKDAGRFSAAWQLYKAQEELIKVAKEYGVKLTMFHGRGGTVGRGGGPTHLAILSQPPDTIHGSLRVTVQGEVIEQSFGEEHLCFRTLQRYTAATLEHGMHPPISPKPEWRALMDEMAVIATEEYRSIVFKEPRFVEYFRLATPELEYGRMNIGSRPAKRKPSGGIETLRAIPWIFAWTQTRFHLPVWLGFGAAFKHVIAKDIRNLNMLQEMYNQWPFFRVTIDLVEMVFAKGDPGIAALYDRLLVSEDLWSFGEQLRTMFEETKQLLLQVAAHKDLLEGDPYLKQRLRLRDSYITTLNVCQAYTLKRIRDPNYNVKLRPHISKEAIDVSKPADELVTLNPTSEYAPGLEDTLILTMKGIAAGMQNTG

SEQ ID NO: 18733 - protein, 295 aa, Helianthus annuus
NLNGSERGVTMEKINDACENWGFFELVNHGIPHDLLDKVEKMTKDHYKKCMEQRFKEMVAAKALEGVKAEVTDMDWESTFFLRHRPTSNISEIPDLVDEYRELMKDFAGKLEKLAEELLDLLCENLGLEKGYLKKAFYGSKGPNFGTKVSNYPPCPTPDLIKGLRAHTDAGGIILLFQDDKVSGLQLLKDGEWIDVPPMRHSIVINLGDQIEVITNGKYKSVMHRVIAQTDGTRMSIASFYNPGNDAVIYPAPTLLEKEPTEKEQSYPKFVFDDYMKLYAGLKFQAKEPRFEAHE

SEQ ID NO: 18734 - protein, 299 aa, Rickettsia typhi str. Wilmington
MINSIRIGTRNSTLALIQTNLVIAQIKQFFPDINCEIVPIITSGDLIQNKPLYDIGGKALFLKEIEQALLDKKIDLAVHSLKDIPGRIPVDLVIAAVLEREDPRDVLVCLNYKSIETLPQNAVIGSSAVRRKAFIKKIRPDLNIKVFRGNVDSRIKKLMTGEVDATILSYAGLKRLNAFNKKYCHLIEYSQILPCVGQGVIAVEIRKDDNAMFNICNQINHIPTFELIKPERAFLEHLDANCSTPIGAYSQYLDAYNIQTDFMLGKLDCNKIIFQTEITNINTSRECGIKAAKMMLAQQ

SEQ ID NO: 18735 - protein, 271 aa, Helianthus annuus
NWGFFEIVNHGISTELLDTVEKMTKGHYKKCMEDRFKDMVASKGLEAVQNQIDDLDWESTFYIRHLPESNISEIPDLEDEYRKVMREFAKELEKLAENILDIFCENLGLEKGYLKKAFYGAKGPTFGTKVSNYPPCPKPDLIEGLRAHTDAGGVILLFQDDKVSGLQLLKDDKWIDVPPMHHSIVINLGDQLEVITNGRYKSVMHRVIAQPDGTRMSIASFYNPGSDAVIYPAPQLVNKEEEKSNIYPKFVFEDYMKLYTAVKFQAKEPRF

SEQ ID NO: 18736 - protein, 179 aa, Arabidopsis thaliana
  misc_feature (107)..(107): Xaa can be any naturally occurring amino acid
  misc_feature (135)..(135): Xaa can be any naturally occurring amino acid
  misc_feature (144)..(144): Xaa can be any naturally occurring amino acid
  misc_feature (149)..(150): Xaa can be any naturally occurring amino acid
  misc_feature (156)..(156): Xaa can be any naturally occurring amino acid
  misc_feature (160)..(160): Xaa can be any naturally occurring amino acid
MASSMLSSAAVVTSPAQATMVAPFTGLKSSASFPVTRKANNDITSITSNGGRVSCMKVWPPIGKKKFETLSYLPDLTDVELAKEVDYLLRNKWIPCVEFELEHGFVXREHGNTPGILTMEGNWTMWKLPLFGCTXSGQVLKGVXKSKRXXGGLIRXIGFXNRKPGVYKPMPFGFMGAIF

SEQ ID NO: 18737 - protein, 485 aa, Bacteroides thetaiotaomicron VPI-5482
MDKTYKRHSFTKLWIATAMFIFCCFATSAFAQEAVDADTFMTTTETITEVKTTPEIAETATASAETTPDTIGELALGLNTVWMLLAAMLVFFMQPGFALVEAGFTRVKNTANILMKNFVDFMFGSLLYWFIGFGLMFGAGGLIGMPHFFDLSFLDSDLPREGFLVFQTVFCATAATIVSGAMAERTKFSMYLVYTIFISVLIYPISGHWTWGGGWLMNGEEGSFMMNLFGTTFHDFAGSTIVHSVGGWIALVGAAILGPRIGKYGKDGKSRAIPGHNLTVAALGVFILWFGWFGFNPGSQLAASTEADAMAISHVFLTTNLAACAGGFFALAMSWMKYGKPSLSLTLNGVLAGLVGITAGCDAVAPSGAVLIGAICGVVMIFAVDFIDKVLKIDDPVGASSVHGVCGFLGTVLTGLFSTSEGLFYGHGAGFLGAQLFGAVVVGVWAAGMGFIIFKVLDKIHGLRVPARVEEEGLDIYEHGESAYN

SEQ ID NO: 18738 - protein, 118 aa, Bacteroides thetaiotaomicron VPI-5482
MKKIEAIIRKTKFEDVKDALLEADIEWFSYYDVRGIGKARQGRIYRGVVYDTSTIERILVSIVVRDKNAEKTVQAIIKAAQTGEIGDGRIFVIPIEDAIRIRTAERGDIALYNAEQER

SEQ ID NO: 18739 - protein, 981 aa, Arabidopsis thaliana
MTDTTDDIAEEISFQSFEDDCKLLGSLFHDVLQREVGNPFMEKVERIRILAQSALNLRMAGIEDTANLLEKQLTSEISKMPLEEALTLARTFTHSLNLMGIADTHHSQLLQSGISPDELYKTVCKQEVEIVLTAHPTQINRRTLQYKHIRIAHLLEYNTRSDLSVEDRETLIEDLVREITSLWQTDELRRQKPTPVDEARAGLNIVEQSLWKAVPQYLRRVSNSLKKFTGKPLPLTCTPMKFGSWMGGDRDGNPNVTAKVTKEVSLLSRWMAIDLYIREVDSLRFELSTDRCSDRFSRLADKILEKDFGESRHTKFEIATTDYMPPNLQKQNEQDFSESDWEKIDNGSRSGLTSRGSFSSTSQLLLQRKLFEESQVGKTSFQKLLEPPPLKRAGSAPYRIVLGEVKEKLVKTRRLLELLIEGLPCEYDPKNSYETSDQLLEPLLLCYESLQSSGARVLADGRLADLIRRVSTFGMVLVKLDLRQEAARHSEALDAITTYLDMGTYSEWDEEKKLEFLTRELKGKRPLVPQCIKVGPDVKEVLDTFRVAAELGSESLGAYVISMASNASDVLAVELLQKDARLALTSEHGKPCPGGTLRVVPLFETVNDLRAAGPSIRKLLSIDWYREHIQKNHNGHQEVMVGYSDSGKDAGRFTAAWELYKAQENVVAACNEFGIKITLFHGRGGSIGRGGGPTYLAIQSQPPGSVMGSLRSTEQGEMVQAKFGIPQTAVRQLEVYTTAVLLATLKPPQPPREEKWRNLMEEISGISCQHYRSTVYENPEFLSYFHEATPQAELGFLNIGSRPTRRKSSSGIGHLRAIPWVFAWTQTRFVLPAWLGVGAGLKGVSEKGHADDLKEMYKEWPFFQSTLELIEMVLAKADIPMTKHYDEQLVSEKRRGLGTELRKELMTTEKYVLVISGHEKLLQDNKSLKKLIDSRLPYLNAMNMLQVEILKRLRRDEDNNKLRDALLITINGIAAGMRNTG

SEQ ID NO: 18740 - protein, 127 aa, Magnetospirillum magnetotacticum MS-1
MLLAGDAAGVVAPASGEGIYYAMLGGRLAAEAAEAFLATGDARSLALARKRFMRLHGRVFWVLGMMQWVWYRSDGLRERFVSICKDKDVQQLTWDAYMNKELVRAKPAAHARIFFKDLAHLFRWVSP

SEQ ID NO: 18741 - protein, 260 aa, Bacillus subtilis
MGDSILFTVKNEHMALITLNRPQAANALSAEMLRNLQMIIQEIEFNSNIRCVILTGTGEKAFCAGADLKERIKLKEDQVLESVSLIQRTAALLDALPQPVIAAINGSALGGGLELALACDLRIATEAAVLGLPETGLAIIPGAGGTQRLPRLIGRGKAKEFIYTGRRVTAHEAKEIGLVEHVTAPCDLMPKAEELAAAISANGPIAVRQAKFAINKGLETDLATGLAIEQKAYEQTIPTKDRREGLQAFQEKRRAVYKGI

SEQ ID NO: 18742 - protein, 485 aa, Ginkgo biloba
MASIFVPVCVSVAVITITCLKKFNGWRYECGLSSKKPLPPGDMGWPLLGNMLSFLIAFKFNRPNSFVSAFVSRFGRTGLYKPFMFGSPTILATTPETCKQVLMDDAHFVPGWPVSTVQLMGRKSFVALSHEDHDRLRKLTAPSINGHEALSNYLGWIEQRVVSAYEDWANQDRIVLLNELKKVTFDIISYIFLSYESKTGTKLASLEREYTSLNMGIRAMAINLPGTAYHKALKARKNLVAILQSVTEERRSSPDPQAKSNKDVLNALLHVKDENGSLLTDEEIIDLLVMYLNAGHESSAHITMWAIIFLVSHPRLYAEAKAEQEKIVNKRPDGQTHLIMYEIREMNYLRKIIDESLRMVNISLMVFREAMDDVEINGYTIPKGWKTQVWLRSVHMDPQVYPNPTKFDPDRWDKLIPKSGMFIPFGAGSRLCPGSDLAKMEICVFIHHLLFHYKIERLNPDCPVRYLPHPRPTDYCKGRVRKLST

SEQ ID NO: 18743 - protein, 220 aa, Raphanus sativus
WQNSWAYSTRTIGVMIMTHGDDKGLILPPKVASVQVVVIPVPYKDANTQGIFDACTATVSALSEAGIRAEEDLRDNYSPGWKYSNWEMKGVPLRIEIGPRDLENDQVRTVRRDNGAKEDIPRGSLVEHVKELLEKIQENMYEVAKAKREACVEEIKTWDEFIVALNKKKLILAPWCDEEEVERDVKARTKGETGAAKTLCSPFEQPELPEGTLCFASGKP

SEQ ID NO: 18744 - protein, 315 aa, Wolbachia sp.
LCDKKIQLGINLTKGLGAGALPDVGKGAAEESIDEIMEHIKDSHMLFITAGMGGGTGTGAAPVIAKAAREARAVVKDKGAKEKKILTVGVVTKPFGFEGVRRMRIAELGLEELQKYVDTLIVIPNQNLFRIAYEKTTFADAFQLADNVLHIGIRGVTDLMIMPGLINLDFADIETVMSEMGKAMIGTGEAEGEDRAISAAEAAISNPLLDNVSMKGAQGILINITGGGDMTLFEVDSAANRVREEVDENANIIFGATFDQAMEGRVRVSVLATGIDSCNDNSSVNQNKIPAEEKNFKWPYNQIPILETKEYASTE

SEQ ID NO: 18745 - protein, 294 aa, Desulfitobacterium hafniense Y51
MKFTLEMKLKDIMAANPKTVEAMQELGLHCLGCPFSVNETLLNAAQMHKLDPEKLLEAVNSVEQGEMSEAAKAKAQPKGAILQMDKKTFAIAPHIPAGVATPEILRKIADVAEKYNAAAIKVTSAQRIAIVGLKPEVIPAAWDDLGMDPGHAIGLCVRSVKVCPGMTFCKRGLQETLGIGMEVDKRYHGMSLPAKFKIGIAGCPNKCTDSMNVDLGIMGTSKGYHVYVGGNGGVKPRRGDLLLENLQSDQLIPVIDAVMEYFKENAKPQERLGRLIDRVGLEGLQEAAQDVVNA

SEQ ID NO: 18746 - protein, 544 aa, Raphanus sativus
MVASLRLPSLTSLLFPATTRYPAALRRRVLCPRNRPASGFATAPSSGTAASPDTKPEVNRLRSDQAVTPRSQDFNAWYLDVIASAELADYGPVRGTMVIRPYGYAIWEAIQDYLNVKFKETGHSNMYFPQFIPYSFIEKEASHVEGFSPELALVTVGGGHELEEKLVVRPTSETIVNHMFTQWIHSYRDLPLMINQWANVTRWEMRTKPFIRTLEFLWQEGHTAHATPEEAEKEAKQMIEIYTRFAFEQTSIPVIAGRKSKLETFAGADTTYTIEAMMGDRKALQAGTSHNLGQNFSRAFGTQFQDENGERQHVWQTSWAVSTRFVGGIIMTHGDDTGLMLPPKIAPIQVVIVPIWKKDTEKTQVLSAASSVKEVLQTAGVRVKLDDTTERTAGWKFNFWEMKGVPIRIEIGPRDVSSNCVVVSRRDIPGKAGKVFGISMEPSTLVAYVKEKLDEIQSSLLEKAISFRDSNIVDVNSYEELKAAIASGKWARGPWSASDSDEQRVKEETGATIRCFPFEQTLGSKTCLMTGNPAEEVAIFAKSY

SEQ ID NO: 18747 - protein, 406 aa, Thermus thermophilus HB8
MFREAELRNGLRVIAEVVPGARSVALGYFVKTGARDETKEESGVSHFLEHMVFKGPEDMDALAVNRAFDRMGAQYNAFTSEEATVYYGAVLPEFAYDLLGLFAKLLRPALREEDFQTEKLVILEEIARYQDRPGFMAYEWARARFFQGHPLGNSVLGTRESITALTREGMAAYHRRRYLPKNMVLAATGRVDFDRLLAEAERLTEAWPEGEAERAYPPLTPAFGVEERPYEKARALYLVALFPGVAYQEEARFPGQVLAHLLGEEGSGRLHFALVDKGLAEVASFGLEEADRAGTFHAYVQADPARKGEVLAVLQEELDRLGREGVGEEEVERAKTPLATGLVFAGETPMQRLFHLGMEYLYTGRYLSLEEVKARVQRVTSREVNALLERGFLEKGLYYLVLPHGA

SEQ ID NO: 18748 - protein, 403 aa, Thermus thermophilus HB8
MSRVERLPNGLVVALEERDFPGVAFQLLVPAGAVNDPEGMEGAAALLEGWLWKGAGDLDARALAQALDALGVRRSSGAGLEYTAFAAAFLPEVLDEVFRLYALLLTRPRLPEEGLEAVRSVALQALLSLEDQPARKLLSELRRKVFRSPHGREPLGREEGLKGARAEALKADYRRRYTPKGAILAVAGGVSWERLRAALEPFLAWEGEEALYPAPELSEPHRFVLRRPTAQVQIGLAYPDVGPEDPGFYAARLALEVLSGGMSSRLFTEVREKRGLVYAVSAFPAGVKGQGLLMAYAGTTKERAGETLEVLRAEVERLAEGVTEEELSRAKVGLKTALVMADESIRSRAASMARDLYMLGRVRSLSEIEAAIEGTSLEAVNAFLRAHPYRDPWVGLLGEVEDV

SEQ ID NO: 18749 - protein, 505 aa, Dehalococcoides sp. CBDB1
MDRIKIFDTTLRDGEQAAGASLNAQEKLEIARQLEKLGVDIIEAGFPITSPGDFEAVKLIAQEVRTPVICGLARAIPADIDRAWEALKEAAHPRIHVFISSSEIHMVHQIKKSRDEVLELARTMVAKAKGYTDDIEFSPMDASRSDPEFLYKLLEAVIDAGATTLNIPDTVGYAIPSEFGELIKGIRQNVPNIGKAVISVHCHDDLGMGTANSLAAVKNGARQVECTLNGIGERAGNAALEEVVMALRTRSDFFNFETGINTQEIYRTSRLVSALTGFAIQPNKAVVGENAFRHQSGIHQDGVIKMAKTFEIMDPKEVGIQASSLVLGKLSGRHAFKQHLTELGFDLNEEDFDRAFKAFKDLADKKKDVTDRDIEALVAEELRTTVELYHLDRIQVTSGDRGIPTAAVRLTTPNGGAVEDASLGSGPVDAVYKAINRIVNVPNKLTEFSVKSVTAGIDALGEVLIRIESDGVTYTGRGSDTDIIVASAKAYMNALNRLLRVKNAS

SEQ ID NO: 18750 - protein, 297 aa, Prosthecochloris aestuarii DSM 271
MQASRRRSEAPSSRSATIFSTQWYRSGSMKQGVACITGSTDGIGRAAAFELAAAGHTVVLHGRSFERLEHTRREIEEQTGNHSIHTVLADFTDLCQVRRMADQLEKLCSVIDILINNAGVYMPRCQITTAGIETTFAVNHLAHFCLTTLLEPLLIESRTRVVNVSSVDHHSAGFSANSITGGTRYTGYQAYAFSKLCNVAFTLEHADRLRRTGVTVNTLDPGILATKLLHAGWSLQGDDVSCGAPPLLYLACSSKVADITGTYFENNHPAICSPIAHDPEIRRELWEISEEIVERNS

SEQ ID NO: 18751 - protein, 1034 aa, Synechocystis sp. PCC 6803
MNLAVPAFGLSTNWSGNGNGSNSEEESVLYQRLKMVEELWERVLQSECGQELVDLLTELRLQGTHEAITSEISEEVIMGITQRIEHLELNDAIRAARAFALYFQLINIVEQHYEQNEQQRNRWEASQETNFYEQAGNEEEMVPPSRLGASTEPLPVGIDQNELQASVGTFHWLMRELKRLNVPPQHIQNLLDHLDIRLVITAHPTEIVRHTIRRKQRRVDRILRKLDQLQGSVTGRDWLNTWDAKTAIAQLTEEIRFWWRTDELHQFKPTVLDEVDYSLHYFDEVLFDAVPELSKRLGQAIKETFPHLRAPRANFCYFGSWVGGDRDGNPSVTPEVTWQTACYQRGLVLGKYLFSLGELVAILSPSLHWCKVSQELLDSLERDRIQLPEIYEELSLRYRQEPYRMKLAYVTKRLENTLRRNNRLANPEERQTMITMPAENHYRTGEELLEELRLIQRNLTETGLTCLELENLITQLEVYGFNLAQLDFRQESSRHAEAIAEIAEYMGVLTTPYEEMAEEDKLAWLGVELQTRRPLIPQEMPFSERTRETIETLRTLRHLQMEFGVDICQTYIISMTNDASDVLEVLLLAKEAGLYDPATASNSLRIVPLFETVEDLKNAPGIMDSLFSLPFYRATLAGSYHSLKELQNQPPDYYQIPTTTALLNPGNLQEIMVGYSDSNKDSGFLSSNWEIHKAQKSLQAVAQSHRVILRLFHGRGGSVGRGGGPAYKAILAQPAGTVDGRIKITEQGEVLASKYSLPELALYNLETLTTAVIQASLLKSSFDFIEPWNRIMEELACTARRAYRSLIYEEPDFLDFFLTVTPIPEISELQISSRPARRKGGKADLSSLRAIPWVFSWTQTRFLLPAWYGVGTALKSFVDQDPVKNMKLLRYFYFKWPFFNMVISKVEMTLSKVDLTIASHYVQELSKPEDRERFDRLFQQIKQEYQLTRDFAMEITAHPHLLDGDRSLQRSVLLRNRTIVPLGLLQISLLKRLRQVTQEAETSGVRYRRYSKEELLRGALLTINGIAAGMRNTG

SEQ ID NO: 18752 - protein, 297 aa, Brassica napus
MGVMVNHHLLAIIFGILGNAISFLVFLAPVPTFYRIYKNKSTESFQSLPYQVSLFSCMLWLYYALTKQDAFLLITINSFGCVVETIYIAMFFTYATKEKKMAAIKLFLTMNVAFFSLIIMVTHFAVKRPSLQVSVIGWICVAISVSVFAAPLMIVARVIKTKSVEFMPFTLSFFLTISAVMWFAYGAFLHDICIAIPNVVGFILGLVQMVLYGVYRNSGEKLDIGKRNNSSSEQLKTIVVMSPLGLSEMHPVDVTVTEPVIPLSYTVHHEDPSKITKEEEPSTEAGQSHVETAPSRI

SEQ ID NO: 18753 - protein, 268 aa, Oryza sativa
  misc_feature (104)..(104): Xaa can be any naturally occurring amino acid
QTRNAETYCDTDDKLITDPLCVSLSELSSSALSKLAPLEAILFDIDGTLCDSDPIHFCAFRELLQQVGFNNGVPISEEFYSANISGGHNDDLARALFPDLDHDXKAMKSMDDKEALYRRLAPEQLVAVEGLHDLCRWIKDHKLKRAAVTNAPRSNAELMLSLLGLTEFFPVLVIGSECDRAKPFPDPYLKALELIGASPDHTFIFEDSASGIRAGVAANVPVVGLTTRNPEKVLQDAGASLLIKDFQDPKLLSILEEIEPTVAAVEQV

SEQ ID NO: 18754 - protein, 410 aa, Streptococcus agalactiae A909
MTLQRVVVTGYGVTSPIGNTPEEFWNSLKEGNVGIGPITKFDSSDFMVKNAAEIHDFPFDKYFVKKDLNRFDMYSLYALYASSEAIQHANLNLDEIDADRFGVIVASGIGGIQEIEEQVIRLHEKGPKRVKPMTLPKALPNMAAGNVAMRLGAHGVCKSINTACASSNDAIGDAFRNIKFGIQDIMVVGGAEAAITKFAIAGFQSLTALSTTEDPSRASIPFDKDRNGFIMGEGSGMLVLESLEHAEKRGATILAEVVGYGNTCDAYHMTSPHPEGLGATKAIQLALVEANIKPEEVNYVNAHGTSTPANEKGESQAIVAALGTDVPVSSTKSFTGHLLGAAGAVEAIATIEAIRHSYVPMTAGTTELSEDITANVIFGQGQDADIRYAISNTFGFGGHNAVLAFKRWED

SEQ ID NO: 18755 - protein, 349 aa, Solanum tuberosum
MKTIQGQSATTALTMEVARVQAISSITKCMDTIPSEYIRSENEQPAATTLQGVVLEVPVIDISNVDDDEEKLVKEIVEASKEWGIFQVINHGIPDEVIENLQKVGKEFFEEVPQEEKELIAKKPGAQSLEGYGTSLQKEIEGKKGWVDHLFHKIWPPSAINYRYWPKNPPSYREANEEYAKWLRKVADGIFRSLSLGLGLEGHEMMEAAGSEDIVYMLKINYYPPCPRPDLALGVVAHTDMSYITLLVPNEVQVFKDGHWYDVNYIPNAIIVHIGDQVEILSNGKYKSVYHRTTVNKYKTRMSWPVFLEPSSEHEVGPIPNLINEANPPKFKTKKYKDYVYCKLNKLPQ

SEQ ID NO: 18756 - protein, 536 aa, Thermosynechococcus elongatus BP-1
MKIWLYDTTLRDGAQREGLSLSLEDKLRIARHLDRLGIPFIEGGWPGANPKDVQFFWQLQETPLQQAEIVAFCATRRPGRKAAEEPMFEPILAAGTRWVTLFGKSWDLHVTEGLKTSLAENCAMIADSIQFLKSHGRRVIYDAEHWFDGYLANPEYALQTLETALAAGADWLVLCDTNGGCLPHQIQAVVAEVMAHLGGLDCLGIHTHNDAGTAVANALAAVQSGVRMVQGTINGYGERCGNANLCTLIPNLQLKLGYDCVTPEQLATLTEVSRHVSEIVNLAPDDHAPYVGLSAFAHKGGVHVSAVQRNPRTYEHIEPHLVGNQRRIIISEQAGISNLLAKTSELGFELDRQHPLSRTILERIKHLESEGYQFEAAEASFELLIQEVLGQRQRPFTLKGFDVFCRTDSRQLEATIRSQSLATVKVEVNGEEMLTAAEGNGPVSALDQALRKALMSFYPEIAEFHLTDYKVRILDGHAGTAAKTRVLVESSNGRDRWATVGVSANIIEASYQAVAEALEYGLQRTRRSQAFPLVPS

SEQ ID NO: 18757 - protein, 627 aa, Arthrospira platensis
MSAPPSAPTVTTFPLAAVVGQEAIKFALLLAAVDPGLGGVVIAGRRGTAKSVMARALHALLPPLEVVKNAIANIAPNWEAGEPTPETEIIPAPFVQVPLGVTEDRLIGSVDVEKSVKQGDTVFQPGLLATANRGVLYIDEINLLDDNIANLLLTVLTEGRNVIEREGISFEHPCQPLFIATFNPEEGPLRTHLLDRIAIALSADGVLSLDQRVQAVDQALDYSQSPEAFLQQYTEDLDNLKTQILLAREWLKDVTITSEQILYLVEEAIRGVVSGHRAELFAVRVAKASAALDGRNSDNADDLRRAVELVIVPRATVIQTPPEEQQQQPPPPPPPQGEEEPEPEDEDEDEDEEPETEPPEEEQNSIPEEFVFDPEGVVLDPTVLYFSQMANRQGKTGSRSMIFSEDRGRYVKPMLPKGKVQRIAVGATLRAAAPYQRSRRLRYPERRVVVESGDIRSKRLARKSGALVVFVVDASGSMALNRMQSAKGAVMQLLTEAYQSRDQVSLIPFRGEQAEVLLPPTRSIAAAKRRLERMPCGGGSPLAHGLTQAVRVGMNAKQSGDIGQVVIVAITDGRGNIPLARSLGEPILEGEKPDIKGELLEIAAKIRGLGIQLLVIDTENKFVSTRF

SEQ ID NO: 18758 - protein, 341 aa, Bifidobacterium adolescentis
MAENEWLSKDFYKVLGVSKDATDAEITKAYRKLARKYHPDLNKTKEAEEKFKDISEAYDVLSNKENRQKYDAIRQFGMGGARFAGGSGQGGFDAGAFSDIFGSMFGGGAGMGGNGSRIRFQTNGGGNPNLNDIFSMFGGGAGGPGAGSAYERYGADDYEQPQPENGEDRNSKIRLTFRQAVKGATVSLSADGKKFKTHIPAGVRDGQKIRLTGKGKPGRNGGKNGDLYLHITVAEDPKFTLRGRDIIMPLPITVSQAVNGAKVTATDIDGNEIAFKVPAGSSSGAEVRIAGKGVANPHENGDLVGRVEIRIPEHPNLVAKHAAKEFDKACGDFADELARER

SEQ ID NO: 18759 - protein, 487 aa, Nocardioides sp. JS614
MAELLMPWAAGREVNARDRTGTNLVNGNRTFAVEDPATLELIAEVADHGETEARAAVDRAHEAFAGWSGTSPRQRSDVLRRAYELMLRDEGRLSALIARENGKSLADAASEVVYAAEFFRWYAEEVVRTEGSYGEAPAGGVRTIVHHKPVGVAALVIPWNFPAAMATRKIAPALAAGCTVVLKPAAETPLTAIAIADLLAEAGLPAGVVELVTTTHAGAVVTAWLEDDRVRKVSFTGSTGIGRLLLHQAADRVVNTSMELGGNAAFIVTEDADLVDAVAGAMIAKFRNGGQACTAANRIYVHRDVADAFVALVGAQVEKLSVGAANDGNMIGPLISAAAVSRVGAAVDRAIEEGARVAARAQLPDAPGYFYPPTVLTDVPSTSSILAEEIFGPVAPIATWDDEQELLRQVNGTEYGLAAYVYTGHLERGLRLGERIEAGMVGINRGIVSDPSAPFGGVKQSGLGREGAREGLREFQETQYLSISWDD

SEQ ID NO: 18760 - protein, 847 aa, Nocardioides sp. JS614
MRVERPSPAVVALWVAMTVLVFAHLMVGYGTAFDVTYLAAVWLAPVVAWIGTARRPPGARLVPGLIAAGLTASAVGDLVWDLYAWSGLEPDVSLADIPYFLSYLGIGGAVAIVMFGRRGLPSTDVESALDALTIVVVSMMVFWTVSIREIMADDTMPRLTQAVLAAYPIADAVLLALLLRAISVRHSRQRLGFGLALGAVCWLISDVAYYGLDVTEPVAGSNDIGWMVGAILMSTATLRPVSPPTPETAEPPSHRAPLGRLGIAIVPLLVPPAIMIVNQAIGRSPHVVEVSVGMTALVAIAFVRMGRMLQWEVVARRELAAARDVALEASRSKSTFLATMSHEIRTPMNGVIGLTGLLEATDLDERQRQYAEGVSSAANALMTIINDILDFSKVEAGRLDLETIDFDLVQVVEEVAELIAEPAQSKGLELLAYCSPELPTCLRGDPSRLRQVLLNLASNAVKFTARGEVLVRASLEASLQDGPEAGAEAGVVVRFEVTDTGIGVEEADRERLFEPFSQADSSTTRRYGGTGLGLAISEHLVTAMGGQIGVDSRPGLGSTFWFTLPLGLAEDLSASTPRGTEDIAGLRVLVVDDNQTNRMILHDQLTAWGLHVDLAEDGPHALAALADAHRTHHPFDLAVLDLCMPDMDGLELAHRISSDPTLTGLAMALLTSGGEISQTDARAVGITASMTKPVQLSRLRATLQDIIGTRRPHTPLHIPTTPAGRGRILVVEDGEINQLVAVGILEHLGYTTDVADNGVTALSAMGRTRYDAVLMDVQMPGMDGYQATREIRRLEGDVHHTPIIAMTASATNDDRDRCLAAGMDDYISKPVNPHTLETVLSRWATST

SEQ ID NO: 18761 - protein, 474 aa, Nocardioides sp. JS614
MPEYKLPDPGEGLTEAEIVKWHVAVGDVVEINQVVVEIETAKSIVELPSPYAGEVSAILVAEGELVPVGTPIIAIGDDVAAEPAAGAAPEARAAAPVEIDLSNPAASGGGEGESLVGRNKADRGPVRRARKVTSGAMAAHMQAQAAFETGGAPMVEADEEPVPATAAAPLDAPAAVRTLAKPPVRKLAKDLGVDLTTLTPSGPNGTVSREDVEAAAGGDAVLGGRVAAGERGGESRPAEREWREPIKGVRKMMGQAMVQSAFTLPHVTEWVTVDVTATMELVERLKTRREFREVRVSPLLVLARAVMLAMRRTPEINSWWDDAAHEVVYKRYVNLGIAAATPRGLVVPNVKDAESMTLLELAQAINAVTATAREGKTQPAEMSGGTFTITNVGVFGVDSGTPIINPGESAILAFGAVRKQPWVVETDGQDTIVPRQICTLALAFDHRHIDGEKGSRFLADVAEIMADPATALLY

SEQ ID NO: 18762 - protein, 129 aa, Triticum aestivum
  misc_feature (84)..(84): Xaa can be any naturally occurring amino acid
MAPTVMASSATSVAPFQGLKSTAGLPVSRRSNGASLGSVSNGGRIRCMQVWPIEGIKKFETLSYLPPLSTEALLKQVDYLIRSXKWVPCLEFSKVGFIFREHNASPGYYDGRYWTMLELLSSDPTPPGD

SEQ ID NO: 18763 - protein, 127 aa, Oryza sativa
  misc_feature (36)..(36): Xaa can be any naturally occurring amino acid
  misc_feature (42)..(42): Xaa can be any naturally occurring amino acid
  misc_feature (48)..(48): Xaa can be any naturally occurring amino acid
  misc_feature (104)..(104): Xaa can be any naturally occurring amino acid
  misc_feature (117)..(117): Xaa can be any naturally occurring amino acid
MITSSLVAPARSKGLSSISRRGSSLAIVCSGCKKIXTDKPYXIGGGSXLHIDASGMEEHRGRVCTNSIDKDGAHVDMLWPIYSPEEWSPTGDTYIGVTMVLLIXPVTLIWLLGGGAXLVYNINAFLG

SEQ ID NO: 18764 - protein, 675 aa, Beta vulgaris
MSESSDSTLPYSYAPLATKNEFNGFGPGENQPRRRSLKIGLAVFSTLMICALLMSILDYNNNVDVNNVSKNNAPNKYNVGDLTFRPQPENVASVEVMPGSKDLLFKVSRGKPHGVSQKANSLPLRGLKVPFFDWNDLQLAWQRTAFHFQPQKNWMNDPNGPLYYNGWYHFFYQYNPAGAVWGNIVWGHAVSKDLIRWKHLPIAMVADRWYDFNGVWTGSATILPDGQIMMLYTGSTNESVQVQNLAYPANLSDPLLLEWVKYPGNPVLVPPPGIGKLDFRDPTTAWLTSEGKWRITIGSKINKTGISLVYDTTDFKNYELLSNILHAVQGTGMWECVDFYPVSVAEPNGLDTSTNDQSVKHVLKASMDDDRNDYYTLGTYIEDNVTWVPDNPAIDVGIGLRYDYGRFYASKTFYDHEKKRRILWGWITEGDSEAADVKKGWASLQGIPRTVLFDQKTRTNLVQWPVEEVETLRQNNKDFDKVEVPAGSVVPLDVSAATEIDIIAEFDIDKEALENLPVSEEHYSCPASKGAAQRGALGPFGLLVLANNDLAEQTPVYFYVIKTLSGSFKTFFCTDLSRSSAATDVFKNIYGSTVPVLKGEKLSMRILVDHSIVEAFAQGGRTCITSRVYPTKAIYKETKLYVFNNATTATVTASIKTWQMSSARLQENIEETKER

SEQ ID NO: 18765 - protein, 412 aa, Helicobacter pylori J99
MRRIVVTGMGMINSLGLNKEDSFLAIAKGECGIKNIESFDANAFPVRIAGEITDFDPTEVMNPKDVKKAGRFIQLALKATREAMKDSGILDAHNRCPEELANRMGVSSGSGIGGLGNIEANSIFCFEKGPRKVNPFFITSALVNMIGGFTSIEFGIKGPNLSSVTACAAGTHAIIEAVKTILLNGADRMLVVGAESTICPVGIGGFASIKALSTRNDDPKKASRPFDKDRNGFVMGEGAGALVLEEYESAKKRGAKIYAEFAGYGESGDANHITAPAPEGEGAFRAMKMALEMAKVEVGYVNAHGTSTHYNDWYESIALKNVFGSKEKVPPVSSTKGQIGHCLGAAGALEAVISIMAMNQGILPPTINQETPDPECDLDYIPNTAREKQVNAVMSNSFGFGGTNGVVIFKKA

SEQ ID NO: 18766 - protein, 213 aa, Arabidopsis thaliana
MNSFSAFSEMFGSDYEPQGGDYCPTLATSCPKKPAGRKKFRETRHPIYRGVRQRNSGKWVSEVREPNKKTRIWLGTFQTAEMAARAHDVAALALRGRSACLNFADSAWRLRIPESTCAKDIQKAAAKAALAFQDETCDTTTTDHGLDMEETMVEAIYTPEQSEGAFYMDEETMFGMPSLLDNMAEGMLLPPPSVQWNHNYDGEGDGDVSLWSY

SEQ ID NO: 18767 - protein, 185 aa, Zea mays
  misc_feature (35)..(35): Xaa can be any naturally occurring amino acid
MAERLTRIAIVSEDKCKPKKCRQECKKSCPVVKTXCIEVTSASKLAFISEELCIGCGICVKTCPFDAIEIINLPKDLEKDTTHRYGPNTFKLHRLPVPRPGQVLGLVGTNGIGKSTALKVLAGKLKPNLGRFKNPPDWQEILTYFRGSELQNYFTRILEDNLKAIIKPQYVDHIPKAVQGNVVDL

SEQ ID NO: 18768 - protein, 354 aa, Oryza sativa
  misc_feature (342)..(342): Xaa can be any naturally occurring amino acid
MGANGNDVVAAAAAGESPMGAARVVAEGGATVFRGADYSLPRTTVALALWLGGIHFNVFLVLASLFLFPLRVAAMVVAFQLLFMLIPLNDKDKLGRKIARNVAPFPPIAENFSHLFLGCWTDREHVPCCSLHVEDYKCFDPNRAYVFGFEPHSVLPIGVAALADLVGFMPLPKIKVLASSAVFYTPFLRQIWTWLGLIPATRKNFQSYLGAGYSCIIVPGGVQEILHMDHDSEIAFLKSRKGFVKIAMQSGCPLVPVFCFGQSYAYKWWRPKGKLFVKIARAIKFTPIVFWGRYGTPIPFPTPMHVVVGRPIEVEKNSQPTIDEINEVHEQFTVALQDLFDXYKTETGYPGLHL

SEQ ID NO: 18769 - protein, 411 aa, Corynebacterium diphtheriae
MTSPDNYLAVIKVVGVGGGGVNAVNRMIEEGLKGVEFIAVNTDSQALMFSDADVKLDIGREATRGLGAGANPEVGRASAEDHKNEIEETLKGADMVFVTAGEGGGTGTGAAPVVAGIAKRLGALTVGVVTRPFKFEGPRRTRQAMEGIDALREVCDTLIVIPNDRLLQLGDANITMVDAFHEADRVLHNGVQGITDLITIPGLINVDFADVRSVMHDAGSALMGVGSASGENRVLTAAEQAINSPLLESTMEGAKGVLLSVAGGSDLGLQEVNEAASMVQEKADEDVNLIFGTIFDDNLGDEVRITVIATGFDGEKNSLDRQREAAQPAASQSASAMEANPTPAPDRSTSTSLFGDSDSAPRHRLNEEPAARRTSHDSEGMYTRRSVPRESYRDQRSDDFDDDLDIPDFLR

SEQ ID NO: 18770 - protein, 567 aa, Beta vulgaris
MASCLKSQKQVILLLVSVLLAYGVSELQAARSPPTNQPYRTAYHFQPRKNWINDPNGPMLYKGVYHLFYQYNPNGVIWGPPVWGHSTSKDLVNWVPQPLTMEPEMAANINGSWSGSATILPGNKPAILFTGLDPKYEQVQVLAYPKDTSDPNLKEWFLAPQNPVMFPTPQNQINATSFRDPTTAWRLPDGVWRLLIGSKRGQRGLSLLFRSRDFVHWVQAKHPLYSDKLSGMWECPDFFPVYANGDQMGVDTSIIGSHVKHVLKNSLDITKHDIYTIGDYNIKKDAYTPDIGYMNDSSLRYDYGKYYASKTFFNDAKKERILLGWANESSSVEDDIKKGWSGIHTIPRKIWLDKLGKQLIQWPIANIEKLRQNPVNIFRKVLKKGSQIEVSGITAAQADAEISFKIKDLKNVEKFDASWTSPQLLCSKKGASVKGGLGPFGLLTLASKGLEEYTAVFFRIFKAYDNKFVVLMCSDQSRSSLNPTNDKTTYGTFVDVNPIREGLSLRVLIDHSVVESFGAKGKNVITARVYPTLAINEKAHLYVFNRGTSNVEITGLTAWSMKKANIA

SEQ ID NO: 18771 - protein, 313 aa, Salinibacter ruber DSM 13855
MEAHAAPTAPRSFPGTCRSHHHCHRSSPTTRQDHMQVSREQRMLDQYLQEIGKIDLLEPEEEVELARRIEDGDEEALHKLCRANLRFVVSVAKKYQGQGLSLADLINEGNYGLIKAAKRFDETRGFKFISYAVWWIRQAILQALAEQSRVVRLPLNRIGTISKIRKASARLQQDLDRKPNIEELAEELEIDVQKVREAMKHTSRHLSMDAPFNEEDDNSLLDVLPDEDNDSPDEEMLSESVKIDIERALSALHDREAEITRLYFGIGREHPLTLEEIGKRFDLTRERVRQIKEKALRKLRQRHSKQDLQPHTD

SEQ ID NO: 18772 - protein, 576 aa, Beta vulgaris
MHTMEKPVVWALLLCFVAVVNGVQTTDLGQNGASAGTTQPYRTAYHFQPLKNWMNDPNGPLYYKGVYHLFYQYNPYSAIWGNMTWGHSISNDLVNWVHLEHALNPIEPYELGGCFSGSITMLPGGRPVIFYTGADTNNFQSQNLAFPKDPSDPLLREWVKSPHNPVITAEDDIEPSDFRDPTTAWQAVDGTWQVLIGGKIDGRGMAYLYQSNDFINWTRSEKIFHSSVKTGMWECPDFYPVSINGKDGVDNYLEKGNTKFVLKASFLDHDHYILGYYKAERNGFQVEATDFMEANTDWRYDYGGKFYASKTFFDGGKKRRILWAWIMEADSRANDIKKGWSGLQSIPRVVWLSASGNQLMQWPVEEIESLRKDEVEIKDKELEKGSLVEVVGITAAQADVEISFELPNLEDAEQMEPSWTDPQLLCAQKNAAVEGRLGPFGLLVLASSNLTEETAIFFRVFKNHSRHIVLLCNDLSRSSLSRDVRKTTFGAFLDINPLQESISLRTLIDHSIVESFGGGGKACITARVYPVLAVDKEAKLFAFNKGSHNIKILKLNAWSMKEAKILPIMKRRKPPV

SEQ ID NO: 18773 - protein, 559 aa, Bacteroides thetaiotaomicron VPI-5482
MCGIAGILNIKTQTKELRDKALKMAQKIRHRGPDWSGIYVGGSAILAHERLSIVDPQSGGQPLYSPDRKQALAVNGEIYNHRDIRARYAGQYDFQTGSDCEVILALYKDKGIHFLEEISGIFAFVLYDEEKDEFLIARDPIGVIPLYIGKDKDGKIYFGSELKALEGFCNEYEPFLPGHYFYSKEGKMKRWYTREWTDYESVKDNDAKVSDVKEALEDAVHRQLMSDVPYGVLLSGGLDSSVISAIAKKYAAKRIETDGASDAWWPQLHSFAIGLKGAPDLIKAREVAEYIGTVHHEINYTVQEGLDAIRDVIYFIETYDVTTVRASTPMYLLARVIKSMGIKMVLSGEGADEVFGGYLYFHKAPTPKDFHEETVRKLSKLHMYDCLRANKSLSAWGVEGRVPFLDKEFLDVAMALNPKAKMCPGKEIEKRIVREAFADMLPESVAWRQKEQFSDGVGYSWIDTLREITAAAVSDEQMEHAAERFPINTPLNKEEYYYRSIFEEHFPSESAARSVPSVPSVACSTAEALAWDVAFRNLNEPSGRAVRGVHEEAYAEEVK

SEQ ID NO: 18774 - protein, 552 aa, Rhodobacter sphaeroides 2.4.1
MALNLMMNNAREELKPRITVFGVGGAGGNAVNNMIEQQLEGVEFVVANTDAQALQQSRATSKIQMGVKVTEGLGAGARPSVGAAAAEETIEEIVDHLAGAHMCFITAGMGGGTGTGAAPIIAQAARELGVLTVGVVTKPFQFEGAKRMRQAEDGIDALQKVVDTLIIIPNQNLFRLANERTTFTEAFALADDVLYQGVKGVTDLMVRPGLINLDFADVRAVMDEMGKAMMGTGEAMGEDRALQAAEKAIANPLLDEISLNGAKGVLINITGGYDLTLFELDEAANVIREKVDSDANIIVGSTLDTSMEGMIRVSVVATGIDATKPAQDMPVPRRSMAAPLPASFSQPEPTPAPQPAPRREMPAPRAAQPAAAQPAPQPEPQPAPEPAAHHFDPAASQHYEQDHYVDEDDMPPPAYRPQPQAQPRATNVHEQDAAAFVAPRPRAPGQPSPEALARLQAAVNKNPAQNRPGMAAGQQRPAAPVQRPAAAASAEKPRFGIGSLINRMAGHGEQQPEPRPQQSRQQPPVTSYEDEPEMSADQERIEIPAFLRRQAN

SEQ ID NO: 18775 - protein, 648 aa, Zea mays
MNSMDEINLLRQAQRQHQHHLMVRGIGEEIDLEIGPVDDPSFSGASLVAVTSTHDTVVHADDHKSLLIPCSQPGAADGLAPQQHLSQGEEHDGMLRSPSGHTKKKKKVVKKWREEWADTYKWAYVAVHDTTTRIFCSVCKEYGRKHRRNPYGNEGSRNMQMSALEEHNNSLLHKEALRLQMASKEKLQPPEIEGPVYVKALSKTAASILECVLRRDPHEAEYIQSIQEVVHSLEPVLVKNAQYIQILERLLEPERCFIFRVPWIDDRGEAHVNRGFRVQFSQALGPCRGGLRFHPSMSLSVAKFLAFEHTLKNALSLYKLGGAAGGSDFDPKGKSDNEIMRFCQSFMDELYRYLGPDQDFPAEDIGVGPREMGYLFGQYRRLSGHFQGNFTGPKIFWSGSSFRTEATGYGLVFFARLLLAEMNKELKGLRCVISGSGKIAMHVLEKLLPCGAIPITVSDSKGYLLDEDGFDYMKYSLLRDIKAQQKSLKEYLKTYPHAKYIDDAKPWSQQCDVAFPCASHNEIDQGEAVAISNSGCRVLVECSNMSCTVQAVDILRKAKVIVAPAKATAAGGVALGEIELNPEFNLMQLSVEDFENRIQDAIKQTYERSVKAAQDYGIMKESPDFLVHGANICAFLNIAQAMTDQGCV

SEQ ID NO: 18776 - protein, 316 aa, Vibrio angustum S14
MSNVKHCELLILGSGPAGYTAAVYAARANLNPVMITGMQQGGQLTTTTEVENWPGDADDLTGPALMDRMKAHAEKFNTEIITDYIVETDFSQRPFLLKGENSTYTCNALIISTGASAKYIGLESEEAFKGRGVSACATCDGFFYRNQKIAVVGGGNTAVEEALYLSNIASEVHLIHRRDSFRSEKILIDRLMDKVANGNIILHTDRTLDEVLGDDMGVTGLRLKDTHSNATEELDVMGVFIAIGHQPNTAIFEGQLDMENGYIKVQSGLNGNATQTSIEGIFAAGDVMDHNYRQAITSAGTGCMAALDAERYLDAQ

SEQ ID NO: 18777 - protein, 170 aa, Zea mays
  misc_feature (122)..(122): Xaa can be any naturally occurring amino acid
  misc_feature (133)..(133): Xaa can be any naturally occurring amino acid
  misc_feature (145)..(145): Xaa can be any naturally occurring amino acid
  misc_feature (151)..(151): Xaa can be any naturally occurring amino acid
  misc_feature (158)..(158): Xaa can be any naturally occurring amino acid
  misc_feature (166)..(166): Xaa can be any naturally occurring amino acid
MTFSMLSSGTVNISPARASMSAPFTGLETSTAYPDSSKTDSDMTSMTRNGGRVNCMKAGAQVSKKKIETVSYLPDLTDGEASNEVDYHLLNKRIPCVKLEEEHEFVYREQINTPTYYDVHNXQMRKFPLDACXDSAHVISQLHEXKNEYPXSFIRIIXFDNNRLVXCINF

SEQ ID NO: 18778 - protein, 464 aa, Carboxydothermus hydrogenoformans Z-2901
MALKIDFNNVFHPYLQKERLGEADIDGYKEKFTSALVSLREKKEKGELGFFHLPYLPEEEIAEIEKTAREVREKFKYFVVLGIGGSALGPLAVHTALNNLRYNELSEELRGGPKFYVEDNIDPERMASLLKVIEPEKTVFNVITKSGATAETLSQLLIVTEVLKKKVGKRFTEHLIFTTDPEKGSLRALARELGVKTFAIPPNVGGRFSELTPVGLLPAAVTGINIRELLAGAREMAERCERENLWENPAGLAAAIHVLLLERGKNMAVMMPYADSLKYMADWYAQLLGESIGKRLNRRGEEVFVGQTPVKALGVTDQHSQVQLYTEGPFDKLLIFLEVERYRNRVVIPPDFPQYAELKFLGGHTLNELIIAEKKATEFALLKARRPNYTVIFPEVNPYTVGELLYFLEAKIAFMGEYLDINAFDQPGVEEGKKATYALLGREGFEEKRQEVLKVKKEPRFILE

SEQ ID NO: 18779 - protein, 590 aa, Rickettsia typhi str. Wilmington
MRHDRINLLRNLFIEYNVEGYIIPSNDKYMNEYVPEYAKRLEYITGFTGSNGIAIICKDTAFFFTDGRYLEQANKELDLEFYKIFDLKDISKTLDKNIKIGYDPQLFTYQVLSNLNINFHKINENLVDKIWYNQPLEPNSKIYLHDIKFAGVSHNDKINKCRETILSSSSVTVDANKNNNDMLVILDIASICWLLNLRASDVNYAPLMFAKVILTPTKLYLFINPIRIDTEIINARPEITVLPEKEFENILRDSKNRYLIDDSITSVHIMDLIANKKVKKILEPCLLPKACKNDIEIKNAIDFHIKDAVALCEFFAEFFLYNSSENMDSYFYSHERITEYSLCLKLTAQRAKQDGYVSDSFHAICGFQENSAIIHYRANPKTAKKIEGHGILLIDSGGQYKGATTDITRTIIIGTPTCEQKKRYTQVLKGHIALAKAKFPKNIVTGANLDILARQYLWQDMIDYPHGTGHGVGSFLSVHEGPHSINLSNKIILKAGMILSNEPGFYIPGKYGIRIENLIYIKENKENNGWLEFETLSLVPYASKLIDMELLNIDEINYIKEYYNKIRAQIYDLLSTQAKYWLNNEINLFL

SEQ ID NO: 18780 - protein, 425 aa, Arabidopsis thaliana
  misc_feature (166)..(166): Xaa can be any naturally occurring amino acid
MGNALVKKEPPPPVVLVPPLFDYPPLSARTRMLESSYNLLFGKLALRCLFEDYFEEANRFTAKFLLKPTDDPHVDLVASVSGAVDGRVEGDFVGNAEFRWQSDVDDPHTFVDLSVSTSNPVLLMRSSAYYPKYGIGAFAVYPLISKITGKSSEEYRIMGLRYGSTXLSVGATVTPFSANNELPKHAWLVSKMGSLTVGVQYEPLHGSKDLAKYTDPRNWSCAAGYGVGSQSPLTPSFNMGIELARSSQFIASFYQHVVVQRKVQNPFEENQVVGITNYIDFGFELQSRVDDSKTPPNAPDSLLQVAASWQANKNFLLKGKVGAHSSTLSLAFKSWWKPSFAFNISATTNHRTGNVQCGFGLRVDNLREASYQRADPNFVMLTPNKEHLAEGIVWKMGKRPMYQADVDAENFSELPKELRPSQKIL

SEQ ID NO: 18781 - protein, 103 aa, Brassica napus
ENLIPHKTFSGNRPSLSLLLPELSAYNVGQLLAIYEHRVAVQGFVWGINSFDQWGVELGKVLATQVRKQLHSSRTQGAAPEGFNYSTTTLLKRYLETSPEPKM

SEQ ID NO: 18782 - protein, 388 aa, Arabidopsis thaliana
MKTIQEQLPNDLVEEILCRVPATSLRRLRSTCKAWNRLFKGDRILASKHFEKSAKQFRSLSLRNDYRIFPISFNLHGNSPSLELKSELIDPHSKNSAAPFEISRVIHCEGLLLCSSQLDESRVVVWNPLTGETRWIRTGDFRQKGRSFDVGYYYQKDKRSWIKSYKLLCYYRGTKYFEIYDFDSDSWRILDDIIAPRGSIGYSELSVSLKGNTYWFAKGVTEERPRTISLLKFDFYTEKSVPVLLPYQSRRLFQASSLSVVREDKLSVLLQLDQSSKTEIWVTNVIDETTKGAVSWTKVLALDLSPHLQIGNDGSFFLGEDKKVVMFCEKLIDENKVKDMVYIVGEDNVVTEVGFGVDEMDGCRAVILNYVPSLVQIERAGGNRKRGH

SEQ ID NO: 18783 - protein, 393 aa, Pseudomonas aeruginosa PAO1
MLSNAQRALIKATVPLLETGGEALITHFYRTMLGEYPEVRPLFNQAHQASGDQPRALANGVLMYARHIDQLQELGPLVAKVVNKHVSLQVLPEHYPIVGTCLLRAIREVLGEQIATDEVLEAWGAAYQQLADLLIEAEESVYAASAQADGGWRGVRRFRVARKQAESEEITSFYLEPVDGQPLLAFQPGQYIGLRLDIDGEEVRRNYSLSAASNGREYRISVKREAGGRVSNYLHDRVAEGDELDLFPPAGDFVLRDSDKPLVLITAGVGITPALAMLQEALPQARPIRFIHCARHGGVHAFRDWIEDVSAQHEQVEHFFCYSEPRAGDSADAEGLLSREKLADWLPQERDLDAYFLGPRPFMAQVKRHLADLGVPSQQCHYEFFGPAAALDA

SEQ ID NO: 18784 - protein, 426 aa, Carboxydothermus hydrogenoformans Z-2901
MSDKVIYLSQEQFDEVVLKSDVPVIVDFYSEDCPPCEALAPAYEKLAQQYGDKFKFVKIYRQQNRPLAEKLGVKGSPTVLFYVNGQEVGQRLTGYISKRQLREAMEKAFGQKLLPEVPETVKYDVIVLGGGPAGLSAALYTARAKLRTIVVDESVPGGQAATTYHIANYPGTPGTIRGKELTQNMLNQALAFGAEVDDLKEVLKVELTGEVKRVITEDKIYEAPAIILATGAEPRKLPAEGEDLFRGRGVHYCATCDGAMYQGMKVVVVGGGNSAVEEAVFLTRFATEVTIIHQFDHFQASKVAQEEAFANPKIKVIWDSEVRKVVGDKHVTGVVIENLKTKELSTVPTDGVFVYIGTQPKTNLFAGQVEMNEWGYIITDEEMRTNIPGVFAAGDLRQKSVRQAVTAAADGVIAAVNVERYLASKK

SEQ ID NO: 18785 - protein, 967 aa, Candidatus Kuenenia stuttgartiensis
MTMNIRTRNSIKWKLLITMLGLIIGLLTILTLVQIYSQKEILTGELEQRIELIKDNLRKQGKTLSDNLAFQVEDALASFNLLDIFSKTNKAVRENTDLKYIILADLKGFALIHTLKPELNDSILSGGDDTFAIAQKNATINEFEKDGTPYMEFIVPIHVSADQWGVLRLGYSLENLYQILSASRHKIKEQIFNIIIRSGLTTIVFIAIGSCLVLFLSSRLAQPLIKLAQMAQELAKGNFSVSENSILNSKDEIGVLAQTFSIMSKELKNYYEILEDYSHSLAMRVEERTAELLKSNNLLKQEIDERHRIEAELEKAREAAVAANNAKSEFLASMSHEIRTPMNAIIGMSDLLWETTLTPKQSEYVKVFRNAGENLLQIINDILDLSKVEAGQITIEHIEFNLREQIEKTCEVMAFRAHEKGLELNCHLAEDIPTSFIGDPVRLHQILTNLIGNAIKFTRTGEILLTGKRNKLPGKKGMLLFLVSDTGIGLPEEKQSIIFNIFSQVDSSTTRQYGGTGLGLAICKRLVELMDGEIWVESTPGKGSTFYFTVTFDVHPKPQEQKEIPLSGAEKPYVLIIDDNATNRMILRDMLHGWDIPVAEAEGGENGINELKRARNAGTPYNLLLLDCRMPGMDGFQIARSVKNDPELAGLIIMMFTSDNKSGDVARAKELGITTYLVKPIKRHDLLTSINAVIDPQKTIPFTGPASRTVIQIPESVPTRQLLLVEDYYHNRVLIQAYLNKTNFKVDVVENGLECLEKFKNEKYDLVLMDIQMPVMDGYTATREIRRYEMELGLKATPVIALTAHAFKGDEQKSIDAGCNCHLIKPIKKQTLIDAIHKYVPLHANYTPATDGEKAAFSAGKVTNEITVENKLFVSINPIFKNVTPEFIEDVRSDIMTMTAALQNTDYKTIETLAHRLKGASGGYGFDELTDMGKFLEISAKNRHVAEMQKWIHAMSQYIEQVEIVYE

SEQ ID NO: 18786 - protein, 400 aa, Clostridium thermocellum ATCC 27405
MSKAKFERTKPHVNIGTIGHVDHGKTSLTAAITKVLGFQGKANYTSYENIDKAPEERERGITISTSHVEYETDNRHYAHVDCPGHADYVKNMITGAAQMDGAILVVSAADGPMPQTREHILLARQVGVPYIVVFLNKCDMVDDEELLELVEMEIRELLNTYEFPGDEIPIIRGSALAALESTATSVDAPEYQPILKLMEEVDKYIPTPQRDIDKPFAMPVEDVFTITGRGTVATGRVERGTLKMGDEVEIVGLSDSPKKTVVTGIEMFRKLLDQAVAGDNIGALLRGIQRNEVERGQVLAKPGSIKPHTYFEAQVYVLTKEEGGRHTPFFNNYRPQFYFRTTDVTGVVELPQGTEMVMPGDHITMKVKLITPVAMEEGLKFAIREGGRTVGAGNVSKIIE

SEQ ID NO: 18787 - protein, 1142 aa, Ashbya gossypii ATCC 10895
MGDKNNNVTSLRGDRIGPWKLGETLGAGSTGKVLLAQNTETGQIAAVKVISKSVFNAQGSTFVGSNDPDVLPYGIEREIIIMKLLNHPNVLRLYDVWETAQDLYMVLEYVEKGELFNLLVQRGPLPENEAVRFFRQIIIGISYCHALGIVHRDLKPENLLLDHKFNIKLADFGMAALESKDKLLETSCGSPHYAAPEIVSGLPYHGFESDVWSCGVILYALLTGRLPFDEEDGNIRNLLLKVQSGKYEIPGEDEISPEARDLIVQILTVEPEQRIKTREILKHPLLQKYPSIKDSKSIRNLPREDTYLNPLDHNDGTIDQAILQNLVVLWHGRDKNEITMKLKEPGANLEKTFYALLHRFKFENEQQQLKQQQIAKRISSTSSSPQQNIVKSSSRRSINNILSTPKKKRSSAINVSSAHKRPVSIQKLNDCGTLNPTSPSKKRSLSNRKLSAVLAGSNSSSPSRKRMSVGQDAPPVPTAVLRDYNKRASRASKRLSFLPSKRGSITTKIIATYAKLSEDNDWEYIDREAKRTSSDFATLIDNIFEHEKYEQIRREKEELERKVREAKEREERERRARAEAERRKREEEERRRRREVEELIRQRELQKSLEEQVARLKAEVAATKQEKRISLAQEQHVRSISEPMERKGTRPSKRDSFLALQNNINSLLKRRTLSLETRPISRLDPGIRLSEENTILEDDLECNEDRLRVEKNILETIRRSKFLGSQYDIDKELQRVRREKLEKVNMRKSQDRKLEPGLHSRQEQRFVSDGTTVTSSHEDSESIILPKNVTAIGVLKDEESEPRKLSEVKIPQFTRRSKHFSASSKRLSVLSMYSTKVSYTNLADYLNNDVQLKSLQPSAPTSIKIPQEPEFMFESAGQENRYQAAAPTDTYLERPKVGVEGDHEPGEPVELIELDDSEDRSKQYSEEDIAKVKLPILPPLDHLNKPNGLGIYQAPAPPKEPLGQPVMKSMIPDDIKIKCVPNQLSPRRRATERAPEKKLTKTVPERVIAAETFPPPNTKKKPSFFKKFSREKMHSDCDVQLDTTVGDSKMFRALNKLLNGWTSYGLKEVRSMPASYTITGKLSSDNILSLRSTAFEIVILSVADTGSSVKFTKKSGSKKTFTRLVNEIEKILEKESVLVLAS

SEQ ID NO: 18788 - protein, 327 aa, Thermosynechococcus elongatus BP-1
MAETLMFNALRAAIDEEMERDPTVFVLGEDVGHYGGSYKVTKDLYKKYGELRLLDTPIAENSFTGMAIGAAMTGLRPIVEGMNMGFLLLAFNQIANNAGMLRYTSGGNFKIPIVIRGPGGVGRQLGAEHSQRLEAYFQAVPGLKIVACSTPYNAKGLLKSAIRDPNPVLFFEHVLLYNLKEDLPEEEYLLPLDKAEVVRTGEDVTILTYSRMRHHVLQAVKTLEKEGYDPEVIDLISLKPLDFETIGASIRKTHRVVIVEECMKTGGIGAELSASIMERYFDELDAPVIRLSSKDVPTPYNGTLENLTIVQPPQIVAAVQKLVQGQV

SEQ ID NO: 18789 - protein, 160 aa, Pseudomonas putida KT2440
MSAFHDLKLEALNGGELPLAPFKGQVVLVVNVASKCGLTPQYKALENLYQIYKDKGFNVLGLPCNQFAGQEPGSEKEIQDFCSLNYGVSFPLGSKLEVNGPQRHSLYRLLAGEGAEFPGDITWNFEKFLVGKDGRVLARFSPRTAPDDPAVVQAIEKALA

SEQ ID NO: 18790 - protein, 406 aa, Bartonella quintana str. Toulouse
MRRVVVTGMGIVSAIGNNPQAVLTSLHEAKSGISYASQYAELGFRSRVYGKPDINIEELVDRRALRFHGRGTAWNHIAMDQAIADAGLEPHEVSNEHTGIIMGSGGASTLSIVEAADITRQKNPKRVGPFVVPKAMSSTASATLATFFKIKGVNYSISSACATSNHCIGNAYEMIQYGKQDRIFAGGCEDLDWTLSVLFDAMGAMSSKYNDVPEKASRAYDTHRDGFVIAGGAGVLVLEELEHAKARGAKIYGEIIGYGATSDGYDMVAPSGEGAERCMRMALATVKNKIDYINPHATATPVGDPPEIEAIRRIFGTGDQCPPISATKSLTGHSLGAAGVQEAIYTLLMMNHNFICESAHIEELDPAFADMPIVRERRDHQQLNTVLSNTFGFGGTNATLVFQRYG

SEQ ID NO: 18791 - protein, 157 aa, Agrobacterium tumefaciens str. C58
MHFVPESRASEVFSSRPLPIWHNTCILVAERELPALTGEAERYFLMKKIEAIIKPFKLDEVKEALQEVGLQGITVTEAKGFGRQKGHTELYRGAEYVVDFLPKVKVEVVLADENAEAVIEAIRNAAQTGRIGDGKIFVSNIEEVIRIRTGETGVDAI

SEQ ID NO: 18792 - protein, 152 aa, Thermosynechococcus elongatus BP-1
MNVIFREVNPFDVWIWVEFAAPPSSVEQQYLEEVFNSWFFLGKLGGFNAENLQVQETGLDLSHLEYDRAQAESSLMAVMHNMGEFEYNDRWARCWFDLGTSDALALDVLINALHQFSEDYVPLKTLVIGGDNPEWPIATSEQREMIEQSAWN

SEQ ID NO: 18793 - protein, 448 aa, Clostridium acetobutylicum ATCC 824
MKELNLKDVEEPNLYRDIFPYHEVPKIKFSTDEIKVDIPDEIWITDTTFRDGQQSMTPFTVEQIVTIFDYLNKLDNNTGVIRQTEFFLYTNRDKEALMECMNRGYKFPQITTWIRANKDDFKLVKDIGIKETGILMSCSDYHIFKKLKMTRTETYNKYVEIVEEALSNGIVPRCHLEDITRADFFGFVVPLVNKLMELSNKYGIQVKIRACDTLGLGVAFPGVELPRSVPAIISGLRKYCGVPSTALEWHGHNDFYYVVPNATAAWLHGCSAVNTTLLGIGERTGNCPLEGMVFQYCQLKGNPGMNLHAITEMSKYFENSMKYEIPPRTPFVGTDFNVTRAGIHADGILKDQEIYNIFDTEKILDRPVLVAVNEYSGLAGIAAWINTYFKLNKENEVDKKDSRVAEIKKWVDNLYENGRTTPITNKELEIEAKMYFKELIDVENTRAS

SEQ ID NO: 18794 - protein, 110 aa, Neisseria meningitidis Z2491
MSSELIVHTGDAAFEQDVLKSDLPVLLDFWAPWCGPCKMIAPILDDIAAEFEGRLKVVKINIDDNEATPSRFGVRGIPTLMVFKNGDVVATKVGALAKGQLTAFVEASIA

SEQ ID NO: 18795 - protein, 559 aa, Bartonella quintana str. Toulouse
MRYKFMGDSLSIRNEKAFEAALQALRRHATKDGVYDIRRHFVEDEQRFSHFSLRLDDLLFDFSKCGITFKTLQLLDDLAVAADVLGRREAMFSGKAINTTEKRSVLHIALRMPTDEVFMLDGHDLVRDIQDVLAHMERFSEMVRDGSYKGNTGEKIINIVNIGIGGSDLGPAMVTHALKPYHDGPHCHFVSNADTAHISDTLSVLNPATTLFIIASKTFTTAETIANAQVARQWIISHLGEEAVCRHFVAVSSALDKVAEFGIDSSRIFKFWDWVGGRYSIWSAIGLVVMLAIGGQNFRQFLNGAQQMDRHFKIAPLHKNIPIRFALLGFWHRVVCGYASRAIIPYAQRLARFPAYLQQLDMESNGKQVSLDGKTLNFSSGPVVWGDSGTNGQHAFFQLLHQGTDVIPVEFILFIKGHEQNLHPMYDILVANCLAQSKALMKGRSVEDVRRILVKSGIDVHETEKLALHKSFEGNRPSIMLVQDLLTPFTLGRLIALYEHRIFVEGILMNINSFDQWGVEFGKELANELLPILRGENKANNRDSSTLGLLAYIQARREE

SEQ ID NO: 18796 - protein, 334 aa, Clostridium acetobutylicum ATCC 824
MKKNHTITLIPGDGIGPEVTGAAKKVIEAAGVSITWDIVEAGAKVMDEYGTPLPEYVLESIKKNKIALKGPITTPVGSGFRSVNVALRQTFNLYANVRPIKTYEGIPTRYKDVDLIIVRENTEDLYAGIEHKIGDYAAESIKIITREASERIADFAFDMAVKQNRKKVTAVHKANIMKFSDGLFLDCARKVAEGYKEKEFEDMIVDAMSMKLVQNPEKYDVLVMPNLYGDILSDMAAGLVGGLGVAPGANIGKEISIFESIHGSAPDIAGKNIANPTAAILSGVMMLRYIGELEAADKIDNAIKVVLKEGTKVTSDLGGNATTDEFANEVIKNI

SEQ ID NO: 18797 - protein, 143 aa, Oryza sativa (japonica cultivar-group)
MKERGVRNKQGVIMKALLDRCLSKHRNGGRPEPPEGSFAVYVGGGGGGGGAARERFVVRTECVNHPLFRALLEEAEEEYGYVADGPLELPCDAGEFVAVLARIEREMAEERTVGCAGGLVFRLHPAAHLMLVAPATPPPMIVG

SEQ ID NO: 18798 - protein, 319 aa, Bordetella pertussis Tohama I
MSTPKHAKVLILGSGPAGYTAAVYAARANLSPALITGLAQGGQLMTTTEVDNWPADVQGVQGPDLMQRFLQHAERFNTEILFDHIAKVDLSRRPFTLTGDTGNLYTCDALIIATGASAKYLGLASEQAFMGRGVSGCATCDGFFYRNKDVVVIGGGNTAVEEALYLSNICRKVTLIHRRDKFRAEPILVDKLMDKVANGNMELKLFHTLDEVLGDDSGVTGVRIRSTETDATEDLDVDGCFVAIGHQPNTGIFEGQLEMKDGYIITKSGLSGMATMTSVPGVFAAGDVQDHVYRQAITSAGTGCMAALDAQRWLENAGQ

SEQ ID NO: 18799 - protein, 218 aa, Sisymbrium irio
MAAFEESTDLDAIQGHLFEDFMVSDGFMGDFDFNASFVSGLWCIEPVMNQVPKQEPDSPVLDPDSFVKEFLQVEAESSTSTGTTELNSSSQETDQSISTRKKSKRFEEQEEEEPRHYRGVRRRPWGKFAAEIRDPAKKGSRIWLGTFESDVDAARAYDCAAFKLRGRKAVLNFPLDAGKYEAPANSGRKRKRSDVQGELQRSQSNSSSSSSDGETTCE

SEQ ID NO: 18800 - protein, 172 aa, Oryza sativa
MALETCFRAWATLHAPQPPSSGGSRDRLLLSGAGSSQSKPRLSVASPSPLRPASRFACQCSNVVDEVVVADEKNWDSMVLGSEAPVLVEFWAPWCGPCRMIAPVIDELAKEYVGKIKCCKVNTDDSPNIATNYGIRSIPTVLMFKNGEKKESVIGAVPKTTLATIIDKYVSS

SEQ ID NO: 18801 - protein, 437 aa, Methylobacillus flagellatus KT
MPISLLPLTLLFSLCIVPLPVSAGEGAPQALAVDSVWVAISGALVFMMQAGFAMLESGMTRAKNAVNVMMKNYMDLAVGALLFWLVGYGLMFGSNPSGWIGTDHFALAHGDDWGASMLFFQVMFAATAATIVSGAMAERTNFIAYLLGACGIMALIYPVFGSWAWNEHGWLKQMGFIDFAGSTVVHSVGAWCALAGIMVLGPRLGRFGSKGEVHMIPGHNLSLVAMGGFLLWFGWFGFNGGSTLAAGVEIGPILLNTHMAGAAGAVGALLVALAMRRPILMAYVVNGSLGGLVAITAGCASMDVPFAVLTGFIGGIVTMLGVWALEKLRLDDVVGAVAVHGFSGVWGTVAAGLFLKDNMFDLNQVLVQMIGVAVAFVWVFLSALLMYGLLARTIGLRVSTMHEQRGLDITEHGEVGYPEFNREAAYQPEHVQHLSRL

SEQ ID NO: 18802 - protein, 411 aa, Xylella fastidiosa Ann-1
MAHFELIEKMAPNAVIKVVGVGGGGGNAVAHMVNSTVDGVEFIIANTDSQAIKNCGAKLQLQLGANVTKGLGAGANPEVGRQAALEDRERIIDALQGADMVFITAGMGGGTGTGAAPVVAQLAKEMGVLTVAVVTKPFPFEGRRRMQVALKGIEELNQHCDSLITIPNEKLITVLGRNATMIQAFRAANDVLQGAVQGIADLIVRPGLINVDFADVRTVMSEMGLAMMGTGSARGDDRAQAAAEAAVQNPLLDDVNLAGANGILVNITAGSDFTMAEFDEIGRTIDGFASEDATVVVGTVLDPEMQDEVRVTVVATGLSRTVSRAAQQRPEQQRASVKLVRNATTGQAEFGDLDNTGGAVPRAVGGSLGLGFGLRRSGTDAVSGSAPSAPVTAELPSDYLDIPAFLRRQAD

SEQ ID NO: 18803 - protein, 486 aa, Bacillus cereus ATCC 10987
MITTEIKRVKNHINGEWVESTGTEVEAVPNPATGKIIAYVPLSPKEDVEKAVEAAKAAYETWSKVPVPNRSRQLYKYLQLLQENKEELAKIITLENGKTLTDATGEVQRGIEAVELATSTPNLMMGQALPNIASGIDGSIWRYPIGVVAGITPFNFPMMIPLWMFPLAIACGNTFVLKTSERTPLLAERLVELFYEAGFPKGVLNLVQGGKDVVNSILENKDIQAVSFVGSEPVARYVYETGTKHGKRVQALAGAKNHAIVMPDCNLEKTVQGVIGSAFASSGERCMACSVVAVVDEIADEFIDVLVAETKKLKVGDGFHEDNYVGPLIRESHKERVLGYINSGVADGATLLVDGRKIKEEVGDGYFVGATIFDGVNQEMKIWQDEIFAPVLSIVRVKDLEEGIKLTNQSKFANGAVIYTSNGKHAQTFRDNIDAGMIGVNVNVPAPMAFFAFAGNKASFFGDLGTNGTDGVQFYTRKKVVTERWF

SEQ ID NO: 18804 - protein, 375 aa, Saccharomyces cerevisiae
MDSEVAALVIDNGSGMCKAGFAGDDAPRAVFPSIVGRPRHQGIMVGMGQKDSYVGDEAQSKRGILTLRYPIEHGIVTNWDDMEKIWHHTFYNELRVAPEEHPVLLTEAPMNPKSNREKMTQIMFETFNVPAFYVSIQAVLSLYSSGRTTGIVLDSGDGVTHVVPIYAGFSLPHAILRIDLAGRDLTDYLMKILSERGYSFSTTAEREIVRDIKEKLCYVALDFEQEMQTAAQSSSIEKSYELPDGQVITIGNERFRAPEALFHPSVLGLESAGIDQTTYNSIMKCDVDVRKELYGNIVMSGGTTMFPGIAERMQKEITALAPSSMKVKIIAPPERKYSVWIGGSILASLTTFQQMWISKQEYDESGPSIVHHKCF

SEQ ID NO: 18805 - protein, 1146 aa, Methylobacillus flagellatus KT
MTAIDYQAGAGGGTSEVMEPTQRIVKVRRDYNTWVVNETLEDYALRFTPRSFRKWSIFRVANTAFGAISFLVLEAIGGTLAVNYGFTNAFWAILAIGLVIFMTGLPISYYAAKFGLDMDLLTRGAGFGYIGSTISSFVYASFTFILFALEAAIMAYALELYFDLPLYIGYLVSALVIVPLVTHGVTLVSRIQMITQPIWLFLLALPYVFIIYKDPGVLGRLGEFAGKSGYDSDFNLLMFGTAMAVGMALIPQIGEQVDFLRFMPEKTRKNRFRWHLGVLVAGPGWISLGMLKMLGGALLAYLAVEGARSFEQAVNPNQMYMAGFSQVFSNPEVVLAVTVFFVVISQIKVNMTNAYAGSLAWSNFFARLTHSHPGRVVWVVFNAMIAIILMEMDVFQALEQVLGLYSNIAISWITAVVADLVINKPLGLSPKGIEFRRAYLYDINPVGVGAMVIASLLSVAAFFGMFGVEAEAFSALIALGTALVVSPLIAWLTKGKYYIARRPVSYQPASGVQRCSICEKQYEVEDMAHCPAYQGAICSLCCSLDARCNDLCKPHGRIEYQWQRVMRRVLPDRWVEVMQSGLGHYLLLMAVTLAFLSALFGLIYFHESLTFTGEKEALLPELRLGYLKVFAALAFVSGIIAWWIVLTSESRRVAQEESNRQTNLLQREIVLHKQTDAELQRARQVAEQANQAKSRYITGISHELRTPLNSILGYAQLLDNDPSIPENRRQSIRVIRRSGEHLLSLIEGTLDIARIESGKLTFDLRLVRFPEFIQQLVSMFELQARNKGIDFKYELRGELPKVVRIDQKRLSQILINILGNAVKFTRHGGVSFKLRYAREMLHISIEDTGPGIAPEEIEKVFEPFARGSAAAKSNIGGTGLGLTISKMLTELMGGQLTVRSTLGQGSQFNIRLFLSQVRVPEEIENASMPMPLAYKGQRRRILVVDNEQVDRELLKNILQPLGFEVAEAANGRECLQTYVKFKPNVILMDLAMPDMDGWEASYMIRKVHQSDVPIAIVSANAFDKGLENTAGIPASDFIVKPVNVMELLRWIGEQLKLEWVTALGDVVDVDAVSRPVTGELEAPPREQRDELMALIKVGYMRGITRKLDEIGQDGQYETFIAAMRQLAGQFELEAMQKMLEEVNDGG

SEQ ID NO: 18806 - protein, 363 aa, Arabidopsis thaliana
MLSDLPKDVAEEVLSKFPVTSLRRVRFTCKKLNTLSKDMSFTRKHIDKEEAKKKQSKEFHVVMMLDFRVSLFSLNLLNPNPIERLGQLVSLDGGAQVDISNIFHCEGFLLCTTKDISRVVVWNPCVGQTIWIKPRNSFNKWDRYALGYDVMKNHKVLRFVDDGEYGRRHLLCEFEIYSFESDSWEVLDVNPDWEIDFVHRGLSIDGNSYWFARDKVVPYGGQDPSYFLLCFDFTTERFRPPLPLPFQPYFGDTVALSSVGDNQIAVLCQRSSSPYTLKIWISSKVEPNAVSWNKLFLKVDMKPLTGNSFSYSGGSFFVDEEKKMAVVLDKNIGGGFDPTRNIAYIIGKEGYFKKVDLGESRHL

SEQ ID NO: 18807 - protein, 286 aa, Zea mays
MGGAAEEALRREYVVGEEIGRGRFGTVRRCYAAATGEPFALKTTPNAALRADPLDLALAEQEPKVHHLASAASRHVVALHAAFEDADAVHLVLDLCAGGDLFALVSARGALPEPEAAELMAQLADALAGCHRRGVAHRDVKPDNLLFDAAAGGALRLGDFGSAAWFGDGRPMTGLAGTPYYVAPEVVAGREYTEKVDVWSAGVVLYMMLSGTVPFSGATAGEIFQAVLRGNLRFPPRAFAAVSPEAKDLLRRMLCRDVWRRLSAEQVLRHPWIVTRGGSVPGGRLV

SEQ ID NO: 18808 - protein, 538 aa, Prunus cerasus
MADRRAEYNAVVSGQPQKNIADFDPPGKPKRNKYAFACAILASMTSILLGYDIGVMSGAVIYIKKDLKVSDVEIEVLVGILNLYSLIGSAAAGRTSDWIGRRYTIVLAGAIFFAGALLMGFAPNYAFLMFGRFVAGIGVGYALMIAPVYTAEVSPASSRGFLTSFPEVFINAGILFGYVSNYGFSKLPTHLGWRLMLGVGAIPSIFLAIGVLAMPESPRWLVMQGRLGDARKVLDKTSDSLEESKLRLGEIKEAAGIPEHCNDDIVEVKKRSQGQEVWKQLLLRPTPAVRHILMCAVGLHFFQQASGIDAVVLYSPRIFEKAGITNPDHVLLCTVAVGFVKTVFILVATFMLDRIGRRPLLLTSVAGMVFTLACLGLGLTIIDHSGEKIMWAIALSLTMVLAYVAFFSIGMGPITWVYSSEIFPLQLRAQGCSIGVAVNRVVSGVLSMTFISLYKAITIGGAFFLFAAIAAVGWTFFFTMLPETQGRTLEDMEVLFGKFYRWRKANALLKQKKQVDHGDGNNNPNNPQIQLGTKGQAN

SEQ ID NO: 18809 - protein, 264 aa, Arabidopsis thaliana
MYQDSGLMLRYMQNCPPDIQQFEDLFKSYKLSDEMNNTFVESSNISEYDIGEESDLFRAPDPILEEPILTVDPLSAALTMISCGEDTSQGLCELPDLGSLQSGQQLLDKAFYECEQDLMMKSAMESPFSDVLDIKNISVVTTINENQDMQKSVSSGNLSSMDWSHAQQETVMIQNFPDFDFGYGMRRAFSEGDIQKLGAGLVQSPLDRIIVSCTSEDRREKLSRYKNKKSRRNFGRKIKYACRKALADSQPRVRGRFAKTEERK

SEQ ID NO: 18810 - protein, 332 aa, Streptococcus agalactiae A909
MSETKVMALREAINVAMSEEMRKDEKVFLMGEDVGVYGGDFGTSVGMLEEFGAKRVRDTPISEAAIAGSAIGAAQTGLRPIVDLTFMDFVTIAMDAIVNQGAKTNYMFGGGLSTPVTFRVASGSGIGSAAQHSQSLEAWLTHIPGLKVVAPGTVNESKALLKSSILDNNPVIFLEPKALYGKKEEVNMDPDFYIPLGKGDIKREGTDLTIVSYGRMLERVMQAAEEVAEEGINVEVVDPRTLIPLDKELIIDSVKKTGKLILVNDAYKTGGFTGEIATMVAESEAFDYLDHPIVRLASEDVPVPYSRVLEQGILPDVAKIKDAIYKVVNKGK

SEQ ID NO: 18811 - protein, 315 aa, Wolbachia sp.
LCDKKIQLGINLTKGLGAGALPDVGKGAAEESIDEIMEHIKDSHMLFITAGMGGGTGTGAAPVIAKAAREARAVVKDKGAKEKKILTVGVVTKPFGFEGVRRMRIAELGLEELQKYVDTLIVIPNQNLFRIANEKTTFADAFQLADNVLHIGIRGVTDLMIMPGLINLDFADIETVMSEMGKAMIGTGEAEGEDRAISAAEAAISNPLLDNVSMKGAQGILINITGGGDMTLFEVDSAANRVREEVDENANIIFGATFDQAMEGRVRVSVLATGIDSCNDNSSVNQNKIPVEEKIFKWPYNQIPISETKEYASTE

SEQ ID NO: 18812 - protein, 356 aa, marine gamma proteobacterium HTCC2207
MSKVLVLPGDNIGPEIITEAVRVLETVNQKFGLGIELDYAHLGGAALDAVGEPCPQETLDKARASDAILLGAVGGPQWDDVERHLRPEKGLLTIRSELELFGNLRPAIMYPQLAHASSLKPEFVSGLDILIVRELVGGIYFGEPRGIRTLDNGEREGYNTYKYNESEIRRIGRMAFEAAMVRGKRLCSVDKSNVLEATILWREIITSMAADYPEVELSHMYVDNAAMQLVKEPKQFDVVVTGNMFGDILSDTAAMLTGSIGMLPSASLDKDGGGMYEPCHGSAPDIAGQGVANPLATILSVAMMLRYSLDAVAAADAIEKAVSDVLDQGLRTGDIYTDGMTRVGTVEMGDAVVAAL

SEQ ID NO: 18813 - protein, 315 aa, Wolbachia sp.
LCDKKIQLGINLTKGLGAGALPDVGKGAAEESIDEIMEHIKDSHMLFITAGMGGGTGTGAAPVIAKAAREARAVVKDKGAKEKKILTVGVVTKPFGFEGVRRMRIAELGLEELQKYVDALIVIPNQNLFRIANEKTTFADAFQLADNVLHIGIRGVTDLMIMPGLINLDFADIETVMSEMGKAMIGTGEAEGEDRAISAAEAAISNPLLDNVSMKGAQGILINITGGGDMTLFEVDAAANRVREEVDENANIIFGATFDQAMEGRVRVSALATGIDSCNDNSSVNQNKIPAEEKIFKWPYNQIPISETKEYASTE

SEQ ID NO: 18814 - protein, 209 aa, Rhizobium etli
MSTLVIVRHGQSEGNARGEFTGTSDVPLTQEGWSESRRAGSLLANLGISFDIAFSSALLRTVDTCRAILNETNGDLLEPIRRTELNERDYGQLTGINKNVARERWGQDVVQVWRRSYSTPPPGGESIRDISARVLPFLISEVFPPLLRGKSVLVVAHGNTIRSLKQGIERLTIQDTLAIESPTAAPTVYRIASDLSIIEKTNVLVGTVC

SEQ ID NO: 18815 - protein, 192 aa, Zea mays
LPLPSRINPRPRRGSSWPPASFQLACVSSHPHPGHRICCAIPSSSSRRIVKSSPLRATTVLSRERRGTGRGASVVCAVQGQDTTIQVPDVTKSTWQSLVIESELPVLVEFSAAWCGPCKMIEPVVGKLSKDYEGKLKCYKLNTDESPDIASQYGVRSIPTTMIFKDGEKKDSVIGAVPESTLVTCIEKFVER

SEQ ID NO: 18816 - protein, 315 aa, Wolbachia sp.
LCDKKIQLGINLTKGLGAGALPDVGKGAAEESIDEIMEHIKDSHMLFITAGMGGGTGTGAAPVIAKAAREARAVVKDKGAKEKKILTVGVVTKPFGFEGVRRMRIAELGLEELQKYVDTLIVIPNQNLFRIANEKTTFADAFQLADNVLHIGIRGVTDLMIMPGLINLDFADIETVMSEMGKAMIGTGEAEGEDRAISAAEAAISNPLLDNVSMKGAQGILINITGGGDMTLFEVDSAANRVREEVDENANIIFGATFDQAMEGRVRVSVLATGIDSCNDNSSVNQNKIPAEEKIFKWPYNQIPISETKEYASTE

SEQ ID NO: 18817 - protein, 174 aa, Prosthecochloris aestuarii DSM 271
MKLSRFILPLLLCLLTAGLSACGPDASELNTSGLEKLKQKDLDGAFEDFSKSIEKDPSFPEAYLNRGFVYGNRGELQDALADFNKAIELDSNYIEAYFNRGFIYGYFEEYKKSDADFSKVIEMNPGDSEAFINRALIRSRMGDSEGEIDDLKQAALLGDPGAQHWLKEHNVSWE

SEQ ID NO: 18818 - protein, 320 aa, Pseudomonas putida KT2440
MSEVRHSRVIILGSGPAGYSAAVYAARANLKPLLITGMQAGGQLTTTTEVDNWPGDPHGLTGPALMQRMQEHAERFETEIVFDHINAVDLANKPFTLQGDSGKYTCDALIIATGASARYLGLPSEETFMGKGVSACATCDGFFYRNKPVAVVGGGNTAVEEALYLANIASKVTLVHRRETFRAEKILVDKLNARVAEGKIELKLNATLDEVLGDNMGVTGARLKNNDGSSDEIKVDGVFIAIGHTPNTSLFEGQLTLKDGYLVVNGGREGNATATNVEGVFAAGDVADHVYRQAITSAGAGCMAALDVERYLDGLANASF

SEQ ID NO: 18819 - protein, 1698 aa, Staphylococcus aureus
MNKNSKKKLDFLPNKLNKYSIRRFTVGTASILVGATLIFGVANDQAEAAENNTTQKQDDSSDASKVKGNVQTIEQSSANSNESDIPEQVDVTKDTTEQASTEEKANTTEQASTEEKADTTEQATTEEAPKAEGTDKVETEEAPKAEETDKATEEAPKTEETDKATTEEAPKAEETDKATEEAPKTEETDKATTEEAPAAEETSKAATEEAPKAEETSKAATEEAPKAEETEKTATEEAPKTEETDKVETEEAPKAEETSKAATEKAPKAEETNKVETEEAPAAEETNKAATEETPAVEDTNAKSNSNAQPSETERTQVVDTVAKDLYKKSEVTEAEKAEIEKVLPKDISNLSNEEIKKIALSEVLKETANKENAQPRATFRSVSSNARTTNVNYSATALRAAAQDTVTKKGTGNFTAHGDIIHKTYKEEFPNEGTLTAFNTNFNPNTGTKGALEYNDKIDFNKDFTITVPVANNNQGNTTGADGWGFMFTQGNGQDFLNQGGILRDKGMANASGFKIDTAYNNVNGKVDKLDADKTNNLSQIGAAKVGYGTFVKNGADGVTNQVGQNALNTKDKPVNKIIYADNTTNHLDGQFHGQRLNDVVLNYDAATSTITATYAGKTWKATTDDLGIDKSQKYNFLITSSHMQNRYSNGIMRTNLEGVTITTPQADLIDDVEVTKQPIPHKTIREFDPTLEPGSPDVIVQKGEDGEKTTTTPTKVDPDTGDVVERGEPTTEVTKNPVDEIVHFAPEEVPQGHKDEFDPNLPIDGTEEVPGKPGIKNPETGEVVTPPVDDVTKHGPKAGEPEVTKEEIPFEKKREFNPDLKPGEEKVTQEGQTGEKTTTTPTTINPLTGEKVGEGEPTTEVTKEPVDEITQFGGEEVPQGHKDEFDPNLPIDGTEEVPGKPGIKNPETGEVVTPPVDDVTKHGPKAGEPEVTKEEIPFEKKREFNPDLKPGEEKVTQEGQTGEKTTTTPTTINPLTGEKVGEGEPTTEVTKEPVDEITQFGGEEVPQGHKDEFDPNLPIDGTEEVPGKPGIKNPETGEVVTPPVDDVTKHGPKAGEPEVTKEEIPFEKKREFNPDLKPGEEKVTQEGQTGEKTTTTPTTINPLTGEKVGEGEPTTEVTKEPVDEITQFGGEEVPQGHKDEFDPNLPIDGTEEVPGKPGIKNPETGEVVTPPVDDVTKHGPKAGEPEVTKEEIPFEKKREFNPDLKPGEEKVTQEGQTGEKTTTTPTTINPLTGEKVGEGEPTTEVTKEPVDEITQFGGEEVPQGHKDEFDPNLPIDGTEEVPGKPGIKNPETGEVVTPPVDDVTKHGPKAGEPEVTKEEIPYETKRVLDPTMEPGSPDKVAQKGENGEKTTTTPTTINPLTGEKVGEGEPTTEVTKEPIDEIVNYAPEIIPHGTREEIDPNLPEGETKVIPGKDGLKDPETGEIIEEPQDEVIIHGAKDDSDADSDSDADSDSDADSDSDADSDSDADSDSDSDSDSDSDSDSDADSDSDSDSDSDADSDSDADSDSDADSDSDSDADSDSDSDSDSDADSDSDSDSDSDSDADSDSDADSDSDADSDSDADSDSDSDSDSDADSDSDSDADSDSDSDSDSDADSDSDADSDSDADSDSDADSDSDSDSDSDSDSDSDADSDSDADSDSDADRDHNDKTDKPNNKELPDTGNDAQNNGTLFGSLFAALGGLFLVGRRRKNKNNEEK

SEQ ID NO: 18820 - protein, 253 aa, Erythrobacter sp. NAP1
MSEEVLTEVQDGVLIVTINRPEAKNAMTKAAAEGIAAAMDRLDAEDDLRVGILTGAGGTFCSGMDLKGFLRGESPTVEGRGFGGVVQAPPSKPLIAAVEGYALAGGLELMIACDLVVASAGAKFGIPEAKRGLVAAAGGVMMLPDQIPERIAMELALTGDFIDAPRAYELGLINEVTDGSAIDAAKALAARIAANGPLAVRVSKQIIKESRGWAMEDRYTKQAQLIAPVFVSEDAREGAAAFAEKRAPNWKGK

SEQ ID NO: 18821 - protein, 259 aa, Thermoanaerobacterium thermosaccharolyticum
MDFNNVLLNKDDGIALIIINRPKALNALNYETLKELDSVLDIVENDKEIKVLIITGSGEKTFVAGADIAEMSNMTPLEAKKFSLYGQKVFRKIEMLSKPVIAAVNGFALGGGCELSMACDIRIASKNAKFGQPEVGLGIIPGFSGTQRLPRLIGTSKAKELIFTGDMINSDEAYKIGLISKVVELSDLIEEAKKLAKKMMSKSQIAISLAKEAINKGMETDLDTGNTIEAEKFSLCFTTDDQKEGMIAFSEKRAPKFGK

SEQ ID NO: 18822 - protein, 430 aa, Streptomyces nogalater
MKESINRRVVITGIGIVAPDATGVKPFWDLLTAGRTATRTITAFDPSPFRSRIAAECDFDPLAEGLTPQQIRRMDRATQFAVVSARESLEDSGLDLGALDASRTGVVVGSAVGCTTSLEEEYAVVSDSGRNWLVDDGYAVPHLFDYFVPSSIAAEVAHDRIGAEGPVSLVSTGCTSGLDAVGRAADLIAEGAADVMLAGATEAPISPITVACFDAIKATTPRNDTPAEASRPFDRTRNGFVLGEGAAVFVLEEFEHARRRGALVYAEIAGFATRCNAFHMTGLRPDGREMAEAIGVALAQAGKAPADVDYVNAHGSGTRQNDRHETAAFKRSLGDHAYRVPVSSIKSMIGHSLGAIGSLEIAASVLAITHDVVPPTANLHEPDPECDLDYVPLRARACPVDTVLTVGSGFGGFQSAMVLCGPGSRGRSAA

SEQ ID NO: 18823 - protein, 1035 aa, Thermosynechococcus elongatus BP-1
MRIFMFRFPLLSFIQLFLPTTAVIAALLTPLYVGQRQALFKDFRVGQEGKLEEIQLTIANDIDDAVTDPKGLGSFHLWHELIDSPSQGELAEEVQELVDQWHRLKEHYDQLYVLDTRGRIRFQWTSTPQSDPPSTVKAINSYWPILRELTPDQVFVSPVEVTATKSSGLPFPVLYIGVPLYHQSAPKGVLVVRYQLNHLFNNLLSRCNIQMGWCLVADDQGYWLLGEDIREQWGFDFPERRQFTVRHQYPLLWQQMQHQLRGGLFGPDGLFVFQSFSLLQENWISAERSAHSSRRQSNVRWWLIGFLPSSALEQYLDHLNRDFLVSFTALCILAAVAVLLITRDRQRKRSLQKLLETSNARFRSVSEMAPVGIFTLDAQGQPTFLNQRLLQLLQVHNLEEAQQQWIERLHPEDRDRVLKAWAACQQKRVPFHERFRIVHNDSSSHWINARIIPLQESSATDSFVGTWEDISQMMQQQELLEVARQAAEEASRAKSEFLATMSHEIRTPMNAIIGLTGLLLDTPLNPQQQEFVNTIRLSGDALLGVINDILDFSKIESGKLELESYPFNLRTCVEEVLDLLASRAAEREVELAAHIDSGVPCAVIGDMGRLRQVLVNLIGNAIKFTQKGNVTLYVKAKPMPMSQYEFMPSYYSYLFAIQDTGIGISAAGMNRLFKPFSQVDASTTRQYGGTGLGLVICQRLVERMGGQIWVESKKTGESLVVGGTPLAVYESIPIAESGSVFYFTARFLLNPNPAPEPTDDTCYLENRRVLIVDDNATNRQILALQIKKWKMQPLVAESGPSALALLQQQGWVDLAILDLQMPEMDGVTLARQIRAAYGELPLILLTSLGNTLTESEKALFSSLISKPVKQSTLYNALNSLFCEKQKTVSPKPAAAPSFEHLKAELPPLRILVAEDNKVNQMVALRILEKLGYRGDIAANGLEVLDAVQRQPYDVILMDMQMPEMDGITATREVTQLFQGLKKPRPRIIAMTANAMESDRQLCLDAGMDDYVSKPIRLEELVRALRQCQPLQTPTT

SEQ ID NO: 18824 - protein, 304 aa, Rhodobacter sphaeroides 2.4.1
MLGFGDKPANGAAPQGDLVKDTSEATFMQDVIDASRDVPVIVDFWAPWCGPCKTLGPALEAAVTAAKGKVRMVKVNVDENQMIAAQLRIQSIPTVYAFFQGQPVDGFQGALPPSEVKKFVEKIAAMGGDDGLADALAAAEEMLAEGAVVDALETFAAILGEEPENAAAYAGLIRCHLASGDLDQAEAYAAAAPAAIAKAKEIEGARAQIELARQAAKAGPVTELSRAVEADPANHQARFDLALALHASGQIDEAVDQLLELFRRDREWNEGAARTQLFTIFDALKPTDPIVLKGRRRLSSMIFA

SEQ ID NO: 18825 - protein, 107 aa, Crocosphaera watsonii WH 8501
MSAAVQVTDGTFKADVLDSDVPVLVDFWAPWCGPCRMVAPVVEEIADQYAGQVKVVKLNTDENPNTASQYGIRSIPTLMIFKGGQRVDMVVGAVPKTTLASTLEKYL

SEQ ID NO: 18826 - protein, 360 aa, Pseudomonas syringae pv. tomato str. DC3000
MSKQILILPGDGIGPEIMTEAVKVLELANQKYQLGFELTHDVIGGAAIDKHGVPLADETLDRARAADAVLLGAVGGPKWDTIERDIRPERGLLKIRSQLGLFGNLRPAILYPQLADASSLKPEIVAGLDILIVRELTGGIYFGAPRGTRVLDNGERQAYDTLPYSESEIRRIAKVGFDMAMVRGKKLCSVDKANVLASSQLWREIVEQVAKDYPEVELSHLYVDNAAMQLVRAPKQFDVIVTDNLFGDILSDQASMLTGSIGMLPSASLDTANKGMYEPCHGSAPDIAGQGIANPLATILSVSMMLRYSFNLTAAADAIEQAVSLVLDQGIRTGDIWSEGKVKVGTKEMGDAVVAALRNL

SEQ ID NO: 18827 - protein, 290 aa, Helicobacter pylori J99
MPNRGVVLLDGQALAYNIEKDLKNKIQIITAQTHKRPKLAVILVGKDPASITYVNMKIKACQRVGMDFDLKTLKENITEAELLSLIKDYNTDQNISGILVQLPLPRSIDTKMILEAIDPNKDVDGFHPLNIGKLCTQKESFLPATPMGVMRLLEHYHIEIKGKDVAIIGASNIIGKPLSMLMLNAGASVSVCHILTKDISFYTKNADIVCVGVGKPDLIKASMLKKGAVVVDIGINHLNDGRIVGDVDFINAQKIAGFITPVPKGVGPMTIVSLLENTLIAFEKQQRKGF

SEQ ID NO: 18828 - protein, 471 aa, Nostoc punctiforme PCC 73102
MSSKIKFGTDGWRGIIADDFTFPNVRKVTRAIATYLETAYTKNRPVLIAYDTRFLADQFAKTAAQVLADLGWTVKITVRDCPTPVIAYNARHLNSAGALMFTASHNPAPYCGIKYIPDYAGPATPEITDTIVANIESASDELPGSNPSGSISIFDPKPDYLQFIYTLLDIEKIKRANLKVKYDALYSTSRGYLDEVLQHSGVQLESFHDWRDVLFGGGMPEPKGEQLVELVEAVVRDQADLGLATDGDSDRFGIVDEQGTVLTPNTVLLVLARHLIKNKGKTGAIVRTVATTHLLDNFAAKNGLQIYETAVGFKYIGEKMRETAVLIGGEESGGLSIIGHIPEKDGVLADMLVAEAIAYEGKPLSQMVKEAIAEADGPLYNNRLDLHLTEAHKTAVIDSFTKNPPTEVVGIKVKEVGRKDGIKLYLEEGSWVLLRPSGTEPLVRVYLETNTPEKLTQIAQELESVIAKLEG

SEQ ID NO: 18829 - protein, 155 aa, Triticum aestivum
  misc_feature (68)..(68): Xaa can be any naturally occurring amino acid
  misc_feature (85)..(85): Xaa can be any naturally occurring amino acid
  misc_feature (94)..(94): Xaa can be any naturally occurring amino acid
  misc_feature (111)..(111): Xaa can be any naturally occurring amino acid
MARAQVMLMAVALVLMLAAVPRAAVAIDCGHVDSLVRPCLSYVQGGPGPSGQCCDGVKNLHNQARSQXSDRQSACNCLKGIARGXIHNLNEGQXAASIPPKCGVNLPYTIXSLNIDCSKGVMGDDSSKLVLKLIHPRGVEARNPLSLCSKGKALY

SEQ ID NO: 18830 - protein, 230 aa, Zea mays
MEDVDVSRQLKQMTNFIRQEAVEKAAEIEAAAAEEFQIEKLQLVEAEKKKIRQEYDRKEKQVGIKKKIDYSMQLNASRIKVLQAQDDLVTDMLESARKELLCISRDHPTYKKLLKTLIVQSLLRLKEPAVLLRCRKEDLQLVDLVLESARNEYADKAKVYPPEIVVDRQIYLPSAPSHYQAPGPSCSGGVVLASRDGKIVCENTLDARLQVVFRKKLPEIRQSLFGQVAA

SEQ ID NO: 18831 - protein, 366 aa, Oceanobacillus iheyensis HTE831
MEKHIILLPGDGIGREIIDSAKQVLTAIASEYNHRFTFEEHAIGGSAIDEYGTPLPDKTVDACSKADAILLGAVGGPKWDANPSHLRPEKGLLGIRKQLGLFANLRPVKTISSLLYASPLKEEIVSQADMLIIRELTGGIYFGTPSERTTNGVVDTLQYSREEIERIVERGFEAARIRKKHLTSVDKANVLESSKLWREIVEEKSKDYPDVAVNHLLVDAAAMKLVTQPSFFDVIVTENLFGDILSDEASVLTGSLGMLPSASLRADGLGLYEPVHGSAPDIAGKGIANPLAMILSAALMLEHSFGLVDEAKEIERAVNDCLLQGFHTADIHIPGGVQVGTKQMTDAVLENVTTKSISDSICSSYV

SEQ ID NO: 18832 - protein, 325 aa, Arabidopsis thaliana
MQIGQALAAAKEGESQMIVMMGNNLSLTSIILNGDPSIEHKGKLTCLDEQVKISQFYHCEGLLLCILKDDSRFVVCNPYLEQTRWIEPRYSHRPYGMDRFSYALGYVNTDSCRSYKLLRFIDYYYNAPEKQFFWYEVYDFDSDLWTTLDVTPHWRIAFCNTGVPFKGNTYWCAAERNVDVDEVLANRLICFDFTKEKLAVLLQHDESNPYELDLWITTKIETEEVLWSKFLRVETAGFNSYVPFISGSFFIDEEKKVAFGFDERNRQRVIVIGEAGYLRGLDLVGDFGDQSCKPDLCSYVPSLVQIKQPEGGEREEESEYGEASI

SEQ ID NO: 18833 - protein, 298 aa, Zea mays
MSAELKRDYEIGEEIGRGRFGVVHRCTSRATGEAFAVKSVDRSRLGDDLDRELAQLEPKLAQLAGAGNPGVVQVHAAYEDEAWTHVVINLCPGPDLLEWVGRRRGAPVPEPVAAAIVAQVAQALALCHRRGVAHRDVKPENILIDAAAGSDDDEEDEAEAAPRARLADFGSAAWVGAGGLGRAEGLVGTPHYVAPEVVAGGEYGAKADVWSAGVVMYALLSGGAFPFGGDSAAEVLAAVLRGSARFPPRLFGGVSPAAKDLMRRMICRDEWRRFTAEQVLAHPWIVSGGGARAMERPT

SEQ ID NO: 18834 - protein, 515 aa, Oceanobacillus iheyensis HTE831
MSRIKIFDTTLRDGEQSPGVNLNKAEKLEIAKQLEKYGVDRMEAGFPASSKGDFESVKQIAETIKSSSVIALARAVKSDIDIAYEALKGAEKPAIHIFLATSPIHMTYKLKKSPEQVIETAVNMVTYAKERFDEIEWSAEDATRSDWNFLAQIIEKVIEAGATVINLPDTVGYTTPEEYGKLFRFIKETVPNINQVALSCHCHNDLGMAVANSIAAVENGATQVEGTINGIGERAGNAALEEVAVALKIRSDYYPFETGLILKETKRTSDLVAKLTGMYVQANKAVIGRNAFSHESGIHQDGVLKNTETYEIITPEMVGVSSNTLFLGKHSGRHAFKDKLKEFGVELSEEELKTAFEQFKLLTDQKKEVTDDDLYTILMDIKTDSTVVDKYKLIQFGVSYDTAATPKANVILESPNGSLIEATQQGNGSVEALYKTINYLIAENITLVDYQINSVGGGKDALAESHVQIIINGETINGRGSAQDVLQASAVAFIQAVNRYYVQKKANLTRLVYES

SEQ ID NO: 18835 - protein, 141 aa, Bordetella parapertussis
MTVVCFNPSYTSNKNSGRMLHARVAQRNPRITIMSEQIKNVSDASFEADVLKSGQPVLVDYWAAWCGPCKMIAPILEEVAAEYAGRLTVAKLNVDENQDTAAKYGVRGIPTLMLFKDGQAAATKVGALSKSQLTAFLDGAL

SEQ ID NO: 18836 - protein, 418 aa, Tropheryma whipplei TW08/27
MSLIVQKYGGSSLASANNLKRVAERVSRAYYGNNRLVVVVSAMGSTTDRLLTLAHEVSVEPERRELDVLLSTGECVTASLLAMAINSIGLPARSFTAAQAGIVTDEHHCNARIITITPTLIEDALNAGEIAVVAGFQGVNRKGQVTTLGRGGSDTTAVALAAALKADRCEIYSDVEGVFTADPRIVPKARLLESIPIDHMLELSTAGARILSLRSVVFAKRHNVSVKVGSTFSDTSGTILCNEGEAMEEPVITGIATDTSQARITIVGLPDIPGSAAEVFSALSVAEVAVDNIVQNFSSSNTGFIDLSFTSPKAQGPAVTSALRENQTRIGYKDLQYDDEVGKITVVGSGIQHSADISAQLFRLLSDAKVNVEMISTSEMRISFVVRANVVAEVARLIHTSFGLDADLRAVVHSEGRV

SEQ ID NO: 18837 - protein, 311 aa, Zea mays
MSAELKRDYEIGAEIGRGRFGVVHRCTSRATGEAFAVKSVDRSRLGDDLDRELAELEPKLAQVAGAGNPGVVQVHAVYEDEAWTHVVMDLCAGPDLLEWVRIRRGAPVPEPVAAAIVAQVAQALALCHRRGVAHRDVKPDNILIDAAAAAAGTDGDGDGEDEEEEGGDGEAEAAPRARLADFGSAAWVGAGGLGRAEGLVGTPHYVAPEVVGGGEYGAKADVWSAGVVMYALLSGGALPFGGESAAEVLAAVLRGSARFPPRLFGGVSPAAKDLMRRMICRDEWRRFTAEQVLAHPWIVSGGGARGMERPT

SEQ ID NO: 18838 - protein, 185 aa, Oryza sativa
GGLEARVPFLDKAFLDVAMNTDAADKMFSKGSLQEVDADGRPRMEKYILRKAFDVIPDDIEAGGDGTGSMLSASAPKKPYLPEDILWRQKEQFSDGVGYSWIDGIKDHAEQSISDEKFQERAKRYPTDTPDTKEAYMIREIFESWFPSDAAASTSVRWIPRADWGCASDPSGRAVKIHESAYADE

SEQ ID NO: 18839 - protein, 1037 aa, Flaveria pringlei
MDRARRLANKAILGRLVSQTKHNPSISSPALCSPSRYVSSLSPYVCSGTNVRSDRNLNGFGSQVRTISVEALKPSDTFPRRHNSATPEEQTKMAEFVGFPNLDSLIDATVPKSIRLDSMKYSKFDEGLTESQMIAHMQDLASKNKIFKSFIGMGYYNTSVPTVILRNIMENPGWYTQYTPYQAEIAQGRLESLLNFQTMVTDLTGLPMSNASLLDEGTAAAEAMAMCNNIQKGKKKTFIIASNCHPQTIDICKTRADGFDLKVVTSDLKDFDYSSGDVCGVLVQYPGTEGELLDYSEFIKNAHANGVKVVMASDLLALTILKPPGELGADIVVGSAQRFGVPMGYGGPHAAFLATSQEYKRMMPGRIIGVSVDSSGKPALRMAMQTREQHIRRDKATSNICTAQALLANMAAMFGVYHGPEGLKTIAKRVHGLAGTFAAGLKKLGTVQVQDLPFFDTVKVTCVDSKAIAEEAYKHKMNLRIVDKNTITVAFDETITIEDVDTLFKVFALGKPVTFTAASIAPEVQDAIPSGLVRETPYLTHPIFNMYHTEHELLRYISKLQSKDLSLCHSMIPLGSCTMKLNATTEMMPVTWPAFADIHPFAPTEQAQGYQEMFKNLGDLLCTITGFDSFSLQPNAGAAGEYAGLMVIRAYHMARGDHHRNVCIIPVSAHGTNPASAAMCGMKIITVGTDSKGNINIEELRKAAEANKENLSALMVTYPSTHGVYEEGIDEICKIIHDNGGQVYMDGANMNAQVGLTSPGWIGADVCHLNLHKTFCIPHGGGGPGMGPIGVKKHLAPYLPSHPVVATGGIPAPEQSQPLGTIAAAPWGSALILPISYTYIAMMGSQGITNASKIAILNANYMAKRLENHYPILFRGVNGTVAHEFIVDLRPLKTTAGIEPEDVAKRLIDYGFHGPTMSWPVPGTLMIEPTESESKAELDRFCDALISIRQEIAEIEKGNVDLNNNVIKGAPHPPQLLMADKWTKPYSREYAAYPAPWLRAAKFWPTTCRVDNVYGDRNLICTLQPPQEYEEKAEATA

SEQ ID NO: 18840 - protein, 384 aa, Flavobacteria bacterium BBFL7
MTASTAIKKNTSFQLDSIEDAIEDIKNGKVIIVVDDENRENEGDFLASAQSVTPEMINFMATHGRGLICMPITESRCQELELDMMVTNNSDPMETAFTVSVDLRGHGVTTGISASDRAKTIQAMIHKDTRGHDLSKPGHIFPLRARDGGVLRRTGHTEAAIDFARLAGHEPAGVIVEIMNEDGTMARLPQLIEVAKKFDVKLVSIEDLVAYRMKNDSLILKKEDFNLRTRFGEYRLRAYQQTTNQQIHLALTLGDWDEEEEILTRMNSTQVNNDLFSTLTSEADRKLDAMFERLNKEGKGAIVFINQQFQPENMLSRLEQLKELQENGEVKAPRKNLDNRDYGIGAQILHDLKISKLKLLTNSEQSKRIGMIGYGLEITETISY

SEQ ID NO: 18841 - protein, 346 aa, Cryptococcus neoformans var. neoformans JEC21
MPAIQPGSLVLVTGASGYIAAHTIDALLKEGFNVRGTVRSQSKGEYLAKLFKGAKARFEYVIVGDIAQEGAFDEAVKSVNAVAHMASPYHFNAVELDELFEPAKKGTTGVLESLKKNNPDCKRVVVTSSVAAIVNSNIKPPHTFTEADWNPVSLKVCEEKGRDADGVNKYRASKTLAEKVFWKFFEDEKPSFDGVAINPPLVLGPIIHECDSPESLNTSVANFYDWMIGKKTEKNLPEAGGNYVDVRDCALAHLRALVVPEAAGQRFITGNGAYNGNDFCIALAETCPDLKGVAKGNADPAYRKKLIDENNHMDGSKAEKVLGLAYRSKNETLRDMAKSLRARFNF

SEQ ID NO: 18842 - protein, 957 aa, Klebsiella oxytoca
MTKPVLVLVGHGMVGHHFLEQCVSRDLHQQYRIVVFCEERYAAYDRVHLTEYFAGRSAESLSLVEGDFFTQHGIELRLSESVASIDREARVVRDAFGHETHWDKLVLATGSYPFVPPVPGHNLEGCFVYRTLDDLDQIAARAATARRGVVIGGGLLGLEAANALKQLGLETHVVEFAPNLMAVQLDNGGAAMLREKISELGVGVHTSKATTEIVRNEQGLQLNFRDGSSLATDMLVFSAGIRPQDALARSGGLSVGERGGICIDNQCRTSDPDVLAIGECALWENKIYGLVAPGYQMAARRAATLAGEAGSFSGADMSTKLKLLGVDVASFGDAQGRTPGCQSYQWTHGPQQVYKKIVVSADGKNLLGGVLVGDAGDYATLLQMMLNGMALPKHPESLILPALEGSRPKALGVAALPDGAQICSCHNVSKGDICQAVSGGAGDMAAIKSRTKAATGCGGCSALVKQVMEYQLAEQGVEVKKDICEHFPWSRQEIYHLVRVNHIRTFEQLIARYGQGHGCEVCKPLVASVLASCWNEYLLKPAHLPLQDTNDRYFANIQKDGTYSVVPRMAAGEVTPDGLIAIGQIAKRYQLYSKVTGGQRIDLFGARLEQLPAIWRELAEAGFETGHAYGKSLRTVKSCVGSTWCRYGVQDSTGLAVTLEHRYKGLRAPHKIKMAVSGCTRECAEAQGKDIGVIATEKGWNLYVCGNGGMKPRHADLFASDLDEATLIRSIDRLLMFYIRTADRLQRTSTWMDNLEGGVDYLREMILEDSLGIGEELEQEMARVVESYQCEWQTTLNDPQRLALFRSYVNSDEPDETVQRQTLRGQPQLAPFAAQGEPALPSRPWQAICDLDAIPQQAGIGARLGERQIALFRFGDQVYALDNLEPGSEANVLSRGLLGDAGGEPIVISPLYKQRIRLRDGRQCDGGEQAVRAWPVKVENGKVWVGNQQLLARAEAS

SEQ ID NO: 18843 - protein, 354 aa, Hordeum vulgare
MDGNKGPVVVTGASGFVGSWLVMKLLQAGYTVRATVRDPANVEKTKPLLELPGAKERLSIWKADLSEDGSFNEAIAGCTGVFHVATPMDFDSQDPENEVIKPTVEGMLSIMRACKEAGTVKRIVFTSSAGSVNIEERPRPAYDQDNWSDIDYCRRVKMTGWMYFVSKALAEKAAMEYASENGLDFISIIPTLVVGPFLSAGMPPSLVTALALITGNEAHYSILKQVQLVHLDDLCDAMTFLFEHPEANGRYICSSHDATIHGLARMLQDRFPEYDIPQKFAGVDDNLQPIHFSSKKLLDHGFSFRYTTEDMFDAAIHTCRDKGLIPLGDVPAPAAGGKLGALAAGEGQAIGAET

SEQ ID NO: 18844 - protein, 405 aa, Coxiella burnetii
MAIEIKVPTLPESVSDATVAKWYKKEGDSISRDENLVDLETDKVMLEVPAPKDGVVEQIVAKEGEVVKADQILALLKEGGAVAKEKAKKDEKETKKEKEKKEEKKDKEKKEKTEEKESDLSPAVRRMVSEKDVDVEEIEGSGKGGRITKKDVEDYLEKQKEKPSEGKEGPADERTEKRVPLSRIRQRVAERLVQVQQEAALLTTFNEINMQLVMELRKKYREEFEKKFKVRLGFMSFFTKAVVEALKRFPMVNASIDGSDIIYHNYYDIGIAIGTERGLIVPILRNAEKMNMADIEKQIREYASRAQEGRLNIEELTGGTFTITNGGTYGTLLSTPIINPPQTAILGMHKIMDRPTVENGEVVVRPIMQVALSYDHRVIDGREAVLFLVTIKELLEDPARMILEC

SEQ ID NO: 18845 - protein, 249 aa, Leifsonia xyli subsp. xyli str. CTCB07
MSASHALILLRHGNSEWNRQNLFTGWVDVRLSEQGVAEAKRAGELLAESGLVPDILYTSLLTRAIQTANHALDAADRLWIPVVRSWRLNERHYGALQGLDKAETLEKYGPEQFQLWRRSFDVPPPPLADDSEWSQADDPRYADLGADLPRTECLKDVIARMLPFWESDITTSLSAGKTVLVTAHGNSLRALVKHLDGISDDDIAELNIPTGVPLVYKLDDSFKPVEPAAYLDPEAAAVGAAAVAAQGKK

SEQ ID NO: 18846 - protein, 419 aa, Clostridium thermocellum ATCC 27405
MYKRIKLENGVRVVCEKIPYLRSVSIGIWVGTGSRNESQSNNGISHFIEHMLFKGTDNRSAREIADSIDSIGGQLNAFTGKECTCYYTKTLDSHADIALDVLSDMFFNSRFEEKDIEVEKKVILEEIGMYEDSPEELVHDILSETVWEDNSLGLPILGTRETLLNINKDKIKAYINERYLPQNTVIAVAGNFEEDRIIDVIKEKFGGWNASGKDSKTIEDAKFKVNSKIKVKDTEQIHICMGFEGVAHGSDELYPLLAVNNVLGGGMSSRMFQKIREEKGLVYSIYSYPSSYKNAGLFTIYAGMNAEHLEKVVELIIKEIKILLKEGLSKDELEKSKEQLKGSYILGLESTSSRMNSMGKSEVLMDRIYTPDEILKKIDAVNQESVERVIKQIFCLDKISFAIVGNIKKEIDIRKIINA

SEQ ID NO: 18847 - protein, 534 aa, Cryptococcus neoformans var. neoformans JEC21
MPDPAPFWLCHECGAQMRPVTIDGTPHCASCNGEFIEILDPEVNPDPDYELPPPPPTRPGQQTPSRFDPHFLSNFPPPQSEGSSSPARQRDTNNTGNFLSSLFSMLGTGSRQGSEETPRRPPPSFHGEPSASQRNGQSQNTDRPGMRTYAFNFGNARGSVTIGSFGSNLGRQGYRMNNDPTSPSGNLFNDPDPFRADPFDARFRPPGDGNRDINGDMPLPLGANEALQLIAALLDGNPPPNMGNLGDFATSDADFMRILQETFMEAAGPQGPVPANETVIEGLPRFTFDSGSLAKSQFRDCPVCKDDFEIGNEVMLIPCGHIYHPDCLVPWLRQNGTCPVCRFSLVSEDEQPNNQRTPNVGTEHTRNAEEERPATPTIPAAVSNFFRNLFGGSESQPSTPRAAAGGGHGSNASQDPHSSVNVVSESTISADASSRHSPTIHGATRREQVQPCDEVASEGSSNDSLVRVYPEHSSGETHGDGATDGEAGRIAEQEQQVASRDRLADRVNRDFNERWQRLRREREEDDTVYHPDLD

SEQ ID NO: 18848 - protein, 315 aa, Wolbachia sp.
LCDKKIQLGINLTKGLGAGALPDVGKGAAEESIDEIMEHIKDSHMLFITAGMGGGTGTGAAPVIAKAAREARAVVKDKGAKEKKILTVGVVTKPFGFEGVRRMRIAELGLEELQKYVDTLIVIPNQNLFRIANEKTTFADAFQLADNVLHIGIRGVTDLMIMPGLINLDFADIETVMSEMGKAMIGTGEAEGEDRAISAAEAAISNPLLDNVSMKGAQGILINITGGGDMTLFEVDSAANRVREEVDENANIIFGATFDQAMEGRVRVSVLATGIDSCNNNSSVNQNKIPAEEKNFKWPYNQIPISETKEYASTE

SEQ ID NO: 18849 - protein, 370 aa, Selenicereus wittii
SDSGKDAGRLSAAWQLYKAQEELIKVAKQFGVKLTMFHGRGGTVGRGGGPTHLAILSQPPDTIHGSLRVTVQGEVIEQSFGEEHLCFRTLQRYTAATLEHGMHPPISPKPEWRTLLDEMAVVSTKEYRSIVFQEPRFVEYFRLATPELEYGRMNIGSRPAKRKPTGGIESLRAIPWIFAMTQTRFHLPVWLGFGAAFKHVIEKDIRNLNMLREMYNMWPFFRVTIDLIEMVFAKGDPEIAALYDKLLVSEELQSFGELLRKNYEETSRLLLEVAEHKDLLEGDPYLKQRLRLRDPYITTLNVSQAYTLKRIRDPDFKVTERPHLSKDIMESNNPAAELVKLNPTSEFPPGLEDTLVLTMKGIAAGMQNTG

SEQ ID NO: 18850 - protein, 315 aa, Wolbachia sp.
LCDKKIQLGINLTKGLGAGALPDVGKGAAEESIDEIMEHIKDSHMLFITAGMGGGTGTGAAPVIAKAAREARAVVKDKGAKEEKILTVGVVTKPFGFEGVRRMRIAELGLEELQKYVDTLIVIPNQNLFRIANEKTTFADAFQLADNVLHIGIRGVTDLMIMPGLINLDFADIETVMSEMGKAMIGTGEAEGEDRAISAAEAAISNPLLDNVSMKGAQGILINITGGGDMTLFEVDAAANRVREEVDGNANIIFGATFDQAMEGRVRVSVLATGIDSCNDNSSVNQNKIPAEEKNFKWPYNQIPILETKEYASTE

SEQ ID NO: 18851 - protein, 364 aa, Raphanus raphanistrum subsp. raphanistrum
SSNKTLVSPGGVFEFGFFKLASSSCWYLGIWYKNIPERSYVWVANRDNPLHSSTGTLRISGTNLVLLDQSKNTVWSTNLTRRCVKSPVVAELFDNGNFVMRYSNNSDPSGYLWQSFDFPTDTLLPQMKLGFDLKTGPHRFLRSWRSPDDPASGNYTYKLETRGLPEFFLRSEDFLLYRTGPWNGIRFNGVPEMPRLLDNILTENKEEITYTFRMTNHSIYSKFIITHSGFFQLLTWTPKVQLWNVLWSIPNDQCDLYVLCGPYGYCDTKTSMCNCIKGFKPKGSQAWALGDMSQGCVRKTSLSCGGDGFIRLTKMKLPDTTYAIVDKLVGIKECKKRCLKDCNCTAFANADIRKGGSGCVMWTG

SEQ ID NO: 18852 - protein, 482 aa, Saccharomyces cerevisiae
MLRNGVQRLYSNIARTDNFKLSSLANGLKVATSNTPGHFSALGLYIDAGSRFEGRNLKGCTHILDRLAFKSTEHVEGRAMAETLELLGGNYQCTSSRENLMYQASVFNQDVGKMLQLMSETVRFPKITEQELQEQKLSAEYEIDEVWMKPELVLPELLHTAAYSGETLGSPLICPRELIPSISKYYLLDYRNKFYTPENTVAAFVGVPHEKALELTEKYLGDWQSTHPPITKKVPQYTGGESCIPPAPVFGNLPELFHIQIGFEGLPIDHPDIYALATLQTLLGGGGSFSAGGPGKGMYSRLYTHVLNQYYFVENCVAFNHSYSDSGIFGISLSCIPQAAPQAVEVIAQQMYNTFANKDLRLTEDEVSRAKNQLKSSLLMNLESKLVELEDMGRQVLMHGRKIPVNEMISKIEDLKPDDISRVAEMIFTGNVNNAGNGKGRATVVMQGDRGSFGDVENVLKAYGLGNSSSSKNDSPKKKGWF

SEQ ID NO: 18853 - protein, 339 aa, Polaromonas sp. JS666
MTQGELQATMHALVQKGKGILAADESGPTIAKRFKTINVESTEENRRAWRSLLLTTPGLGEFVSGVILHEETLGQATDDGTPLPQCAARQGIVAGIKVDAGKIPLAGAPGDEITQGLDGLAGRLAAYQRQGARFAKWRAVYNVSDTLPSRLALEANAEALARYAAICQEQGIVPIVEPEVLIDGDHTMARCAEVTEAALHEVFHALHRHRVVLEHMLLKPSMVVPGKTHAHQAAPAEVAVQTVRILRRTVPAAVPSINFLSGGQTPEEATANLDAMNLLGPQPWQLSFSYGRALQEPALQAWKGQAAHARSSQDALLKRARLNGAACRGRYSAAMEAAD

SEQ ID NO: 18854 - protein, 369 aa, Scapania nemorea
SDSGKDAGRLSAAWEMFKCQEDLVKVAKEHGIKLTMFHGRGGTVGRGGGPTHLAILSQPPDTIHGSLRVTVQGEVIEQSFGEEHLCFRTLQRFTAATLEHGMHPPRSPKPKWRELMDEMAKVATEEYRNVVFKHPQFVEYFRSATPETEYGRMNIGSRPAKRKPSGGIESLRAIPWIFAWTQTRFHLPVWLGFGGAFKQSLAKSSTNLALMREMYNEWPFFRVTIDLIEMVFAKGDPRIAALYDELLVSDELKPLGQKLRTMYAETRELLLKIAGHEDVLAGNPTLKQRLRLREPYITPLNLIQAFTLAKIRDQNFHVTEQPTTPRSGDPAKQSSELVSLNRTTEYPPGLEDTLIITMKGIAAGMQNTG

SEQ ID NO: 18855 - protein, 315 aa, Wolbachia sp.
LCDKKIQLGINLTKGLGAGALPDVGKGAAEESIDEIMEHIKDSHMLFITAGMGGGTGTGAAPVIAKAAREARAVVKDKGAKEKKILTVGVVTKPFGFEGVRRMRIAELGLEELQKYVDTLIVIPNQNLFRIANEKTTFADAFQLADNVLHIGIRGVTDLMIMPGLINLDFADIETVMSEMGKAMIGTGEAEGEDRAISAAEAAISNPLLDNVSMKGAQGILINITGGGDMTLFEVDSAANRVREEVDENANIIFGATFDQAMEGRVRVSVLATGIDSCNDNSSVNQNKIPAEEKNFKWPYNQIPILETKEYASTE

SEQ ID NO: 18856 - protein, 367 aa, Raphanus raphanistrum subsp. raphanistrum
SSNKTLVSPGGVFELGFFKPLATHVGIWGIWYKKVFQKTYAWIANRDSPLSNSIGTLKISGNNLVLIGQSNNTVWSTNITRGNARSSVIAELLPNGNFVMRYSNNRDPSGFLWQSFDFPTDTLLPDMKLGYDLKTGRNRFLTSWRSYDDPSSGIPRTNSKFEGDCPEFILMTEPFEIQRSGPWNGIEFSGIPEDEGLNYMVYNYTENSEEIAYSFHMTNQSIYSRLIVREDTLNRFTWIPPSRAWSTFWGLPKDGCDYLYFCGSYSYCDLNTSPNCNCIKGFVPKNQQRWDLRDGTDGCVRTTRLSCGGDGFLRLNNMNLPDTKTATVDRRIDVKKCEEKCLSDCNCTSFAIADVRNGGSGCVMWTG

SEQ ID NO: 18857 - protein, 247 aa, Candida glabrata CBS 138
MPKLVLVRHGQSEWNEKNLFTGWVDVRLSAKGEQEAARAGELLKEKNVHPDILYTSKLSRAIQTANIALSKADRLWIPVKRSWRLNERHYGALQGKDKAETLETYGEEKFNTWRRSFDVPPPVIEADSPYSQKNDERYRDVDPNVLPQTESLALVIDRLLPYWEDVIAKDLLAGKTVMIAAHGNSLRGLVKHLEGISDADIAKLNIPTGIPLVFELDENLKPSKPSYYLDPEAAAAGAAAVAAQGKK

SEQ ID NO: 18858 - protein, 573 aa, Candida albicans SC5314
MCGIFAAYRQPEVEDFKSKALQYSKLIRHRGPDWSGNVVQNSTILCHERLAIVGLDSGAQPIVSPDGNFTLAVNGEIYNHIQLREQFPDYKFKSLSDCEPIIPLFTKYDIDAPKHLDGMFAWVLYDKKNDRIVAARDPIGITTLYMGKSSKSPKTRYFASELKCLIEECDEIFAFPPGHVYDSNTDEITRYFKPSWWDASKVPEQHVDFKKVRETLELAVRKRLMAEVPYGVLLSGGLDSSLIASIASRETKKAAQASFNPEGIDANKELSGVDDKGSLHSTGVFNQLHSFAIGLPGAPDLLAAEKVAHFIGTIHHSHTFTLEEGLDALDDVIYHLETYDVTTIRASTPMYLLSRKIKAQGVKMVLSGEGSDEIFGGYLYFANAPSAKEFHEECVKRVKNLHYADCLRANKSTMAWGLEARVPFLDKQFLEVCMNINPEDKLIQPGKIEKYILRKAFDTSDEPDVKPYLPEEILWRQKEQFSDGVGYSWIDGLKDTAEKMVSDEEFAHPKPEWGDDIPTTKEAYWYRCKFDKMFNGSKAAASTVMRWIPKAEWGCHADPSGRYAATHDHKVAQ

SEQ ID NO: 18859 - protein, 368 aa, Sphagnum palustre
SDSGKDAGRLSAAWQMFKAQEDLVKVAKEYGVKLTMFHGRGGTVGRGGGPTHLAILSQPPDTINGSLRVTIQGEVIEQSFGEEHLCFRTLQRFTAATLEHGMHPPIAPKPEWRALMDSMAVVATEEYRSIVFQNPKFVAYFRAATPEMEYGRMNIGSRPSKRKPSGGIESLRAIPWIFAWTQTRFHLPVWLGLGRALSHALDTDPKNITTLRQMYNKWPFFRVTIDLVEMVFAKGDPRIAALYDSLLVSPEFKPFGEELRQKYNETRNNLLRVAGHDDVLAGNPTLKQRLRLREPYITPLNVQQAYTLKKMREENKQLNITQNGELAKPTKRATELVKLNTTTEYAPRLEDTLILTMKGIAAGMQNTG

SEQ ID NO: 18860 - protein, 67 aa, Brassica napus
  misc_feature (4)..(4): Xaa can be any naturally occurring amino acid
  misc_feature (19)..(19): Xaa can be any naturally occurring amino acid
  misc_feature (21)..(21): Xaa can be any naturally occurring amino acid
  misc_feature (23)..(23): Xaa can be any naturally occurring amino acid
  misc_feature (54)..(57): Xaa can be any naturally occurring amino acid
  misc_feature (59)..(59): Xaa can be any naturally occurring amino acid
  misc_feature (61)..(64): Xaa can be any naturally occurring amino acid
SISXFSEIISPIKAVALTXQXEXDAANIKRLLEEGDLVICPEGTTCREPFLLRXXXXFXEXXXXGGG

SEQ ID NO: 18861 - protein, 315 aa, Wolbachia sp.
LCDKKIQLGINLTKGLGAGALPDVGKGAAEESIDEIMEHIKDSHMLFITAGMGGGTGTGAAPVIAKAAREARAVVKDKGAKEKKILTVGVVTKPFGFEGVRRMRIAELGLEELQKYVDTLIVIPNQNLFRIANEKTTFADAFQLADNVLHIGIRGVTDLMIMPGLINLDFADIETVMSEMGKAMIGTGEAEGEDRAISAAEAAISNPLLDNVSMKGAQGILINITGGGDMTLFEVDSAANRVREEVDENANIIFGATFDQAMEGRVRVSVLATGIDSCNDNSSVNQNKIPAEEKNFKWPYNQIPISETKGYASTE

SEQ ID NO: 18862 - protein, 380 aa, Hirschfeldia incana
SSNKTLVSPGDVFELGFFKTTTRSSQDGSTDRWYLGIWYKTTSDHRTYVWIANRDNPLHNSIGTLKISHSSNLVLLDQSDTPVWSTNLTGVVKSPATAELLANGNFVLRGSYTIDLTHFMWQSFDFPVDTLLPEMKLGRNLIGPEHEKILTSWKSPTDPSSGDYSLILETEGFLHEFYLFKNEFKVYRTGPWNGVRFNGIPKKMQNWSYIVNNFIDNKEEVAYSFQVNNNHNIHSRFRMSSTGYLQVITWTKTVPQRNMFWSFPEDACDLYQVCGPYAYCDMHTTPMCNCIKGFVPKNAGRWDLRDMSGGCVRSSPLTCGEGDGFMVLGQMKMPETSEAFVEEMIGLEECSQKCVRDCNCTGFAIMDNMNGGSGCVMWTG

SEQ ID NO: 18863 - protein, 322 aa, Pyrus pyrifolia
MENFPVINLESLNGEGRKATMEKIKDACENWGFFELVSHGIPTEFLDTVERLTKEHYRQCLEQKFKELVASKGLEAVKTEVNDMDWESTFYLRHLPQSNISQVPDLKDEYRNVMKEFALKLEKLAEQLLDLLCENLGLEQGYLKKAFYGTNGPTFGTKVSNYPPCPNNDKIKGLRAHTDAGGLILLFQDDKVSGLQLLKDGEWVDVPPMRHSLVINLGDQLEVITNGKYKSVEHRVIAQTDGTRMSIASFYNPSSDAVIYPAPTIVEKNAEEKNQVYPKFVFEDYMKHYVGVKFQAKEPRFEAMKAVEVKTSFGLGPVKTTA

SEQ ID NO: 18864 - protein, 573 aa, Lycopersicon esculentum
IRHESTVTGGVQDVYGEDSATEDQSITPWTLSVASGFSLLRNPHYNKGLAFSERERDTHYLRGLLPPVVISHDLQVKKMMNSIRKYDVPLQRYMAMMDLQEMNERLFYKLLIDNVEELLPIVYTPTVGEACQKYGWIFKRPQGLFFSLKEKGKIHEVLKNWPEKKIQVIVVTDGERILGLGDLGCQGMGIPVGKLSLYSALGGIRPSACLPVTIDVGQTMKFVDDEFYIGLRQRRATGQEYSELLDEFMYAVKQNYGEKVLIQFEDFANHNAFNLLAKYGTSHLVFNDDIQGTASVVLAGLMAALNLVGGSLSEHTFLFLGAGEAGTGIAELIALEMSKQTGIPLEETRKKIWMVDSKGLIVKSRMEMLQHFKRPWAHDHEPVQELVNAVKSIKPTVLIGSSGAGRTFTKEVVQAMATFNEKPIIFALSNPTSQSECTAEEAYSWSEGRAIFASGSPFAPVEYNGKVYASGQANNAYIFPGFGLGLIISGAIRVHDDMLLVASEALADEVSQENFEKGTHIPPFSNIRKISAHIAKVAAKAYELGLATRLPQPKDLVAYAESCMYSPAYRSYR

SEQ ID NO: 18865 - protein, 368 aa, Raphanus raphanistrum subsp. raphanistrum
SSNKTLVSPGNVFELGFFTTGSSSRWYLGIWYKKVSGRTYVWVANRDNPLSSSIGTLRFSNMNLVLLDQSNKSVWWTNLTRGNERSPVVAELLANGNFVIRDCSNNDASGFLWQSFDYPTDTLLPGMKLGYDAQKGLNRFLTSWRNSDDPSSGNISYKLDTQRGMPEFFLLKDGLRAHRSGPWNGVQFSGIPEDQKLSYMVYNFTENSEEVAYTFRMTNSSIYSRLKISFRRFLERWTTPTSIPWNLFWSAPVDLKCDVYKTCGPYSYCDLNTSPLCNCIQGFMPSNVQQWDLRDPSAGCIRRTRLSCSGDGFTRMKNMKLPETRMAIVDRSIGVKECEKRCLSDCNCTAFVQMRYPEWWVGMCDVDR

SEQ ID NO: 18866 - protein, 322 aa, Pyrus pyrifolia
MENFPVINLESLNGEGRKATMEKIKDACENWGFFELVSHGIPTEFLDTVERLTKEHYRQCLEQKFKELVASKGLEAVQTEVKDMDWESTFYLRHLPQSNISQVPDLKDEYRNVMKEFALKLEKLAEQLLDLLCENLGLEQGYLKKAFYGTNGPTFGTKVSNYPPCPNNDKIKGLRAHTDAGGLILLFQDDKVSGLQLLKDGEWVDVPPMRHSLVINLGDQLEVITNGKYKSVEHRVIAQTDGTRMSIASFYNPSSDAVIYPAPTLVEKNAEEKNQVYPKFVFEDYMKHYVGVKFQAKEPRFEAMKAVEVKTSFGLGPVKTTA

SEQ ID NO: 18867 - protein, 574 aa, Prochlorococcus marinus str. MIT 9312
MKETSPKSNNGTILDINESFKIEFDPISDALAAIRNGECIIVVDDERRENEGDLICAAQFATPQQINFMATEGRGLICLAMQGEKLDSLDLPLMVDRNTDKNQTAFTISIDAGPENNVSTGISAEDRAKTIQVAINPNTKPDDLRRPGHIFPLRAKKGGVLKRAGHTEAAVDIAAMSGLYPAGVICEIQNPDGSMSRLPQLKEYAKQWGMKLISIADLISYRFQTERFVFRKSDAVLPSIFGNFKAYGYINELDGSEHVALVKQKSKKLSEPVLVRMHSECLTGDAFGSLRCDCRPQLEAALSRIEKEEEGVVVYLRQEGRGIGLINKLKAYSLQDGGLDTVEANEKLGFPADLRNYGVGAQILTDLGIKKLKLLTNNPRKIAGLGGYGIEVIERVPLMICPNDNNAEYLSVKRTKLGHMIDVDNSNFRNIDPFISIFLDGNYKSIHLVPIKNKVNKFCKDQNINIKLESTPRLLAFWNRPKLVWRIIHDRNRTNTNITDEEIKNIELLIEFLSKYEDSKKIGIIVSRNIEQALHPKNSIKLINTKFTINNEILYSSTRKFNLDKETFSIVFEG

SEQ ID NO: 18868 - protein, 368 aa, Raphanus raphanistrum subsp. raphanistrum
SSNKTLVSPGNVFELGFFTTGSSSRWYLGIWYKKVSGRTYVWVANRDNPLSSSIGTLRFSNMNLVLLDQSNKSVWWTNLTRGNERSPVVAELLANGNFVIRDCSNNDASGFLWQSFDYPTDTLFPEMKLGYDLKKGLNRFLTSWRNSDDPSSGNISYKLDTQRGMPEFFLLKDGLRATGVVHGMESNLVAYQRDQKLSYMVYNFTENSEEVAYTFRMTNSSIYSRLKISSEGFLERWTTPTSIPWNLFWSAPVDLKCDVYKTCGPYSYCDLNTSPLCNCIQGFMPSNVQQWDLRDPSAGCIRRTRLSCSGDGFTRMKNMKLPETRMAIVDRSIGVKECEKRCLSDCNCTAFANADIRNGGSGCVMWTG

SEQ ID NO: 18869 - protein, 322 aa, Pyrus pyrifolia
MENFPVINLESLNGEGRKATMEKIKDACENWGFFELVSHGIPTELLDTVERLTKEHYKQCLEQRFKELVASKGLEGVQTEVKDMDWESTFHLRHLPQSNISEVPDLKDEYRNVMKEFALKLEKLAEQLLDLLCENLGLEQGYLKKAFYGTKGPTFGTKVSNYPPCPNPDLIKGLRAHTDAGGLILLFQDDKVSGLQLLKDGEWVDVPPMRHSIVINLGDQLEVITNGKYKSVEHRVIAQTDGTRMSIASFYNPGSDAVIYPAPTLVEKEAEEKNQVYPKFVFEDYMKLYAGVKFEPKEPRFEAMKAVEIKASFGLGPVISTA

SEQ ID NO: 18870 - protein, 527 aa, Prochlorococcus marinus str. MIT 9312
MNEELNSWDKFCNYLWFDKKLNIWLDISKIIFTNDDIVTLEEKFTDVLSSIKELENGAISNIDENRQVGHYWLRNPSISPSSNIGEEISADINEISEFGKQILNGNIKNKNNQKYTDVLWIGIGGSGLGPLLITESLQKCSKGLNFSYIDNVDPFLISEKLEELAEKLSTTLFVVVSKSGGTPEPRIAMEIIKSHCENNSLEWNSNAIAITMKDSKLFNKAISENWLKIFNLQDWVGGRTSITSSVGLLPLALINENIFEFIRGASLMDEATRTSDFKNNPAALLSSAWYLTGDGVGKRDMVVLPYRDRLQVFSKYLQQLVMESLGKKFNRNGEVVNQGISVFGNKGSTDQHAYVQQLRDGIDNFFCIFIELLDSPSTNIFDGKENPKEYLSGFLQGTRSALSSENRQSITITLEKLNCFSLGALIALFERSVSFYAELVNINAYDQPGVEAGKKAAANIIDYQQKVSNLLEKGGEYSINEITSLIDNSVSEPIFFILREMCFGNEDYLVKGDWSNPNSLVIQKRNS

SEQ ID NO: 18871 - protein, 533 aa, Arabidopsis thaliana
MKARSGHEMKKTLTWWDLMWFGIGAVIGSGIFVLTGLEARNHSGPAVVLSYVVSGVSAMLSVFCYTEFAVEIPVAGGSFAYLRVELGDFMAFIAAGNIILEYVVGGAAVARSWTSYFATLLNHKPEDFRIIVHKLGEDYSHLDPIAVGVCAIICVLAVVGTKGSSRFNYIASIIHMVVILFVIIAGFTKADVKNYSDFTPYGVRGVFKSAAVLFFAYIGFDAVSTMAEETKNPGRDIPIGLVGSMVVTTVCYCLMAVTLCLMQPYQQIDPDAPFSVAFSAVGWDWAKYIVAFGALKGMTTVLLVGAIGQARYMTHIARAHMMPPWLAQVNAKTGTPINATVVMLAATALIAFFTKLKILADLLSVSTLFIFMFVAVALLVRRYYVTGETSTRDRNKFLVFLGLILASSTATAVYWALEEEGWIGYCITVPIWFLSTVAMKFLVPQARAPKIWGVPLVPWLPSASIAINIFLLGSIDTKSFVRFAIWTGILLIYYVLFGLHATYDTAKATLKEKQALQKAEEGGVVADNSCSAT

SEQ ID NO: 18872 - protein, 357 aa, Citrus sinensis
MVTPTARRVESLARSGIQAIPKEYVRPKEELMGIGNIFEEEEKDEGPQVPTIDLKEIDSEDRVEREKCREELKKAAMDWGVMHLVNHGISDDLTERVKRAGQAFFDQPVEEKEKYANEQASGKIQGYGSKLANNASGQLEWEDYFFHLIYPEDKRDMSIWPKTPSDYTEATSEYARQLRSLATKILAVLSLGLGLEEGRLEKEVGGLEELLLQMKINYYPKCPQPELALGVEAHTDVSALTFILHNMVPGLQLFYKDKWVTAKCVPNSIILHIGDTIEILSNGEYKSILHRGLVNKEKVRISWAVFCEPPKDKIILKPLPETVSEQKPAMFPPRTFQQHIEHKLFRRTQDALLSDEE

SEQ ID NO: 18873 - protein, 207 aa, Arabidopsis arenosa
MASFEESSDLEAIQSHLFEDLLACDGFMGDFDFDASFVSGLWCIESQVPKQEPDSPVLDPDSFVNEFLQVEGESSSSSSPELNSSSSTYETDQSVKKAERFEEEEEARHYRGVRRRPWGKFAAEIRDPAKKGSRIWLGTFESDVDAARAYDCAAFKLRGRKAVLNFPLDAGKYEAPANSGRKRKRSDVQEELQRTQSNSSSSSCDAF

SEQ ID NO: 18874 - protein, 553 aa, Nostoc punctiforme PCC 73102
MTTNSSPQLWLYDTTLRDGTQREGLSVSIEDKLRIAKRLDQLGVPFIEGGWPGANPKDVQFFWQLQEDPLKQAEIVAFCSTRRPNSTAATEPMLQDILAAGTRWVTIFGKSWDLHVTTSLKTTLEENLAMIRDTIEYLRSQGRRIIYDAEHWFDGYKHNPDYALQTLEAAIASGAEWLVLCDTNGGTLPHEIGQIVQDVSSHLSFVTCQETMTKDNGQRIIPQIGIHTHNDSEMAVANAIAAVMAGAKMVQGTINGYGERCGNANLCSLIPNLQLKLGYSCITEDQLTQLTEASRFVSEVVNLAPDEHAPFVGLSAFAHKGGIHVSAVERNPLTYEHIQPEQVGNHRRIVISEQSGLSNVLAKARSFGIDLDQLKAEAKEILQRLKDLESEGFQFEAAEASFALLMHEALGGRQKFFEVKGFQVHCDLVEGKETSNALATVKIAVDGKNILEAAEGNGPVAALDAALRKALVNFYPQIATFDLTDYKVRILNGHTGTAAKTRVLVESGNGRQRWTTVGVSTNILEASYQAVVEGLEYGLLLHSQAEAAVKAST

SEQ ID NO: 18875 - protein, 640 aa, Corynebacterium diphtheriae
MCGLLGMLSSTGQASKYAAAIESALPCMHHRGPDEAGTWHDDHAVFGFNRLSIIDLEHSHQPLRWGPEGEPDRYAMTFNGEIYNYVELRKKLQDLGYTFNTSGDGETIAVGFHHWGADVVLHLRGMFGIAIWDTKEQRLFLARDQFGIKPLYFATTEAGTVFASEKKCILGMADAIGLDLGLDQRAIEHYIDLQYVPEPESLHQHIRRLESGCFAFVSVGGNVEQTRYFRPQFPAQEFPKDKEQDLFDRIAKALEDSVEKHMRADVTVGSFLSGGIDSTAIATLAKRHNPNLLTFTTGFEREGYSEVDVAAESAAAIGVEHIVKIVSPEEYANAIPQIMWYLDDPVADPSLVPLFFVAQEARKHVKVVLSGEGADELFGGYTIYKEPLSLAPFEKIPSPLRRGLGKVAEVFPDGMRGKSLLQRGSMTMEERYYGNARSFNFDQMKRVIPWAKKEWDHREVTAPIYAQSEHMDPVARMQHLDLFTWMRGDILVKADKINMAHSLELRVPFLDKEVFEVAETIPYDLKIANGTTKYALRKAMEQIVPPHVLHRKKLGFPVPMRHWLAGDELFGWAQDTINESMTDQYFDKAAVLAMLNEHKNGVSDHSRRLWTVLAFMIWHGIFVEHRIDPGIEKRDYPVYL

SEQ ID NO: 18876 - protein, 321 aa, Carboxydothermus hydrogenoformans Z-2901
MNSIGVLTSGGDAPGMNAAVRAVVRKALFHGIKVYGIERGYAGLINNEIKEMSLGSVGDIIQRGGTVLKTARSLEFKTYEGRLRAFQNLKNHGIEGLVVIGGDGSFQGALKLYEEFGVKVVGIPATIDNDIYGTDYSIGFDTTVNTVVDAINKIRDTAFSHERTFIVEVMGRNAGFIALEAGIAGGAESIIIPEIPYSIEEICQKLIKSHQRGKLHSIIIIAEGAGSGIKLGEVIKEKTGFETRVTILGHIQRGGSPSAFDRILASRMGAMAVDALREGISQGVMVAFEKGEYVLKPLETAFSGKKQIDLEYYRLADILSI

SEQ ID NO: 18877 - protein, 314 aa, Symbiobacterium thermophilum IAM 14863
MRKVVILGTGPAGLTAAIYTARANLQPLVIEGNEPGGQLTTTTEVENFPGFPDGIMGPELMDNMRRQAERFGAEFRRGYVTGVDFSRRPFRITVDETDVIEAEAVIIATGASAKHLGIPGEDENIGRGVSYCATCDGFFYRGKKVLVVGGGDSAMEEANFLTKFADVTVVHRRSELRASKIMQERARANPKISWVLNAVPVEVLADERGFKALKVRDKETGEERLLEADGMFVAIGHKPNTDFLRGQIDMDELGYIKTIPGTAQTNVPGVFACGDVQDSRYRQAITAAGSGCMAALDCERFLEEVAAQEGSLTK

SEQ ID NO: 18878 - protein, 170 aa, Triticum aestivum
MATDAILETIKPRRSPWLEDLPVTNGGAAKGGKVDLSGMRRRVSSSLSLSLQPLSSSSSAAFRRARSMPSIKALAAAGAVRQWWEWGLGWVMTRKPSFARGLEMSEDEAALLGCHCRGTLRHVFYKARAEVRRLLGRDGRPLGGVAAQDFRYDSVSYAQNFDNGDVDARC

SEQ ID NO: 18879 - protein, 364 aa, Pseudomonas putida
MNSAIGPYKGGLRFHPSVNLGVLKFLAFEQTFKNSLTSLPMGGGKGGSDFDPKGKSDAEVMRFCQAFMSELYRHIGADVDVPAGDIGVGAREIGFLFGQYKRLSNQFTSVLTGKGMTYGGSLIRPEATGFGCVYFAEEMLKRRGQSVEGKRVAISGSGNVAQYAARKVMDLGGKVISLSDSEGTLYCEAGLSEAQWLALLELKNIKRGRISELASAHGLEFRAGQHPWSLPCDIALPCATQNEVDAGAARTLLRNGCVCVAEGANMPTTLAAVDIFIEAGILFAPGKASNAGGVAVSGLEMSQNAMRLLWTAGEVDSKLHAIMQSIHHACVHYGEDNGQINYVKGANIAGFVKVADAMLAQGVV

SEQ ID NO: 18880 - protein, 105 aa, Treponema pallidum subsp. pallidum str. Nichols
MALLDISSGNVRKTIETNPLVIVDFWAPWCGSCKMLGPVLEEVESEVGSGVVIGKLNVDDDQDLAVEFNVASIPTLIVFKDGKEVDRSIGFVDKSKILTLIQKNA

SEQ ID NO: 18881 - protein, 371 aa, Scleropodium purum
SDSGKDAGRLSAAWQMFKAQEDLVKVAKQYGVRLTMFHGRGGTVGRGGGPTHLAILSQPPDTINGSLRVTVQGEVIEQSFGEEHLCFRTLQRFTAATLGHGMHPPIAPKPEWREIMDKMAVISTKEYRAVVFQNPKFVEYFRTATPELEYGRMNIGSRPSKRKPSGGIESLRAIPWIFAWTQTRFHLPVWLGLGSALKEVLQTDPRNIAILRRMYNQWPFFRVTIDLVEMVFAKGDPRIAALYDNLLVSDEVKPLGDELRRKYNETREYLLRVAGHEDILQGNPTLKQRLRLREPYLTALNVQQALVLKKMRDSSSQFCALQNGNSGEVPKSPRRAAELVELNPTTEFPPGLEDTLILTMKGIAAGMQNTG

SEQ ID NO: 18882 - protein, 274 aa, Xanthomonas oryzae pv. oryzae KACC10331
MVGGLRLGSGRRCSGRRAGRARLQCGDGLLQRIEFFAGAQQYRALHVELFTGDQVQLAQPGLQRALEGALQFFARLAQARRHQVAEAAGEVVELIEIDHGVLRRSVGSLVQAGTRGTSARQSADSKDSPIRLSSAVTAARSGMSVAAVHGMLRGRHALGPAPMKMIMAIVKPFKLDDVREALAGCGVAGITATEVKGFGRQKGHAELYRGAEYVVDFLPKVKIEVAVTDDQAERVVEAIVAAVGTGKIGDGKVFAYDLGTVVRIRTGELGSDAL

SEQ ID NO: 18883 - protein, 315 aa, Wolbachia sp.
LCDKKIQLGINLTKGLGAGALPDVGKGAAEESIDEIMEHIKDSHMLFITAGMGGGTGTGAAPVIAKAAREARAVVKDKGAKEKKILTVGVVTKPFGFEGVRRMRIAELGLEELQKYVDTLIVIPNQNLFRIANEKTTFADAFQLADNVLHIGIRGVTDLMIMPGLINLDFADIETVMSEMGKAMIGTGEAEGEDRAISAAEAAISNPLLDNVSIKGAQGILINITGGGDMTLFEVDSAANRVREEVDENANIIFGATFDQAMEGRVRVSVLATGIVSCNDNSSVNQNKIPAEEKNFKWPYNQIPISETKEYASTE

SEQ ID NO: 18884 - protein, 888 aa, Zea mays
  misc_feature (728)..(728): Xaa can be any naturally occurring amino acid
MPAAGQRGMQQRSSSKSSSTVAMHARAKMNQMSMWPCSEDAFIYLRSTEGLALYSIGLRTVDNHGNKQGKAVYRKKRKFISNLEEDGRVYTNHEDIQGVLDGFFTNLLGTDFPRSVTIDLLGCHRPAADLSELDSPFSEKEVRDAIADLPSDKAPGPDGFTGRFYKTCWSIIKEDLLAALNFLHQGNAHKLGLLNSAYIILLPKRSDAMTASDYRPISLIHSFAKLVTKLLANRLGPHLHELVAANQSAFVRGRSIHDNFMLVQQSIKSLHKRKIAGLFLKLDISRAFDSVSWAFIIEILVHLGFGPIWRNLISSLMFTSSTQVLLNGSPGARIAHRRGLRQGDPLSPMLFVMVMDVLNSLFRAAESRGLLQGLEAAGIRNRLSIYADDVVLFVKPLVDDLNCVKLILDCFGEATGLVTNLRKSFAIPIRCEGLESQAGCNILQCSSGSFLCSYLGLPISDKKPRKRDFMVWVNKIADRLPNWKARLLSLAGRTALVRHVLSAIPVYILMAMSVPKWVIKSIDKLRRGFLWKGRKNVNGGSCLVPWEIVTRPLKYGGLGVSNLQFKSWALQVKWLWLQRTDPSRPWQGMNLPIQQQVRQFFNLSVFHVVGDGTSTLFWFDKWLNGKAIFDIAPEVVCLVDSRVSSTRTVAQALDNWRWVRDIGSHLSMLGLQQYLKLWDEIGQVTLSQEADRLVWRHTTSGQFSSKSCYNAFFLGSISFEAWKRLWKXSPPKCKFFLWLAMKNKCWNVDRLEKRGLPHPEVCPLCDQEQETIQHILCTCSFSRDFWHLILSSIGLGNLTPIVAEQSFAVWWEKISKRVHRCKRKGFNSVIILGAWCLWLSRNRAVFDGVSPSISLTKRLFLDELISWNKAGAKHLDSLGIIVTLNRVS

SEQ ID NO: 18885 - protein, 397 aa, Shewanella sp. ANA-3
MSIEIKVPVLPESVADATIATWHVKVGEQVSRDQNLVDIETDKVVLEVVAPEDGHIGEFLFQEGDTVLGEQVIAKFIAGAVSGQEVTKAEAEAAAPVAAAATEESNDALSPSVRRLLAEHNVDASKVKGTGVGGRITKEDVEAFIKSAPKAAAPAAPAVQPLAAGRSEKRVPMTRLRKTIANRLLEAKNSTAMLTTFNEVNMKPIMDIRKQYQDIFEKRHGIRLGFMSFYVKAVTEALKRFPEVNASIDGDDIVYHNYFDVSIAVSTPRGLVTPVLRDTDTMSLADIEKAVRDLAIKGRDGKLTVADMTGGNFTVTNGGVFGSLMSTPILNLPQSAILGMHAIKDRPMAVNGQVEILPMMYLALSYDHRIVDGRESVGFLVAIKDFLEDPTRLLLDL

SEQ ID NO: 18886 - protein, 364 aa, Vanilla aphylla
  misc_feature (134)..(134): Xaa can be any naturally occurring amino acid
SDSGKDAGRLSAAWQLYKAQEDLIKVAKKYGVKLTMFHGRGGTVGRGGGPTHLAILSQPPDTIHGSLRVTVQGEVIEQSFGEEHLCFRTLQRFTAATLEHGMHPPISPKPEWRTLLDEMAVVATNEYRSIVFQXPRFVEYFRLATLELEYGRMNIGSRPSKRKPSGGIESLRAIPWIFAWTQTRFHLPVWLGFGTAFKHVVQKDIKNLRILQEMYNEWPFFRVTIDLVEMVFAKGNPGIASLYDKLLVSEDLLPFGERLRANYQETKDLLLQVAGHKDLLEGDPYLKQRLRLRDSYITTLNVCQAYTLKRIRDPSFHVKVRPHISKEISDASKPAAELVKLNPMSEYAPGLEDTLILTMKGIAA

SEQ ID NO: 18887 - protein, 623 aa, Amaranthus hypochondriacus
MLVLCSRSRLTSSLIRRLKDQIANVSNHRSFATSEGHRLAIVNKRSLDILQDPWFNKGTAFSMTERDRLDLRGLLPPNVMTTEQQIERFTADLRVLELTTKDGPSDTYDLAKWRILNRLHDRNETMFFKVLIENIEEYAPIVSTPTVGLVCQKFSGLYRRPRGMYFSSDDRGEMMSMVYNWPAEQVDMIVVTDGSRILGLGDLGVHGIGVAIGKLDLYVAAAGINPQRVLPVMIDVGTNNEDLLKNPLYLGLQKKRLDGEEYLAVMDEFMEAVFTRWPNVIVQFEDIQNKWALTLLQRYRHKYRTFNVDVQGTSGVAIAGLLGAVRAQGRPMIDFPKQKIVVAGAGSSGVGVLNAARKTMARMLGNDESAFDRARSQFWVVDDKGLITEKRANLDPEVQPFAWKENEISLQGLNEGAKLVEVVRQVKPDVLLGLSAYGGLFSKEVLEALKDSTSTRPAIFAMSNPTKNAECTPEEAFSIVGDHVVYASGSPFKDVDLGNGKIGHVNQGNNMYLFPGIGLGVLLSGSRIISDSMFQAAAERLAGYMTDEEVINGVIYPSISRIRDITKEVAAAVIKEAVEEDLAEGYRDMDARELQKLNEEQILEYIEKNMWNPEYPTLVYKKR

SEQ ID NO: 18888 - protein, 312 aa, Wolbachia sp.
LCDKKIQLGINLTKGLGAGALPDVGKGAAEESIDEIMEHIKDSHMLFITAGMGGGTGTGAAPVIANAAREARAVVKDKGAIEKNILTVGVVTKPFGFEGVRRMRIAVLGLEELQKYVDTLIVIPNQNLFRIANEKTTFADAFQLADNVLHIGIRGVTDLMIMPGLINLDFADIETVMSEMGKAMIGTGEAEGEDGAISAAEAAISNPLLDNVSMKGARGILINITGGGDMTLFEVDSEEVDENANIIFGATFDQAMEGRVRVSVLATGIDSCNNKPEASSINQNKIPAEEKNFKWPYNQIPISETKEYASTE

SEQ ID NO: 18889 - protein, 108 aa, Triticum aestivum
  misc_feature (25)..(25): Xaa can be any naturally occurring amino acid
  misc_feature (36)..(36): Xaa can be any naturally occurring amino acid
  misc_feature (64)..(64): Xaa can be any naturally occurring amino acid
VVDGSFVSSLSSDNSVEESSFQQLXDAVSQVDVKTXLCIRDGLYRLARNAQNKPEPGCKDNKVXGNSGQFVDPRTIETQTNPIDRSIALLLFHQPSDQVAGAVDNPRH

SEQ ID NO: 18890 - protein, 364 aa, Vanilla pompona
SDSGKDAGRLSAAWQLYKAQEDLIKVAKKYGVKLTMFHGRGGTVGRGGGPTHLAILSQPPDTIHGSLRVTVQGEVIKQSFGEEHLCFRTLQRFTAATLEHGMHPPISPKPEWRTLLDEMAVVATNEYRSIVFQEPRFVEYFRLATPELEYGRMNIGSRPSKRKPSGGIESLRAIPWIFAWTQTRFHLPVWLGFGTAFKHVVQKDIKNLRILQEMYNEWPFFRVTIDLVEMVFAKGNPGIASLYDKLLVSEDLWSFAERLRANYQETKDLLLQVAGHKDLLEGDPYLKQRLRLRDSYITTLNVCQAYTLKRIRDPNFHVKVRPHISKEISDASKPAAELVKLNPTSEYAPGLEDTLILTMKGIAA

SEQ ID NO: 18891 - protein, 476 aa, Bacillus cereus G9241
MQNKIIMMFQKDFRLYDNPALFEAAQSGEVVPVYVQDETFSIGSAAKWWLHHAIIDVQKQLKALGATFIIRKGKTQEEILSLIEQLDITAVYWNICYEPDRLQSNQKMKMMLEDKGIICKEFNSHLLLEPWIIKKKDNTEYKVFTPFYNAFQKQAIPKPTSKVQSIKWGSSLPASLSVSELHLLPTIPWTSHMESIWNPTEEGAYKTFKKFFSSKLTFYSEGRDFPNQNVHSMLAPYLSFGQISVKLMFHYLINKSTERQSSLFEKQVNSFIRQLIWREFSYYLLYHYPFTVYKPLNKNFEHFPWDKEEELLRVWQKGETGYPFIDAGMRELWQTGFMHNRARMAVASFLVKHLLIPWQEGAKWFMDTLLDADIANNTMGWQWVAGSGADASPYFRIFNPITQGEKFDKDGEYIRKWVPELRDIPNKYIHKPWEAPEPILQKANIQLGDTYPLPVVDHKAARERALCAYKSMKEFI

SEQ ID NO: 18892 - protein, 364 aa, Raphanus raphanistrum subsp. raphanistrum
SSNKTLVSPGGVFEFGFFKLASSSCWYLGIWYKNIPERSYVWVANMRQPSPQFHWNSQNLQALTSVLLDQSKNTVWSTNLTRRCVKSPVVAELFDNGNFVMRYSNNSDPSGYLWQSFDFPTDTLLPQMKLGFDLKTGPHRFLRSWRSPDDPASGNYTYKLETRGLSRVFSTSEDFLLYRTGPWNGIGLTAYRRCHGVDNILTENKEEIRYTFRMTNHSIYSKFIITHSGFFQLLTWTPKVQLWNVLWSIPNDQCDLYVLCGPYGYCDTKTSMCNCIKGFKPKGSQAWALGDMSQGCVRKTSLSCGGDGFIRLTKMKLPDTTYAIVDKLVGIKECKKRCLKDCNSYAFANADIRKGGSGMCDVDP

SEQ ID NO: 18893 - protein, 741 aa, Pyrus pyrifolia
MLACNCIEPQWPADELLMKYQYISDFFIALAYFSIPLELIYFVKKSAVFPYRWVLVQFGAFIVLCGATHLINLWTFNMHSRTVAIVMTTAKVLTAVVSCATALMLVHIIPDLLSVKTRELFLKNKAAELDREMGLIRTQEETGRHVRMLTHEIRSTLDRHTILKTTLVELGRTLALEECALWMPTRTGLELQLSYTLHQQNPVGYTVPIHLPVVNQVFSSNCAVKISPNSPVARLRQLAGKHIPGEVVAVRVPLLHLSNFQINDWPELSTKRYALMVLMLPSDSARQWHVHELELVEVVADQVAVALSHAAILEESMRARDLLMEQNIALDLASREAETAIRARNDFLAVMNHEMRTPMHAIIALSSLLQETDLTPEQRLMVETILKSSNLLATLINDVLDLSRLEDGSLQLDIATFNLHSIFREVHDLIKPVASVRKLSVALNIAADLPVCAIGDEKRLMQIILNVVGNAVKFSKEGSISITAYVAKSESLRDFRAPDFFPVQSDNHFYLRVQVKDSGSGINPQDIPNLFTKFTQTQTLASQNSGGSGLGLAICKRFVNLMEGHIWIESEGLGKGCTATFIVKLGFPERSNESKQPFAPKLQANHVQTNFPGLKVLVMDDNGVSRSVTKGLLVHLGCDVTTVSSIDEFLHVISQEHKVVFMDVCMPGIDGYELAVRIHERFTKRHERPVLVALTGSIDKMTKENCMRVGMDGVILKPVSVDKMRSVLSELLEHRVLFEAM

SEQ ID NO: 18894 - protein, 290 aa, marine gamma proteobacterium HTCC2207
MSILINRDTKVICQGFTGGQGTFHSEQALEYGTKMVGGVTPGKGGTTHLGLPVFNTVAEAVETTGAEASVIYVPAAFCKDSILEAANAGLKLVVCITEGIPTQDMLDCKVVCDTLGVRLIGPNCPGVITPGECKIGIMPGHIHLPGKVGIVSRSGTLTYEAVKQTTDYGYGQSTCVGIGGDPIPGSSFIDILALFEKDPATEAIVMIGEIGGTAEEEAAAYIKANVTKPVVSYIAGVTAPAGKRMGHAGAIVSGGKGTADEKFAALEDAGVKTVRSLADIGAGLKEITGW

SEQ ID NO: 18895 - protein, 371 aa, Sinapis arvensis
SSNKTLVSPGNDFELGFFRTTPSSRWYLGIWYKKLSERTYVWVANRDNPLFNSIGTLKISGNNLVLLGQSNKSVWSTNLTRGNERSPVVAELLANGNFVMRDSNNNSASGILVAKFRLPYRYLLPEMKLGYDLRTGLNRFLTSWRSSDDPSSGNYSYKLQNRRLPEFYLSSGVFRLHRSGPWNGIRFSGIPEDEKLRYMVYNFTENSEEVAYTFRMTNNSIYSRLTISSEGIFQRLTWNPSLEMWNLFWSSSSGPPCPIGFIMLGPYSYCGPLNTSPICNCIRGFNPSNMEQWDQRSWSGGCIRRTRLRCSGDGFTRMKNMKLPETTMAIVDRSIGVKECEKRCLSDCNCTAFANADIPERWVGMCDVDRR

SEQ ID NO: 18896 - protein, 363 aa, Vanilla phalaenopsis
SDSGKDAGRLSAAWQLYKTQEELVQVAKQFGVKLTMFHGRGGTVGRGGGPTHLGILSQPPDTILGSLRVTVQGEVIEQCFGEERLCFRTLQRFTVATLEHGMHHHISPKPEWRSLMDEMAVIATKEYRSIVFQEPRFVEYFRLATPELEYGRMNIGSRPAKRKPSGGIESLRAIPWIFAWTQTRFHLPVWLGFGAAFKHVITKDIRNLHILREMYNGWPFFRVTIDLIEMVFTKGNPGIASLYDELLVSNDLLSFGMELKANYEETKRLLLQVAGHKDLLEGDPHLKQRLRLRDPYITTLNVCQAYTLKRIREPSYHAMAPHHVSNETESRKSAAELVKLNPTSEYAPGLEDTLIITMKGIAA

SEQ ID NO: 18897 - protein, 166 aa, Hordeum vulgare
MVAGCVITEQCALAVSTERLWKVVFSGEDTAALPKACAGFIDVVDVEGDGGPGSVFTMTLSPAAAELSGSGVMRSRVMARDNAARVFKTEILEGGKVSGQLKSQVVEMKLEAAGDGACVAKLRVEYERLDGGGALSAEDQAALAAGYLDQLKMVEAYLVAHPAEYV

SEQ ID NO: 18898 - protein, 363 aa, Hirschfeldia incana
SSNKTLVSPGDVFELGFFKTTSSSRWYLGIWYKKVDFRTYVWVANRDNPLSSSIGTLKMSNMNLVLLDHSNKSVWSTSLTRGNERSPVVAELLANGNFVMRDSNNKDASGFLWQSFDFPTDTLLPEMKLGYDLKKGRNRFLTSWRNSDDPSSGEISYQLDTQTGMPEFYLLQSGVRVHRSGPWNGVRFSGMPGDQELNYMVYNFTENNEDVAYTFRMTNNSIYSILKTSSEGFLERLTWTPNSIAWNLFWSSPLENCDMYLICGPYSYCDVNTSPLCNCIQGFKPWNMQQWDLRDASVGVKRSTRLSCSGDGFTRMKNMKLPETKMAIVDRSIGVKECEKRCLMDCNCTAFANADIRNGGSGG

SEQ ID NO: 18899 - protein, 578 aa, Burkholderia mallei ATCC 23344
MKASRFFIGTLKEAPADAEIVSHKLMVRAGMIRRVAGGIYNYLPVGLRSIRKVEAIVREEMNRAGAIELLMPAVQPAELWQESGRWEQYGPELLRFKDRKQNEFVIGPTHEEVVTDIARNQIKSYRQMPVNFYQIQTKFRDEIRPRFGVMRGREFIMKDAYSFDKDHESLKESYKKMYDAYVRIFTRIGFEFRPVAADNGSIGGSGSHEFHVIADTGEDAIAYCPTSDFAANVEAAEALPLLASRAAPAEAMQKVATPGKAKCEAVAELMGIPLERTIKSIVLATDNEGAEPTIWLLMLRGDHDLNEIKTAKLPGLAGHRFATEAEIVEWFGTPPGYLGPIGTKKPVRVVADRTVANMSDFVVGANEVDYHIAGVNWGRDLPEPVVADIRNVKAGDPSPDGKGALDICRGIEVGHVFQLGTKYSDAMGATFIDESGKAQPMVMGCYGIGITRILGAAIEQNFDDKGIVWPEAIAPFEVVLCPMGYDRSDAVREAADKLYADLAAAGIDVILDDRGERPGVMFADWELIGVPHRLVIGERGLKDGKIEYQGRRDAEATLLPADSAAAAVAEKVRAALAR

SEQ ID NO: 18900 - protein, 399 aa, marine gamma proteobacterium HTCC2207
MATEIKAPTFPESVQEGSLATWHKQVGETVKRDELLVDIETDKVVLEVVAPAAGVLAEIFKAEGDIVLSNEVIARIEEGAEASAPTAAAAAEAVAEAPEATASGGLINPAARKLAEERNIDVAQIVGTGKGGRITKEDVVNYKAPAAAQAVAAPAAVAEEVLETGDRVERRVPMTRMRSRIAERLLEVTQTTASLTTFNEVDMTALMDLRKQYKEEFTKIHNGTRLGFMGFFVKAAVEALKRFPSVNASIDGSDIVYHGYQDVGVAVSTDRGLVVPVLRNAENMSIANIENGIYDYAMKARDGKLTIDEMTGGTFTITNGGVYGSLISTPIINPPQSAILGMHKIQERPVAVNGQVVIRPMMYLAMSYDHRLIDGKGAVQFLVTMKELLEDPAKILLEI

SEQ ID NO: 18901 - protein, 971 aa, Candida glabrata CBS 138
MTAEALVNGTSYTTLVAHSQESFKNAVEFYKNFLSLMKLNDKNANEATLYNSSVCLKIVLEEDSSKNQAAMHRVTKLSEMSKKQDWRAQVKDSLVFNIVDIQSIQKSLIANNFPIQAYPTTLQPMQLFTIDPLGNVVGVTCTKNAASTRPTKPQADVTTVPPSALASNVPSALPSKVQSFTDLSYCMKTTDHYPSLPTKATRVTPESKKAIAVMTSGGDAPGMNSNVRAIVRSALFKGCRAFVVMEGYEGLVRGGPEYIKEFSWEDVRGWSTQGGTNIGTARCMEFRERKGRLLGAQHLIEAGVDALIVCGGDGSLTGADLFRSEWPSLIDELLKENRIDNDQYERYKHLNICGTVGSIDNDMSTTDATIGAYSALDRICTAIDYVEATANSHSRAFVVEVMGRNCGWLALLAGIATSADYIFIPEKPATSSEWQDQMCDIVAKHRSRGKRTTIVIVAEGAIANDLTPISPSDVHKVLCDRLGLDTRITTLGHVQRGGTAVAYDRILATLQGIEAVNAVLESKPDTQSPLIAINENKITRKPLVESVKLTKSVADAIQAKDFKKAMSLRDTEFIEHMKNFMAINSADHNEPKLSEDKRLKIAIVNVGAPAGGINSAVYSMATYCMSQGHKPYAIYNGFSGLARHESVRSLKWQDMLGWQSRGGSEIGTNRVTPEEADLGMVAYYFQKYQFDGLILVGGFEAFESLHQLERARETYPAFRIPMVLIPATLSNNVPGTEYSLGSDTALNALMEYCDIVKQSASSTRGRAFVVDVQGGNSGYLATYAALAVGAQVSYVPEEGISLEQLSQDIEYLAEAFEVAQGREGFGKLILKSTNASKALTAEKLAEVITAEANGRFDAKAAYPGHVQQGGLPSPIDRTRATRFAIRAVDFIEEQQSVIANARAANDVFVADDKDVESTATVLGVKGSQIVFSSIRQLYDFETEVGKRMPKVIHWQNARAIADHLVGRKRVD

SEQ ID NO: 18902 - protein, 367 aa, Hirschfeldia incana
SSNKTLVSPGNVFELGFFRTTSSSRWYLGIWYKKLSNRTYVWVANRDNPLSNSIGTLKISNMNLVLLDHSNKSVWSTNLPRGNERYPVVAELLANGNFVMRYSDNNDASGFLWQSFDFPTDTLLPEMKLGYDLKTGLNRFLTAWRNLDDPSSGDYSYKLENRELPEFYLSKNGFQVHRSGPWNGVQFSGIPENQKLSYMVYNFTENSEEVAYTFRMTNNSIYSRLKVSSDGYLQRLTLIPESIIWNLFWSSPVDIRCDLYKTCGPYSYCDGNTSPLCNCIQGFDPWNMEQWDQRVSAGGCIRRTPLSCSGDGFTRMKNMKLPDTTMATVDRSIDVKECEKRCLSDCNCTAFANADIRSGGSGCVSGP

SEQ ID NO: 18903 - protein, 179 aa, Triticum aestivum
  misc_feature (100)..(100): Xaa can be any naturally occurring amino acid
  misc_feature (106)..(106): Xaa can be any naturally occurring amino acid
  misc_feature (132)..(132): Xaa can be any naturally occurring amino acid
  misc_feature (144)..(144): Xaa can be any naturally occurring amino acid
  misc_feature (170)..(171): Xaa can be any naturally occurring amino acid
  misc_feature (175)..(175): Xaa can be any naturally occurring amino acid
MAPTVMASSATSVAPFQGLKSTAGLPVSRRSNGASLGSVSNGGRIRCMQVWPIEGIKKFETLSYLPPLSTEALLKQVDYLIRSKWVPCLEFSKVGFIFRXSTNASXPGYYDGRYWTMWKLPMFGVQPDATQXVINEVEEVKEGXPDAYVRIIGFDNMRQVQWVSFNCLKXXGCEXSGKG

SEQ ID NO: 18904 - protein, 314 aa, Pyrus pyrifolia
MATFPVVDMSLVNGEERAATLEKINDACENWGFFELVNHGISTELLDTVEKMNKDHYKKTMEQRFKEMVVAKGLDAVQSQIHDLDWESTFFLRHLPSSNISEIPDLEEDYRKTMKEFAVELEKLAETLLDLLCENLGLEKGYLKKAFYGSKGPNFGTKVSNYPPCPKPDLIKGLRAHTDAGGIILLFQDDKVSGLQLLKDGEWVDVPPMHHSIVINLGDQIEVITNGKYKSIMHRVIAQSDGTRMSIASFYNPGDDAFISPAPALLEKKSEETPTYPKFLFDDYMKLYSGLKFQAKEPRFEAMKARETSSVATA

SEQ ID NO: 18905 - protein, 660 aa, Thermosynechococcus elongatus BP-1
MCGLTGFWQPCGCPTDEVSATIQRMADTLVHRGPDDVGVWVDTEVGIALGHRRLAILDLSPAGHQPMVSATGRYVIAFNGEIYNHLELREELSKVGAGGTAPVWRGHSDTETLLAAFAALGIEKTLKRVVGMFAIALWDRETRTLTLARDRMGEKPLYYGWVRDALVFGSELKALRAYPGFDNAIERRSLALFMRYDYIPAPWSIYENIWKLPPGCFVQFRAASHGGEPLAVGSRGNIKPYWSVRDVAERGLANPFTGREADAVEELERLLRQSIAGQMMADVPLGAFLSGGIDSSTVVALMQAQSSRAVKTFTIGFHEQDYNEAKHAKAVACHLRTNHTELYVTPQEAMAVIPKLPSLYDEPFADSSQIPTFLLAQLARQQVTVSLSGDGGDELFGGYTRYFLTHSLWQRLAWIPLPMRKLAEQGVLAISPQTWNRVFALLAPVLPERLRFRLPGDKLHKAAALFVTRRPEDIYLRFVSHWHDPTSLVIGTEEPRTALTEPATVLEGADFEARMMYLDSITYLPDDILVKVDRAAMGVSLETRVPLLDHRIVEFAWQLPHYFKIRRGQSKWLLRQVLYRYVPKELIERPKMGFGIPLDQWLRGPLREWAEDLLSEERLKREAFLNPELVRQKWQEHLLGRRNWAYHLWNVLMWEAWLAA

SEQ ID NO: 18906 - protein, 392 aa, Pseudomonas putida KT2440
MLNAEQRAIIKATVPLLESGGEALTTHFYKMMLSEYPEVRPLFNQAHQASGDQPRALANGVLMYARHIDQLEQLGGLVGQIINKHVALQILPEHYPIVGSCLLRAIEEVLGKDIATPAVIDAWGAAYGQLADILIGAEENLYKEKEEAEGGWRGTREFRLVRREQESSEIVSFYFAPVDGMPVLKAEPGQYIGLKLDIDGAEQRRNYSLSALCDGKEYRISVKREAGGKVSNYLHDELKVGDTLQLFPPAGDFTLAASDKPLVLISGGVGITPTLAMLQAALQTRREVHFIHCARNGAVHAFRDWIDGLAARHPQLKRFYCYAEPEGGAAADAVGLLSEDLLAEWLPQERDVDAYFLGPKGFMAAVKRQLKGLGVPEQQSRYEFFGPAAALE

SEQ ID NO: 18907 - protein, 363 aa, Hirschfeldia incana
SSNKTLVSPGGVFEFGFFKIASSSRWYLGIWYKNIPKRSYVWVANRDNPLCSSTGTFKITGTNLVLLDQSKNTVWSTNLTRRCVKSPVVAELFDNGNFVMRYSDNNDPSGYLWQSFDFPTDTLLPEMKLGFDLKTGSHRFLRSWKSPDDPASGDYTYKLETRGRPECFLRSKDFLLYRTGPWNGFRFSGVPEMPQLLVNIFTENKEEITYTFRMTNHSTYSKLIVTPSGFFQLLTWTPKVQLWIVLWSVPKDQCDLYMLCGPYGYCDAKTSMCNCIKGFKPKASQAWASGDMSQGCVRRTRLTCGGDGFIRLTKMKLPDTMYATVDKLVGIKECKMRCLNNCKCTAFANADIQNGGSGCVMWT

SEQ ID NO: 18908 - protein, 292 aa, Candidatus Protochlamydia amoebophila UWE25
MIIDGKRIAEEIQLEIKELIQQSLCRPPCLAVLIVGSHPASQIYVNRKTAACKAVGIASIKCELPFTISEEELIREVEKLNVDPQIDGILVQLPLPPHINSNRVNYHIDPQKDVDGFHPLNVGKMLIGELDGFLPCTPFGIKTLLERTGIEVCGKHALIIGRSNIVGKPMAALLMQSYPGGNATVTVAHRYTKNLKELCLQADLIIVAIGQPKLITADMVKEGVIIVDVGINKIHDSSKKNGYQIVGDVDFVNVAPKCAFITPVPGGVGPMTIAMLLYNTLLSYSKSQNLNL

SEQ ID NO: 18909 - protein, 284 aa, Triticum aestivum
APPAMSCGRSENTTRKCRTRSTPGETMYLHTADAKKITHYQANLPTTMDRDIGAYPVKHHFPSPIVSWIEDLSSFGDVPFSHDTEYVDDQSTPSFGQSFASSNLHDMQISVRLTDEFMELAKENTSNNLEACGILGASFRDGTYYVTTLIIPKQEGTAHSCQASNEEEIHAVLSEQSLYPAGWIHTHPSQTCFLSSIDLHTQFSYQVMLPEAVAIVAAPTDPTRSYGIFRLTDPGGMDVLRECSESGFHTHRETTDGGPIYETCTNVHFKPNLRFEIVDLRSGA

SEQ ID NO: 18910 - protein, 548 aa, Neisseria meningitidis Z2491
MKHLHDLPAWSKLWNHFDDSKTLHMREMFEQDPQRAERYWLQVGGLTLDYSKNRINDETMSLLFELAHEAGVPERMRQMFHGKKINTTENRAVLHVALRNRTNSPIVVDGEDVMPKVNRVLQRMGEFAHEVRSGSWLGYTNQVITDVVNIGIGGSDLGPLMMCTALKPFGHPRLNMHFVSNVDGSQLRDVLSKVHPETTLFIIASKTFTTQETLTNALTAREWFLNHAGDEEAVAKHFAAVSTNQKAVAEFGIDTANMFEFWDWVGGRYSLWSAIGLPIMLYLGEENFIEMLNGAHLMDQHFINTPLERNLPVILALIGIWYINYYGGGSHVIAPYDQHLHRLPKFIQQLDMESNGKQVTLDGKAVGHETSPIIWGETGINGQHAFFQLLHQGTHITPIDLIASLEKRSNLPGHHEILLANVFAQAEAFMRGKTPDEVRAELKAQGMDEARIEELVPHKTFSGNRPTNLILMDKVNPRNMGSLIAMYEHKTFVQGIIWGINSFDQWGVELGKQLAKTILGELTGETGSQKHDSSTERLINLYLQTNRK

SEQ ID NO: 18911 - protein, 257 aa, Mesorhizobium loti MAFF303099
MAYETIITETRGKVGLVTLNRPKALNALNLQLLAELVAAVKDFDADAGIGAVVITGSDKAFAAGADIKEMQAISFADAYLQDLFVGWEDLTRVRKPVIAAVAGYALGGGCELAMMCDFIIAADTAKFGQPEITLGVIPGMGGSQRLTRFVGKSKAMDMCLTGRMMDAAEAERSGLVSRVVPAAELVEEAVKAAAKIADFSLPSVMMAKEAVNRSYETTLTEGLRFERRLFHSLFALEDQKEGMAAFAEKRKPNFANR

SEQ ID NO: 18912 - protein, 440 aa, Bordetella parapertussis
MGLLEGICRYRGAILKREVYRARAARRRAGRDRAKGAKIAAFQPGRARFMSAQISSLNAGAAPESFGIASVPEIIAELRAGRIVILVDEEDRENEGDLVMAAEFVTPEAINFMVTHGRGLVCLTLTEERCRQLDLPLMASRNGTRYGTNFTQSIEAAEGVETGISAADRARTIQVAVARDAQPSDLVQPGHIFPVRAVPGGVLVRAGHTEAGCDLTAMGGLTPAAVICEILKPDGTMARLPDLVEFAREHKLKIGTIADLIQYRSEHESIIARMGERMMQTPWGDFRCIAYRDDATRSPHLALVHGNIDPERETLVRVHEPASLLDVLDTGASPHSWSVGQALHAIAASPAGVLVLMNCQSSTEHLFGQIANWAGPAERAAAQEGDRFGLRTYGIGAQILRDLNVGRMKLLARPRKMPSMAGFALTITGYDCAPPNLRND

SEQ ID NO: 18913 - protein, 231 aa, Wolbachia sp.
  misc_feature (166)..(166): Xaa can be any naturally occurring amino acid
AVNNMIQSNLQGVNFVVANTDAQALEKSLCDKKIQLGINLTKGLGAGALPDVGKGAAEESIDEIMEHIKDSHMLFITAGMGGGTGTGAAPVIAKAAREARAVVKDKGAKEKKILTVGVVTKPFGFEGVRRMRIAELGLEELQKYVDTLIVIPNQNLFRIANEKTTXVDAFQLADNVLHIGIRGVTDLMIMPGLINLDFADIETVMSEMGKAMIGTGEAEGEDRAISAAEAA

SEQ ID NO: 18914 - protein, 168 aa, Avena vaviloviana
VMASSATTVAPFQGLKSTAGLPVSRRSNAGLGSVSNGGRIRCMQVWPIEGIKKFETLSYLPPLSEEALLKQIDFLIRSKWVPCLEFSKVGFIFREHGSTPGYYDGRYWTMWKLPMFGCTDASQVIKEVEEVKKEYPDAYVRIIGFDNIRQVQCVSFIAFKPPGCEESG

SEQ ID NO: 18915 - protein, 967 aa, Lupinus luteus
MANRNLEKMASIDAQLRQLVPAKVSEDDKLVEYDALLLDRFLDILQDLHGEDLRETVQEVYELSAEYEEKHEPEKLEKLGNIITSLDAGDSIVFAKAFSHMLNLANLAEEVQIAHRRRNKLKKGDFADENNATTESDIEETFKRLVGELKKSPQQVFDALKNQTVDLVLTAHPTQSIRRSLLQKHGRIRNNLTQLYAKDITPDDKQELDEALQREIQAAFRTDEIRRTPPTPQDEMRAGMSYFHETIWKGVPQFLRRVDTALKNIGINERVPYNAPLIQFSSWMGGDRDGNPRVTPEVTRDVCLLARMMASNLYYSMIDDLMFELSMWRCNDELRVRADEISRSSKKDAVAKHYIEFWKIIPSSEPYRVVLGEVRDRLYRTRERSRHLLSQGSSDIPEEETFTNVEEFLEPLELCYRSLCVCGDRAIADGTLLDFLRQVSTFGLSLVRLDIRQESDRHTDVLNAITQHLGIGSYQEWSEEKRQQWLLSELSGKRPLFGHDLPQTEEIKDVLDTLHVIAELPPDNFGAYIISMATAPSDVLAVELLQRECRIKHPLRVVPLFEKLADLESAPAALARLFSIDWYRNRINGKQEVMIGYSDSGKDAGRFSAAWQLYKAQEELIEVAKKFGVKLTMFHGRGGTVGRGGGPTHLAILSQPPETIHGSLRVTVQGEVIEQSFGEQHLCFRTLQRYTAATLEHGMHPPISPKPEWRALMDQMAVIATEEYRSIVFQEPRFVEYFRLATPELEYGRMNIGSRPAKRRPTGGIETLRAIPWIFAWTQTRFHLPVWLGFGAAFRQVITKDVRNLNMLQEMYNQWPFFRVTIDLVEMVFAKGDPGIAALYDRLLVSEDLWSFGEQLRTKFEETKKLLLQVAAHKDLLEGDPYLKQRLRLRDSYITTLNVCQAYTLKRIRDPNYDVKLRPHISKECIEISKAADELVTLNPTSEYAPGLEDTLILTMKGIAAGLQNTG

SEQ ID NO: 18916 - protein, 480 aa, Crocosphaera watsonii WH 8501
MSATTVKNLVNQPYKYGFVTDIETETIPRGLSEDVIRLISAKKNEPEFMLEFRLKAYKQWLKMTEPTWPHVHYPKIDYQNIIYYSAPKQKKEKLKSLDDVDPTLIETFEKLGIPLSEQKRLSNVAVDAIFDSVSVATTFKEKLAEDGVIFCSISEALEEHPELVRKYLGSVVPVADNFFAALNSAVFSDGSFIFIPKGVKCPMELSTYFRINTGDTGQFERTLIVAEEGASVSYLEGCTAPMYDSNQLHAAVVELVALDNADIKYSTVQNWYAGDEKGKGGIYNFVTKRGLCKGVNSKISWTQVETGSAITWKYPSCVLAGDNSVGEFYSIALTNNMQQADTGTKMIHLGKNTRSTIISKGISAGNSKNSYRGLVQMGPRAKGARNYSQCDSMLIGDNAEANTFPYIQVDNNTAKVEHEASTSKIGEDQLFYFAQRGISEEDAVSMLVSGFCKDVLSELPMEFASEADKLLSLKLEGTVG

SEQ ID NO: 18917 - protein, 367 aa, Bordetella pertussis Tohama I
MRGVFVFLRLFKYLWPERYLPETPAQDPFDENPPPCGPGRVGVLLVNLGTPDEPTRGAIRRYLGEFLSDPRVIEIPRYLWMPILHGLVLTMRPKKLAPRYAGIWMEEGSPLLVYSQRQAAGVRQGLAARGVHAEVELAMRYGKPSIPAAITALRERGCDHILAVPLYPQYAASTTATVVDAVTRHAGRLRDQPALRFVKRFHNDPAYVEAQAGRIAEFWQAHGRPQKLVMSFHGLPRYSIELGDPYYRDCLDTARLLRERLGLREDEVEVTFQSRFGSARWLEPYTEPTLAELARQGVTEVDVVCPGFVADCLETLEEISQECRDAFVAAGGRQFRYIPALNDCPPWIEGLTDLVERQLRGWPTGNP

SEQ ID NO: 18918 - protein, 526 aa, Arabidopsis thaliana
MTTISDLPEDVVEEILPRVPLTSLSAVRSICKTWNTLSKNRVLCKAAVKKQFLGFIMMDYRVCSMKFHLRNDEGGDLVDDLSIKQVGILDQIEISEVLHCDGLLLFVTKDNSSLVVWNPYLGQTRLIQPSNNFHCSDRYAIGYDNNRNLKILRNLVIMEALGNTYILAQGKIRVDSRWKIEAILLSFDFTTERFGPRLQLPFGFYYPQDLFSLSCVREEQLVVLHQSWMVSGELEIWITNKIDPGVVSWTKFLRSISCCRISIQAGSFFINEENQVAVVFDLDEYKGSETCRNQTAYIIGQDEYFKSVNIGEAPNLGRPEKYAPHIYCRPLGNTYILAQGKIRVDSRWKIEAILLSFDFTTERFGPRLQLPFGFYYPQDLFSLSCVREEQLVVLHQSWMVSGELEIWITNKIDPGVVSWTKFLRSISCCRISIQAGSFFINEENQVAVVFDLDEYKGSETCRNQTAYIIGQDEYFKSVNIGEAPNLGRPEKYAPHIYCRPLVCSSYVPSLVPLQINQPDTRKESDD

SEQ ID NO: 18919 - protein, 476 aa, Haloarcula marismortui ATCC 43049
MAEQPVDVDPAGENIAGEAPAEEPEAVTDDTVVHDDDVELERTIGLVGGLAIGIGTMIGAGIFVFPGLAAANAGLAATLSFAIGGLIALLVALPTSELATAMPRSGGGYYFISRGMGTAYGAIVGLGLWLGLMFASAFYLVGLGHYASAVFAELGIGLPFSPVIGIGLLFGVALTALSIGGTENTAKLQNVVVGVLLVVLTGFLSYGVLDAVGVFGGGTVPEQFFSRGYFRVLTTAALVFTSYLGFAQVATVAGEIKQPSRNLPLAMVGSVLIVTVFYVVTIFVATSAFGAERLGEFGETAMVEVARDFLGLPGAVAILGAGLLATFSSANASILSASRAVYALSRDALLPRKASEVNLRYGTPHVALLSAGGPILVLVATGRVELLAEVASFLHLIMYGLMCIALLVLRRRNPEWYSPSYRVPGYPLVPVVGALASFGLIVFMQPASIGIGVVVMLASYLWYRYYAGDVTLKGDI

SEQ ID NO: 18920 - protein, 310 aa, Nitratifractor salsuginis
EDAAKWIDEKQSHDVTLLSGQHGRLTHFIVEPFTPPTQDQEYYIAATTVGEDDVLYMSAEGGMEVEEGWEEKVHEVRIPINMPEADIEKAIRANVPEDIPAESHEAFATFAIQFFKFFRDMHFAYLEINPLVLIGTDAHILDLVARLDDTAGFMMKEKWGDIEFPTAFGMEEQSPEEKAIAEADSKSGASLKLTVLNPQGRIWTMVAGGGASVVYADTIADLAGVKDLANYGEYSGGPTTGETEFYAETIFDLMTRYPDPRGKILIIGGAIANFTDVAKTFTGIINALEKWAPKLKEHNTKIYVSSGGPN

SEQ ID NO: 18921 - protein, 649 aa, Corynebacterium diphtheriae
MAHSVVMPELGESVTEGTITQWLKSVGDAVTADEPLLEVSTDKVDTEVPSPVSGVLLEIKFEEDDTVDVGDVIAIIGEEGDAPAAKEEPAEEPKAEAPKAEAADSTDVVMPELGESVTEGTITQWLKSVGDTVDVDEPLLEVSTDKVDTEVPSPVAGTILEILFNEDDTVDVGDVIVRVGTPGSAPAAKEEPAKEPKAETPKEEPKAEAPKAEAADSTDVVMPELGESVTEGTITQWLKSVGDTVDVDEPLLEVSTDKVDTEVPSPVAGTILEILFNEDDTVDVGDVIVRVGTPGSAPAAKEEPAKEPKAETPKEEPKAEAPKAEPKKEAPAKTINNENVPYVTPLVRKLADKHGVDLTTVEGTGIGGRIRKQDVLAAAGVGAAPAAQVAPAQPVSAASTKSVDPEKQKLIGTTQKVNRIREITARKTVEALQISAQLTQLHEVDMTKVAELRKANKPAFQEKHGVNLTYLPFFAKAIVEALVAHPNVNASYNAETKEMTYHADVNLSIAVDTPAGLLTPVIHKAQELSLPELAKAIVDLADRARNNKLKPNDLSGGTFTITNIGSEGALSDTPILVPPQAGILGTGAIVKRPVVITEDGIDSIAIRQMVYLPLSYDHQIVDGADAGRFLTTIKDRLETANFEGDLELS

SEQ ID NO: 18922 - protein, 204 aa, Capsella rubella
MATIEESSDLEAMQKHLFEDFLVSDGFLGDFDFDASFVSGLWCIEPQVPKQEPDSPVLDPDSFVNEFLQVEAKSSPELNTSSSSTYETDQCVKKAERFEEEVETRHYRGVRRRPWGKFAAEIRDPAKKGSRIWLGTFESDVDAARAYDCAAFKLRGRKAVLNFPLDAGKYEAPANSGRKRKRSDAQEELQRTHSNSSSSSCDAF

SEQ ID NO: 18923 - protein, 480 aa, Solanum tuberosum
MIPIMSSAPLSTPAPVTLPVRTIPGSYGLPLLGPIADRLDYFWFQKPENFFTKRMEKHKSTVFRTNVPPCFPFVGSVNPNVVAVLDVKSFSHLFDMEIVEKANVLVGDFMPSEVYTGDMRVCAYLDTSEPKHAQIKNFSLDILKRSSKTWVPTLLKELDTMFTTFEADLSKSKEASLLPALQKFLFNFFSLTLLGADPSVSPEIANSGYIFLDSWLAIQLAPTVSIGVLQPLEEILVHSFAYPFFLVKGNYEKLVQFVKNEAKEVLNRAQTEFQLTEQEAIHNLLFILGFNAFGGFTIFLPTLLGNLGDEKNAEMQEKLRKEVRDKVGVNPENLSFESVKEMELVQSFVYETLRLTPPVPSQYARARKDFKLSSHDSVYEIKKGELLCGYRPLVMKDPKVLDEPEKFVLERFTKEKGKELLNYLFWSNGPQTGRPTESNKQCSAKEIVTLTASLIVAYIFQKYDSVSFSSGSLTSVKKAS

SEQ ID NO: 18924 - protein, 540 aa, Nostoc punctiforme PCC 73102
MSITSQPDRVIIFDTTLRDGEQSPGATLNVEEKLAIAHQLALLGVDVIEAGFAVASPGDFQAVKTIAEQVGIPGGPIICSLARAIRQDIHAAAEALKGAARPRIHTMISTSDIHLKYQLKKSRSEVLAIASEMVAYAKSFVDDVEFSPMDASRTEPEFLYEVLEAAIAAGATTINIPDTVGYCTPKEIGTLIQGIREHVPNIDGVILSIHTQNDLGLATANALAAIEYGVRQVECTINGIGERAGNAALEEIVMALQVRKPFFNPYFGRPVDADTPLTNIKTQEIYKTSSLVSQLTGMLIQPNKAIVGANAFAHESGIHQDGIIKHRQTYEIMEAAAIGLPENRIVLGKHSGRNAFRTRLKELGFELNEADLNKAFNRFKDVADKKKEISDWDLEAIVRDETQIQVESGFQIEHVQVICGDCTCPTATITIVTPDGKILTDASVGTGPVDAVYQAINRLVQIPNQLIEFSVQSVTGGIDALGTVTVRLKHQERIFSGQASDTDIVVAAAYAHINALNRLYRYLQTEKSEFHEINSAVVSG

SEQ ID NO: 18925 - protein, 546 aa, Cryptococcus neoformans var. neoformans B-3501A
MSDAQAPPASTSWADMVDEDEKQKQEQNMSNQNDGWGETATETSAPAPPPASAPVSSSNNDGWGEPAPSAPADNGWADAGASNGGSGANNNDGWFDAPVPPSSQPPKKEASDIQLQDDTEGLITNTFQVEVKLADLQGDPNSPLYSVQSFKELNLHEDLMKGIIAAGFQKPSKIQEKALPLLLSNPPRNLIGQSQSGTGKTAAFTLNMLSRVDPTIPTPQAICIAPSRELARQIQEVVDQIGQFTQVGTFLAIPGSWSRNSRIDKQILIGTPGTLVDMLMRGSRILDPRMIRVLVLDEADELIAQQGLGEQTFRIKQLLPPNVQNVLFSATFNDDVQEFADRFAPEANKIFLRKEDITVDAIRQLYLECDSEDQKYEALSALYDCLVIGQSIVFCKRKVTADHIAERLISEGHAVASLHGDKLSQERDAILDGFRNGETKVLITTNVIARGIDIPAVNMVVNYDVPDLGPGGNGPDIETYIHRIGRTGRFGRKGCSVIFTHDYRSKSDVERIMNTLGKPMKKIDARSTTDIEQLEKALKLAMKGPA

SEQ ID NO: 18926 - protein, 1171 aa, Staphylococcus aureus
MINRDNKKAITKKGMISNRLNKFSIRKYTVGTASILVGTTLIFGLGNQEAKAAENTSTENAKQDEASASDNKEVVSETENNSTQKNDLTNPIKKETNTDSHQEAKEAPTTSSTQQQQNNATTSTETKPQNIEKENVKPSTDKTATEDTSVILEEKKAPNNTNNDVTTKPSTSEIQTTPTTPQESTNIENSQPQPTPSKVDNQVTDTTNPKEPVNVSKEELKNNPEKLKELVRNDSNTDRSTKPVATAPTSVAPKRVNAKIRFAVAQPAAVASNNVNDLITVTKQMITEGIKDDGVIQAHDGEHIIYTSDFKIDNAVKAGDTMTVKYDKETIPSDITDDFTPVDITDPSGEVIAKGTFDLNTKTITYKFTDYVDRYENVNAKLELNSYIDKKEVPNETNLNLTFATADKETSKNVKVEYQKPIVKDESNIQSIFSHLDTTKHEVEQTIYVNPLKLNAKNTNVTIKSGGVADNGDYYTGDGSTIIDSNTEIKVYKVASGQQLPQSNKIYDYSQYEDVTNSVTINKNYGTNMANINFGDIDSAYIVKVVSKYTPGAEDDLAVQQGVRMTTTNKYNYSSYAGYTILFYQLLTLVVVTVSVKPEEKLYKIGDYVWEDVDKVGVQGTDSKEKPMANVLVTLTYPDGTTKSVRTDANGHYEFGGLKDGETYTVKFETPAGYLPTKENGTTDGEKDSNGSSVTVKINGKDDMSLDTGFYKEPKYNLGDYVWEDTNKDGIQDANEPGIKDVKVTLKDSTGKVIGTTTTDASGKYKFTDLDNGNYTVEFETPAGYTPTVKNTTAEDKDSNGLTTTGVIKDADNWTLDSGFYKTPKYSLGDYVWYDSNKDGKQDSTEKGIKDVTVTLQNEKGEVIGTTKTDENGKYHFDNLDSGKYKVIFEKPAGLTQTGTNTTEDDKDADGGEVDVTITDHDDFTLDNGYFEEDTSDSDSDSDSDSDSDSDSDSDSDSDSDSDSDSESDSDSDSDSDSDSDSDSDSDSDSESDSDSESDSDSDSDSDSDSDSDSDSDSDSDSDSDSDSDSDSDSDSDSDSDSDSDSDSDSDSDSDSDSDSDSDSDSDSDSDSDSDSDSDSDSDSDSDSDSDSDSDSDSDSDSDSDSDSDSDAGKHTPVKPMSATKDHHNKAKALPETGSENNGSNNATLFGGLFAALGSLLLFGRRKKQNK

SEQ ID NO: 18927 - protein, 115 aa, Triticum aestivum
MARGAATQLVLVAMVAAMLLVACDAAISCGQVTSALSPCISYARGNVANPPAACCSGVRSLAGAARSTADKQAACKCIKSAAGGLNAGKAAGIPSKCGVSVPYAISSSVDCSKIR

SEQ ID NO: 18928 - protein, 309 aa, Haloarcula marismortui ATCC 43049
MAKRPAERAGVADIDCTGMQVLVTGSTSGIGREAALSLGRLGADVIVHGRDADAGAAVVSELSGLGVDAAFVQADFAAVDEVRSLAATVRDETDGLDILVNNAGGLFRQGRLTDIGVEYTFHVNHLAPYLLTTELLDHLNAGARVVTTASSAHRGTSLDLDRVTTVDSYTGTWAYSHSKLANVLFATELARRLETTGRDVVSNCLHPGAIPGSGFSRFLPGPIPQFVKLFDAVPGITSVEDGAAEILHLAVSSRIGDVSGRYFAGQRPATPSHAARDRAAASRLWRRSADLLGIDVPLGDVQSSAPTEN

SEQ ID NO: 18929 - protein, 848 aa, Listonella anguillarum
MSLRSSTVKKKQKIATVITKSMIAVIGALTLSVLFQSYQISSKIIAQEVQRTASQTSSLIQNLFNFRLSLLQINQDSSAKNAGLVKAIRKGDNDSIDQFFFGVDQLEVANTPDIRFISDSDSLMWEDGNAQFYGIEQNELVNMSRKVALSNNWHMIKSPSQLGYAYLMVRRTPVIDSQSGEVIGFLHLATVLNNNYVLAETLREGSNSENLVMTTGEKVLASTINGDETYTERDVLEDNFDAYSFADYMVSRTALTIEGVPIYINVLSVQSNENVLQLRENYFFWMIFALFAMVIVSILTRWWLQQRVKNEISSLMNYTHKAAEAGSYELFSGSKIYEFDHFGRTLEHTFQRLSEQEKQFEDLFNFSLSPIIVWSIDGDIIKMNPSAKKYFMRRNDQQQCILDALKQELQPKIRLAVEQETFREINVEVGNKVFRWNLSPIIFEQRIESIITQGQDITTIAEAAKQSRLARQEAEESARIRAEFLAKMSHELRTPLNGILGVSQLLKREISDHEQLEQVNVLCSSGEHLLAVLNDILDFSKIEQGQFRIQESDFKLVEVISAVESIYRPLCAEKEIEFSLKSNIPPDMMIHSDQVRLNQILFNLLNNATKFTHHGLISIEFQQKNNHQLFISISDTGIGIREQDLALIFEPFTQVESNTTREYGGSGLGLAIVKSLIEMLGGAVNVKSQFGVGTTFSVELPLVVVSDCGKDIPSYERAPPHEMFEKPIKVLLVEDNHTNAFIAQAFCKKYGMEVTRVEDGLQAIDYVKDHPVDLILMDNQLPYLGGVETTHLIKHELMMDVPIYACTADGMQSTNEAFMAAGAEYVIVKPIKEKALHEAFCHFQKRQK

SEQ ID NO: 18930 - protein, 421 aa, Ricinus communis
MDRLKAPARLMIVSDLDHTMVDHHDPENMSLLRFNALWEAHYRHDSLLVFSTGRSPTLYKQLRKEKPMLTPDITIMSVGTEITYGNKMVPDDGWDEVLNQKWDRNIVTEETSKFPELTLQSETEQRPHKVSFYVDKTKAQIVTKVLSERFAKRGLDVKIIYSGGMDLDILPQGAGKGQALAYLHQKFKTEGNLPINTLVFGDSGNDAELFSIPDVHGVMVSNAQEELLQWYAENAKSNPKIIHATERCAAGIIQAIGHFNLGPNASPRDTIDFSNHELEIVTPGKAVVNFFLFLEKWRRGEVENCEMYMAGMKADCDSSGVLVHPSGVELSLHDAINRIRSHYGDKQGKPFRIWVDKILSTKIGSDTWLAKFNLWELSGEEQQGCVNTAIMTIKNAEATYMHVHQTWLEGSGAKDQSTWLF

SEQ ID NO: 18931 - protein, 157 aa, Schizosaccharomyces pombe
MAEEEHVDFEGGEAGASLTFPMQCSALRKNGHVVIKGRPCKIVDMSTSKTGKHGHAKVHIVALDIFNGRKYEDMSPSTHNMDVPVVKRDEYQLVNIDDGYLNLMTTDGTTKDDVRLPEGELGNEIEEGFDEGRDLIITVVSAMGEETALACRDAPSS

SEQ ID NO: 18932 - protein, 148 aa, Hordeum vulgare
  misc_feature (5)..(5): Xaa can be any naturally occurring amino acid
  misc_feature (139)..(139): Xaa can be any naturally occurring amino acid
MASKXILKEFKDLQKDPPTSCSAGPSGEDMFHWQATIMGPHDSPYAGGVFLVNIHFPPDYPFKPPKVSFKTKVFHPNINSNGSICLDILKEQWSPALTISKVLLSICSLLTDPNPDDPLVPEIAHMYKTDRSKYETTAXSWTQKYAMG

SEQ ID NO: 18933 - protein, 194 aa, Triticum aestivum
  misc_feature (78)..(78): Xaa can be any naturally occurring amino acid
  misc_feature (92)..(92): Xaa can be any naturally occurring amino acid
  misc_feature (103)..(103): Xaa can be any naturally occurring amino acid
  misc_feature (119)..(119): Xaa can be any naturally occurring amino acid
  misc_feature (129)..(129): Xaa can be any naturally occurring amino acid
  misc_feature (138)..(138): Xaa can be any naturally occurring amino acid
  misc_feature (142)..(142): Xaa can be any naturally occurring amino acid
MAPTVMASSATSVAPFQGLKSTAGLPVSRRSNGASLGSVSNGGRIRCMQVWPIEGIKKFETLSYLPPLSTEASSKQVXDYLIRPKWVPCLRXSSKVGVIFREXNASPGYYDGRYWTMWXLPISGCTDAXQVINEVEEXKKGXLTVLRRVRQHRKCMRSCLKQRAARSGRLKVIQRAIMHAVPELLVPPLLLVSK

SEQ ID NO: 18934 - protein, 364 aa, Vanilla phalaenopsis
SDSGKDAGRLSAAWQLYKAQEDLIKVAKKYGVKLTMFHGRGGTVGRGGGPTHLAILSQPPDTIHGSLRVTVQGEVIEQSFGEEHLCFRTLQRFTAATLEHGMHPPISPKPEWRTLLDEMAVVATNEYRSIVFQEPRFVEYFRLATPELEYGRMNIGSRPSKRKPSGGIESLRAIPWIFAWTQTRFHLPVWLGFGTAFKHVVQEDIKNLRILQEMYNEWPFFRVTIDLVEMVFAKGNPGIASLYDKLLVSEDLLPFGERLRANYQETKDLLLQVAGHKDLLEGDPYLKQRLRLRDSYITTLNVCQAYTLKRIRDPSFHVKVRPHISKEISDASKPAAELVKLNPMSEYAPGLEDTLILTMKGIAA

SEQ ID NO: 18935 - protein, 383 aa, Bacillus anthracis str. A2012
MQSYNDLPKLYNQWCSVVRWEKTTRPFLRTTEFLWQEGHTIHETAEESQAETLNILNLYASFCEDYLAIPVIKGQKTEKEKFAGAKATYTIESLMHDGKALQTGTSHNFGTNFSEAFDIKFLDRNGKWQYVHQTSWGVSTRMIGGLIMVHSDNNGLVMPPKVAPVQVVIVPIAQHKEGVLAKATELQGHIQKVARVKIDASNKTPGWKFNEYEMKGIPIRLEVGPKDIEKNQVVLVRRDTKEKEFISMDQLEERIPALLEEIHNSLFNKAKVFRDENTYSVTNFEEMKKLADEKQGFIKAMWCGELACEEKLKEEVASRCMPFEQEHLAEECVCCVNKWCIGEKRINALLDRKDEKDFGLHNKCNPKSFLVLQFVSCIFKMEG

SEQ ID NO: 18936 - protein, 191 aa, Zea mays
AQRAAAAMSSSSSFPNSRFPFAAGAGASGGSGSSVRPWGSSGGTSVSSSGKRIQKELLDLNASDCSAGPKGDNLYHWLSTIIGPQGSPYEGGIFFLDIVFPPDYPFKPPMVTFKTRIYHCNIDSTGKVHLDILKDGWSPAFTISKVLLAIKDIISNPDPYSPLMMSISRQYLTDRAKHDEIAAEWTMRFAR

SEQ ID NO: 18937 - protein, 554 aa, Pseudomonas syringae pv. syringae B728a
MAYYRTPSDVTALPAWQALNKHRQAMQNFSMREAFNTDPQRFSQFTLSSAGLFLDYSKNLITTETRDLLVSLAGEVGLKDAIKAQYDGELVNSSEGRPALHTALRRPVGDKLKVNGVDVMPDVHRVLNQMTELVGRIHDGLWRGYTEKPITDVVNIGIGGSFLGPELVSEALVAYAHKGVRCHYLANIDGSEFHELSMKIRAETTLFIVSSKSFNTLETLKNAQAARAWYLAQGGSEVELHRHFIAVSSNNAAAVAFGIREENIFPMWDWVGGRYSLWSAIGLPIALAIGMSNFKELLSGAYTMDQHFQSAPFEQNMPVLLGLLGVWYGNFWNAQSHAILPYDHYLRNITKHLQQLDMESNGKSVRQDGTPTSTDTGPVIWGGVGANGQHAYHQLLHQGTQMIPADFIVPIVSFNPVADHHQWLYANCLSQSQALMMGKTRAEAEAELREKGMDEQEVQKLAPHKVIPGNRPSNTLVVERISPRRLGALVAMYEHKVFVQSVIWGTNAFDQWGVELGKEMGKAVYQRLTGGTEEQADDASTQGLINYFRGRHRG

SEQ ID NO: 18938 - protein, 363 aa, Vanilla phalaenopsis
SDSGKDAGRLSAAWQLYKCQEELVQVAKKFDVVLTMFHGRGGTVGRGGGPTHLAILSQPRDTVNGSLRVTVQGEVIEQSFGEEHLCFKTLQRFTAATLEHGMHPPTSPKEEWRKLMDEMGAISTEVYRSVVFQEPKFVSYFRMATPELEYGRMNIGSRPSNRKPSGGIESLRAIPWIFAWTQTRFHLPVWLGFGTAFKHVVQEDIKNLRILQEMYEEWPFFRVTVDLVEMVFAKGDPRIAALYDSLLVSPDLQEIGKQLRAKYEQTQKLLLQVAGHKELLEGNPTLKQRLRLREPFITTLNVQQAYTLKKMRQADSDPPAVVDPRKPAAELVNLNKTTEYAPGLEDTVILTMKGIAAGMQNTG

SEQ ID NO: 18939 - protein, 293 aa, Leifsonia xyli subsp. xyli str. CTCB07
MSARTLDGKATAAAIKAELRERVSALRERGVVPGLGTILVGDDPGSQWYVAGKHRDCAEVGIASLRRDLPAEISQAELEAVVEQLNADPGCTGFIVQLPLPSHLDTDAVLELVDPAKDADGLHPTNLGRLVLNVNRPITTPLPCTPRGVIELMLRHGIDLAGKDVVVVGRGVTVGRSIGALLTRREVNATVTLTHTGTKSLDEHLRSADVIVAAAGVPGLVSAENVKPGAIVLDVGVSRVEDPETGKSRVAGDVAADVAGVASWISPNPGGVGPMTRALLLQNVVESAERALR

SEQ ID NO: 18940 - protein, 426 aa, Streptococcus agalactiae A909
MVFSFDTASVQGAVIKVIGVGGGGGNAINRMIDEGVAGVEFIAANTDIQALSSSKAETVIQLGPKLTRGLGAGGQPEVGRKAAEESEEVLTEALTGADMVFITAGMGGGSGTGAAPVIARIAKSLGALTVAVITRPFGFEGNKRSNFAIEGIQELREQVDTLLIISNNNLLEIVDKKTPLLEALSEADNVLRQGVQGITDLITNPGLINLDFADVKTVMANKGNALMGIGIGSGEERITEAARKAIYSPLLETTIDGAEDVIVNVTGGMDMTLTEAEEASEIVSQAAGKGVNIWLGTSIDMDMKDEIRVTVVATGVRKDKTNQVSGFTTSAPTNQAPSERQSTSNSNFDRRGNFDMTESREMPTQQNQPHAQNQQQSSAFGNWDLRRDNISRPTEGELDSKLSMSTFSENDDMDDELETPPFFKNR

SEQ ID NO: 18941 - protein, 530 aa, Aspergillus oryzae
MSDARTTLMETWFTPALVAAIVAARLLFSLYSAWRHAQRARSLNCQEAPLYPSRDPFGVATLLETLRADRDKFLPKLSQKRVDLISSQQNRYVSTFRVRQAGRENFFTVDPKNIQAMLATQFNDFFLGDMRRNAGAPVIRSGIFVSDGADWSHSRSLIRPQFTRTQINNLELEERHVQNALRAMPTQSNGWTSEVDIQTILFRLTLDSATEFLFGKSCNSQLTALEKDAGEMSDSFLNSFDRCAWYLAARLRFERLYWIVNNKEFRECTRVVHELVDGYVHAALQRAQQAEKPADPERGSHYVFVDALTATTQDPNQLRDECLNVLIAGCDTTASLLSWNILLLARHPDIFQRLRKEIIERFGTYSEPRDINFSSLKSCQYLQHFINETLRLHPVVPFNRRCANKDTTLPRGGGKDGNSPVYLQKGQPVLYSSYVLQRRKDIWGEDAEEFNPDRWYGRKAIWEHIPFSGGPRTCIGQQFAITNTSFVLVRLLQRFDSIEDVYPEREIRYGVTLTNCPADRVTVRMHQAEL

SEQ ID NO: 18942 - protein, 315 aa, Oceanicola granulosus HTCC2516
MRDILTVTLNPALDLATEVAHVQPNVKLRCGPPDLDPGGGGLNVARAIHQLGGSARCFVALGGDTGQSLLNLLTRAGLTPVVHDAPGETRQSLAVSDLETNDQFRFMLPGPEWSRADIDGARKALLDAATGDGFLVLSGSGPAGAAPDLYARICEDFAGTGEEIILDTSGPALAHLAAGQAKPPFVLRMDQHEAEELARRPLASRADSAAFARSLVERGAARLVIVARGADGSTMADAERKLHVTAAPVRVNSKVGAGDSFVGGFTMALARGGSVEAALSHGAAAASAAVMTPGTQLCHREDMERLLPECRVSEL

SEQ ID NO: 18943 - protein, 486 aa, Mycobacterium sp. JLS
MINANLIIDGREETSDRTIDVVSPADIRVLLGSVPDAAPGQVDEAVAAAAMAFPEWSSRPLEERQGALLAAAGTIHDMIEEYAPILSRENGKILEESHVDLEFASGICGYTAGISAEILADQQIRDTGGTTLIRRRPIGPVAAITPWNFPVVLAFMKLAPALVAGNTVVLKPAANSPLVLAEVVRALQQHFPPGVLNMVTGGDAVGEALVAHPRIRKIGFTGGIDTGRKVMAAAARDIKRVTLELGGNDPAILLDDVDLSPETMRQIVKGAFGTTGQVCFGLKRIYVPTRIHDRFVEAFSAAVDEIVVGPGDDPRVTMGPLNNAQQKNLVEKIVDDARSSGATVTTLGQRLDSAAWDHGHFMMPSVVTAADPRLAIVEEEQFGPVVPVLKYDELDDVIRLVNQSQYGLAASIWTSDEERAFLLGRRFDTGSVFINSHTFTSLDPRAPFGGAKASGLGREFSPASLDSYTELQTISRRIGPPGPPLS

SEQ ID NO: 18944 - protein, 373 aa, Anabaena variabilis ATCC 29413
MYDTIIVGAGPAGGAAAYHLAKKGRSVLVLEKESLPRYKPCGGGVSPIVAEWFDFDFSPAISLKVDSFRFTWNLEDPVEAKIETKEPVWMVRREVFDHFLVQQAQKQGAELRDNTEVTGIEFKSDYWQVNTANGPVTGRYLIAADGAKGPMAKWLGFKERKRRLAGALEAEVPAQVKDKSTIHFEFGLVKNGYIWNFPKEEGYSIGVGTFIGGQPQDFKKILVEYSQLFNIDVKTSKQYGHPIALWDGNQKLHTQNAILAGEAACVVDPMTAEGIRPSIYSGVMAAGAVDQALSGDINALEQYTEIIQESWGAEMAWAQKLAGAFYRFPSVGYQVGVKRPTAPKVMGKILCGEMSYSSVAGRALKRLIPGFRG

SEQ ID NO: 18945 - protein, 369 aa, Hirschfeldia incana
SSNKTLVSPGNVFELGFFRTTSSSRWYLGIWYKKLSNRTYVWVANRDNPLSNSIGTLKISNMNLVLLDHSNKSVWSTSLTRGNERSPVVAELLANGNFVMRDSNNKDASGFLWQSFDFPTDTLLPEMKLGYDLKKGRNRFLTSWRNSDDPSSGEISYQLDTQTGMPEFYLLQSGVRVHRSGPWNGVRFSGMPGDQELNYMVYNFTENNEDVAYTFRMTNNSIYSILKTSSEGFLERLIWTPNSITLTLFWYLPLENQCDMYLICGRYAYCDVNTSPLCNCIQGFIPWNKQQWEMRDPSGGCKRSTRLSCSGDGFTRMKNMKLPETKMAIVDRSIGVKECEKRCLMDCNCTAFANADIRNGGSGCVMWTG

SEQ ID NO: 18946 - protein, 110 aa, Arabidopsis thaliana
MAFALRFFTCFVLTVFIVASVDAAITCGTVASSLSPCLGYLSKGGVVPPPCCAGVKKLNGMAQTTPDRQQACRCLQSAAKGVNPSLASGLPGKCGVSIPYPISTSTNCAT

SEQ ID NO: 18947 - protein, 371 aa, Glycine max
SARGSGTVTVYKQSSSYPITAPSPLSGLPEFSHLGWGHWFTLRDLELATNRFSKENVLGEGGYGVVYRGQLINGTPVAVKKILNNTGQAEKEFRVEVEAIGHVRHKNLVRLLGYCIEGTHRMLVYEYVNNGNLEQWLHGAMRHHGYLTWEARIKILLGTAKALAYLHEAIEPKVVHRDVKSSNILIDDDFNAKVSDFGLAKLLGAGKSYVTTRVMGTFGYVAPEYANTGLLNEKSDVYSFGVLLLEGITGRDPVDYGRPANEVNLVDWLKMMVGNRRSEEVVDPNIEVKPSTRALKRALLTALRCVDPDSEKRPKMGQVVRMLESEEYPLPREDRRHRRRNREGSGEIESQKEYSDTDRSEIQDSREERRG

SEQ ID NO: 18948 - protein, 113 aa, Arabidopsis thaliana
MAFALRFFTCLVLTVCIVASVDAAISCGTVAGSLAPCATYLSKGGLVPPSCCAGVKTLNSMAKTTPDRQQACRCIQSTAKSISGLNPSLASGLPGKCGVSIPYPISMSTNCNK

SEQ ID NO: 18949 - protein, 512 aa, Listeria monocytogenes str. 4b F2365
MKKIQFFDTTLRDGEQTPGVNFDVKEKIQIALQLEKLGIDVIEAGFPISSPGDFECVKAIAKAIKHCSVTGLARCVEGDIDRAEEALKDAVSPQIHIFLATSDVHMEYKLKMSRAEVLASIKHHISYARQKFDVVQFSPEDATRSDRAFLIEAVQTAIDAGATVINIPDTVGYTNPTEFGQLFQDLRREIKQFDDIIFASHCHDDLGMATANALAAIENGARRVEGTINGIGERAGNTALEEVAVALHIRKDFYQAETNIVLNQFKNSSDLISRLSGMPVPRNKAVIGGNAYAHESGIHQDGVLKNPDTYEIITPALVGVDKNSLPLGKLSGKHAFNTRMEEMGYTLTEQEQKDAFKRFKQLADAKKEVTEEDLHALILGQSSESADDFELKHLQVQYVTGGVQGAIVRIEERDGALVEDAATGSGSIEAIYNTINRLMKQDIELTDYRIQAITAGQDAQAEVHVVIKNDKGAVFHGIGIDFDVLTASAKAYLQASGKSKTASKQADFEEVK

SEQ ID NO: 18950 - protein, 380 aa, Hirschfeldia incana
SSNKTLVSPGDVFELGNFKTTTRSSQDGSTDRWYLGIWYKTTSDHRTYVWIANRDNPLHNSIGTLKISHSSNLVLLDQSDTPVWSTNLTGVVKSPATAELLANGNFVLRGSYTIDLDHFMWQSFDFPVDTLLPEMKLGRNLIGPEHEKILTSWKSPTDPSSGDYSLILETEGFLHEFYLFKNEFKVYRTGPWNGVRFNGIPKKMQNWSYIVNNFIDNKEEVAYSFQVNNNHNIHSRFRMSSTGYLQVITWTKTVPQRNMFWSFPEDACDLYQVCGPYAYCDMHTTPMCNCIKGFVPKNAGRWDLRDMSGGCVRSSPLTCGEGDGFMVLGQMKMPETSEAFVEEMIGLEECSQKCVRDCNSTGFAIMDNMNGGSGCVMWTG

SEQ ID NO: 18951 - protein, 350 aa, Listeria monocytogenes str. 4b F2365
MTYKITSLAGDGIGPEIMTSGLQVLEAVAKKYNHTFEIESHPFGGAGIDVAQDPIPSSTLKACRDADAILLGAIGGPKWDNAPKRPEDGLLALRKALGLFANIRPIQVPSSITHLSPLKKEIVENTDFVVVRELTGGLYFGEPKYWDNEAAVDSLTYTRAEIERIIEKAFEIAATRNKKVTSVDKANVLASSKLWRKIADEVASRHPDITLEHLYVDAAAMLMIQRPTTFDVIVTENLFGDILSDEASVITGSLGMLPSASHAENGPSLYEPIHGSAPDIANQNIANPMSMISSVSMMLRQSFSLFEEADAIDAATARTMQAGFLTADLGGNTSTTDFTNEVLKQIEGGE

SEQ ID NO: 18952 - protein, 518 aa, Arabidopsis thaliana
  misc_feature (388)..(388): Xaa can be any naturally occurring amino acid
MILKKVWGSVWNRSNSGKDLVNHQRAIDVPPLLLSSSSSLGAFDQLPMDILVQILMMMEPKDAVKLGLTCKAWKCVASGNRLWIFYLQCSQEPWDSIFFAETSLRSGYPLRMISSQSGELSFMHIYSQRAQVPGSIIIDGGSGYCKFGWSKYASPSGRSATFLEFGNIESPIYARLQQFFATIFTRMQVKPSMQPIVVSLPLCHFDDTESAKASRRQLKTAIFNVLFDMNVPAVCAVNQAVLALYAARRTSGIVVNIGFKVITILPILHGKVMRQVGVEVIGFGALKLTGFLKEKMQENNISFQSLYTVRTLKEKLCYVALDYKAELSKDTQASVEVSGEGWFTLSKERFQTGEILFQPRLAGIIVHKLVYEFHGFPYAYQGWAIFLXKSLHTFGQFIIYFWIGFCLGQNRRAMSLHQAVSLCMDHCDAAGLTGDDSWFKTVVLTGGSACLLGLSERLERELQDHLPSSISNGIRVIPPPYGVDTSWHGAKLISNLSIFPGPWCITRKQFRRKSRLMW

SEQ ID NO: 18953 - protein, 364 aa, Raphanus raphanistrum subsp. raphanistrum
SSNKTLVSPGGVFEFGFFKLASSSCWYLGIWYKNIPERSYVWVANRDNPLHSSTGTFRISGTNLVLLDQSKNTVWSTNLTRRCVKSPVVAELFDNGNFVMRYSNNSDPSGYLWQSFDFPTDTLLPQMKLGFDLKTGPHRFLRSWRSPDDPASGNYTYKLETRGLPEFFLRSEDFLLYRTGPWNGIRFNGVPEMPRLLDNILTENKEEITYTFRMTNHSIYSKFIITHSGFFQLLTWTPKVQLWNVLWSIPNDQCDLYVLCGPYGYCDTKTSMCNCIKGFKPKGSQAWALGDMSQGCVRKTSLSCGGDGFIRLTKMKLPDTTYAIVDKLVGIKECKKRCLKDCNCTAFANADIRKGGSGCVMWTG

SEQ ID NO: 18954 - protein, 323 aa, Schizosaccharomyces pombe
VAKNQAMREAGIYVPETFEKLPALLQEVYEGLVKKGVIVPQPEVAPPNIPLDYAWAKELGLVRKPSSFICTISNDRGSELTYNNVPISKVFEEELGIGGVISLLWLRRRLPSYATKFLEMVLQLTADHGPCVSGAMNTIITTRAGKDLISSLVAGLLTIGTRFGGALDGAAQEFSKAYDAGLSPRAFVDSCRKANKLIPGIGHRIKSRNNPDLRVELVKGYVKKNFPSTKLLDYALAVENVTTSKKDNLILNVDGCIAVCFVDLLRNCGAFTLEEANEYINLGILNGMFVLGRSIGLIGHHLDQKRLRAPLYRHPWDDFLYLS

SEQ ID NO: 18955 - protein, 416 aa, Streptomyces avermitilis MA-4680
MAPRRVVVTGLGAVTPLGVGVGELWRGLLEGECGIRELDGEEFEGLPVRVAGTVPVDPATLLPRPQARRMNRAAQFAVLAAREAWRDAGFDGAGTAESGLDPARVGVSVGAILGDASVLVGGDRKLRAKGPRSVSPLTTPMTVPSQAASQVSLALRITGEARTVTSACASGTEAIGLAIDRIRYGHVDIALAGGAEAVVTPAIMASFAAMRALSHHGLTEGSPSRPFAKDRDGFVNGEGAGFLLLETEEHARARGARIYCEAAGWGLSADAHHMAAPDPSGSGVALALRRALKDAGGHVVDVVHVNAHATATVEGDLAEANALRAVLGGPVPVTALKGHLGHLQGAAGGVEAVATALTLHHGLIPPTIGCAIQDDEIGLDVVTHSARPLPAGGDLALSNSFGFGGHNAVLALRRVG

SEQ ID NO: 18956 - protein, 1065 aa, Bacillus cereus ATCC 14579
MEKKVSAIPQPKTYGPLGNLPLIDKDKPTLSFIKIAEEYGPIFQIQTLSDTIIVVSGHELVAEVCDETRFDKSIEGALAKVRAFAGDGLFTSETHEPNWKKAHNILMPTFSQRAMKDYHAMMVDIAVQLVQKWARLNPNENVDVPEDMTRLTLDTIGLCGFNYRFNSFYRETPHPFITSMTRALDEAMHQLQRLDIEDKLMWRTKRQFQHDIQSMFSLVDNIIAERKSSGDQEENDLLSRMLNVPDPETGEKLDDENIRFQIITFLIAGHETTSGLLSFAIYFLLKNPDKLKKAYEEVDRVLTDPTPTYQQVMKLKYMRMILNESLRLWPTAPAFSLYAKEDTVIGGKYPIKKGEDRISVLIPQLHRDKDAWGDNVEEFQPERFEELDKVPHHAYKPFGNGQRACIGMQFALHEATLVMGMLLQHFELIDYQNYQLDVKQTLTLKPGDFKIRILPRKQTISHPTVLAPTEDKLKNDEIKQHVQKTPSIIGADNLSLLVLYGSDTGVAEGIARELADTASLEGVQTEVVALNDRIGSLPKEGAVLIVTSSYNGKPPSNAGQFVQWLEELKPDELKGVQYAVFGCGDHNWASTYQRIPRYIDEQMAQKGATRFSKRGEADASGDFEEQLEQWKQNMWSDAMKAFGLELNKNMEKERSTLSLQFVSRLGGSPLARTYEAVYASILENRELQSSSSDRSTRHIEVSLPEGATYKEGDHLGVLPVNSEKNINRILKRFGLNGKDQVILSASGRSINHIPLDSPVSLLALLSYSVEVQEAATRAQIREMVTFTACPPHKKELEALLEEGVYHEQILKKRISMLDLLEKYEACEIRFERFLELLPALKPRYYSISSSPLVAHNRLSITVGVVNAPAWSGEGTYEGVASNYLAQRHNKDEIICFIRTPQSNFELPKDPETPIIMVGPGTGIAPFRGFLQARRVQKQKGMNLGQAHLYFGCRHPEKDYLYRTELENDERDGLISLHTAFSRLEGHPKTYVQHLIKQDRINLISLLDNGAHLYICGDGSKMAPDVEDTLCQAYQEIHEVSEQEARNWLDRVQDEGRYGKDVWAGI

SEQ ID NO: 18957 - protein, 576 aa, Buchnera aphidicola str. Bp (Baizongia pistaciae)
MKMLSGSDMVIRSLIDQGIKYIFGYPGGAVLDIYDSLKQMHGIKHILVRHEQSATHMADGYARATGKIGVVLVTSGPGATNSITGIATAYMDSIPLVVISGQVASSLIGYDAFQECDMIGISRPIVKHSFLVKNTEDIPKIFKKAFWLASSGRPGPIVIDLPKDILNPLIKKPYIWPKLISIRSYSPVLQGHQGQIKKALHILIKAKQPIIYIGGGIITSNSHKELKLLAETLNIPVTTSLMALGALPQNHPQNLKMLGMHGTYEANMAIHNADVILAIGVRFDDRTTNNVDKYCPNATIIHIDIDPTSISKTISAHIPIVGHARNVLKQILNLLKNQFSKKNIYNLEHWWKQINCWKSKNSLEYDRKSKKIKPQNVIEIISALTNGNAFVTSDVGQHQMFTALYYSFNKPRRWVNSGGLGTMGYGLPAALGVKLALPKETVLCITGDGSIQMNIQELSTAMQYKLSILILNLNNRSLGMVKQWQDIIYSGRHSHSYMKSLPNFIKLAESYGHIGISIHNPEDLEKKLKLALLKLDQGNLVFVDITIDPEEHVYPMQIRSGGMNEMILRTTEHTSL

SEQ ID NO: 18958 - protein, 283 aa, Pisum sativum
MASPTPTALYQIHSLFLYKTNHPQLSLSQTQSFRSNFFFQRKLSFELPRMPRKETVIVSATTSEKKRHPGEAKGFVEEMRFVAMRLHTKDQAKEGEKEVKKPEERAVTKWEPTVDGYLRFLVDSKIVYDTLEKIVQDAAYPYYAEFKNTGLERSASLDKDLEWFKEQGYTIPEPSSPGLTYAVYLTDLSQNDPQAFICHFYNIYFAHSAGGRMIGKKIASQLLNNQALEFYKWDGDLSQMLQNVRDKLNKVAEEWSREEKNHCLEETEKSFKLSGEILRLILS

SEQ ID NO: 18959 - protein, 175 aa, Zea mays
  misc_feature (132)..(132): Xaa can be any naturally occurring amino acid
  misc_feature (153)..(153): Xaa can be any naturally occurring amino acid
  misc_feature (160)..(160): Xaa can be any naturally occurring amino acid
  misc_feature (172)..(172): Xaa can be any naturally occurring amino acid
MYKLGRGNRDKVQQFMTITGASEKVALQALKASDWHLEGAFDFFYSQPQVDPQDIVMLVISWHMKAATMCEFTRQEFIGGLQSIGVDSIEKFRGKLPSLRAELKDDNKFRDIYNFAFTWAREKGQKSLSLEXTSIGMWQLLFAERNWPLSDHXWCQFLQXVRHNKAISRDTXVPA

SEQ ID NO: 18960 - protein, 409 aa, Moorella thermoacetica ATCC 39073
MLTGNCVVAQSGGPTAVINNSLGGVIEAALGSEAIKEVYGARHGVLGILREDFCDLRREDPASIQGLRYTPGAALGSCRYQLKNQEDYDRLLDIFRRYNIRYFFYIGGNDSMDTAAKVNRLALEEGYDLRVIGIPKTIDNDLPQTDHCPGYGSAAKYLATSVLEMGLDLKCIVTSTKVAIVETMGRNTGWLAAATALARRRPGDAPHYIYLPEVAFDMAAFLADVERAYRQYGTALVVVSEGLVDKNGNYVFNDAATVDVFGHQRLGGLGQFLLNKIERELNLKGRVILPATSQRSAMHLASRTDAEEAWAVGRVAVEAAVKGASGQMVAIRRLEGDTYQVTYELVDLDQVANKEKKLPRAWINEQGNDVTDHFINYVRPLIQGEVSIPFPNGLPAYVNLACHPVKDPD

SEQ ID NO: 18961 - protein, 406 aa, Pseudomonas syringae pv. tomato str. DC3000
MAIDIKAPSFPESVADGTISKWYKKEGDAVKRDEMLVDIETDKVVLEVLAEADGVMGAITKEEGAIVLSNEVLGTLNDGATASAAPAPAAAPASAPAAAPAAAGEEDPIAAPAARQLAEENGINLASVKGTGKDGRITKEDIVAAVEAKKSAPAAAPAAKPVAAAAPVVAAGDRTEKRVPMTRVRATVAKRLVEAQSNMAMLTTFNEVDMTEVMALRSKYKDLFEKSHNGVRLGFMSFFVKAATEALKRFPAVNASIDGSDIVYHGYADVGVAVSSDRGLVVPVLRNAEHMSLAEIEGGIATFGKKARDGKLSIDEMTGGTFTITNGGTFGSMMSTPIVNPPQAAILGMHNILQRPMAVNGQVVIRPMMYLALSYDHRLIDGKEAVTFLVTIKNLLEDPARLLLDI

SEQ ID NO: 18962 - protein, 183 aa, Oryza sativa
MATILENIQKARFLPTRPLKDELPTFQGGGGGGGGGGGKESHLMGLRKRLSSFSDKIQPISSASAEWAFRRSKSAPSLGAFAGGPLKRWWDWGVGWLMSKKPGFATDLEMNEEEVAALGRGSRGSWGHILYKMRSGVRRLVTSHSLPTTHRAAAAASASAQCKPAATFNYTQSFHSGQTAMAY

SEQ ID NO: 18963 - protein, 239 aa, Zea mays
  misc_feature (77)..(77): Xaa can be any naturally occurring amino acid
  misc_feature (110)..(110): Xaa can be any naturally occurring amino acid
MSMCEKDQNLPWGYDLFRDPFAPPNGYYGPPPGYCDGHCCDLHHYGRASHPDETQLHSSQLAYDMYNPSVGIYHPGXPMGPASPKINGEIPSIDEATMDHESLTERLRLXELVENKVKGDGNCQFRALSDQLYQSSYHHEFVRSQIINQLAGKRDAYDGYVPMAYDDYLEKVARNGEWGDHVTLQAAADKYGVKIFVMTSFKDTCYIEILPKVQKSNKVILLSFWAEVHYNSIHPQNGE

SEQ ID NO: 18964 - protein, 175 aa, Xylella fastidiosa Ann-1
MHPKNFQHQLKTIPQPPEETRDFVFNHTMLRVKDINASLDFYARILGFRLIDQRDFHEAQFSLYFLALLPQTVHISDNDTERRLWMSGIPGVLELTHNYGTETQEGQIYHNGNSEPRGFGHICISVPDLYSACARFDTLQVPYQKRLTDGRMKNIAFIKDPDGYWVEIISNTPLP

SEQ ID NO: 18965 - protein, 528 aa, Arabidopsis thaliana
MERTNSIEMDRERLTAEMAFRDSSSAVIRIRRRLPDLLTSVKLKYVKLGLHNSCNVTTILFFLIILPLTGTVLVQLTGLTFDTFSELWSNQAVQLDTATRLTCLVFLSFVLTLYVANRSKPVYLVDFSCYKPEDERKISVDSFLTMTEENGSFTDDTVQFQQRISNRAGLGDETYLPRGITSTPPKLNMSEARAEAEAVMFGALDSLFEKTGIKPAEVGILIVNCSLFNPTPSLSAMIVNHYKMREDIKSYNLGGMGCSAGLISIDLANNLLKANPNSYAVVVSTENITLNWYFGNDRSMLLCNCIFRMGGAAILLSNRRQDRKKSKYSLVNVVRTHKGSDDKNYNCVYQKEDERGTIGVSLARELMSVAGDALKTNITTLGPMVLPLSEQLMFLISLVKRKMFKLKVKPYIPDFKLAFEHFCIHAGGRAVLDEVQKNLDLKDWHMEPSRMTLHRFGNTSSSSLWYEMAYTEAKGRVKAGDRLWQIAFGSGFKCNSAVWKALRPVSTEEMTGNAWAGSIDQYPVKVVQ

SEQ ID NO: 18966 - protein, 279 aa, Lycopersicon esculentum
MFQTLKNDFQICEEIGRGRFGTVYRCFSPATGESYACKSIDKNLLIDSTDRECLDKEPKILQLLSGNPNILHLYKVYEDDDFLHMVTDFCPNSDLYERVSSGSLSESAAAAILTQLVSAISYCHHMGVAHRDIKPDNVLFDSENRLKLADFGSAEWFAGCEGRMMSGVVGTPYYVAPEVLMGKEYNEKVDVWSAGVILYIMLSGVPPFYGETPTETFQAVLRGNLRFPTRNFRSVSPEAKDLLRKMICKDVSRRFSAEQVLRHPWVINGGETRSMADLN

SEQ ID NO: 18967 - protein, 281 aa, Desulfitobacterium hafniense Y51
MTQILNAKPVVQAMKENLRQEVAALQAEGKAPTLGIIRVGSRPDDVYYENNIIKNCETIGIATKTYPLDLNISMEEFTAVMTQVNDDPSVHGIMLFRPLPPQLDEEVIKHLISADKDIDCMSPLNLEKVFEGDMSGLLPCTPAAVMAILRHYEIELKGANAVVMGRSLVVGKPLSMMLLQDNATVTICHSRTRNLPEVAKNADIVIAAMGRARMIDDNYVAENSIVIDVGINDAGDGKICGDVDYDAVVDKVKAITPVPGGVGSVTTTILLNNLVRACKSQ

SEQ ID NO: 18968 - protein, 413 aa, Haloarcula marismortui ATCC 43049
MHRRRSGPTSQPLARGERGLPANRSFASLIAWLTSVRLLCRSPPFCCFYSLSTYTTVMYTDGQYDYDVAVVGGGPAGLTSALYTSRLGMDTIVINRGGGRAAMMTDTHNVIGVTEDVSGNEFLETAREQVQDYGGTYERGFVESVDPLADEEDGFTVTTSDGELAVKRVVLATGFADERPDPPLPRTGKGLHWCLHCDAFMFVGEPVFVMGTGEAAAHVAMIMLNYTDDVDILTRGETPEWSDETQTMLDNHPVEIVETELSGKQTDDDGWLSAYEFEDGSVREYKGGFPMLGSDYHAELADELGLDRNDDGTVAVDDHGETSVSGVYAVGDLTPGHNQIPIAMGEGADAGIAIHKDLRKYPRSVDDIESEGAVEDVEVPAVSEELFATALTHEGHAAGPRSEEAPEVRADDD

SEQ ID NO: 18969 - protein, 399 aa, Fusobacterium nucleatum subsp. vincentii ATCC 49256
MIYKIEDVLKDIKNGIPLIIVDDENRENEGDLFVAAEKATYESVNLMATYARGLTCTPMSTEYAVRLGLDPMTARNTDAKCTSFTVSVDAKEGTTTGISIADRLTTIKKLADINSVPSDFTRPGHIFPLIAKDRGVLEREGHTEATVDLCKICGLAPVAVICEILKDDGTMARVPDLEIFAKKHNLKIITIADLIKYRKKTEQLMKIDVVANMPTDSGTFKIVGFDNLIDGKEHIALVKGEVAGKENVTVRIHSECFTGDILGSLRCDCGSQLKTAMRRIDRLGEGIVLYLRQEGRGIGLLNKLRAYNLQEEGMDTLDANLHLGFGADMRDYAVAAQMLKALGVKSIKLLTNNPLKINGLEEYGMPVVEREEIEIEANKINKIYLKTKKERMGHLLKIK

SEQ ID NO: 18970 - protein, 211 aa, Ehrlichia chaffeensis str. Arkansas
MGIIVSENSSFISPVEHIIEDSKQGKMFILIDDEQRENEGDLVVLAEKVTSGVINFMITHGSGIVCLSITEDLMHKLGLEFIPKRHVNCNSASFATSIDARYGITTGVSAHDRAHTILTVVNKNVTEDDFVTPGHIFPIVSKKGGVLERSGHTEASVEIARIAGLAPVAVVCELMNPDGTMSRMPDIIEFSQRYNIKVTSIDKLIQYVKAN

SEQ ID NO: 18971 - protein, 512 aa, Aspergillus oryzae
MTIHKSKLINPCIILYTYVRYPADRISPPRVEVNKEDDFDTWYEPIVVKGEMIDHCSLPGYFILKPVAYGMWEKVRSWLADHLQPLELQSFSVPILPYLGDRAQAPYAVSGSSSFPNAESVIYPYCRKWIKSHRDLPLRMNQWCIRFQHEQNPQPLLRSCEYLLQEVHSAHITKDSARQEAAQILELYSLLYRDLLAIPVVKGYKNAAYLQDTDISTGVVIAYIPATNQCIEGAKCHEFGQTLSKAYEITVRDPSATAEPAALLHVWQNCWRISIRALGVMVATHSDNHGLVLPPRIAETQVAIVAAQASSTDEQLILDTETDRLVSRLSSAGIRVKVDDLEGYSLGWRFNEWIVSGTPLFIVLGPNEVTNQVVTIRRRDLLHAEGKVEAAIPELHTIIPTTLANIQEELYRNALAKFQADQTRIADNWDDFIKSLYRDKLVCLTPHCRQRSCELYIEGMGSDGTDQALGSHIRCLCVPLEQPGATEECATPCINPTCKYSALKWAMFGYAY

SEQ ID NO: 18972 - protein, 91 aa, Lactobacillus delbrueckii subsp. lactis
LDHYQIDLTGKNAVIVGRSNIVGKPLAALMLERNASVSILHSRSRNLADLTKQADILVCAVGKAKMIKADMVKEGAVVIDVGINRVDGHLV

SEQ ID NO: 18973 - protein, 566 aa, Bacillus cereus ATCC 10987
MFGKTAGEALVDLLIDWGVEHIYGMPGDSINSIIEALRKKQDKIKFIQVRHEEAGALAAAAYAKLTGKLGVCMAIAGPGAIHLLNGLYDAKLDKAPVLAISGQVETDLLGTDFFQEVNLERMFDDVAVYNQRIMSAEQLPAVVNQAIRMAYTKKGVSVLTIPDDVPKFEVKNGARVTNTSFTLPELFPQKEDLDAAKLAINEAKKPVILAGKGTKHARESLLALAEHIGAPIVLTLPAKGIIPDEHPLCIGGLGLIGTKPSYEAMKHADTLIMVGTSYPFTGFLPEKAKTLHIDTDPAQIGKRYVTDIGLAGDADKTLKWLLENVEKHEDHSFLEHHQEMMKKWEEKLHNQEDDSSTPIKPQRVMHALQHVAQDDAILSVDVGNVTVWTARHFRMTNQQFIISSWLATLGCGLPGALAGKIAFPDKQVFAVCGDGGFGMTMNDFVTAVKYKLPIVVVVLNNNKIAMIKFEQEVMGNIEFGTDLTNPDFAKYAEACGGIGYRVENLDELLPAFESAVKQSRPCIIDVVVDANEAPMPAKITFGQAAGYTKHMIKELFEEGKIDLPPL

SEQ ID NO: 18974 - protein, 416 aa, Glycine max
MASENVSTDTVSKAVDALLKWRRSQSETLKPKLFDEDEEYVYLILTLKKIPSKSRVNPHKIPLPHSLFSPFSEQCLILDDRPNKARVTKAQAQARIQSESIPVNKILKLSKLASDYRPFEAKRKLCDSYDLFFAEKSIVPLLPRLLGKSFFKKRKIPVPVDLKKGSWKEQVERACSSAMLFMRTGTCSVVRVAKVRMERDEIVENVVAAIEGIVEVVPKKWGNVRSLHLKLLESVALPVYQTVPDVKLKIEGFKVEEKKNEKERDGEVSDSIEGGTEKKKKKKGRIHEVRYMDENVVEAGMEDELASDDDDSEDEMVSKKRKKGVSSELSGVEQLKKLVFNELSANGKKKSKKGCLSVGKGVKGGLIEGSGSELVVKDEESGVKKKKKKREEVKAKATKSVKATKGVKAKKIKKAA

SEQ ID NO: 18975 - protein, 495 aa, Rhizobium etli
MAISSTLLGRLKDQTLVREQMLVGGKWSSEGVNGTRINVLNPSTMDVLASLPSAGLAEVRASIDAAKAAQKKWAKVSAKERSLIMRKFYEEVVANAEDLAVILTSEMGKPLAEARGEIAYGASYIEWFGEEAKRVYGDTIPGHQADKRLLVIKQPVGVVAAIAPWNFPSAMVCRKIAPALASGCAIVFKPAAETPLSALALAILAERAGIPDGLFSVLPTDNARMFGEEVCSNPVVKKLTFTGSTEVGRILMAQGAQKIMKLSLELGGNAPFIVFDDADLDQAVEGAMLSKFRNAGQTCVCANRIYVQSGIHDRFVEKLAMRVSALQVLDGFESGATIGPLINDEAVAKLYGHIDDAVTKGATVVVGGDRDARGGTFVQPTLLSGATKDMKVAREETFAPLAPVFKFDTVEEVIELANDTEFGLAAYFFANDLRNVWKVTEALEYGMVGVNTGLISTELAPFGGVKQSGFGREGSKYGMDDFLSMKYVCMGGIGA

SEQ ID NO: 18976 - protein, 306 aa, Streptococcus pneumoniae R6
MLEGTSSFWYNGRYLKEKRSDMTQIIDGKALAAKLQGQLAEKTAKLKEETALVPGLVVILVGDNPASQVYVRNKERSALAAGSRSEVVRVPETITQEELLDLIAKYNQDPAWHGILVQLPLPKHIDEEAVLLAIDPEKDVDGFHPLNMGRLWSGHPVMIPSTPAGIMEMFHEYGIDLEGKNAVVIGRSNIVGKPMAQLLLAKNATVTLTHSRTHNLAKVAAKADILVVAIGRAKFVTADFVKPGAVVIDVGMNRDENGKLCGDVDYEAVAPLASHITPVPGGVGPMTITMLMEQTYQAALRTLDRK

SEQ ID NO: 18977 - protein, 406 aa, Streptomyces avermitilis MA-4680
MAGMDIAVTGLGLVTPGGIGVGPSWAAVCDGRPAAALDPVLADNPVRISCRVPDFDPEQLLSARRAHRLDRFVQFALVAAHEAVADAGLDPTTWDGARVGVVLGCADGGPGTVEEQHRVLLEQGADRVSPLLLPMQLPNMLAGQTAIEFGATGPNLVVATACASGATAIGTARDLLALGRCDVVLAGGSEAMITPLVMAGFAQMGALSRREDDPASASRPFDADRDGFVAGEGAGILVMERVEDARARGAHIHGRIIGYGATADAHHMTSPHPDGAGIEAAVRAALADAGADPDDVQHVNAHGTSTPLNDLAEARMIQRTLQGDPLVTSTKGVTGHLLGAAGAVEAAFALLSIEHEMVPPIAGLCIPDPRIDIKLAQSATSMPIDLALSNSCGFGGQNTALAIAPA

SEQ ID NO: 18978 - protein, 417 aa, Cryptococcus neoformans var. neoformans JEC21
MPLKRPSPGPHPLDLNPYERLQFEEKENRRSHNDTDHHATLTSRQEGLRRRAALGENVDISADGESKEDEGYSAEKRNDRLSSPEDTKTGEGKGKKSPLMSNLKLDDFRDTLEAGIERKFAPLHIPPHRRLQTAAVALWALLLPICMIVLLLLLSLPPMWLILIPYFIWISFDRAPIHGGRPKEWARKGFIWKYFADYYPCSIVKEAELPPNRPYLFGYHPHGIIGMGAFATFATEGTNFSEYFPGIKPHLLTLGSNFKIPFYRELLMIHGCGSVSKRSCANVLSQGPGSAIAIVIGGASESLSAHPGTADLTLKKRFGFVKMAIREGADLVPVFSFGENDIYAQLANAKGSMVYKLQKKFEKVFGFTLPLFYGRGQLWTNAVSSSYRFCRWKAHSCRTGSTSKRRKGARATEQIHC

SEQ ID NO: 18979 - protein, 429 aa, Erwinia carotovora subsp. atroseptica SCRI1043
MTLTSHKRIVVTGCGIISPLGCGTDIVWRRLLEGRSGIRTLPADISDGTGISVAGQVPGLSDDPEAGYEPERFIPAKERKKMDRFIEFALIAAQEAVTQAGWHPANEHERQRTATIIASGVGGFGAIAEAVRTTDTRGPRRLSPFTAPSFLANMAAGQVSIQQGFRGPLGAPITACAAGVQAIGDAARLIRNGEADIAICGGTEAAIDRVTLGCFAAARALSTGFADKPEEASRPFDRDRDGFVMAEGAGLLVIESLEHALARGATPLAELVGYGTSADAWHLTAGPEDGSGARRAMELALGQAGINADEIQHINAHATSTQVGDRGELAAIRSVFGSESGVAVSSTKSATGHLLGAAGGIEAIFTVLALRDQVIPPTLNLRNPDEAGRGLDLVALKARYATITYALSNGFGFGGVNASVLFRRWETTP

SEQ ID NO: 18980 - protein, 527 aa, Burkholderia sp. 383
MRDADNGIVTSLCGSDVMSGSDSSSSRPDLAQGIALDDLADGAMIEGHVGDAAVLLVRRADELFAVGAQCPHYGAPLADGLLEGDTIRCPWHHAAFCLRTGELLRAPALDGLPCWRVERRDGRAVVLDARPAAVPPALNAAGLPVSVVIVGGGAAAIAAAVTLRQEGYPHPVTLLTADADPPYDRPNLSKDYLAGTADADWLPLRAPSFYADHHIDVRCGTRVARIDPARQAVELADGSRVGYGALLLATGAEPNRLTVPGADLPHVCVLRSRADCDALIAKLKTARRCVVVGASFIGLEAAAALRTRGLDVQVVAPDAHPMARVLGDALGSTIQALHESHGVVFHLGATPAQITPDSVTLSTGDVLPADLVVVGIGVHPNVALAQDAGLAVERGVTVDRFLQTSAPGIYAAGDIARWPDPLTGERIRVEHWVVAERQGIVAARNMLGQQRPFDAVPFFWSQHYDLTVNYVGHAEQFDRVEIDGDLGAHDCTIAYWRGNTRLAVATIGRDLDSLKAEAAFEQQIAAA

SEQ ID NO: 18981 - protein, 311 aa, Staphylococcus aureus subsp. aureus MRSA252
MTEIDFDIAIIGAGPAGMTAAVYASRANLKTVMIERGIPGGQMANTEEVENFPGFEMITGPDLSTKMFEHAKKFGAVYQYGDIKSVEDKGEYKVINFGNKELTAKAVIIATGAEYKKIGVPGEQELGGRGVSYCAVCDGAFFKNKRLFVIGGGDSAVEEGTFLTKFADKVTIVHRRDELRAQRILQDRAFKNDKIDFIWSHTLKSINEKDGKVGSVTLTSTKDGSEETHEADGVFIYIGMKPLTAPFKDLGITNDVGYIVTKDDMTTSAPGIFAAGDVRDKGLRQIVTATGDGSIAAQSAAEYIEHLNDQA

SEQ ID NO: 18982 - protein, 378 aa, Thermosynechococcus elongatus BP-1
MLIALILAAAIALCNGLSSAQLAASHPVSGGTYEYGYHYLSPPFGFTAGWMFLVAKSASAATAALGSVAYLYQWLGLEDSSGRWQVMAALGLLAVLTGVVLLGIRRSTQVNLGILLVTFTSLLLFVGIGHLQQRGGSPWLATSQPLSLKHLLQATALLFVAYAGYARIAVLAEEVKTPRQTIPRAIVLTIVIALLLYLSVAWVVLGSHHSGNLTTAASLAVVASRFGVPWLPPLMALGAIAALVGILLNLLLGLSRVVLAMARRRDLPPTLAQIPPQGKQPVAAILAVSGGIALLILLGNVQTTWSFSAFSVLIYYAITNLAALQLQEPQFPRWLAVAGLIGCLGLAFWVEVQVWVSGCGLLLLGLAWHYWMRRAKAL

SEQ ID NO: 18983 - protein, 317 aa, Vigna radiata
MANFPVVDMGKLNTEERGAAMEMIKDACENWGFFELVNHGISIELMDTVERLTKEHYKKTMEQRFKEMVANKGLESVQSEINDLDWDSTFFLRHLPVSNVSENTDLDQDYRKIMKQFAEELEKLAEHLLDLLCENLGLEKRYLKQVFYGSKGPNFGTKVSNYPPCPTPDLIKGLRAHTDAGGIILLFQDDKVSGLQLLKDDQWIDVPPMRHSVVINLGDQLEVITNGKYKSVMHRVIAQTDGTRMSLASFYNPGDDAVISPAPALVKESDETSQVYPKFVFNDYMKLYAGLKFQAKEPRFEAMKAVSSVDVGAIATV

SEQ ID NO: 18984 - protein, 544 aa, Staphylococcus aureus subsp. aureus MRSA252
MKGIELLNNPFLNKGTAFTNEERKQLGLEGLLPANVRTLEQQAEQCYEQFKAKQTDFEKRLFLMAIFNRNRTLFYKLTSEHLVEFMPIIYDPVIAQSIEQYNENFSRPQDAVFLSVDRQDQIEQELRNVANGRDIRLIVVTDAEGILGIGDWGVDGVDIAIGKLIVYTAAAGINPAQVLPVSLDVGTNNEQLLNDELYLGNRHKRVDDETYYTFVDKFVSAVRKEYPNALLHWEDFGRGHAKNILDKYEDTLPTFNDDIQGTGIVTLAGVLGALNISKVDYTNQTFLVYGGGTAGMGITNILKDELIKQDVSEDKANQHFYIMDKQGLLFDDMDDLTEAQQVFAKNRNEFSNTVNWKNLKEVIENIKPTVLIGTSTQTGAFTEDAVKEMLKHTERPMIFPLSNPTKLAEATAQDLLKWTNGKALIGTGIPYNDIEYNGVNYSIGQANNALMYPGLGLGLIASKAKKVNQQILSAASHALGGMVNPDEPGAAVLPPVEKIHQCSRAIAKAVAQSVIDQGLNAETIDDIDEAIEAEIWYPEYKSYI

SEQ ID NO: 18985 - protein, 411 aa, Xanthomonas campestris pv. vesicatoria str. 85-10
MSRRVVVTGMGMVSPLGNDLATSWDGIVHGRSGIGPITQIDASQFTTKIAGEIKNFDPTLFVSAKDVKKMDSFIHYGVGASFMALDDSGLEIDESNAERVGAILGSGIGGLLGIEEQTIKFHEGGARKISPFYVPSTIINMLPGQVSLIKGLKGPTFSAVSACATSNHSIGTAMRMIQHGDADVMLAGGAERGSSPSSVGGFCAMKAMSTRNDDPTGASRPWDKQRDGFVLGDGAGVLVLEEYEHAKARGARIYAELVGFGASSDAFHMTAPSEDGEGAARSMAAAMRDAKLNPEQIGYLNAHGTSTPLGDLAETMAMKRALGDHAYKTMVSSTKSMTGHLLGAAGGVEAIFSVMALHTGIIPPTINLEEPSEGCDLDYVPNVAREVQVDAVMSNGFGFGGTNGTLVFKRV

SEQ ID NO: 18986 - protein, 625 aa, Xanthomonas axonopodis pv. citri str. 306
MANERPAQQSDIKLLISKGLEQGYLTYAEVNDHLPDDLVDPEQIEDIISMINGMGIDVHEVAPDAETLLLNDGNTGNREVDDTAAEEAAAALTALDTEGGRTTDPVRMYMREMGTVELLTREGEIAIAKRIEEGLSQVQAALGVFPLSTEMLLADYEAHKEGKKRLAEIVVGFNDLIEEADAAAAALAAAGPVAVSDDEAVDEDDDEDGDDEAAEEEAGPTGPDPVEVATRMENLANEYAKFKKVYAKNGAEHKLVVKAREDMAAIFTTLKLPLPLTDALVTQLRGVVNGIKDHERKVLHLATTVARMPRKDFIRSWEGNQTNLEWVEDALKRKQKWSSALRDVKDQIISEQQGSIEMEKANYLTLGEIKEISRAMAYGEAKARKAKKEMVEANLRLVISIAKKYTNRGLQFLDLIQEGNIGLMKAVDKFEYRRGYKFSTYATWWIRQAITRSIADQARTIRIPVHMIETINKLNRISRQMLQQFGREATPEELAKEMDMPEDKIRKVMKIAKEPISMETPIGDDEDSHLGDFIEDTNVESPIDNTTNINLSETVRDVLAGLTPREAKVLRMRFGIDMNTDHTLEEVGKQFDVTRERIRQIEAKALRKLRHPSRSEQLRSFLDID

SEQ ID NO: 18987 - protein, 313 aa, Moorella thermoacetica ATCC 39073
MIEIKVGSRESELARWQARWVIQALEKAWPGLSCRLVTLKTKGDKILDVALARIGDKGLFTKELELALLDGAIDLAVHSMKDMPTTLPEGLVIGAIGPREDPADVLVSPEGYTLATLPIKARVGTSSLRRKAQLAYARPDLELVDLRGNVPTRLAKMERDGLTAIVLAAAGLKRLNHGQVLGEPIPYHICLPAVGQGAIGVEIRAGDRRVAELVAAINHPPTAAAVRAERAYLRALEGGCQVPIAALATVEDTALVLQGMVASLDGREMLRDIASGSTRDPEAAGRELARKLLARGAGEILQEVKAQSGKYQG

SEQ ID NO: 18988 - protein, 475 aa, Xanthomonas campestris pv. vesicatoria str. 85-10
MSSVSIDGAPDAGENTRFIILISCVATIGGFLFGFDSGVINGTVDGLKQTFQSTAAETGFEVASMLLGCAIGAFFAGRLADRWGRRAVLIISAALFLLSAIGAGASHSSGFFIFARVMGGFAVGAASVISPAYIAEVASARYRGRLATMQQIAIISGLFCAFLSNYLLANAAGASTEPLWAGQAAWRWMFWMQAVPSILFLLLLLVIPESPRYLVVKGRREQALVVLKRLYGNAAAQTKLGEISASMAADQHKPKFSDLINKATGKIRPIVWIGIGLAVFQQLVGINVVFYYGAVLWQAVGFSEQDALLINVLSGGLSIGACLVTVMLVDKIGRKPLLWIGSAGMAVSLALVTYAFATASLDPNGKLAMSDAMGMLALVAANVYVVFFNASWGPVMWVMLGEMFPNQIRGSGLAIAGAAQWTSNFAITVSFPILLGSIGLAGAYGIYTVAAFISVFFVLKYVYETKGKELEQMEG

SEQ ID NO: 18989 - protein, 641 aa, Pseudomonas syringae pv. tomato str. DC3000
MKFRQWDINTRTQIISLGPALLLTVMLISFFTFVRIQDLRQELNHTGQLIANQLAPAVEPGVTAGDIDGLKSLMRATLSMPSVRYVEIQDASNTVMVYIDQTRENEHQPRQMEIFQAPIRHQRAAAHTAPAARRETQDAASPDYLGRVLVGMSSEAFNRRQQEILLKAGILALCALLFTFLLARRLSLSLSRPISEMGEALKAIQQGDYHTPMPVSDDAELGALARHINSLAENLHRTSLEQQRSVAQLIQTREEAERANRAKSDFLAMMSHELRTPMNGVLGMLQLMETTRMTDEQSEYATLATESTEHLLKVINDILDFSRIERDALQMEGIAFNLAELVSVSTHAFNHSALQRKLLLELHVQPGLEAMTVIGDPTRIRQILVNLIGNALKFTEEGKVCVEADWLMLDDEQLRFTCKVHDSGIGIDAERLESMFDAFKQADSSISRRYGGTGLGLPIARKLAERMGGTLYAESVEGAGSAFTLQIALPVSRYVSVDVVPPPSALYAYGKERSILLVEDNPVNRTVVQAMLHNLGCKVDVAVDGVDAVMKAGAGNYALILMDCRLPVMDGYEATRKIRQLSGLERIPIIALTANALHGDRDACLQAGMDDYLPKPFKHADLQQVLQRWLSFQAPATGDKC

SEQ ID NO: 18990 - protein, 291 aa, Bordetella pertussis Tohama I
MHGRRFKKMKAKVIDGSRASARIREQLKERVACLRARNIRPGLAVLLVGEDPASQVYVRNKVAACEQVGIHSVTERYPSAWTENQLLDRIASLHGDPAINGILVQLPLPPHMSAHRVIEAISPLKDVDGFHISNAGLLMTGKPQFQPCTPYGVMKLLESEGVSLRGAEAVIVGASNIVGKPMAMLLLAAGATVTICNSKTRDLAGQARRADVLIVAAGRAGIVDGSMIKPGAVVIDVGINRSPDGRLCGDVDYGSAAKVAGAITPVPGGVGPMTIAMLLANTVEAAERSAI

SEQ ID NO: 18991 - protein, 94 aa, Glycine max
  misc_feature (56)..(56): Xaa can be any naturally occurring amino acid
MASLKVAFLASLLCMVVVSAPMAHAAITCGHVTSSLAPCIGYIQKGGSPPAPCCSXVKSLNAAAKTTTDRQQRRLASRQGKCGVSIPYMIIIKV

SEQ ID NO: 18992 - protein, 106 aa, Rhodobacter sphaeroides 2.4.1
MSTVPVTDATFDTEVRKSDVPVVVDFWAEWCGPCRQIGPALEELSKEYAGKVKIVKVNVDENPESPAMLGVRGIPALFLFKNGQVVSNKVGAAPKAALATWIASAL

SEQ ID NO: 18993 - protein, 654 aa, Cryptococcus neoformans var. neoformans B-3501A
MTRDFGSLFFTGPIFVDYSFTARHLESFLSSFPPQVSHAMSSASTPTAPYLEDLVRNSLDQTLPWVVQKYGGTSVGKSLDNITKIVGSYIDNGSKVAIVCSARSTQTKSLGTTNLLLQASREALQPALSSSGDGRSGSMSGTATPFYPKRVGSGFFGKDQSTSMVSSVSSLSQLEPQLGRSGSPSPFQSSSSRSPPRSPATPSQDSSVSQEPAFHATVDLIKKGHLEAARASLKEGPLRDELEEEIERDCESLRSFLYAAQIIDEISPRSQDSIVGTGERLACKIVAAALRDRGVDSELVVLDNIVDASMSAASEAISVDAGDQGVAQLGQEFYDQLSFRLGERLRECGQRVPVVTGYFGPVPGSLLAQIGRGYTDLCAALCAVGLKASELQVWKEVDGIFTADPRKVPSARLVPIITPDEAAELTYYGSEVIHPFTMEQVIRARIPIRIKNVENPSGAGTVIYPDLGFPRGLDTEPPKAERIVEGVDERMPTAVTIKDEIIVLNIHSNRKTLSHGFLARIFGTLDRAGVVVDLISTSEVHVSMAMQDFLNRKRLERLVKDLEKIGEVTVSKDMAILSLVGRNMRNAIGSAGLMFASLARAMINIEMISQGASEINISCVIENKDAIKALNVIHESCLSYPRSPATEMAGLQLQ

SEQ ID NO: 18994 - protein, 523 aa, Carboxydothermus hydrogenoformans Z-2901
MKVYLYDTTLRDGAQAEGINYTVSDKLKIARKLIAFGIDYLEGGWPGANPKDLEFFQEAKKLDFNKTKLAAFGSTRHPRLKVKDDPNLLNLIKSEAPVVTVFGKSWDLHVESALATTLENNLLMVYETVAFLKEVGREVVFDAEHFFDGFKNNPEYALKVIEQAARAGADFIVLCDTNGGSLPKEIRAGVEAALKIHPRIGIHAHNDSELAVANSLIAVETGATMVQGTINGYGERCGNANLCSVIPNLILKMGVEVNCQDNLKNLTRLSRYVSEIANLHPNPYQPYTGQSAFTHKGGVHASALLKDKGTYEHIPPELVGNHRKVSISDQAGVSNLLFNSENLGLSEEEVKTYGKELVAAIKAMEHQGYQFEGAEASLELLVRKVTGKLSEPFKIDNSKLIIEIKEDGRVLSEAVVKVRVGDTTIHTASDGNGPVNALDNALRKALLEIYPNLSELKLTDYKVRVLNEKAGTEAVVRVLIESSAGEKSINTVGVSTNIIEASLKALTDSLIYFLINNNEGTVS

SEQ ID NO: 18995 - protein, 332 aa, Streptomyces aureofaciens
MTRIAINGFGRIGRNVLRALLERDSDLDVVAVNDLTEPATLARLLAYDTTSGRLGRPVTVEGNVLVVDGRRITVTAEREPANLPWAELGVDIVLEATGRFTSAKAARAHLDAGAKKVLVSAPADGADITLAFGVNTDAYDPDLHTIVSNASCTTNALAPLAKVLDDLAGIEHGFMTTVHAYTQEQNLQDGPHRDPRRARAAAVNIVPTTTGAAKAIGLVLPNLDGKLSGDSIRVPVPVGSIVELNTTVARDVTRDEVLDAYRAAAQGPLAGVLEYSEDPLVSSDITGNPASSIFDSELTRVDGRHIKVVAWYDNEWGFSNRVIDTLQLLAAR

SEQ ID NO: 18996 - protein, 207 aa, Olimarabidopsis pumila
MATFEDGSDLEAIQKHLFEDLLVCDGFMGDFDFDASFVSGLWCIEPQVPKQEPDSPVLDPDSFVNEFLQVEAESSPSSPELNTSPLSTYETDQSVKKAERFEEEEEARHYRGVRRRPWGKFAAEIRDPAKKGSRIWLGTFESDVDAARAYDCAAFKLRGRKAVLNFPLDAGKYEAPANSGRKRKRSDVQEELQRTQSNSSSSSCDAF

SEQ ID NO: 18997 - protein, 298 aa, Archaeoglobus fulgidus
MARTGFQGRKLGEAFEIWTEMLREENITILMGLSGAMVPAGMRKIIAWLIRNRYIDVLVSTGANLFHDIHEAMGFRHFMGSEHVNDCKLFEEGIDRIHDVFAYEKEFNVIDYTLAEIISEMSGVMSSREFLEEIAGRLNVKDRNSIVIAAYESKVPIFSPAIADSSIGIAAALAKREVVIDTIRDVEELTEIVVNSEKTGVIYVGGGVPKNFIQQTEVVARLKGYDVRGHEYAIQITTDVPQFGGLSGCTFEEGVSWGKISGKAKKVQVNCDATIALPVLAHGLIGIRRQKYPIFNGL

SEQ ID NO: 18998 - protein, 434 aa, Cryptococcus neoformans var. neoformans JEC21
MAAPFVQYGITPGQSAEAPKRPHLYVGNLSPRVTDYILTEIFAVAGPVVSAKIIQDRNFQHGGFNYGFVEYADMRSADQALTTLNGRKIFDAEIRVNWAYQGNQNKEDTQHHYHVFVGDLSPEVNDDVLSKAFGAFGSLSEARVMWDMNSGKSRGYGFLSFRDKADAEQAIASMNGEWLGSRAIRVNWANQKTQTGGTRTGGGTPSYPAPPMGAPPAPAGVPSAYGAPAPGVVPGVGVGGAVGSYETVASQTPEFNTTVYVGNLIPYTTQADLIPLFQGYGYIVEIRMQADRGFAFVKLDTHQNAALAITHLQNQLVHGRPIKCSWGKDKGSMEGGAPAAGYPSMQPQIGYPNYNYYGGYNYNQAGVPGQPGQPGVAVASHPAPAVGAVGAVGAESQAQQGAWDPAAAAAYYQAGGWGGYYAQQQDTQQPSAHQ

SEQ ID NO: 18999 - protein, 183 aa, Photobacterium profundum SS9
MNTKQQQIAIVTGANGGIGKNYTRMMLDDGFRVVMAVRNEVAGSLVRDELLQSHPDAAIDILKVDMSSLSSIKAFSKQVKEKYSRIDVLAHNAGVYFFDNERRESTDGIELNLAVHVVGPYALTIQLLPLLKETQGSRVITMSSSEHHGAKIDLRDIQIKERFEEQGNMIAYSRSKWAGLGWH

SEQ ID NO: 19000 - protein, 301 aa, Archaeoglobus fulgidus
MRVTSPEIQRGIKVSELLDMFGSTAFNARRLGEAAKICEEMVKSDSFVFLTLAGAMIPAGMRKIVAGMMQNGFISSLVTTGANIVHEIVESLGIGHEIGSCYVDDTALAEESINRIYDVFVGQEAFERVEEFLSGIIEGLDGIYTTYEFLWEVGKRIPDERSFLRIAAEREIPVFCPTLHDSIAGLHMTIYRKNLQIDFFRDVSRIIDFCFQKRKMGVIVVGGGVPKNFTLQAMLLAEGFDYAVQITTDSPQWGGLSGATLEEAKSWCKLKPDAKAVTVYCDATIALPMLYAYLLDRCGES

SEQ ID NO: 19001 - protein, 736 aa, Vibrio cholerae O1 biovar eltor str. N16961
MVMAIRSSLKKKSILALTIYLAFFLAIVGTLSYWGLEVPFRKELKNNLALRAELLATQIREPLNNSIGVLQSLTSIGKSAADKEEQERMLRSLFSVVGGVIISGGLWPEPNLSATDPSLRYDSLFFNKATDGQVDQLSSWNNPKAGGYDRESWYLAAEREAEGLYFWSPVYVDPYTRVEMITVSTPYYRNGQFAGVATVDLSLESLIQFVAATAEQYNLGVNLKDAFGVEVVSHNFRTYDNALVSYYSFGEFNWQIEVVNANQHVDEIIFDLIINIEKGLMPILLLCVMVGYFLISHYWIRPIVLIAKKVSESREGEIIDIRYKSQDEIRHLIDTFNQKTIYLEAEKVKAQASTKAKSAFLATLSHEIRTPMNGVLGTAQILLKDELTSKQRQHLTSLYESGEHMMSLLNEILDYSKIEQGKFELDHSAFPLKSIIGSIKSIYSSLCVEKGLKFQLNSEITDGRWYYGDKARLRQIIFNLLSNAVKFTEAGFVAIGLSEESCDEENYLIIKVQDTGIGIAQESLGRIFRPFEQAESHTTRRFGGTGLGLAIVKQIAELMNGTVLVQSEVGQGSCFKVRVKLAITEPVTEDVKPTKAKTYPGLRVLIVEDNRTNIMILEAFMRNKGFECHSVMDGVQAITALQESSFDLVLMDNHMPLKDGIQATREIRQLPLPQAKILLFGCTADVFKDTRDKMLSAGADDIIAKPIAEHELDMALEQHSERLYQFHREPSLPSVE

SEQ ID NO: 19002 - protein, 378 aa, Archaeoglobus fulgidus
MEEVSSHVKSGKPVMILDSEKSAICIPAEVVSGEILNFMMKNCDEIRLALTWKQILNLGLNRFRFQNGNLIPIDPNLEKISAEERAKFIRELVSGNAGDIKYPGRIFVEETKEMGVLERPGIAEACVDLARMAGFAPSAVYAPLMTAEGGVAGEDYALKFAKEHSMPVFRIKDMIEFRIKSEKIVERVIEATLPTKFYGTFRAVGYKTPLGEIVALVKGRVDEGDVLVRIHSECLTGDVFHSLRCDCGDQLENALKMIDREGKGVAIYMRGHEGRGIGLINKLMAYKLQEEGKDTVDANIELGFPPDMRSYGIAAQILMDLKVKSIRLLTNNPLKIEELKKYGFKIVREPIEVEPCEVNLPYLKAKKDKMGHLICFND

SEQ ID NO: 19003 - protein, 116 aa, Zea mays
ASTAGLVSSARPCGRASEERDGVAIPREWVGLQQFPPATQTELHELLGKLKEEDVSTLTILVMGKGGVGKSSTVNSIVGERIATVSAFQSEGLRPMMWSRTRAGFTLNIIDTPGLI

SEQ ID NO: 19004 - protein, 573 aa, Acinetobacter sp. ADP1
MSNQKVSDIIIEVLEQAGVQRCYGIVGDTLNHVTDSMSKSKIEWIHVRHEEVGGFAAGTDALLSGHLTACAGSCGPGSLHFINGLYESHRNRAPVILIASQISTEMAGFIDFPQYVDFKSVYAKNSVFCEEITQPSQARHIMSMACQAALNKRGVAVVIVPANISEASAEAGLPFVPRHVEPDILPNKAELHQMVELISQHQKIGIYAGAGCEGAHDQLIAFAEKLKAPVAHTSRAKDFVEYDNPYNMGMTGIFGNKAGYHTLMDCDLLILLGADFAWAQYYPSHAKILQIDIDPTHLGRRHPITLGAVGKISSTLDALLPLLETRQERAFLDHCLELKHHSDETRHKEERVGKDGLIHPQYLVSLLNRYADQDAIFFGDGGSPMVWVLRHIDVNGKRRTFTSLLHGTMANAMPQALGAQKAFPNRQIIALCGDGGLAMLLGDLLTTIQEKLPIKIVVFNNSSLNFVELEQKVEGLLDHYTDLLNPDFGKLASVIGLHGQTVTHGDGLEQAVENFLKHDGPALLNVHTNPMELVMPPDPNLNQVSSTSLYAIKALMSGRVDDVKNLLVNNFIK

SEQ ID NO: 19005 - protein, 446 aa, Cryptococcus neoformans var. neoformans JEC21
MPLKRPSPGPHPLDLNPYERLQFEEKENRRSHNDTDHHATLTSRQEGLRRRAALGENVDISADGESKEDEGYSAEKRNDRLSSPEDTKTGEGKGKKSPLMSNLKLDDFRDTLEAGIERKFAPLHIPPHRRLQTAAVALWALLLPICMIVLLLLLSLPPMWLILIPYFIWISFDRAPIHGGRPKEWARKGFIWKYFADYYPCSIVKEAELPPNRPYLFGYHPHGIIGMGAFATFATEGTNFSEYFPGIKPHLLTLGSNFKIPFYRELLMIHGCGSVSKRSCANVLSQGPGSAIAIVIGGASESLSAHPGTADLTLKKRFGFVKMAIREGADLVPVFSFGENDIYAQLANAKGSMVYKLQKKFEKVFGFTLPLFYGRGLFNYNYGLMPFRHPIVSVVGKPIHVERDPHPSDEKVQELQSKYIAELTRIWDKYKDLYARGRTKELTLVE

SEQ ID NO: 19006 - protein, 218 aa, Treponema pallidum subsp. pallidum str. Nichols
MERSFTLAPSLLSADFSALDRALVYLEAHGAQWVHLDVMDGHFVPNLTFGAPVLRCLRSKTHLPFDVHLMVSRPADLIEDFVQAGADFLTFHIEAEVHAHRLIHAIRGRGVKVGISLVPSTPVAALSEVLPFVDLVLVMTVNPGFSGQQMIAHCLSKVSALVQMRTERGYSYMISVDGGIDCRTLPQALDAGADVIVSGSAFFSGTLRSLLCKDSSGA

SEQ ID NO: 19007 - protein, 163 aa, Neurospora crassa
MSAAHDDAQHEHTFDSVDAGRSATYPMQCSALRKGGHVVIKNRPCKIVDMSTSKTGKHGHAKVHLVAIDIFTGKKLEDLCPSTHNMDVPNVKRTDYQFSYIDEDFLVLIDSNGEEKRELKMPEGELAKRIEKLEEEGKDFFVGVQTAMGEEAAIDVKEASNKD

SEQ ID NO: 19008 - protein, 977 aa, Desulfovibrio gigas
  misc_feature (158)..(158): Xaa can be any naturally occurring amino acid
ATMALKTVDAKQTTSVCCYCSVGCGLIVHTDKKTNRAINVEGDPDHPINEGSLCAKGASTWQLAENERRPANPLYRAPGSDQWEEKSWDWMLDTIAERVAKTREATFVTKNAKGQVVNRCDGIASVGSAAMDNEECWIYQAWLRSLGLFYIEHQARIXHSATVAALAESYGRGAMTNHWIDLKNSDVILMMGSNPAENHPISFKWVMRAKDKGATLIHVDPRYTRTSTKCDLYAPLRSGSDIAFLNGMTKYILEKELYFKDYVVNYTNASFIVGEGFAFEEGLFAGYNKETRKYDKSKWGFERDENGNPKRDETLKHPRCVFQIMKKHYERYDLDKISAICGTPKELILKVYDAYCATGKPDKAGTIMYAMGWTQHTVGVQNIRAMSINQLLLGNIGVAGGGVNALRGEANVQGSTDHGLLMHIYPGYLGTARASIPTYEEYTKKFTPVSKDPQSANWWSNFPKYSASYIKSMWPDADLNEAYGYLPKGEDGKDYSWLTLFDDMFQGKIKGFFAWGQNPACSGANSNKTREALTKLDWMVNVNIFDNETGSFWRGPDMDPKKIKTEVFFLPCAVAIEKEGSISNSGRWMQWRYVGPEPRKNAIPDGDLIVELAKRVQKLLAKTPGKLAAPVTKLKTDYWVNDHGHFDPHKIAKLINGFALKDFKVGDVEYKAGQQIATFGHLQADGSTTSGCWIYTGSYTEKGNMAARRDKTQTDMQAKIGLYPGWTWAWPVNRRIIYNRASVDLNGKPYAPEKAVVEWNAAEKKWVGDVPDGPWPPQADKEKGKRAFIMKPEGYAYLYGPGREDGPLPEYYEPMECPVIEHPFSKTLHNPTALHFATEEKAVCDPRYPFICSTYRVTEHWQTGLMTRNTPWLLEAEPQMFCEMSEELATLRGIKNGDKVILESVRGKLWAKAIITKRIKPFAIQGQQVHMVGIPWHYGWSFPKNGGDAANILTPSVGNPNTGIPETKAFMVNVTKA

SEQ ID NO: 19009 - protein, 90 aa, Anabaena variabilis ATCC 29413
MEIKIEHQPSPEILQKLGVFQWGIWQKEVSKFPWTYDTQETCYFLEGDVIVTPHGGQPVQMGKGDLVTFPVGMSCIWEIKSGVKKHYSFN

SEQ ID NO: 19010 - protein, 343 aa, Mycobacterium sp. KMS
MRIGVLTGGGDCPGLNAVIRAVVRTCDVRYGSSVVGFQDGWRGLLENRRIQLRNDARNDRLLAKGGTILGTARVHPEKLRAGLDQIKQTLDDNGIDVLIPIGGEGTLTAAHWLSEENVPVVGVPKTIDNDIDCTDVTFGHDTALTVASEAIDRLHSTAESHQRVMLVEVMGRHAGWIALNAGLASGAHMTLIPEQPFDVEEVCRLVKQRFVRGDSHFICVVAEGAKPAEGTMQLRQGGMDEFGHEKFTGVAQQLAIEVEKRVNRDVRVTVLGHVQRGGTPTPYDRVLATRFGVNAADAAHAGEYGMMVSARGQEIGRVSLADATRRLKLVPQSRYDDAAEFFG

SEQ ID NO: 19011 - protein, 357 aa, Bradyrhizobium sp. BTAi1
MSKKPYRIAVIPGDGIGKEVMPEGLRVIEAAAKKHGVAVQFDHFDFSSYDYYEKHGQMMPDDWKAQIGSHDAIYFGAVGWPAKIADHVSLWGSLIKFRREFDQYVNLRPVRLMPGVPSPLAGRKPGDIDFWVVRENTEGEYSSVGGRMFPDTDREFVTQQTVMTRTGVDRILKFAFELAQSRPKKHLTSATKSNGISITMPYWDERVEAMAKNYPGVKWDKYHIDILTANFVLHPDWFDVVVGSNLFGDILSDLGPACTGTIGIAPSGNINPERNFPSVFEPVHGSAPDIAGQGIANPIGMIWSGAMMLEHLGEKTAAQAIVGAIERTLAERTLRTRDLGGNADTEACGKAVAEMVD

SEQ ID NO: 19012 - protein, 406 aa, Oceanicola granulosus HTCC2516
MTPLADGVEASWSRILEGKSGAGPITLFDPEGFGTTYACEVPRGAGEGEFDPNRYMDPKDQRKVDDFIIFAMAAAAQAVEDAGWTPEDEAELLRTGVLTGSGIGGLNSIANTAIQMKEKGPRRVSPFFVPGALINLISGQIAIKYGYKGPNHAVVTACSTGAHAIGDATQLIKTGRADVMLAGGAEATICEIGIAGFNACKALSTKYADEPAKASQPYNRGRDGFVMGEGAGMVMLEEYEHAKARGARIYGEVLGYGLSGDAYHITAPAEDGDGAERSMRMALEDAGLQPEDVDYINAHGTSTMADAIELAAVERLMGAHAKDVTMSSTKSMTGHLLGAAGAIEAIFSILAIRDQVCPPTINLTDPDVETSIDLAPNAKVERPVKVALSNSFGFGGTNASVLFGKV

SEQ ID NO: 19013 - protein, 496 aa, Thiomicrospira crunogena XCL-2
MSEATQYQEINDLLSKNKGYKEGFYTQTTVETFEKGLNETVIRAISAKKNEPEWMLDFRLKAFEHWKTMKEPHWAKAEYEPLDYQDYSYYSAPECSACGDHCQTDGADAVEPEMDPEVAKAFAALGVPVYGDETSEKTNIAVDAIFDSVSVSTTKREDLSKLGIIFCSFSEAVQDYPELVQKYLGTVVPYHDNYFAALNSAVASDGTFVYIPEGVRSPIDLSTYFRINEAKTGQFERTILIADKNSYVSYLEGCSAPVRDTYQLHAAVVEVIVHENAEVKYSTVQNWYPGDEDCEGGILNFVTKRGVCEGANSKLSWTQAETGSAITWKYPSCVLKGDNSIGEFYSVALTNRRQQADTGTKMIHIGKNTRSTIISKGLSAGKSDNTYRGLVKILPTAEGARNFTQCDSMLIGDQCGAHTFPYIEVENPTAKMEHEATTSRIGEDQLFYCQQRGISEQDAISMIVNGFCKEVFSELPLEFAQEAEELLAISLEGSVG

SEQ ID NO: 19014 - protein, 150 aa, Clarkia delicata
KGEVVNNHDELMSNFFAQPDALAYGKTPEQLKKENVSEHLIPHKTFTGNRPSLSILLPTLDAYRIGQLLGIYEHRVAVQGFVWGINSFDQWGVELGKSLATQVRKQLHASRVKGEPVEEGFNFSTKTLLTRYLQATSDVPADPSTLLPNI

SEQ ID NO: 19015 - protein, 505 aa, Vinca major
MAIVDFLAAFLIFILTQKLIQTLFRRTYRRKLPPGPKGWPVIGALPYLGTMPHTSLAYMAKKYGPVMYLKVGTNDMVVVSTPDAARAFLKTLDINFSNRPPNAGATHLAYGAQDMVFAHYGPKWKLLRKLSNLHMRGGKALEDWSNVRISELGHMLETMYESSKKGEAVVVAEMLTYAMANMIGQVILSRRVFVTKGSDSNEFKDMVVELMTSAGLFNIGDFIPSIAWMDLQGIEGGMKRLHKKFDVLLTKLLEEHKESSSKRKGKPDLLDYVLANRDNSEGERLTTTNIKALLLNLFSAGTDTSSSIIEWALSEMLRNPSILKRAQHEMVQVIGRNRRLVESDISRLPYLQAICKETFRKHPSTPLNLPRIATEACEVNGYYIPKGTRLSVNIWAIGRDPDVWENPLEFNPDRFLSGKNAKIDPRGNDFELIPFGAGRRICAGTRMGILLVEYILGTLVHSFDWNLPSSVTKLNMDESFGLALQKVVPLAALVTPRLPINAYSP

SEQ ID NO: 19016 - protein, 183 aa, Arabidopsis thaliana
  misc_feature (132)..(132): Xaa can be any naturally occurring amino acid
  misc_feature (149)..(149): Xaa can be any naturally occurring amino acid
MASSMLSSAAVVTSPAQATMVAPFTGLKSSAAFPVTRKTNKDIISIASNGGRVSCMKVWPPIGKKKFETLSYLPDLSDVELAKEVDYLLRNKWIPCVEFELEHGFVYREHGTTPGYYDGRYWTMWKLPLFGXCTDSAQVLKEVEECKKXEYPGAFIRIIGFDNTRQVQCISFIAYKPPSFTEA

SEQ ID NO: 19017 - protein, 429 aa, Clarkia delicata
AAHLKQKIDRMNNGDHINSTENRSVLHVALRAPRNSVICSDGKNVVPDVWNVLDKIKDFSERVRNGSWVGATGKELKDVIAVGIGGSFLGPLFVHTALQTDPEASKNARGRELRFLANVDPIDAARNISGLNPETTLVVVVSKTFTTAETMLNARTLREWISSALGVSAVAKHMVAVSTNLPLVEKFGIDPNNAFAFWDWVGGRYSVCSAVGVLPLSLQYSFAVVEKFLQGAHSIDQHFSSAPFEKNIPVLLGLLSVWNVSFLGYPARAILPYSQALEKLAPHIQQVSMESNGKGVSIDGLPLPFESGEIDFGEPGTNGQHSFYQLIHQGRVIPCDFIGVVKSQQPVYLKGEVVNNHDELMSNFFAQPDALAYGKTPEQLKKENVSEHLIPHKTFTGNRPSLSILLPTLDAYRIGQLLGIYEHRVAVQG

SEQ ID NO: 19018 - protein, 463 aa, Oryza sativa
MTSLSSSAAAARATFVMPSSVRGGMSRGRRMARLVTRAAASSPKLPSGRRLRVAVVGGGPAGGAAAEALAKGGVETVLIERKLDNCKPCGGAIPLCMVSEFDLPLDLVDRKVRKMKMISPSNVAVDIGGTLAPHEYIGMVRREVLDAYLRSRAEGAGAEVVNGLFLRYEAPKEPNGSYVVHYNHYDSSNGKAGGEKRTFEVDAIVGADGANSRVAKDMGAGDYEYAIAFQERVKIPDDKMKYYEERAEMYVGDDVSPDFYGWVFPKCDHVAVGTGTVTHKPDIKKFQAATRLRAKDRIEGGKIIRVEAHPIPEHPRPKRVAGRVTLVGDAAGYVTKCSGEGIYFAAKSGRMCAEAIVAGSANGTRMVEESDLRRYLAEFDRLYWPTYKVLDVLQKVFYRSNAAREAFVEMCADDYVQRMTFDSYLYKRVVPGNPLDDIKLAVNTIGSLVRATALRREMEKVTL

SEQ ID NO: 19019 - protein, 203 aa, Brassica napus
RPRVRDNGTVPLEVQIRTQEMHLQAEFGFAAHWRYKEGDCEYSSFVLQMVEWARWVVTWHCETMSKDRSSICSSDSIKPPCKFPSHSEDCPASYKPNSSQDGPVYVIVIENDKMSVQEFPASSTVSDLLSRAGPGSSRWSMYGIPAKEELRPRLNQRPVSDLKWKLKMGDVVELTPPIPDESLPEYREEIQRMYDRGLAFSRP

SEQ ID NO: 19020 - protein, 352 aa, Cochliobolus heterostrophus
MPPAGSGSSRKISFNVSEQYDIQDVVGEGAYGVVCSALHKPSGQKVAIKKITPFDHSMFCLRTLREMKLLRYFNHENIISILDIQKPRNYETFTEVYLIQELMETDMHRVIRTQELSDDHCQYFIYQTLRALKAMHSANVLHRDLKPSNLLLNANCDLKVCDFGLARSAASTEDNSGFMTEYVATRWYRAPEIMLTFKEYTKAIDVWSVGCILAEMLSGKPLFPGKDYHHQLTLILDVLGTPTMEDYYGIKSRRAREYIRSLPFKKKIPWKAIFPKTNDLALDLLERLLAFNPVKRISVEDALKHPYLEPYHDPDDEPGADPIPEEFFDFDKNKDNLTKEQLKLLIYQEIMR

SEQ ID NO: 19021 - protein, 504 aa, Xanthomonas campestris pv. vesicatoria str. 85-10
MTQTNGFDALHAHAQRLRGAAIPALLAAEPQRPTQYARQVGPLYFNFARQKYDRAALDALFAIARERDLAGAFQRLFRGEQVNVTEQRAALHTALRGDLTDAPVASEAYATAAEVRQRMGALIQQLEATEVTDIVSVGIGGSDLGPRLVADALRPVSGARFRVHFVSNVDGAAMQRTLATLDPARTAGILISKTFGTQETLLNGSILHAWLGGSERLYAVSANPERAAKAFDIAPGRVLPMWDWVGGRYSLWSAVGFPIALAIGFERFEQLLEGAAQFDAHVLNTPLEENVAVLHGLTAVWNRNLLGSATHAVMTYDQRLALLPSYLQQLVMESLGKRVKLDGSAVDSDTVSVWWGGAGTDVQHSFFQALHQGTSVVPADFIGTVHNDDPYAENHVALMANVLAQTEALANGQDSSDPHRSYPGGRPSTVILLDALTPQALGGLISMYEHSVYVQSVMWGINAFDQFGVELGKQLASQLLPALKGEAADVADPVTRELLSKLRG

SEQ ID NO: 19022 - protein, 362 aa, Oryza sativa
LLFFFSVLIPVAVSLLFPCAYVLIWHRKGQILCYLLCNKTRSRNESNIQKLIVSYGSLAPKRYKYSEVAKITSFLSNKLGEGGYGVVFKGKLQDGRLVAVKFLHDSKGNGEEFVNEVMSIGRTSHVNIVSLFGFCLEGSKRALIYDYMPNSSLDNYIYSEKPKETLGWEKLYDIAIGIARGLEYLHHGCNTRIVHFDIKPQNILLDQDFCPKIADFGLAKLCCTKESKLSMTGARGTIGFIAPEVLYRSFGVVSIKSDVYSYGMMLLEMIGGRKNVKSMVQNSSEKYFPDWIYDHFYQGDGLQACEVTSEVEEIAKKMTLIGLWCVQVLPMHRPTITQVLDMFEKALDELDMPPKQSFCESL

SEQ ID NO: 19023 - protein, 617 aa, Arabidopsis thaliana
MDSDFGIPRELSPLQQLRSQYHPELPPCLQGTTVRVELGDGTTVAKAGDAHIIARAFPHTLGQPLAHFLRATAKVADAQIITEHPVKRVGIVFCGRQAPGGHNVVWGLYEALKVHNAKNTLLGFLGGSEGLFAQKTLEITDEVLQTYKNQGGYDMLGRTKDQIRTTEQVNAALKACTDLKLDSLVIIGGVTSNTDAAHLAEFFAEAKCSTKVVGVPVTINGDLKNQFVEANVGFDTTCKVNSQLISNICTDALSAEKYYYFVRLMGRKHSHVALECTLQSHPNMVILGEEVTASKLTIFDIIKQICDAVQARAEQDKNHGVILIPEGLVESIPELYALLKEIHGLLKEGVQVDNISTQLSSWSSALFEFLPPFIKKQLLLHPESDDSAQLSQIETEKLLAYLVETEMNKRLKEGTYKGKKFNAICHFFGYQARGSLPSKFDCDYAYVLGHVCYHILAAGLNGYMATVTNLKSPVNKWKCGAAPISAMMTVKRWSQNSGSTTIGRPVIHPASVDLKGKAYDLLRQNAQKFLMEDMYRNPGPVQYDGPGADAKAVSLCVEDQDYMGKIKKLQEYLDQVRTIVKPGCSQDVLKAALSVMASVTDVLTTISSSSTSGQQFA

SEQ ID NO: 19024 - protein, 314 aa, Bordetella pertussis Tohama I
MAAVERLTIATRASRLALWQAEHVRDLLRARYPACSVELLTLTTRGDQILDRTLSKVGGKGLFVKELETALLDGRADLAVHSLKDVPVDLHAPFELSCVLERADPRDAFVSNDYGSLADLPPGAAVGTSSLRRESQIRARYPHLVVKPLRGNLDTRLGKLDNGDYAAIVLAAAGLERLGLAARIRALLEPDDSLPAAGQGALGIEILQGRADVRAMLAPLGDAATLACVTAERAVSRMLGGSCQVPLAAYARIDGDELALRALVAAPDGRRIVRAERRGPRDQAQAIGESAARDLLADGADAILAELLPTSPAP

SEQ ID NO: 19025 - protein, 260 aa, Oceanobacillus iheyensis HTE831
MTMTSAVRYQKENQIAYIAMNRPEKRNALSIEMAEELIAALHQAEKDSEVKVVILTGEGKGFSAGGDLQVLHSLNNSAQIMNYMKKALQIIQTMRDLDKYVISAVHGFAAGAGFSIAIAADFIVAKKDASFACSFTNVGIIPDLGLLKGLADKLPTAVAKEWISSGRHITAQEAYERGIVNRVVEGDLLEEATDFAQFIVQGPPLANQFVKHMVNHASEYNQDTNDLQELAVQTLLLQSEDNKEGIAAFFEKRKPAFKGK

SEQ ID NO: 19026 - protein, 163 aa, Thermobifida fusca YX
MSTPFATADLIDAYGDELASCELQFRQFGGVRAFFGPIQTIKCHEDNALVKEVLNQPGDGRVLVVDGGSSLRSALMGDMIARAAERNGWAGVVINGAVRDVAELATLSLGIKALGSNPRKSAKAGAGQVGVNVAFGQVVFTPGAWLYSDEDGIVVSAKELSLP

SEQ ID NO: 19027 - protein, 161 aa, Medicago sativa
MSDEEHQFESKADAGASKTYPQQAGTIRKNGYIVIKNRPCKVVEVSTSKTGKHGHAKCHFVAIDIFTSKKLEEVYVPSSHNCDVPHVNRTDYQLIDISEDGFVSLLTENGNTKDDLKLPTDDSLLTQIKDGFAEGKDLVVSVMSAMGEEQICALKDIGGKN

SEQ ID NO: 19028 - protein, 494 aa, Citrus sinensis
MVLSKTFSESDESIHSTFASRYVRNSLPRFTMPENSIPKEAAYQIINDELMLDGNPRLNLASFVTTWMEPECDKLMMAAINKNYVDMDEYPVTTELQNRCVNIIARLFNAPLEDSETAVGVGTVGSSEAIMLAGLAFKRKWQNKRKAEGKPFDKPNIVTGANVQVCWEKFARYFEVELKEVKLSEGYYVMDPAKAVEMVDENTICVAAILGSTLNGEFEDVKLLNDLLTEKNKETGWDTPIHVDAASGGFIAPFLYPELEWDFRLPLVKSINVSGHKYGLVYAGIGWVVWRNKEDLPEELIFHINYLGADQPTFTLNFSKGSSQVIAQYYQLIRLGFEGYRNVMENCHENAMVLKEGLEKTGRFNIVSKDEGVPLVAFSLKDNKRHDEFEVAELLRRFGWIVPAYTMPADAQHITVLRVVIREDFSRTLAERLVLDITKVLHELDSLPSKVLVPASEQNGRNGKKTEIETQREVTTYWRKFVSERKANNKNKIC

SEQ ID NO: 19029 - protein, 146 aa, Methylobacillus flagellatus KT
MKNDLHLVCPHCQSINRVPTAKLSEHPNCGRCQQPLFTGEPIELTTATFARHLERSDLPLLVDFWAPWCGPCKMMAPQFEQAASLLEPKVRLAKVNTEAEPHLAAQFGIRSIPTLILFRGGHEVARQAGAMGAQDIMRWVASQLPR

SEQ ID NO: 19030 - protein, 293 aa, Bordetella pertussis Tohama I
MSILINKDTKVITQGITGKTGQFHTRMCREYANGKAAFVAGVNPKKAGEDFEGVPIYANVKDAKADTGATVSVIYVPPAGAAAAIWEAVEAELDLVICITEGIPVRDMLEVKNRMQAMNSKTLLLGPNCPGLITPDEIKIGIMPGHIHRKGRIGIVSRSGTLTYEAVAQVTELGLGQSSAVGIGGDPINGLKHVDVLKLFNDDPDTDAVIMIGEIGGPDEVNAAQWAKDNMKKPVVGFIAGVTAPAGKRMGHAGALISGGADTADAKLEVMEACGIRTTRNPSEMGKLLKSVL

SEQ ID NO: 19031 - protein, 473 aa, Citrus sinensis
MAGLTLVYDLVLYISISTVIFFIIKRSRSRRLRLPPGSLGLPFLGETLQLIAAYKTENPEPFIDVRVKRFGSIFTTHIFGEPTVFSADPETNRFILQNEGKSFECSYPGSVSNLLGKHSLLLMKGSLHKRMHSLTMTFANSSIIRDHLLVVIDRLVRLHMDSWTDRVLLMEEAKKITFELTVKQLMSFDPNEWTESLRKEYVLVIEGFFTVPLPIFSTTYRRAIQARTKVAEALSLVVRQRRKESEPGERKNDMLEALLAGDDGFSDEEIVDFLVALLVAGYETTSTIMTLAVKFLTETPLALAQLKEEHDEIRAKKSKQEPLEWNDYKSMPFTQCVVNETLRVANIISGVFRRAMTDINIKGYTIPKGWRVFASFRAVHLDHDHFKDARSFNPWRWQNNSGATSPVNVSTSFGGGPRLCPGYELARVELSVFLHHLVTRFSWVPAEQDKLVFFPTTRTQKRNPIIVQRRNEN

SEQ ID NO: 19032 - protein, 332 aa, Carboxydothermus hydrogenoformans Z-2901
MAHRVTLIPGDGIGPEIVEAARRVIDASGANIEWEVVEAGEKVMAEYGTPLPEYVLESIKKNKVALKGPMTTPIGTGFRSVNVALRKALDLYANVRPAKSLPGVVTRYENIDLITVRENTEDLYAGVEHMVGDDAAESIKIITRKASQRIVRFAFELARKEGRKKVTAVHKANIMKYTDGLFLAVAREVAAEYPDIEFEDMIVDAMAMKLVQTPEKFDVMVMPNLYGDILSDLCAGLVGGLGVAPGANIGDEYAVFEPVHGSAPKHAGQNRVNPLAEILSGVMMLKHLGEMDAAAKIERALTKVLPNKDMVTYDLGGTAKTSEMADYIIKHL

SEQ ID NO: 19033 - protein, 72 aa, Brassica napus
MYEVAKQKREACVEEIKTWDEFIVALNKKKLILTPWCDEEEVERDVKARTKGETGAAKTLCSPFEQPELPEG

SEQ ID NO: 19034 - protein, 181 aa, Zea mays
MAYSMLSSAAVVTSPAQATMVAPFTGLKSSSAFPVTRKANNDITSIVSNGGRVSCMQVWPPIGKKKFETLSYLPDLTEVELGKEVDYLLRNKWIPCVEFELEHGFVYREHGSTPGYYDGRYWTMWKLPLFGCTDSAQVLKEVQECKTEYPNAFIRIIGFDNNRQVQCISFIAYKPPSFTGA

SEQ ID NO: 19035 - protein, 632 aa, Vibrio parahaemolyticus RIMD 2210633
MDVKERTQRRFSIGNQLMLAVLTLSLIFTLVISAISLYRDFQEELSHLDTDLKQVESSYLSSFSASLWVEDRELLLTQALGAMRLPSVDYLRIATKDEVIIELGTEITQDVVERRWPMQFSVGEKTFELAELTVQSDLSAVYQDLWQQFFFLLTTEAIKILLLMVGVLWVAFRLLVNPLQLLSGAVSDFSGGNAPSTVTLPKRWCFDEVSLLAQKYNRSVQKVREHQAELEAERDKAEVANRKKSEFLATMSHEIRTPMNGIIGVASLLSDTKLDPQQKEFVEIIDNSSQSLMTIIDDILDFSKVEAGKVELASETYHFRQLLDDVISLHTVKAQQKNLQLLSDIDPKLPAEVQGDEGRLKQVLNNLLSNAVKFTERGHVKLLVSLHEQNNDIAQVRFRVVDSGIGIAKEHQQAVFERFQQADGSTTRKYGGTGLGLAICAQLVHIMGGDIKLTSELGLGSCFDFTIPLTVVSGLPTYTDPLNVLDFPRTEANEATNKNPDKPWVLIVEDTEVNQRVVRIMLEQLGLKVSVASHGEEAFQLCREHAFDLIFMDCQMPVMDGFIATEQIRDMNEWGAHVPIIALTANVVKEDQQRCFEAGMNEFVAKPVTKARLQQIFEQYLPKALKNIATPK

SEQ ID NO: 19036 - protein, 355 aa, Helicobacter hepaticus
MYHKRIKEAIEAIKQGEMIIIMDDEDRENEGDLVMAGIFSSPQKINFMAQEARGLICVSITQELAQKLDLPPMVQKNDSNHETAFTISIDAKEAKTGISAFERDMTIRLMCESNTKPSDFVRPGHIFPLIAKEGGVLVRTGHTEASVDICRLAGVAPISVICEIMKKDGTMAGRGDKFLLDFASQHHLKILYVSDIIQYRLNFENLLREITRESAVFMGVECEKITFIDHLEREHIVFGFPHKGSSSNEPKPLIRFHNVRSDLELLQNAQEWNALLKSIECLKEKGGYLVFLNTHSEYANSSKTCGDIKDFGIGAQILKRLGIEDFVLLSSCGGSKGEYNALSGFNLHLVEKIEV

SEQ ID NO: 19037 - protein, 138 aa, Arabidopsis thaliana
  misc_feature (2)..(3): Xaa can be any naturally occurring amino acid
  misc_feature (12)..(13): Xaa can be any naturally occurring amino acid
  misc_feature (51)..(51): Xaa can be any naturally occurring amino acid
  misc_feature (63)..(63): Xaa can be any naturally occurring amino acid
  misc_feature (67)..(67): Xaa can be any naturally occurring amino acid
  misc_feature (78)..(80): Xaa can be any naturally occurring amino acid
  misc_feature (82)..(83): Xaa can be any naturally occurring amino acid
  misc_feature (85)..(85): Xaa can be any naturally occurring amino acid
  misc_feature (90)..(91): Xaa can be any naturally occurring amino acid
  misc_feature (93)..(94): Xaa can be any naturally occurring amino acid
  misc_feature (100)..(101): Xaa can be any naturally occurring amino acid
  misc_feature (104)..(105): Xaa can be any naturally occurring amino acid
MXXSMVSSAAVXXSPAQATMVAPFTGLKSSAAFPVTRKTNKDITSIASNGXRVSCMKVWPPIXKKKXETLSYLPDLSXXXLXXEXDYLLXXKXXPCVEFXXQHXXALLTPPYCPLMIPFLCPSFVITLPQCISSPPSP

SEQ ID NO: 19038 - protein, 83 aa, Brassica napus
MAGTGRSMLLSLLLFAVTLSLLEMYRGWFAASELKTIAGGFVSSFLFLLLLTFIGNYQEASGVRTGWGAVVVAQLVALIVAGT

SEQ ID NO: 19039 - protein, 391 aa, Erwinia carotovora subsp. atroseptica SCRI1043
MADIIINDTTLRDGEQSPGVAFRASEKLAIAEALVDAGVTALEVGTPAMGDDERARIAVIRRRLPDTVLMTWCRMNALEIRQSADLGMNWVDISVPASDRLREQKLRQPLNVLLAQLSSLIAQARQQGLRVCVGCEDASRASDDTLRQIAIAADAAGAERLRFADTLGVLDPFSTFARISTLRQNWGGEIEMHAHNDLGLATANTLAAIEAGVSHVNTTVLGLGERAGNAALETVALALERCLDRDSGIHFARLPALCQLVASAAQRTIDKQQPLVGEQVFTHESGVHVAALLNDSRSYQGIDPALMGREFCLVLGKHSGRQAVAGIFARLGFQPQASETEALLRSVRAFAENWKRNPLDYELLEMYRELCGSDAVMGRANDGMVLPVTRR

SEQ ID NO: 19040 - protein, 528 aa, Streptococcus agalactiae A909
MKFTELNLSQDILSAVEKAGFVEPSPIQEMTIPLALEGKDVIGQAQTGTGKTAAFGLPTLNKIHTEDNTIQALIIAPTRELAVQSQEELFRFGRDKGVKVRSVYGGSSIEKQIKALRSGAHVVVGTPGRLLDLIKRKALKLNHIETLILDEADEMLNMGFLEDIEAIISRVPETRQTLLFSATMPDPIKRIGVKFMKDPEHVKIKATELTNVNVDQYYVRVKENEKFDTMTRLMDVDQPELSIVFGRTKRRVDELTRGLKLRGFRAEGIHGDLDQNKRLRVIRDFKNDHIDILVATDVAARGLDISGVTHVYNYDIPQDPESYVHRIGRTGRAGKSGQSITFVSPNEMGYLTIIENLTKKRMTGMKPATASEAFQAKKKVALKRIARDFEDQELVSKFDKFKADALELATQYTPEELALYVLSLTVQDPESLPEVEITREKPLPFKPSGGGFKGKGGRGNGRGGDRRRNDRGDRRGNRDRDDRGGRCDFKRRDDKFKKDNRRQENKKPHKNTSSEKQTGFVIRNKGDK

SEQ ID NO: 19041 - protein, 129 aa, Brassica napus
MGISGIVSVLLLLVLLSLSSNNIKGVEAFHHVYENLQSQSVESVNHLHRTAFHFQPPKHWINDPNGPVYYKGFYHLFYQYNTKGAVWGNIVWAHSVSKDLVNWEALEHALYPSKWFDIKGTWSGSITIV

SEQ ID NO: 19042 - protein, 115 aa, Triticum aestivum
MARGAATQLVLVSMVAAMLLVACDAAISCGQVTSALSPCISYARGNGANPPAACCSGVRSLAGAARSTADKQAACKCIKSAAGGLNAGKAAGIPLKCGVSVPYAISSSVDCSKIR

SEQ ID NO: 19043 - protein, 394 aa, Archaeoglobus fulgidus DSM 4304
MILMRFFIIGFGQAGGKILDMFIENEKMRGSNIRMRWLAINSARTDLMGLKHVPVQDRILIGQTIVKGHGVGTDNKLGAKVAQEDIETILNAIDERGTHDMDAFLIVAGLGGGTGSGGAPVLAKYLSEMYSEPVYAVGILPAPEEGKLYSLNAARSMISLLKYVDNLILVDNGAWKFEGTSLKESFAKINEEIVRRLALLARAGEPIEEDVVGEMVVDSSEVVNTLRGGGISSIGYATTLAESSEKKRKGFRLFGRKEEEEIEALENDKPMKIATLVRRAALGRLTVPCNIHSAERALVLVAGPPEHLDRKGLEKAKIWLEEQIAGVEVRAGDYPTRRTKYVAALVLLANVTDIPRVKELQRLAAEAKEEAEEAEKMRMTKTIELFDEDIEPLI

SEQ ID NO: 19044 - protein, 659 aa, Neisseria meningitidis Z2491
MPKILQQTTLHRFFRANTHHPISPSVLQQAGDLIRWLCFSDGISDFRPCRLKPQNPIGGTVMNTVSNYLSALREAMKAQGLDALVIPSADPHLSEYLPEHWQARRELSGFTGSVGTFVVTADEAGVWVDSRYWEQAAKQLAGSGIELQKSGQVPPYNEWLAANLPENAAVGILSDMVSLTGKRTLAQSLAAKNIRIEHPDGLLDQVWTSRPAIPAETVFVHDPAYVSETAAEKLARVRAVMAEKGADYHLVSSLDDIAWLTNLRGSDVPFNPVFVSYLLIGKDNAVLFTDRCRLNAEAAAALQTAGITVEPYAQVADKLAQIGGALLIEPNKTAVSTLVRLPESVRLIEGINPSTLFKSCKSEADIARIREAMEHDGAALCGFFAEFEDIIGNGGSLTEIDVDTMLYRHRSVRPGFISLSFDTIAGFNANGALPHYSATPESHSTISGNGLLLIDSGAQYKGGTTDITRVVPVGTPTAEQKRDNTLVLKAHIALAEAVFPENIPSPLIDAICRKPLWQAQCDYGHGTGHGVGYFLNVHEGPQRIAFAAPATPETAMKKGMVTSIEPGLYRPGKWGIRIENLAANQAVAAPQETEFGSFLCFETLTLCPIDTRLMDTALMTDGEIDWVNRYHAEVRRRLEPLTEGAAKAWLIKRTEPLAR

SEQ ID NO: 19045 - protein, 692 aa, Methanosarcina mazei Go1
MKNHNIAVYPFTAIVGQEKMKKALVLNLINPKLGGVLVRGEKGTAKSTAVRALANLLPEIEVVEGCKFKCNPQYQKELCEECLGKLNAGNLRVSRIKMKVVDLPVSATEDRVVGTLDIEHAIKKGEKRFEPGVLAMAHRGILYVDEINLLDDHIVDVLLDSAAMGVNTVEREGISYSHPANFVLVGTMNPEEGELRPQLLDRFGLCVDVKGISDVSRRVELIKYRLSYEADPEGFAANWQAAETELCGQILTAKQLLSEVRISDDMLELISQICVDMGVDGHRADITMMKTSITLSAFNGRADVLEEDVKEAAELVLSHRMRRKPFDSHSDKQDKLDESIEKHREKQKEKNKEKEQNRDQNNQEQQKQDRKENPEKTHEHPEGQQPENAQSNAEGQPDASSETIFATGESYQIKQLAPEFIRADRKGSGRRSKTFTSSRQGRYIKSAIPHEKTTDLAFDATLRAAAPYQLTREKNGNSIIIHDPDLRKKIREKKIGNLVLFVVDASGSMGARQRMVASKGAVLSMLMDAYQKRDRVGLIAFKGDSAELLLPPTSSIELAQKYLQEMPTGGKTPISRGLVKGYEIIKSELRRDPDTCPFMVLISDGRANVSMNGEPPLHEIITIASRLKEEGIQSAVIDTESSMIKFGFAQQISTALGATYLTLENLKADSIVNAVRASAPFEIMMHPGVSSV

SEQ ID NO: 19046 - protein, 477 aa, Shigella flexneri 2a str. 301
MTQSRLHAAQNALAKLHEHRGNTFYPHFHLAPPAGWMNDPNGLIWFNDRYHAFYQHHPMSEHWGPMHWGHATSDDMIHWQHEPIALALGDDNDKDGCFSGSAVDDNGVLSLIYTGHVWLDGAGNDDAIREVQCLATSRDGIHFEKQGVILTPPEGIMHFRDPKVWREADTWWMVVGAKDPGNTGQILLYRGSSLREWAFDRVLAHADAGESYMWECPDFFSLGDQHYLMFSPQGMNAEGYSYRNRFQSGVIPGMWSPGRLFAQSGHFTELDNGHDFYAPQSFLAKDGRRIVIGWMDMWESPMPSKREGWAGCMTLARELSESNGKLLQRPVHEAESLRQQHQSVSPRRISNKYVLQENAQAVEIQLQWALKNSDAEHYGLQLGTGMRLYIDNQSERLILWRYYPHENLDGYRSIPLPQRDTLALRIFIDTSSVEVFINDGEAVMSSRIYPQPEERELSLYASHGVAVLQHGALWLLG

SEQ ID NO: 19047 - protein, 527 aa, Clarkia delicata
VEFDNIFLDYSRQQASPDTISKLYKLADAAHLKQKIDRMYNGDHINTTENRSVLHVALRAPRNSSICSDGKNVVPDVWNVLDKIKDFSDRVRNGSWIGATGKELKDVIAVGIGGSFLGPLFVHTALQTDPEASKNARGRELRFLANVDPIDVARNISGLNPETTLVVVVSKTFTTAETMLNARTLREWISSALGPSAVAKHMVAVSTNLPLVEKFGIDPNNAFAFWDWVGGRYSVCSAVGVLPLSLQYGFAVVEKFLQGAHSIDQHFSSAPFEKNIPVLLGLLSVWNVSFLGYPARAILPYSQALEKLAPHIQQVSMESNGKGVSIDGLPLPFESGEIDFGEPGTNGQHSFYQLIHQGRVIPCDFIGVVKSQQPVYLKGEVVNNHDELMSNFFAQPDALAYGKTPEELKKENVSEHLIPHKTFTGNRPSLSILLPTLDAYRIGQLLAIYEHRVAVQGFVWGINSFDQWGVELGKSLATQVRKQLHASRVKGEPVEEGFNFSTKTLLTRYLQATSDVPADPSTLLPNI

SEQ ID NO: 19048 - protein, 265 aa, Glycine max
MDQTMLLTSGISANHFLRNKNPLAQPKVHHLFLSGNSPVTLPSRIPSLVPLAIFKPKTKAAPKKVEKVKPKVEDGIFGTSGGIGFTKQNELFVGRVAMIGFAASLLGEALTGKGILAQLNLETGIPIYEAEPLLLFFILFTLLGAIGALGDRGKFVDDPPTGLEKAVIPPGKGVRSALGLKEQGPLFGFTKANELFVGRLAQLGIAFSLIGEIITGKGALAQLNIETGIPIQDIEPLVLLNVAFFFAAAINPGNGKFITDDGEES

SEQ ID NO: 19049 - protein, 1029 aa, Staphylococcus aureus subsp. aureus MRSA252
MNMKKQEKHAIRKKSIGVASVLVGTLIGFGLLSSKEADASENSMTQTENTSNESKSNDPSSVNAAPKTDNTNVSDSNTTTNTNSDETNVAQNPAQQETTQSASTNATTEETPVTGEVTTTATNQANTPATTQSSNTNAEESVNQTSNETTSNDTNTVSSVNSPQNSTNAENVSTTQDISTEATPSNNESAPQSTDASNKDVVNQAVNTSAPRMRAFSLAAVAADAPAAGKDITNQLTNVTVGIDSGDTVYPHQAGYVKLNYGFSVPNEAVQGDTFKITVPKELNLNGVTSTAKVPPIMAGDQVLANGVIDSDGNVIYTFTDYVNTKDDVKATLTMPAYIDPENVTKTGNVTLATGIGSTTANKTVLVDYEKYGKFYNLSIKGTIDQIDKTNNTYRQTIYVNPSGDNVIAPVLTGNLKPNTDSNALIDAQNTSIKVYKVDNASDLSESYYVNPDNFEDVTDSVNITFPNPNQYKVEFNTPDDQITTPYIVVVNGHIDPNSKGDLALRSTLYGYNSNIIWRSMSWDNEVAFNNGSGSGDGIDKPVVPEQPDEPGEIEPIPEDSDSDPGSDSGSDSGSDSNSDSGSDSGSDSTSDSGSDSASDSDSASDSDSASDSDSASDSDSASDSDSASDSDSASDSDSTSDSDSTSDSDSASDSDSDSDSDSDSDSDSDSDSDSDSDSDSDSDSDSDSDSDSDSDSDSDSDSDSESDSDSDSDSDSDSDSDSDSDSDSVSDSDSDSDSDSESDSDSDSDSDSDSDSDSESDSDSDSDSDSDSDSDSDSDSDSDSDSDSDSDSDSDSDSDSDSDSDSDSDSDSDSESDSDSDSDSDSDSDSDSDSDSDSDSDSDLDSDSDSDSDSDSDSDSDSDSDSDSDSDSDLDSDSDSDSDSDSDSDSASDSDSDSDSDSDSESDSDSDSDSDSDSDSASDSDSDSDSASDSDSDSTSDTGSDNDSDSESDSNSDSDSGSNNNVVPPNSPKSGTNASNKNEAKESKEPLPDTGSEDEANTSLIWGLLASLGSLLLFRRKKENKDKK

SEQ ID NO: 19050 - protein, 602 aa, Thiomicrospira crunogena XCL-2
MCGICGEIYWDGQMASETKLVPMLAELEKRGPDDGGTWVQNHVGLGHRRLSIIDLSDGGHQPMLDDEISLVFNGCIYNYETLSAELIELGHEFRSHSDTEVILKAYRQWGMECVSRFEGMFAFAIWDDHQHQLLLARDRFGIKPLYYAPVEGGVRFASNTQALLASGGINTDIDPVGLHHQFTLHAVVPAPHTILKGIRKLEPGHWMIVNPDGQMYKKSYWHLEAKRPTADNAPQTEKEWIDAIHESLKQAVHKRLTAADVPVGVLLSGGLDSSLIVALLAEAGVEDIRTFSIGFEDVPEEKGSEFEYSDLVVEQYQTAHQKYLIPNETVLPRLTEAVDAMAEPMFGQDAIAFYLLSEKVSEDVKVVMSGQGADEVFAGYFWYPMMAKAAESLKDASRPVDAFAPYYFDRSHEEWLEMIEDEFHVYDVTSELINDRLSDKGADSYLDQVLRLDTTTLIVDDPVKRVDNMTMAWGLEARVPFLDHHLVELAMSAPTDLKLKDFKYILKKIARGIVPNEVIDRPKGYFPMPALKYVRGPFYEMMKSILTSPQAKARGIFKPAYIQKLLDHPEADESFTAIKGSKLWHAALLELWLQRHVDPYVQ

SEQ ID NO: 19051 - protein, 526 aa, Clarkia delicata
VEFDNIFLDYSRQQASPDTISKLYKLADAAHLKQKIDCMYNGDHINSTENRSVLHVALRAPRNSAICSDGKNVVPDVWNVLDKIKDFSDRVRNGSWIGATGKELKDVIAVGIGGSFLGPLFVHTALQTDPEASKNARGRELRFLANVDPIDVARNISGLNPETTLVVVVSKTFTTAETMLNARTLREWISSALGPSAVAKHMVAVSTNLPLVEKFGIDPNNAFAFWDWVGGRYSVCSAVGVLPLSLQYGFAVVEKFLQGAHSIDQHFSSAPFEKNIPVLLGLLSVWNVSFLGYPARAILPYSQALEKLAPHIQQVSMESNGKGVSIDGLPLPFESGEIDFGEPGTNGQHSFYQLIHQGRVIPCDFIGVMKSQQPVYLKGEVVNNHDELMSNFFAQPDALAYGKTPEQLKKENVSEHLIPHKTFTGNRPSISILLPTLDAYRIGQLLAIYEHRVAVQGFVWGINSFDQWGVELGKSLATQVRKQLHGSRVKAKPVEGFNFSTKTLLIRYLEATSDVPADPSTLLPNI

SEQ ID NO: 19052 - protein, 76 aa, Oryza sativa
ALNGLSFYTTEEELKNVFSPFGAVEEARLVRDNQTGRPKGFGFVKYSSQADGEKAVKEMDGRIIRGRLIFVEIAKE

SEQ ID NO: 19053 - protein, 675 aa, Zea mays
ARAVVGQDAIKTALLLGAIDREIGGIAISGKRGTAKTVMARGLHAMLPPIEVVVGSIANADPNSPDEWEDGLADQIQYDSDGNVKSEIVKTPFVQIPLGVTEDRLIGSVDVEASVRSGTTVFQPGLLAEAHRGVLYVDEINLLDDGISNLLLNVLTEGVNIVEREGISFRHPCKPLLIATYNPEEGSVREHLLDRIAINLSADLPMSFDDRVEAVDIATRFQESSKEVFKLVEEKTETAKTQIIFAREYLKDVTISTEQLKYLVMEAIRGGCQGHRAELYAARVAKCLAAMEGREKVFVDDLKKAVELVILPRSILSDNPQDQQQEQPPPPPPPPPPENQDSSEDQDEEDEDQEDDEEENEQQDQQIPEEFIFDAEGGLVDDKLLFFAQQAQRRRGKAGRAKNVIFSEDRGRYIKPMLPKGPVRRLAVDATLRAAAPYQKLRREKERDKTRKVFVEKTDMRAKRMARKAGALVIFVVDASGSMALNRMQNAKGAALKLLAESYTSRDQVSIIPFRGDYAEVLLPPSRSIAMARKRLEKLPCGGGSPLAHGLSTAVRVGLNAEKSGDVGRIMIVAITDGRANVSLKRSTDPEAAAASDAPRPSSQELKDEILEVAGKIYKAGMSLLVIDTENKFVSTGFAKEIARVAQGKYYYLPNASDAVISAATKTALTDLKSS

SEQ ID NO: 19054 - protein, 320 aa, Thermobifida fusca YX
MSTTPARLGTRRSTMATNQSRRVAEILTARTGVPVELVLITSFGDITRAHLTQLGGTGVFVSALRDALLAGEVEFAVHSLKDLPTAPTEGIVLAAVTERDDPRDALCARDGLKFADLPPGATVGTGSPRRVAQLAALRPDLRYVPIRGNAETRLGKVASGELDAVVLAYAGLHRVGRLDDVTDVFDVDQVLPAPGQGALAVECRTADFTGPLRYLTAVDHLPTRAAVTAERVILAELEAGCAAPVGAYAEFVAEDRLRLRAAVVATDGSQAVRAEQTVTVTEFPDAVQAATALGRQLAHDMIEQGADQIVADAAAGRGES

SEQ ID NO: 19055 - protein, 207 aa, Arabidopsis arenosa
MASFQESSDLEAIQSHLFEDLLVCDGFMGDFDFDASFVSGLWCIEPQVPKQEPDSPVLDPDSFVNEFLQVEGESSSSSPELNSSSSSTYETDQSVKKAERFEEEEEARHYRGVRRRPWGKFAAEIRDPAKKGSRIWLGTFESDVDAARAYDCAAFKLRGRKAVLNFPLDAGKYEAPANSGRKRKRSDVQEELQRTQSNSSSSSCDAF

SEQ ID NO: 19056 - protein, 527 aa, Avicennia marina
MAIRQLITLARRTRKPVQACASLRPFSTAVATAPDASLPSPPPPTGMIYDRLSESVKQKLKKLEEPDSRFLRYNSPHPTVDSHTEILSAPLTRVTTLPNGLRIATESTLVSTTATVGVFIDAGSRFESEESNGTAHFLEHMIFKGTERRNARELEEEIENMGGHLNAYTSREQTTYYAKVMDKDVPRALDILSDILQNSRFDEQRIIRERDVILREMEEVEGQTEEVIFDHLHASAFQYTPLGRTILGPAENIKKIGKEHLRTYISTHYTAPRTVVVASGAVKHEDFVEEVKKLFTRLSSDPTTASELVAKEPAIFFTGSEVRMLDDDIPLAQFAVAFEGASWTDPDSIALMVMQSMLGSWNKNAVGGKHMGSELAQRVGINEIAESMMAFNTNYKDTGLFGVYAIAKPDCLDDLAYAIMYEITKLCYRVSEADVIRARNQLKSSLLLHMDGTSPVAEDIGRQLLTYGRRIPYAELFARIDAVDPSTIKRVANRFIFDRDVAISAVGPIQGLPDYNWFRRRTYWLRY

SEQ ID NO: 19057 - protein, 573 aa, Cryptococcus neoformans var. neoformans B-3501A
MSSSNSTVRVALRGGAILNNPRFNKGSAFTHQERSEFALRGRLPYAVDSLEIQVKRAYEQYKSRETNILKNSFLQSMKAQNWTLFYALLQAHLVEMFPIVYTPTEADAIADYSHLFRRSEGLYLTPPGEKNMEEDFLDACEGRELELIVVSDGEAILGIGDQGSGGIGISGAKAVIYSLIAGVDPAKCLAITLDVGTNNQDLLNDPLYIGYREKRLRDDPYDQFVDKFVGLVKKHQPECLLHFEDFGVTNAERLLRRYRDQHSIFNDDIQGTGAVTLAAVQAAISVTKSSLKDQRIVIYGSGSAGLGIARQLRDAIALDSSGSPSEAAKQFWLIDKHGLIKKSLGKDKIRSEIEDEFIRDEGDWGEGETGLKEVVKKIKPTILVGTSTQAGAFTEEVVKEMSKHVDRPIIFPLSNPTRLCEAQPKDVSEWSKGKALMSTGSPFDPVDISDSGEKYIVAECNNALIYPGLGLGSILAKSSKMTDKMIIAGAQRLGQLAPALVKKNANKSLLPDFGDAQKVNFEVALAVLEQAMEDGVARAKDIPEDKDERRKWAENNRWSPGYPNFKYDPEGLK

SEQ ID NO: 19058 - protein, 180 aa, Oryza sativa (japonica cultivar-group)
MASAPSTTASGLAPPPFSSARGARLLPGALLRLPPPPASVGSFRVVGPAAAPPGGRRIASARVRCGAAVRFIGQSEFEAEVLQSDLPVLVDFVADWCGPCRLIAPVVDWAAEEYEGRLKIVKIDHDANPQLIEEYKVYGLPSLILFKDGKEVPGSRREGAITKAKFKEYLEPLLSTSTVA

SEQ ID NO: 19059 - protein, 148 aa, Glycine max
  misc_feature (27)..(27): Xaa can be any naturally occurring amino acid
  misc_feature (42)..(42): Xaa can be any naturally occurring amino acid
SLDIMSDIPGASTYIIGAQNETAFYLXPHDVQQVVNISVDNXKSPNSTSSYHCDIMRHIPIDSIDPSLAIGFYCRDKDDFDDFCSQASKLAEESNGAPLFTVTQSRSFSKQVTSNDVSGDNTGFQEEDFPGMDRGNDTGTNEDDWQLL

SEQ ID NO: 19060 - protein, 302 aa, Fusobacterium nucleatum subsp. vincentii ATCC 49256
MKKNIIIGSRGSILALAQANLIKDKLQINYPNLTFTIKEIVTSGDKDLKSNWENSDISLKSFFTKEIEQELLDGDIDIAVHSMKDMPAISPKGLICGAIPDREDARDVLVSKNGFLVTLPQGAKVGTSSLRRAMNLKAIRPDFEIKHLRGNIHTRLKKLETEDYDAIVLAAAGLKRTGLADKITEYLNGEVFPPAPAQGVLYIQCRENDEEIKKILKSIHNKAVAKIVEIEREFSKIFDGGCHTPMGCYSQINGDKIKFTAVYLDEGKQIKAVVEDDLAKGKEIAYMAAEEIKNKINKGTIQ

SEQ ID NO: 19061 - protein, 599 aa, Oryza sativa
MAKMIEEKYKDLHPRLPVIVAETLLYTDPEIELPLWLVQMFKRPVDVLHRKNMSATWFPYTAIERLWCQLEEMQNAGHSVDQCDRLKKLLHGSLMSHLQQSTNLPAVTRHIDKVYSCPFGLFDGSVSPFSELGVWSYEAGKMDKLNGSARLMIVSDLDHTMVDHHDEENLSLLRFGALWESVYCQDSLLVFSTGRSPTLYMELRKEKPMLTPDITIMSVGTEITYGEEMVPDDGWVEYLNNKWDRNIVVEETANVSELKLQVESEQRPHKVSFYVDKKSAQEVIKSLSEKLEKRGLDVKIIYSGGQDLDVLPQGAGKGQALAYLLKKLSSCGKPPNNTLACGDSGNDAELFSIPGVHGVMVSNAQEELLQWYSENAKDNPKIIHATERCAAGIIQAIGHFKLGPNVSPRDVDFPYVKENPVKPTDAVVKFYVLYEKWRRAEVPKSDSVTQYFKNITHANGVIIHPAGLECSLHASIDALGSCYGDKQGKKYRAWVDRLVVSQCGSEGWLVRFNLWELEVMEVSENPISLINIQCIKERPVSFGCISYQHTNAICDVWSCCLTSLALNAKPETPEGFVVTHIHKTWLKGYSSADEQSSKL

SEQ ID NO: 19062 - protein, 83 aa, Arabidopsis thaliana
  misc_feature (2)..(2): Xaa can be any naturally occurring amino acid
  misc_feature (21)..(21): Xaa can be any naturally occurring amino acid
  misc_feature (28)..(28): Xaa can be any naturally occurring amino acid
  misc_feature (32)..(32): Xaa can be any naturally occurring amino acid
  misc_feature (55)..(55): Xaa can be any naturally occurring amino acid
  misc_feature (67)..(67): Xaa can be any naturally occurring amino acid
  misc_feature (69)..(69): Xaa can be any naturally occurring amino acid
  misc_feature (76)..(76): Xaa can be any naturally occurring amino acid
MXSSMFSSAVVVTSPVQATMXAPFTGLXSSAXFPVTRKTNKDITSIASNGGRVSXMKVWPPIGKKKXEXSILPPLXLSDVRIG

SEQ ID NO: 19063 - protein, 404 aa, Pediococcus pentosaceus ATCC 25745
MKNRIIEKIENALQTLKNGGLIIITDDENRESEGDMVGLAEYVTPKAVNTMVTNARGLLCVPMSAEIAQKLGLSPMVTNAEDAFGTAFTISTDAKTTKTGISAFDRAKTIQKLADPQAKFSEFYHPGHVFPLIAEEGGVLARGGHTEAAVDLAKLAGVRPVAYITEVLKKDGTMARRNTLKSLAEGMQMPLLTIEEIKIYRYMKDAGIVKSVAKVHLPTKYGEFEMEAFDTGAGQEPTLLLTKGSLSEVQPLLLRIHSECLTGDIFGSKRCDCGEQLERSLKEIQSRGRGALLYLRQEGRGIGLANKLKAYELQEQGMDTVEANLKLGFQADERHYGVAAAILRKKGITKVNLLTNNPDKIKQLETLGIKVEERVTIQIPARPENRSYLKVKKEKMHHLLKGMD

SEQ ID NO: 19064 - protein, 118 aa, Nostoc punctiforme PCC 73102
MSTLYDNIGGQPAIEQVVDELHKRIATDSLLSPIFAGTDMAKQRNHLVAFLGQIFEGPKQYGGRPMDKTHAGLNLQQPHFDAIAKHLGEAMAVRGVSAENTKAALDRVTNMKGAILNK

SEQ ID NO: 19065 - protein, 116 aa, Triticum aestivum
  misc_feature (83)..(83): Xaa can be any naturally occurring amino acid
MARTAATKLVLVALVAAMILAASDAAISCGQVSSALTPCVAYAKGSGTSPSGACCSGVRKLAGLARSTADKQATCRCLKSVAXGGLNPNKAAGIPSKCGVSVPYTISASVDCSKIH

SEQ ID NO: 19066 - protein, 423 aa, Aspergillus oryzae
MADLRGRKIFKVFNQDFIVDERYNVTKELGQGAYGIVCAATNIQTGEGVAIKKVTNVFSKKILAKRALREIKLLQHFRGHRNITCLYDMDIPRPDNFNETYLYEELMECDLAAIIRSGQPLTDAHFQSFIYQILCGLKYIHSANVLHRDLKPGNLLVNADCELKICDFGLARGFSIDPEENAGYMTEYVATRWYRAPEIMLSFQSYTKAIDVWSVGCILAELLGGRPFFKGRDYVDQLNQILHYLGTPNEETLSRIGSPRAQEYVRNLPFMPKIPFQRLFPSANPDALDLLDRMLAFDPSSRISVEEALEHPYLHIWHDASDEPTCPTTFDFHFEVVDDVQEMRRMIYEEVVRFRAAVRQQSQAQAAAAAQQQQIAQQTNVPIPENQQGVWKQEEPKPQEALAAGGGVHNDLESSLQRGMDVQ

SEQ ID NO: 19067 - protein, 403 aa, Oryza sativa
MAGVDLEKCKRIVQYFWDPEPKNDTVPEAPIWCLGQEYTPTPKDVSKSTDVSRGERPGTNSDAAVGSSWPEAFLDDFESRIWMTYRSNFTPIPRNKTPEATSSMTLGVRLRSQLMDSQGFTSDTGWGCMIRSGQSLLANTLSMIQLGRDWRRGSSPEEESKLLAMFADHPDSPFSVHRFVQRGAESCGKYPGEWFGPSATARCIQLLSHECESPKLRVYITNNTSDVYEDEVARLGRDENGQPVPVLVLLGLRLGIEQVTSVYWDGLRAALQYPQSVGIAGGRPSASHYFVGVQDSHLFFLDPHSTRPALPVPQSSKVYSREDLDTCHTRRLRRIHIKDMDPSMLIGFLIRDESDWKDWKQRVQSTPGKPIIHILASGAPTEEGMERMEALDEVEALDDSEAE

SEQ ID NO: 19068 - protein, 313 aa, Pseudomonas putida KT2440
MSTREIRIATRKSALALWQAEYVKARLEQAHTGLQVTLVPMVSRGDKLLDAPLAKIGGKGLFVKELETALLDNEADIAVHSMKDVPMDFPEGLGLYCICEREDPRDAFVSNTFDSLEALPAGSIVGTSSLRRQAQLLARRPDLQIRFLRGNVNTRLAKLDAGEYDAIILAAAGLIRLGFEDRITSTISVDDSLPAGGQGAVGIECRSADVEIHALLAPLHHVDTADRVIAERALNKRLNGGCQVPIACYAVLEGDQLWLRGLVGQPSGGTLLVADARAPRAAAEALGVQVAEDLLGQGAEAILKEVYGEAGHP

SEQ ID NO: 19069 - protein, 159 aa, Gymnadenia conopsea
MSDEEHHFESKGDAGASKTYPQQAGTIRKNGYIVIKGRPCKVVEVSTSKTGKHGHAKCHFVAIDIFTAKKLEDIVPSSHNCDVPHVNRTDYQLIDISSDGFLSLLTENGNTKDDLRLPTEDALLSQIKEGFGEGKDLVLSVMSAMGEEQICGVKDIGHK

SEQ ID NO: 19070 - protein, 1065 aa, Bacillus cereus G9241
MDKKVSGIPQPKTYGPLGNLPLIDKDKPTLSFIKIAEEYGPIFQIQTLSDTIIVVSGHELVAEVCDETRFDKSIEGALAKVRAFAGDGLFTSETHEPNWKKAHNILMPTFSQRAMKDYHAMMVDIAVQLVQKWARLNPNENVDVPGDMTRLTLDTIGLCGFNYRFNSFYRETSHPFITSMTRALDEAMHQLQRLDIEDKLMWRTKRQFQHDIQSMFSLVDNIIAERKSSGNQEENDLLSRMLNVKDPETGEKLDDENIRFQIITFLIAGHETTSGLLSFAIYFLLKNPDKLKKAYEEVDRVLTDPTPTYQQVMKLKYIRMILNESLRLWPTAPAFSLYAKEDTVIGGKYPIKKGEDRISVLIPQLHRDKDAWGDNVEEFQPERFEELDKVPHHAYKPFGNGQRACIGMQFALHEATLVMGMLLQHFEFIDYEDYQLDVKQTLTLKPGDFKIRIVPRNQTISHTTVLAPTEEKLKNHETKQQVQKTPSIIGADNLSLLVLYGSDTGVAEGIARELADTASLEGVQTEVAALNDRIGSLPKEGAVLIVTSSYNGKPPSNAGQFVQWLEELKPDELKGVQYAVFGCGDHNWASTYQRIPRYIDEQMAQKGATRFSKRGEADASGDFEEQLEQWKQSMWSDAMKAFGLELNKNMEKERSTLSLQFVSRLGGSPLARTYEAVYASILENRELQTSSSERSTRHIEVSLPEGATYKEGDHLGVLPINSEKNVNRILKRFGLNGKDQVILSASGRSVNHIPLDSPVRLYDLLSYSVEVQEAATRAQIREMVTFTVCPPHKKELESLLEEGVYQEQILKKRISMLDLLEKYEACEIRFERFLELLPALKPRYYSISSSPLVAQDRLSITVGVVNAPAWSGEGTYEGVASNYLAQRHNKDEIICFIRTPQSNFQLPENPETPIIMVGPGTGIAPFRGFLQARRVQKQKGMNLGEAHLYFGCRHPEKDYLYRTELENDEREGLISLHTAFSRLEGHPKTYVQHVIKEDRIHLISLLDNGAHLYICGDGSKMAPDVEDTLCQAYQEIHEVSEQEARNWLDRVQDEGRYGKDVWAGI

SEQ ID NO: 19071 - protein, 117 aa, Archaeoglobus fulgidus DSM 4304
MIKVMVVDDEIAMREILKIMLKDYKVIEASNGREAVELYREERPDIVLMDVMMPLMNGIEATSEIKKIDPDAKIVAITAYASSKGEKVIEAGADYILKKPFTRKEVVELIKRILNSS

SEQ ID NO: 19072 - protein, 93 aa, Zea mays
MSSRRSSSSSSHGNISEDEMNELVSKLQALLPSSRRRRGSGQASTAKLLKETCSYIKSLQREVDDLSDRLSDLLSTMDHNSPAAEIIRSILRS

SEQ ID NO: 19073 - protein, 527 aa, Clarkia delicata
VEFDNIFLDYSRQQASPDTINKLYKLADEAHLKQKIDRMYNGDHINITENRSVLHVALRAPRNSAICSDGKNVVPDVWNVLDKIKDFSERVRNGSWVGATGKELKDVIAVGIGGSFLGPLFVHTALQTDPEASKNARGRELRFLANVDPIDAARNISGLNPETTLVVVVSKTFTTAETMLNARTLREWISSALGVSAVAKHMVAVSTNLPLVEKFGIDPNNAFAFWDWVGGRNSVCSAVGVLPLSLQYGFAVVEKFLQGAHSIDQHFSSAPFEKNIPVLLGLLSVWNVSFLGYPARAILPYSQALEKLAPHIQQVSMESNGKGVSIDGLPLPFESGEIDFGEPGTNGQHSFYQLIHQGRVIPCDFIGVVKSQQPVYLKGEVVNNHDELMSNFFAQPDALAYGKTPEQLRKENVSEHLIPHKTFTGNRPSLSILLPTLDAYRIGQLLAIYEHRVAVQGFVWGINSFDQWGVELGKSLATQVRKQLHASRVNGEPVEEGFNFSTKTLLTRYLKATSDVPADPSTLLPKI

SEQ ID NO: 19074 - protein, 277 aa, Acinetobacter sp. YY-5
TRGVWANNLVYNLHLLTGKISQPGCGPFSLTGQPSACGTAREVGTFAHRLPADMVVTNEKHRDICEKKWNIPSGTIPAKIGLHAVAQDRALKDGKLNVYWTMCTNNMQAGPNINEERMPGWRDPRNFIIVSDPYPTVSALAADLILPTAMWVEKEGAYGNAERRTQFWRQQVQAPGEAKSDLWQLVQFSRRFKTEEVWPEDLLAKKPELRGKTLYEVLYATPEVSKFPVSELAEDQLNDESRELGFYLQKGLFEEYAWFGRGHGHDLAPFDDYHKAR

SEQ ID NO: 19075 - protein, 118 aa, Zea mays
MASLKVAFLAAVLCMVVVSAPMAHAAITCGQVTNSLINCIGYLQNGGTPPSGCCNGVKSLNAAAKTTADRQTACNCLKSAASQISGFKANNAASLPGKCGVSIPYKISTSTNCATIKV

SEQ ID NO: 19076 - protein, 278 aa, Laelia anceps
MNRVETVNKENYRRFREQRFKEFAAKTLESGEKVDADNLDWESTFFLRHLPTSNISQIPDLDDDCRSTMKEFAGELEKLAERLLDLLCEDLGIEKGYLKRVFCGGSDGLPTFGTKVSNYPPCPKPELIKGLRAHTDAGGIILLFQDDKVSGLQLLKDGQWIDVPPLRYSIVVNIGDQLEVITNGKYKSVMHRVVAQTEGNRMSIASFYNPGSDAVISPAPALVEKEAEEEKKETTYPKFVFQDYMNLYIRKKFEAKEPRFEAMKTMETVSGSQLIPTA

SEQ ID NO: 19077 - protein, 154 aa, Medicago truncatula
MTNILLRTASRGGSLRATLIRRFSTDALVESKPGEIGLVSGIPQEHLRRRVLIYSPARTAGQQGSGNVGRWRINFLSTQKWENPLMGWTSTGDPYSHVGDSALDFDTEEAAKEFAERHGWEYVVKKHHTPLLKVKLYADNFKWKGPPKAAEAEQ

SEQ ID NO: 19078 - protein, 411 aa, Oryza sativa
MNALAATSRNFRQAARLLGLDSKLEKSLLIPFREIKVECTIPKDDGTLASFIGFRVQHDNARGPMKGGIRYHPEVDPDEVNALAQLMTWKTAVAAIPYGGAKGGIGCAPGELSTSELERLTRVFTQKIHDLIGAHTDVPAPDMGTNSQTMAWILDEYSKFHGHSPAVVTGKPIDLGGSLGRDAATGRGVMYATEALLAEHGKSISGSTFVIQGFGNVGSWAARIIHEKGGKVIALGDVTGSIRNKNGLDIPALMKHRNEGGALKDFHDAEVMDSSELLVHECDVLIPCALGGVLNRENAPDVKAKFIIEAANHPTDPEADEILAKKGVTILPDIYANSGGVIVSYFEWVQNIQGFMWDEEKVNMELHKYMNNSFQHIKAMCKSHDCNLRMGAFTLGVNRVARATLLRGWEA

SEQ ID NO: 19079 - protein, 536 aa, Silicibacter sp. TM1040
MSDIWQQLSAHRAATEATPLTDYFAQDADRFARYSASAGEMLLDYSKTALDDTARDLLVQLAESVDLKSRIAAMMSGAKINSTENRAVLHTALRAPKDAVIEVDGENVVPGIQKVLAQMGAFATALREGSYQTKTGTAFTDVVNIGIGGSDLGPVMATLALAPYHDGPACHFVSNVDGAHIHDVLAGLNPETTLVVIASKTFTTIETMTNAETAIQWLKGALGEDVSTHLAAVSTALDKTAAMGIPDARVFGFADWVGGRYSMWGPIGLPIMIAVGPESFGEFLAGAAAMDQHFRDAPLMENLPALLGLIGVWHNNICGYGSRAVLPYDQRLSRLPAYLQQLDMESNGKSVALDGSPLPRASGPVVWGEPGTNGQHAFYQLLHQGTQVIPTEFLIAATGHEPELAHQHNLLKANCLAQSEALMLGRSWDEAREIAIARGFDGVDADRMAGHLSFPGNRPSVTLAYPKLTPFVFGQIVALYEHRVFTEGVIWGINSFDQWGVELGKELATRLLPMVEGADASQKDASTRGLLAKLST

SEQ ID NO: 19080 - protein, 307 aa, Clarkia epilobioides
  misc_feature (77)..(87): Xaa can be any naturally occurring amino acid
AAHLKQKIDRMNNGDHINSTENRSVLHVALRAPRNSVICSDGKNVVPDVWNVLDKIKDFSERVRNGSWVGATGKELXXXXXXXXXXXFLGPLFVHTALQTDPEASKNARGRELRFLANVDPIDAARNISGLNPETTLVVVVSKTFTTAETMLNARTLREWISSALGVSAVAKHMVAVSTNLPLVEKFGIDPNNAFAFWDWVGGRYSVCSAVGVLPLSLQYSFAVVEKFLQGAHSIDQHFSSAPFEKNIPVLLGLLSVWNVSFLGYPARAILPYSQALEKLAPHIQQVSMESNGKGVSIDGLPLPFES

SEQ ID NO: 19081 - protein, 543 aa, Thiomicrospira crunogena XCL-2
MGVETSSAWQALQLHSDSGMGSIHLSKLFQDTNRQDDYSLELSDVYVDFSKNRITQETVQLLIELAEQQKLPKEIHRLMTGEHVNDTEDRPALHTALRALGKDVSGGAETVQPEIEQVLQKMELMTKKIRSGHWRGYSGKPITDVVNIGVGGSDLGPLMITHSLQTISSPINLHFISSIDGTQTSNLLRGLKQETTLFILASKSFTTIDTLSNAETAKDWLKECISDERVIFSQHFIGVSTKPDKMQEWGIPPENQLMFWDWVGGRYSLWSAIGFPIALKIGMDGFRELLQGAHEMDQHFATADLKKNIPVILALIDIWNINFLNIHDKAILPYDARLRYLPAYLEQLVMESNGKSVARSGESVPYKTCPVLWGEVGPNAQHAFYQLLHQGTQAVMCDFIAPVERDDFDANSHTERDESLRHQHELALANCFAQSRVLMLGDNAIPSDLKASFDSPFKHYPGNQPSNTILIKTISAKTLGMLVAMYEHKTYVESVIWEINPFDQWGVELGKLIAKETYNAIKDKPLADSFDSSTKGLIDRVVK

SEQ ID NO: 19082 - protein, 335 aa, Fusobacterium nucleatum subsp. vincentii ATCC 49256
MAVKVAINGFGRIGRLALRVMSKNKDFDVVAINDLTDAKTLAHLFKYDSAQGRFDGTIEVTDNGFVVNGDSIKVFAKANPEELPWGDLGIDVVLECTGFFTSKEKAEAHIKAGAKKVVISAPATGDLKTIVYNVNDNVLDGTETVISGASCTTNCLAPMAKVLNDKFGIIEGLMTTIHAYTNDQNTLDAPHKKGDLRRARAAAENIVPNTTGAAKAIGLVIPELKGKLDGAAQRVPVITGSITELVTVLGKDVTVDEVNAAMKAASNESFGYTEEPLVSSDIIGISFGSLFDATQTKVLTVDGKQLVKTVAWYDNEMSYTSQLIRTLKKFVEISK

SEQ ID NO: 19083 - protein, 311 aa, Sulfurovum lithotrophicum
RNAANWIDEKQSHDVTLLSGEKGHLTHFIVEPFTPHTQEQEYYISATTVGEDDVLFMSAEGGMEVEEGWDEKVNEVHIPINMPDADMEKMVKSHIPADIPDENKTAFASFAIQFFKFYRDMNFAYLEINPIVMLDGGEMAILDLVARLDDTAGFMMKDAWGDIEFPTAFGMEDMSDEEKAIAEADSKSGASLKLTILNPMGRIWTMVAGGGASVVYADTIADFAGVEDLANYGEYSGGPTTGETKFYAETIFDLMTRYDDPRGKVLIIGGAIANFTDVAKTFTGIIQAFEIYADKLKEHKTKIYVRRGGPN

SEQ ID NO: 19084 - protein, 421 aa, Corynebacterium efficiens
MALVVQKYGGSSLESAERIRNVAERIVATKKAGNDVVVVCSAMGDTTDELLDLAAAVNPVPPAREMDMLLTAGERISNALVAMAIESLGAEAQSFTGSQAGVLTTERHGNARIVDVTPGRVREALDEGKICIVAGFQGVNKETRDVTTLGRGGSDTTAVALAAALGADVCEIYSDVDGVYTADPRIVPNAQKLERLSFEEMLELAAVGSKILVLRSVEYARAFNVPMRVRSSYSNDPGTLIAGSMEDIPMEEAVLTGVATDKSEAKVTVLGIPDKPGEAAKVFRALADAEINIDMVLQNVSSVEDGTTDITFTCPRSDGPRAMELLKKMQQQGDWTNVLYDDQVGKVSLVGAGMKSHPGVTAEFMEALRDVNVNVELISTSEIRISVLIREDDLDKSAKALHEKFQLGGDEEATVYAGTGR

SEQ ID NO: 19085 - protein, 146 aa, Medicago sativa
MGFTDKQEALVNSSWESFKQNPGNSVLFYTIILEKAPAAKGMFSFLKDSAGVQDSPKLQSHAEKVFGMVRDSAAQLRATGGVVLGDATLGAIHIQKGVVDPHFAVVKEALLKTIKEVSGDKWSEELNTAWEVAYDALATAIKKAMV

SEQ ID NO: 19086 - protein, 359 aa, Zea mays
MRTLLPVAAGRGTVACAATPVPRRSLLLSTAAAGAALQPEQVAGTRPLRLTRSVASAVAKPRTSADEAISWAKKDNRRLLHVVYRVGDLDKTINSSARPCWSDDPITQCRFYTECLGMKLLRKRDIPEEKYSNAFLGYGPEESHFVVELTYNYGVDKYDIGEGFGHFGIAVEDVAKTVELIRAKAGKVIREAGPVKGGETVIAFVEDPDGYKFEIIERPGTPEPLCQVMLRVGDLDRAISFYEKACGMELLRKRDSPEYKYTVAMMGYGPEDKDAVLELTYNYGVTEYAKGNAYAQIKQIAIGTDDVYRTAEAAKLSGGQVVREPGPLPGINTKITAILDPDGWKLVFVDNMDFAKELE

SEQ ID NO: 19087 - protein, 81 aa, Zea mays
MSDKGRPLPKFGEWDVNDPASAEGFTVIFNKARDEKKTGGKPGSPGKSTDGHAKSGGGGGDPSKPQPKKWLCCMQSPAVDS

SEQ ID NO: 19088 - protein, 470 aa, Acinetobacter sp. ADP1
MSNEMHGQPSGEGELSRSLSNRHLQLIAIGGAIGTGLFMGSGKTISLAGPSILFIYLIIGVMVFFVMRALGELLLSNLQYKSFIDFSTDLIGPWAGYFVGWTYWLCWITIGIADLSAIIYYLQFFNNGMPFTPTEGAMISVAAIFFIMGLNLMTVKLFGELEFWFAMIKITAIVVLILVGLWMIFTGFTSTSGEVASFTHLWANGGFFPTGMHGFLAGFQIAIFAFVGVELVGTTAAETKNPEINLPKAVNSIPIRIIIFYVLALLIVMSVTPWNRIDPNISPFVNLFSQAGIAAAAIIMNLVVLSSVMSSMNSGVFSTSRMLFGLSKEKQAPQAFGALNKGRVPANALYFSTVCLLLGAALQYVVPNTVEAFTLATTLSTILFICVWLMIIWSYMVYYKKRPELHAKSIFKLPGGLFTCWILIIFFVGMIYVLSLEPDTMKALMVSPIWLVILVIGYFGFYKPRLKSKK

SEQ ID NO: 19089 - protein, 416 aa, Listeria monocytogenes str. 4b F2365
MAVEKITMPKLGESVTEGTISSWLVKPGDTVEKYDAIAEVLTDKVTAEIPSSFSGTIKEILAEEDETLEVGEVICTIETADAGSSEPVAEVEETETKAPEKQETKQVKLADAPASGRFSPAVLRIAGENNIDLSTVEGTGKGGRITRKDLLQVIENGPVAKREEMKSAPQEKAAMPTPPVRSAAGDKEIPINGVRKAIAKHMSVSKQEIPHAWMMVEVDATGLVRYRNAVKDSFKKEEGYSLTYFAFFIKAVAQALKEFPQLNSTWAGDKIIEHANINISIAIAAGDLLYVPVIKNADEKSIKGIAREISELAGKARNGKLSQADMEGGTFTVNSTGSFGSVQSMGIINHPQAAILQVESIVKRPVIIDDMIAVRDMVNLCLSIDHRILDGLLAGKFLQAIKANVEKISKENTALY

SEQ ID NO: 19090 - protein, 841 aa, marine gamma proteobacterium HTCC2207
MLKVVVVGNGMVGHHYVEQLVASDVEAQITVIGGETRPAYDRVHLSEFFAGRSPEDLALTTRDHYRELGVEAHFGDMVASIDRDTKTLTTESGKQFAYDKLVLATGSYPFVPPVKGNDLEPCTVYRTIDDLGTIQAQATGGKIGVVVGGGLLGLECANAVKNLGLETHVVEFAPGLMGVQLDGGGSAMLRRKIEALGVTVHTSKATKVIEPDAEGEARLRMQFADGSSLATDMIVFSAGIRPYDQLAKDCGLTVGERGGIEIDYHCKTSDSDIFAIGECALFGGRIYGLVAPGYRMAEAAVSQLTNEVVPFQGADMSTKLKLLGVDVGSIGDAHGKEAGSVAYTFSDERIDVYKRLIVSADGKKLLGAVLVGDCSDYDTLLQYFLNGIALPADPQTLILPYNAGAAPALGAAALPATATICSCHNVSKGDIVNAMDAGFCSLAEVKSETAASSGCGGCAALLKSVVDDELASRGLEVNKAMCEHFNLTRQEMFHIVKVESIKSFEELISKHGSGRGCDICKPTAGSILASLWNDYVLEEKHVGLQDTNDTFLANMQKNGTYSVVPRIAGGEITPDKLITIGQVAKKYNLYTKITGGQRIDLFGARVQHLPGIWEELIAAGFETGHAYGKALRTVKSCVGSTWCRYGVQDSVAMALYIENRYKGLRSPHKLKSAVSGCTRECAEAQSKDFGVIATENGWNLFVGGNGGMKPRHADLFATDLDDETLIKYIDRFLMFYVRTADRLQRTSVWMGTLEGGLDYLKQVVIEDSLGIAGELEEQMESIVGSYQCEWKTTVEDPEKLKRFRQFVNSKAEDREIIFVEERGQPRPATDAERKQLLAESA

SEQ ID NO: 19091 - protein, 401 aa, Streptococcus pneumoniae R6
MEYRKIQEALEALQKGRLVLVIDDKDRENEGDLICSAQAATTENVNFMATYAKGLICMPMSESLANQLMLSPMVENNTDNHKTAFTVSIDYKETTTGISAEERGLTARMCVAEDITPSDFRRPGHMFPLIAKKGGVLERNGHTEATVDLLKLAGLKECGLCCEIMNHDGKMMRTDDLIQFSKKHNIPLITIKELQEYRKVYDQLVERVSTVNMPTRYGNFKAISYIDKLNGEHHLALIMGNIEDEANVLCRVHSECLTGDVLGSLRCDCGQQFDKAMKMIVENGSGVLLYLRQEGRGIGLINKLKAYHLQDQGMDTLDANLALGFEGDLRKYHIGAQMLKDLGLQSLHLLTNNPDKVEQLEKYGITISSRISIEIEANPYDSFYLETKKNRMGHILNMEEK

SEQ ID NO: 19092 - protein, 331 aa, Vibrio vulnificus CMCP6
MTIKVGINGFGRIGRFVFRAAQERADIEVVGINDLIDVDYMAYMLKYDSTHGRFNGTVEVEGGNLIVNGKTVRVTAERNPEDLKWDAIGVDVVAEATGLFLDDATARKHITAGAKKVVLTGPSKDATPMFVMGVNHTSYAGQDIVSNASCTTNCLAPIAKVLNDKFGIESGLMTTVHATTATQKTVDGPSAKDWRGGRGASQNIIPSSTGAAKAVGVVLPELNGKLTGMAFRVPTANVSVVDLTVNLKNGASYEAICAAMKEASEGELKGVLGYTEDAVVSQDFIGEVQTSVFDAKAGIALTDNFVKVVSWYDNEIGYSNKVLDLIAHISK

SEQ ID NO: 19093 - protein, 459 aa, Photobacterium profundum SS9
MSLVDSYVNPYTSLTVAKFGGTSVADFTAMSRSAAIILHAPQTRLVLISACSGVTNILVELANGVTDTQQRHALLTRLTDIHQSVLSQLKQPQQADEAITLLLKNVAELAKKAAIEKSVALTDQLVSHGELLSTHLFAQILRELGIKAIRFDIRDVMRTDGQFGKAIPQPSIIRQLSEQHLLPQLKKHVVVSQGFIGSDEQGNTTTLGRGGSDYSAALMAEAIGASTLEIWTDVPGMYTTDPRIATKAKPIKEISFSEASEMANFGAKILHPSTLVPAIRQQIPVFIGSSKAPEQGGTWIRETVSDAPLFRALALRCNQTMVTLTSLNMFHAYGFLAEVFRILAEHKISVDLITTSEVSVSLTLDQTDTSGGAPTLPAQALAELSELCRVEVEQDLCLVALIGNQMSSTKGSAKTVFSTLEYYNLRMICYGASPHNLCFLVKAQDAKSAIKDLHCAIFE

SEQ ID NO: 19094 - protein, 420 aa, Streptococcus pneumoniae R6
MTRENIKLFSEMHAEPSWLADLRQKAFDKIETLELPVIERVKFHRWNLGDGTITENEPSANVPDFTALDHHLKLVQVGTQTVFEQTPVELAEQGVVFTDFHSALEEIPELIEEFFMSSVKYDDDKLAAYHTAYFNSGAVLYIPDNVEITEPIEGIFYQDSDSNVPFNKHIMIIAGKNSKISYLERLESRGEGSDKATANITVEVIARSGAQVKFAAIDRLGENVTAYISRRGKLGNDASIDWAIGVMNEGNVVADFDSDLIGNGSHADLKVVALSSGRQVQGIDTRVTNYGCNSIGNILQHGVILEKATLTFNGIGHIIKGAKGADAQQESRVLMLSDQARSDANPILLIDENDVTAGHAASIGQVDPEDMYYLMSRGLDKATAERLVVRGFLGSVIVEIPVKEVRDEMIATIEEKLSKR

SEQ ID NO: 19095 - protein, 391 aa, Listeria monocytogenes str. 4b F2365
MLEFDTSSESLATIKVIGVGGGGNTAVNRMIEHGVQGVEFISVNTHAQALNLAKAETKLQIGTKLTRGLGAGAVPEIGKKAAEESREQIEEALKGSDMVFVTAGMGGGTGTGAAPVIAQIAKEMGALTVGVVTRPFGFEGPKRTKQALTGTEAMKEAVDTLIVIPNDRLLQIVDKNTPMLEAFREADNVLRQGVQGISDLIAVPGLINLDFADVKTIMTNRGSALMGIGIATGENRAAEAAKKAISSPLLETSVDGAKGVLMNITGGSNLSLYEVQEAAEIVSSASDEDVNMIFGSVINDELKDELIVTVIATGFDEEKQAQQQAQANRRPNQSIQVNRPNYAVQDEQQNDYAQNAPQQANAPVHEQQAEPQQNSSDVDVPAFIRNRNRRG

SEQ ID NO: 19096 - protein, 200 aa, Triticum aestivum
  misc_feature (197)..(197): Xaa can be any naturally occurring amino acid
MVSADAARNIVGVIGNVISFGLFLCHAPMFRRICKAKDVEEYKPDPYLATLLTCMLWVFYGLPIVHPNSILIVTVNGIGLVVQLVYLIIFFIYSTNNKRSKMLAVLGIEAAFMAAVVVGVLHGAHTHEMRSMIVGILCVICGSVQYASNLTVMVRVIRTESVEYMPFFLSLAIFLSGCCWMAYALIEFDLYVAIPNXLDA

SEQ ID NO: 19097 - protein, 590 aa, Arabidopsis thaliana
MSAPKFGYVLLLIVLINISNNGVDAFHKVFKKLQSKSTSLESVSPLHRTAYHFQPPRHWINDPNAPMLYKGVYHLFYQYNPKGAVWGNIVWAHSVSKDLINWEALEPAIYPSKWFDINGTWSGSATHVPGKGPVILYTGITENQTQIQNYAIPQDLSDPYLKTWIKPDDNPIVKPDNGENGSAFRDPTTAWFNKKDGYWRMLVGSKRKNRGIAYMYKSRDFKKWVKSKRPIHSRKKTGMWECPDFFPVSVTDKKNGLDFSYDGPNAKHVLKVSLDLTRYEYYTLGTYDTKKDRYRPDGYTPDGWDGLRFDYGNYYASKTFFDDKTNRRILWGWANESDTVQDDTVKGWAGIQLIPRTILLDSSGKQLVFWPIEEIESLRGKNVQMTNQKMEMGQRFEVQGITPAQVDVDVTFNVGNLEKAEKFDESFATKPLELCNLKGSNVNGGVGPFGLITLATSDLEEYTPVFFRVFKDAASNKPKVLMCSDAKPSSLKKDTGTDAKERMYKPSFAGFVDVGLLDGKISLRSLIDHSVVESFGAKGKTVITSRVYPTKAVGEKAHLFVFNNGSQPVTVESLNAWNMQKPLKMNQGAK

SEQ ID NO: 19098 - protein, 331 aa, Vibrio sp. Ex25
MTIKVGINGFGRIGRFVFRAAQERADIEVVGINDLIDVDYMAYMLKYDSTHGRFNGTVEVEGGNLIVNGKTVRVTAERNPADLKWDEIGVDVVAEATGLFLTDETARKHIEAGAKKVVLTGPSKDATPMFVMGVNHATYAGQDIVSNASCTTNCLAPIAKVLNDKFGIESGLMTTVHATTATQKTVDGPSAKDWRGGRGASQNIIPSSTGAAKAVGVVLPELNGKLTGMAFRVPTANVSVVDLTVNLKEGASYEAICAAMKEASEGELKGVLGYTEDAVVSQDFIGEVQTSVFDAKAGIALTDNFVKVVSWYDNEIGYSNKVLDLIAHISK

SEQ ID NO: 19099 - protein, 514 aa, Thiomicrospira crunogena XCL-2
MKEELVIFDTTLRDGEQSPGASMTKEEKVRIAKQLEKLRVNVIEAGFPAASQGDFESVQAVASAVKDSTVCGLARAVENDIVRAGEAIKLANSGRIHTFIATSPIHMEKKLKMSPDEVVERAVWAVKRARDFTDNVEFSPEDAGRSELDFLCRVIEAAIDAGATTINIPDTVGYNVPEQFGELFHQLLNRIPNADKAIFSAHCHNDLGLAVANSLAAVKSGARQVECTINGLGERAGNTALEEVVMAVRTRQDWFDVDTRIHTPEILAASRLVAGITGFAVQPNKAIVGTNAFSHESGIHQDGVLKHRETYEIMRAEDVGWSTNKMVLGKHSGRSAFRSRLKELGIEFETEQELSDAFISFKELADRKHEIYDEDIQALVTDNNTRRVENETFRLVALKVGTQTGDAPTATITLWIDGEEKTASSEGGGVVDATFKAIEKLVDSGATLELYSVSNVTNGTDSLGETTVRMEKAGRIVNGQGADTDIVTASAKAYINALNKLIDTGSKEHPQAHV

SEQ ID NO: 19100 - protein, 419 aa, Bradyrhizobium sp. BTAi1
MTVYAGPVFEMAANQFNVIADHLGIPADERDRLLLPKRAITVSCPIHKDDGTIAVYEGYRVQHLLTMGPTKGGTRFAPTVDIGEVAALAIWMSWKCALVGLPYGGAKGGVTVDLSKLSRRELESLSRRYMQEMIPFVGPHTDVMAPDMGTNEQVMAWFMDTYSMYQGQTVTEIVTGKPVFSGGTLGRREATGRGVAHVSRRVMDVLGIDPAKSTVVVQGFGNVGSYAALGFHQMGMKVIAVSDHTGALHDARGLDIPALMAHASKHGSIAGFSTELAFDPKEILTLACDILVPAAVERVIDAKVAANLKCRVIAEAANGPTTPDADLVLDQRRKEIFLIPDILCNSGGVIVSYFEWVQDLQQLFWEEEEVMRREYQILDRAFERMVTRAKADDISHRTAAMAIGVEKVRNAKNTRGLFP

SEQ ID NO: 19101 - protein, 501 aa, Photorhabdus luminescens subsp. laumondii TTO1
MSSEFCFVKYGFDKNLNKLINEFQFDELSTGTILFRSTTKVSKFKSERYTAFLIGNIYNISTIRSILGKIEGRSSVLSDVEILLLSRDKFGNSIISIAEGDYCLFIEDKKGNIEVITESRGLNLVNLVQTDLIWITNSLKIVGKVEGDKAFDFKPESEVIKNSLKPDNFSPIRNVSRLKPGTINKLTFDEQRYLHLEVEYVISPVEENSFDIKESVLLEIIDSDLRNSISRLSKNNETIGVPLSGGLDSSLVTALASKYFDKVKTWSIGTELSNEFEFSKIVSDYLGTEHEVKILSEDEVISGVVKAIYYNEIFDGLSSEIQSGLFNVYELAKGKVNSLITGYGSDLLFGGILDPEKSYIEPNKILSEQVYRTKWTGEFSTHGAGNYGLNVYHPFWTNNLISLCHNLDPYFKIRDNEVKNILREYANSINILPKEIVWRKKIGIHEGSSVNKSFATMIGTEVNNYQDKTRFSYSIYKEFLTGRLSIEEANSTKLCEIIRRN

SEQ ID NO: 19102 - protein, 185 aa, Blastopirellula marina DSM 3645
MKAMDDKQLAKTSKFLSLVLRHQPDKIGIELDEQGWVEVATLLAAIRRESRPLTLAQLQEVVTRNDKQRFMFSSDGLRIRAVQGHSIEVELGYEAAAPPEYLLHGTPEQSVAIILETGLKKMKRHHVHLHHDRQTASAVGQRRGKPVLLQIAAGRMHADGYSFYVTPNQVWLTDEVPPAYLSILE

SEQ ID NO: 19103 - protein, 923 aa, Dechloromonas aromatica RCB
MSLPLSTSPLPSRLARINFYVLASAIVFATVFIVFTFVWMTMQAHVEAGYRHLDQLRDKAQPVLMINDRAAAESKFAALKGMPYLHSVAVFREDLSLLVAFDRNGAEVAAPAPLSGPVAGHAYSWRRIDFLAPAQVAGQPAGWLRLSTDLGGAYQHLLGYLGLILVEMAAALAIALHLQSRQVGRLIEPLQDLTRHMADVSVGRLDIRAADSRVTEIDQLVTGFNQMVEQIRERDHWLSTHLGNLEQIVEQRTRELRLAKEAAEAGSQAKSEFLATMSHEIRTPMNGVLGMTELLLGTELEPTQRQFVEAVERSGKHLLHIINDILDFSKIEAGKLELDVVDFDLRNLLEESLELFSQPARRKGLELVADLPPDEKLIVRGDPLRLRQIVTNLLGNAVKFTETGEILLRLLVVEPRDNGLKLALVVSDTGIGIPLDAQEKIFEHFLQADGSTTRKYGGTGLGLAICRHLVDMMGGRIHVESTPGKGAAFTVELDLPLGKLPVASPEKQALPATGARVLVVDDSSTQREVLLALLRGRGFIAEGAASSLAGLSVLKAAVEEGEPYALLLIDTQMPDLPGCDVVRALRADQNLAPTRVIIISAQVDALSKAERASLQIAACLPKPVRQAELLRAIETTLQRRSVSDTAVIDSPARKLRGRVLVAEDNESNLVVARAQLERMGLEVIAASDGQQALDILAEETVDLVLMDCQMPVLDGFAATMALREREAVSGRHLPVIALTANAMKGDRERCKDAGMDEYLAKPYSGEELLTLLARWLPAERRKSAVPTPAVANAQPVASASLPEPVTPLEQTAFDKIRALSPEGGDALVRQVVVAYLKAAEREWGRFDQGLADGDAALMAGAVHALKSSSFNVGAAVFAERCREVEQLAREVRMRELLARVDGLRSEWRRVDAALKAVLVELAA

SEQ ID NO: 19104 - protein, 603 aa, Coccidioides immitis RS
MSSQQSQDGVDASPTSTSLPICTMDPTTQGGAAPAAGELSKNAAKKAAKQKKQAADKAEKAANKGIGKSESKSSNPKHPKKKIDGAALIGIDVAKEDDFAAWYQQVLLKGDMLDYYDVSGCFVLKPHSFFIWEEIQSWFNDKIKKMGVKNCSFPLFVSEDVLKKEKDHIEGFAAEVAWVTHAGSSELEKKIAIRPTSETVMYPYYAKWIRSHRDLPLKLNQWNSVVRWEFKNPQPFLRTREFLWQEGHTAHLTEAAAREEVLQILQHYAHVYEQLLAIPVIRGQKTDKEKFAGGLYTTTVEGYIPATGRGIQGGTSHGLGQNFSKMFGITVEDPTSKPDEKKPPLHVWQNSWGLSTRTIGVMVMVHSDNRGLVLPPRVADVQTVIVPVGLTAKTPDDVRASINAEIDHLASVLEAAGIRVEIDKREGYSPGWKFNDWELKGIPLRLEFGPGESSGGFVTTSRRDIPGKEGKSTIPIAELATAVPALLETIQADLYARADAEFRSHVKHITNWEDFCPALNDKNLCMIPHCLTEQCEDEIKEMSARKAEEETGEAVDAKLPSMGAKSLCIPFEQPAGIKKGVTKCTNPRCTRLAEQWCLFGRSY

SEQ ID NO: 19105 - protein, 336 aa, Lotus corniculatus
MGSVPETVCVTGAAGFIGSWLVMRLMERGYMVRATVRDPANMKKVKHLLELPEAKTKPTLWKADLAEEGSFDEAIKGCTGVFHVATPMDFESKNPENEVIKPTINGVLDIMKACQKAKTVRRLVFTSSAGTLNVIEHQKQMFDESCWSDVEFCRRVKMTGWMYFVSKTLAEQEAWKFAKEHGIDFITIIPPLVVGSFLMPTMPPSLITALSPITGNEAHYSIIKQGQYVHLDDLCLAHIFLFEHPESEGRYICSASEATIHDIAKLINSKYPEYNIPTKFKNIPDELELVRFSSKKIKDMGFEFKYSLEDMYTGAIDTCKEKGLLPKAAENPSNGK

SEQ ID NO: 19106 - protein, 214 aa, Triticum aestivum
  misc_feature (93)..(93): Xaa can be any naturally occurring amino acid
  misc_feature (136)..(136): Xaa can be any naturally occurring amino acid
  misc_feature (155)..(155): Xaa can be any naturally occurring amino acid
  misc_feature (160)..(160): Xaa can be any naturally occurring amino acid
  misc_feature (165)..(165): Xaa can be any naturally occurring amino acid
  misc_feature (174)..(174): Xaa can be any naturally occurring amino acid
  misc_feature (178)..(178): Xaa can be any naturally occurring amino acid
MQQRMKQAAAVAAQQQQQMMQQALLMHQHHAHPGLLAAPHIEPIVSGNLPPGFDSSTCRSVYVGNIHLQVTDSLLHEVFQSIGPVEGCKLIRXKEKSSFGFVDYYDRRYAAIAIVSLNGRQLFGQPIKVNWAYASXKREDTSGHFNILVRDLAPXVTDAXVCFSXHIYCSNARXMWDXQTGHQKVGFVPLGTTDHNGIMWKWEPQINWHKAQCW

SEQ ID NO: 19107 - protein, 627 aa, Vibrio parahaemolyticus RIMD 2210633
MAIEINVPDIGADEVEVTEILVSVGDKVEEEQSLITVEGDKASMEVPASQAGIVKEIKVAEGDKVSTGSLIMIFEAEGAADAAPAPAAEAAPAAAPAPAAAAELKEVHVPDIGGDEVEVTEIMVAIGDSIEEEQSLITVEGDKASMEVPAPFAGTLKEIKVAAGDKVSTGSLIMVFETAGSGAPAAPAAVEAPAAAAPAASAAKEVNVPDIGGDEVEVTEIMVAVGDTVEEEQSLITVEGDKASMEVPAPFAGTVKEIKIAAGDKVSTGSLIMVFEVAGAAPAPVAAPAQAAAPAAAAPKAEAPAAAAPAAGDFQDNDEYAHASPVVRRLAREFGVNLSKVKGSGRKSRILKEDVQNYVKEALKRLESGAAASGKGDGAALGLLPWPKVDFSKFGETEVQPLSRIKKISGANLHRNWVMIPHVTQWDNADITALEAFRKEQNAIEAKKDTGMKITPLVFIMKAAAKALEAFPAFNSSLSEDGESLILKKYVNIGIAVDTPNGLVVPVFKDVNKKGIYELSEELMAVSKKARAGKLTAADMQGGCFTISSLGGIGGTAFTPIVNAPEVGILGVSKSEMKPVWNGKEFEPRLQLPLSLSYDHRVIDGAEGARFITYLNACLSDIRRLVL

SEQ ID NO: 19108 - protein, 210 aa, Thermobifida fusca YX
MTLPNSLCRIACATILGPRGSEHGTVRHAARQDSPVGSSDGQGAEARLRDMKIYQSELRTLEGEPFRLPQTQLLLIVNVASKCGLTPQYSGLERLQEAYAYRGFSVIGVPCNQFGGQEPGDAQEIRLFCATTYGISFPILEKMEVNGPNRHPLYVELTKARDSQGLAGDVQWNFEKFLVAPGGRVLYRFRPQVEPEDPEIIRAIEENLPN

SEQ ID NO: 19109 - protein, 343 aa, Acinetobacter sp. ADP1
MNHSVALNFADGKTFFIAVQEDELLLDAAVRQGINLPLDCREGVCGTCQGTCETGIYEQEYVDEDALSERDLAKRKMLACQTRVKSNAAFYFDHHSSICNAGETLKIATVVTGVELVSETTAILHLDASQHVKQLDFLPGQYARLQIPDTDDWRSYSFANRPNASNQLQFLIRLLPNGVMSNYLRERCQVGQTLIMEAPLGSFYLREVERPLVFIAGGTGLSAFLGMLDNIAEQPNQPSVHLYYGVNTEADLCEQKRLTTYAERIKNFSYHPIISKASEQWQGKSGFIHEHLDKNQLSEQSFDMYLCGPPPMIEAVKTWLDEQAIADCHIYSEKFLQSNTAKT

SEQ ID NO: 19110 - protein, 932 aa, Clostridium thermocellum ATCC 27405
MPSDELDFCAFFDIEEHLYWQGDAMKSKRMIKQSTLSAIILAIFFFIAVMLIWSILYMNSCIRAEQNAERRRTEFKQLGIDLADASDYLTDEARKFAVTRKIVHLERYWEEINVTRTRDKVISRLQELDSPKEELELLAKAKKYSDALVETERRSMRLVLEALGVDESDMVPEVASFKLSEGDQRLSREDKLLKAIEIMYDARYDSDKKNIMDPIAKFQRIMNQRLESELEAARRGTAGATVLQIILAFVIILAIAVLIRILFTQVTYPIRDYILKLKDFSFDDEEFRLVPKGTVELNMLAENFNELYRSFHNELVRRKKAEETMKAARDEADKANRAKSEFLASMSHEIRTPINSIIGYQYLLKNSVLSPKQREYVENIGLAAKNLLAIINQILDFSKIEAGRMVLEEVDFNIDDVLNELMIIVGMEAKRKGIELRIKVDEDVPRFLKGDITRLKQVVMNLVSNGIKFTHEGYISIRVELVEKNEENACIKFSVTDTGIGISDEQKKLLFQAFTQGDASTSRKYGGTGLGLAICKRLVELMKGEINVESEVGKGSTFSFSLRLKIASCNENRNGKSKSVDTEEQYKNVKILLVEDSSVNLQMTKEILENMGIDTDTAQSGEEAVKKAESNEYELILMDIRMPGMDGYEATRRIRKLERGSMPIVALTADAVEGVAQKAKEAGMNGYLTKPLEPEKLLEVIRSMTNGGGKFKEEKSKSCAKAAEAENPYYEHKYETLDFDGAVNRLGGKRDKYIGILKSFVELHKDDGVKIRELAASGKRDELRRFLHSLKGSAANIGALRLKDLLARLEESCIPQNCEKNAKWMNDLEKEFERLIEEIMQYIRAFDSYKGSSPENHENNNVREDLEMLCKLLLTGDSEAKSFFEEKLAYLGNVLRPEDYHDLKKKISCYEFQKALAIVDKLKQDFSGKLTK

SEQ ID NO: 19111 - protein, 636 aa, Prunus cerasus
MDTNTTSYTPLPGDPFLSGPPETPRRPLKGFAVIFASVIFLMSLVALIINQGPPQQDGHHHEKQSASTASSETTSFSRLPRGIAQGVSAKSNPSFSDESSYNWTNAMLSWQRTAFHFQPERNWMNDPDGPMFYKAWYHLFYQYNPNSALWGNITWGHAVSPDLIHGSTSRWLWSPIDGSMPTGCGWVCAILPDGQIAILYTASTNESVQVQNLAYPANLSDPLLLDWVKYSGNPVLTPPAGIGSTDFRDPTTAWIGPDGLWRTTIGSKVNKTGISIVYTTTNFIDYELLEGVLHAVPGTGMWECVDFYPVSINGSTGLETSVNGPGVKHVLKASLDDTKMDHYAIGTYFLENNTWIPDDPKIDVGIGLKYDYGRYYASKTFYDQNKERRILLGWINETYTETDDLEKGWSSLQTIPRTVLFDNATGTQLLQWPVEEIEDLRLTSTEFSDVLVEAGTVVPLDIGTATQLDIFVDFEIEVLETESVNGSVGCGGGATDRSTLGPFGILVIADETLSELTPVYFRVSNSTDGDITTHFCADETRSSKAPEVYKTVYGDQVPVLDGETYSARVLVDHSIVESFAQGGRTVIASRIYPTEAIYGAARLFLFNNATGVNVKATLKIWQLNSAFIHPFPLDQI

SEQ ID NO: 19112 - protein, 595 aa, Triticum aestivum
MAMAMEVLARLACVFCATILLQSLAWPCSNGERGFSYPQSPKAPSIVRERYRTAYHFQPPRNWMNDPCGPMYYNGVYHEFYQYNPDGAFDPNDSLMNMVWGHSVSTDLINWVGLEPAIKPDIPSDICGCWTGSATILFGVQPVIIYTGLIDRKANQVQNIALPKNRSDPYLREWAKVGSNPVIQHVIPGLNSSHFRDPTTGWIGPDGLWRIAVGAEVNGIGTALLYKSEDFMSWTRIERPLYSNNALNMWECLDFFAVVPGSNNGLDMSSEIPSGAKHVLKVSINSCDMYIVGVYDLKRDEFVPDTVQDDNRLWTRIDYGTFYASKSFFDSKHGRRVIWAWSNETDSYSDDIAKGWAGIHSIPRTIWLDGDGKQLIQWPVEEIESLRINEINHQGLELKKGDLFEIKGIDTIQADIEIDFEPTSIDDAEPFDPSWLFDPRKQCREADASVHGGIGPFGLVILASDNMEEHTAVHFRVYKSEQKYIILMCSDLRRSSLRPGLYTPAYGGFFEFDLENEKRISLRTLIDRSAVESFGSGGRICITARVYPVALVDNGATHMYAFNNGSTTVGVPQLRAWSMKRAQVNVMKGGSVIDA

SEQ ID NO: 19113 - protein, 534 aa, Oryza sativa
MLRAALLRSGSGLRRPPMAAPLSTAAAASWLSDSASSPPRVRLLIGGEFVESRADEHVDVTNPATQEVVSRIPLTTADEFRAAVDAARTAFPGWRNTPVTTRQRIMLKYQELIRANMDKLAENITTEQGKTLKDAWGDVFRGLEVVEHACGMGTLQMGEYVSNVSNGIDTFSIREPLGVCAGICPFNFPAMIPLWMFPIAVTCGNTFVLKPSEKDPGAAMMLAELAMEAGLPKGVLNIVHGTHDVVNNICDDEDIKAVSFVGSNIAGMHIYSRASAKGKRVQSNMGAKNHAIILPDADRDATLNALIAAGFGAAGQRCMALSTAVFVGGSEPWEDELVKRASSLVVNSGMASDADLGPVISKQAKERICKLIQSGADNGARVLLDGRDIVVPNFENGNFVGPTLLADVKSEMECYKEEIFGPVLLLMKAESLDDAIQIVNRNKYGNGASIFTTSGVSARKFQTDIEAGQVGINVPIPVPLPFFSFTGSKASFAGDLNFYGKAGVQFFTQIKTVTQQWKESPAQRVSLSMPTSQK

SEQ ID NO: 19114 - protein, 518 aa, Methylobacillus flagellatus KT
MLDANIKTQLQAYFDKLTQPIEITASVDGSDKSRELLELLDDLKSLSSRITVQQSDDDTQRKPSFSLNSPGKNLSIRFAGLPMGHEFTSLVLALLQVGGHPPKAEPEVIEQIRNLEGEFNFETYISLSCHNCPEVVQALNLMAAINPNIRHVMIDGALFQKEVDERKIMAVPTIFLNGQEFGHGRMGVQEILNKIDTGAVKKEAEKLSAKEPFDVLIVGGGPAGASAAIYSARKGIRTGIVAERFGGQVMDTMAIENFISVKETDGPKLAAALEEHVKSYDVDIMHLQRAAALVPAHENGGLAEVRLESGATLKAKAVIIATGARWREINVPGEKEYRGRGVAYCPHCDGPLFKGRSVAVIGGGNSGVEAAIDLAGIVKDVTLIEFNNELRADAVLQKKLFSLPNVTVITGAQTTEINGDGEKVNGLTYIDRQTGESHRIDLAAVFIQIGLVPNTDWIKDTITLNKFGEIEVDDKGQTSEPGIFAAGDVTTVPFKQIIIAMGEGSKAALGAFEHLIRH

SEQ ID NO: 19115 - protein, 147 aa, Medicago sativa
MSFTDKQEALVNSSWEAFKQNLPRYSVFFYTVILEKAPAAKGLFSFLKNSAEVQDSPQLQAHAEKVFGLVRDSAVQLRATGGVVLGDATLGAIHVRKGVVDPHFVVVKEALLKTIKEAAGDKWSEELNTAWEVAYDALATAIKKAMS

SEQ ID NO: 19116 - protein, 163 aa, Triticum aestivum
  misc_feature (52)..(52): Xaa can be any naturally occurring amino acid
  misc_feature (74)..(74): Xaa can be any naturally occurring amino acid
PRVRKDPKVYSNRAACYTKLGAMPEGLKDAEKCIELDPTFSRGYSRKGAIQXFFMKEYDKAMETYQEGLKHDPXNQELLDGVKRCIQQINKANRGELTPEELKERQGKAMQDPEIQNILTDPVMRQVLIDFQENPRAAQDHLKNPGVKQKIQKLVSAGIVQMK

SEQ ID NO: 19117 - protein, 306 aa, Candida glabrata CBS 138
MMDAKDVVVHVRNLEKSKGNDESVLEILRILEKEVVPTEKLLRETKVGVEVNKFKKSENAEISKLVKRMIGAWKDAINKHKKAKLRQQQPPQQGVSASSGGAADGSNNDGAKSGDEPRKTDKFVSSKIRNTKNDGVDPNVHNNKLRDQVIRALYDALAKDSEHPPKSILQTSIAIEEEMHKLNDSSIKEKEYKDKYRVIYSNIISRNNPDLKVKIANGDLSPEQLVNSDPKDLAPEHLKKKMEEIKKQNLFNAQGATIERSVTDRFTCGKCKEKKVSYYQLQTRSADEPLTTFCTCEACGNRWKFS

SEQ ID NO: 19118 - protein, 353 aa, Streptococcus pneumoniae R6
MNKRVQAFLAKMQEKELDGIIINNLKNVYYLTGFWGSNGTVFISRDRQVLVTDSRYIIAAKQETSGFEIVADRDELAVIAGIVKDMGLTRIGFEDEISVSYYHRMQAAFAGLDLLPQTQFVEGLRMIKDEAEIAAIRKACSISDQAFRDALDFIKPGKTEIEIANFLDFRMRELGASGLSFDTILASGINSSKPHAHPMHKPVELGEAITMDFGCLYDHYVSDMTRTIYLGHVSDEQAEIYNTVLKANQALIDQAKAGLGFRDFDKIPRDIIIEAGYGDYFTHGIGHGIGLDIHEEPYFSQTSTETIKTGMVLTDEPGIYIEGKYGVRIEDDILITETGCELLTLAPKELIVI

SEQ ID NO: 19119 - protein, 470 aa, Streptococcus pneumoniae R6
MAEERVEPKPIDLGEYKFGFHDDVEPVLSTGKGLNEGVIRELSAAKGEPEWMLEFRLKSYETFKKMPMQTWGADLSEIDFDDLIYYQKPSDKPARSWDDVPEKIKETFERIGIPEAERAYLAGASAQYESEVVYHNMKEEFQKLGIIFTDTDSALKEYPDLFKQYFAKLVPPTDNKLAALNSAVWSGGTFIYVPKGVKVDIPLQTYFRINNENIGQFERTLIIVDEGASVHYVEGCTAPTYSSNSLHAAIVEIFALDGAYMRYTTIQNWSDNVYNLVTKRAKAQKDATVEWIDGNLGAKTTMKYPSVYLDGEGARGTMLSIAFANAGQHQDTGAKMIHNAPHTSSSIVSKSIAKGGGKVDYRGQVTFNKNSKKSVSHIECDTIIMDDLSASDTIPFNEIHNSQVALEHEAKVSKISEEQLYYLMSRGLSESEATEMIVMGFVEPFTKELPMEYAVELNRLISYEMEGSVG

SEQ ID NO: 19120 - protein, 422 aa, Ehrlichia chaffeensis str. Arkansas
MAKKRVVITGLGLVTSLGSDLKTVWDSLSKGISGIRKIDRFDTSDLDCKVAGQVTTKPESEEYIFDAGDYIPEKDLKKMDTFIHFGIASATQAINDSNLLDYKDLDYSRVGVIVGSGIGGLQFIEKTVICLKERGPKRISPFFIPASLINLTSGHISMKYGFTGLNDAVVTACSTGAQAIGNAARVIQSGEADVIIAGGTESAICRIGIAGFAAMKALSTKFNDTPELASRPWDKQRDGFVMGEGSGVVILEDYEHAKKRGARIYGELLGYGMTSDAYHMSAPHPEGKGGIKSIELALSNAQLNPESINYINAHGTSTPIGDSIEIQAIKNVFKESVYKVPISSTKSSIGHLLGAAGSVEAIFCILAMNTGIAPPTLNLHESSEDPKLNLVPLNAQEHKINYCLSNSFGFGGVNVSLVFGKV

SEQ ID NO: 19121 - protein, 280 aa, Candida glabrata CBS 138
MAPSQGNAVQNNPPSRVVYLGSIPYDQTEEQILDLCSNVGPVVSLKMMFDSQTGKSKGYAFVQYQDLESSASAVRNLNGYQLGSRLLKCGYSSNSDITDQGVGNANNSAMDEYNEEMLSNSINRRFPQLPQGVDVNINMTTPAMMISSELAKKSPQEQKNLLKVFQKWTRENPEDAVYLLQECPQLSFVIAELLLTTGISKVDELTQLAESNQTGSQGNITSDILNNDKTIDPAVRAKKIELLRQVLQLSDGEIAILPYDEKMVIWDLKQKALRGEFGAL

SEQ ID NO: 19122 - protein, 416 aa, Bradyrhizobium sp. BTAi1
MDDDRMGQGTVTNGPVVIVGAGHAGFQLATSLRQAGFADPIHLINDEAHLPYQRPPLSKAYLKGTGGPETLMFRPQKFYADQTIDLVHDRVVSVQRDQRKVLLASGKALGYGHLVFATGARNRLLDIPNANLPAVRYLRILDDSEALRGLLGEAKRVVVIGAGFIGLEFAATARIKGLEVDVLELGARVMARAVTAEISDYFQKQHAEAGVRIHLGVQATSIEADGNKVTGVSLSDGRHIPADLVVVGVGVLPNIELAADAGLAVASGIVVDEYLLTSDPHISAIGDCALFASPRFGGTLRLESVQNATDHARCVAARLTGDVKPYDGQPWFWSDQGNDKLQIAGLTTGYDQVVLRGDPAQKAFSAFCYKEGRLVGIESVNRAGDHMFGRKLLAAGGTVDAAKAADPSFDLKSALV

SEQ ID NO: 19123 - protein, 741 aa, Arabidopsis thaliana
MGHDSFCYLIVLRCALRCGIIALMQICALQKKERRSKMESSDRSSQAKAFDETKTGVKGLVASGIKEIPAMFHTPPDTLTSLKQTAPPSQQLTIPTVDLKGGSMDLISRRSVVEKIGDAAERWGFFQVVNHGISVEVMERMKEGIRRFHEQDPEVKKRFYSRDHTRDVLYYSNIDLHTCNKAANWRDTLACYMAPDPPKLQDLPAVCGEIMMEYSKQLMTLGEFLFELLSEALGLNPNHLKDMGCAKSHIMFGQYYPPCPQPDLTLGISKHTDFSFITILLQDNIGGLQVIHDQCWVDVSPVPGALVINIGDLLQLISNDKFISAEHRVIANGSSEPRISMPCFVSTFMKPNPRIYGPIKELLSEQNPAKYRDLTITEFSNTFRSQTIRITEIPALFRATPATLASLKSPPPPKHLTIPTVDLKGASVVEKIGEAAEKWGLFHLVNHGIPVEVLERMIQGIRGFHEQEPEAKKRFYSRDHTRDVLYFSNHDLQNSEAASWRDTLGCYTAPEPPRLEDLPAVCGEIMLEYSKEIMSLGERLFELLSEALGLNSHHLKDMDCAKSQYMVGQHYPPCPQPDLTIGINKHTDISFLTVLLQDNVGGLQVFHEQYWIDVTPVPGALVINIGDFLQVKKIMLLLRSCFISCMIWGLILLFYCVQLITNDKFISAEHRVIANGSSEPRTSVAIVFSTFMRAYSRVYGPIKDLLSAENPAKYRDCTLTEFSTIFSSKTLDAPKLHHFKI

SEQ ID NO: 19124 - protein, 488 aa, Glycine max
MGVITVSTSAARTPLRLNTRLISHQQEKIPLPLETAKKHQKRVGKTSESLKRVRAVSTVETSPCTLDVDYNEAAAKLENIYKLSPVSDTCNVEDIDSKIERVLRRRKKVSEERDDGNCDNVVRNQNKKAKRLSLDKRIALKNNAKEEVIDQTQKKRNVKNRVQNIDVLIRDYSASTDLVSMDWKKMKIPPVLPSSEHAWLFKLMQPMKALLQAKEDLKEVDKEITGGELADATNMSIIQVRKAIEVGRAARNKLIKHNLRLVLFVINKYFQDFASGPRFQDLCQAGVKGLITAIDRFEPKRRLQLSTYSLFWIRHSIVRSITLSSFTRVPFGLERVRVDIQRTKLKLTFELQRSPTEEELVERIGISLERYHEVMKASKPILSLHSRHITTQEEYINGITDVDGVNGDNRRQLAVLRLALDDVLDSLKPKESLVIRQRYGLDGKGDRTLGEIAGNLNISREIVRKHEVKALMKLKHPARLDYLRRYVV

SEQ ID NO: 19125 - protein, 499 aa, Oceanicola granulosus HTCC2516
MQDLSHYVNGARVAGTSGRFADVFNPATGEVQARVPLASRAEVDDAIAKAAAAQPAWGATNPQRRARVMMRVVELLNRDMDKLAEALSREHGKTLPDAKGDIQRGLEVIEFCIGAPHLLKGEYTDGAGPGIDMYSMRQPLGVVAGITPFNFPAMIPLWKMGPALACGNAFILKPSERDPSVPLMLAEIFLEAGLPEGVLQVVNGDKEAVDAILENETVQAVGFVGSTPIAAYIYAKGCEHGKRVQCFGGAKNHMIVMPDADMDKAADALVGAGYGAAGERCMAISVAVPVGEETADRLVEKLVPRIEALKVGPYTAGDDVDYGPVVTAAAKANIEKLVQSGVDAGAELAVDGRDFKLQGYEDGFFVGPHLFDRVTPDMEIYRKEIFGPVLSTVRAGSYEEALKLAMDHEYGNGTAIFTRDGDAARDFASRVNVGMVGINVPIPVPLAYHTFGGWKKSGFGDLNQHGPDSFKFYTRTKTVTARWPSGIKEGGEFNFKAMD

SEQ ID NO: 19126 - protein, 533 aa, Kluyveromyces marxianus
MDGDSKAITNTTFSLNRPSVHFTPSHGWMNDPNGLWYDAKEEDWHLYYQYNPAATIWGTPLYWGHAVSKDLTSWTDYGASLGPGSDDAGAFSGSMVIDYNNTSGFFNSSVDPRQRAVAVWTLSKGPSQAQHISYSLDGGYTFEHYTDNAVLDINSSNFRDPKVFWHEGENGEDGRWIMAVAESQVFSCLFYSSPNLKNWTLESNFTHHGWTGTQYECPGLVKVPYDSVVDSSNSSDSKPDSAWVLFVSINPGGPLGGSVTQYFVGDFNGTHFTPIDGQTRFLDMGKDYYALQTFFNTPNEKDVYGIAWASNWQYAQQAPTDPWRSSMSLVRQFTLKDFSTNPNSADVVLNSQPVLNYDALRKNGTTYSITNYTVTSENGKKIKLDNPSGSLEFHLEYVFNGSPDIKSNVFADLSLYFKGNNDDNEYLRLGYETNGGAFFLDRGHTKIPFVKENLFFTHQLAVTNPVSNYTTNVFDVYGVIDKNIIELYFDNGNVVSTNTFFFSTNNVIGEIDIKSPYDNPYTINSFNVTQFNV

SEQ ID NO: 19127 - protein, 480 aa, Pseudomonas putida KT2440
MQLKDAQLFRQQAYINGEWLDADNGQTIKVTNPATGEVIGTVPKMGTAETRRAIEAADKALPAWRALTAKERSAKLRRWFELMIENQDDLARLMTTEQGKPLAEAKGEIAYAASFIEWFAEEAKRIYGDTIPGHQPDKRLIVIKQPIGVTAAITPWNFPAAMITRKAGPALAAGCTMVLKPASQTPYSALALVELAHRAGIPAGVLSVVTGSAGEVGGELTGNSLVRKLSFTGSTEIGRQLMEECAKDIKKVSLELGGNAPFIVFDDADLDKAVEGAIISKYRNNGQTCVCANRIYVQDGVYDAFAEKLAAAVAKLKIGNGLEEGTTTGPLIDGKAVAKVQEHIEDAVSKGAKVLSGGKLIEGNFFEPTILVDVPKTAAVAKEETFGPLAPLFRFKDEAEVIAMSNDTEFGLASYFYARDMSRVFRVAEALEYGMVGINTGLISNEVAPFGGIKASGLGREGSKYGIEDYLEIKYLCISV

SEQ ID NO: 19128 - protein, 328 aa, Triticum aestivum
  misc_feature (7)..(7): Xaa can be any naturally occurring amino acid
  misc_feature (139)..(139): Xaa can be any naturally occurring amino acid
MARAAVXTAPLSRLHSPTPSIPCHSVSSQLRIHQQRKPLTVASALPEVADLPGLSLPAAAAAVAALAAAVSLSDPERRRMAQAEALGGGDKEAVRAYFNSTGFERWRRIYRPRGATDAWVNRVQLDIREGHAHTVAATXLAMLRDAPDVPLAGATVCDAGCGTGSLSIPLASAGASVLASDISAAMVSEAQRQAALAAGSSPGFRMPRFEVRDLESLEGRYDVVVCLDVLIPYPREEAQKMIRHLASLAGKRLVISFAPKTLYFDVLKRVGELFPGPSKATRAYLHSEKDIEEALRAAGWRVKNKGFISTQFYFAKLYEAVPVAAASS

SEQ ID NO: 19129 - protein, 128 aa, Vibrio sp. Ex25
MIHTMIRVSDLDRSLQFYRDILELEIKDQYIFDGFSLTYLANEETGFELELTHNHDQTEPYTHGSGYGHLAVSVEDIEQTHKRIKSLGIEAGDIKAFDHQQKHLATFFFVTDPDGYKIEFLQRQGRYL

SEQ ID NO: 19130 - protein, 333 aa, Buchnera aphidicola str. Bp (Baizongia pistaciae)
MTIKIGINGFGRIGRVLFRLAQLRSNIEILAINDLINVQYIAYMLKYDSIHGNFNGKIVIKNETLFVNGKKIRITNEKDPKNLMWGDLNIDVVIESTGIFLTTEDSYKHIQAGAKKVIITSPPKDNTPMFVRGVNFNEYVGQKIVSNASCTTNCLAPLAKVINDEFEIVEGLMTTVHATTATQKTVDGVSYKDWRGGRSALQNIIPSTTGAARAVGKVLPELNGKLTGIAFRIPTANVSVVDLTVRNKKIATYEDICQIIKYASNHDMKEVIGYTEDHVVSSDFNGNTLTSIFDAKAGLSLNNNFIKLVSWYDNECGYSSKVLDLSEFISTFS

SEQ ID NO: 19131 - protein, 435 aa, Staphylococcus aureus subsp. aureus MRSA252
MTTDILNISEEQLVDYSKAHNEPSWMTELRKKALKLTETLEMPKPDKTKLRKWDFDSFKQHDVKGDVYQSLSQLPESVREIIDVDHSKNLVIQHNNTIAYTQVDDNASKDGVIVEGLADALMNHSDLVQKYFMKDAVTVDEHRITALHTALVNGGVFVYVPKNVVVEHPVQYVVLHDDENASFYNHVIIVTEESAEVTYVENYLSNASGEGNQLNIISEVIAGANSNITYGSVDYMDKGFTGHIIRRGITEADASINWALGLMNEGSQIIDNTTNLFGDRSTSSLKSVVVGTGEQKINLTSKIVQYGKETDGYILKHGVMKEHASSVFNGIGYIKHGGTKSIANQESRVLMLSEHARGDANPILLIDEDDVQAGHAASVGRVDPDQLYYLMSRGISQREAERLVIHGFLDPVVRELPIEDVKRQLREVIERKVSK

SEQ ID NO: 19132 - protein, 226 aa, Chlamydia muridarum Nigg
MTLLILLRHGQSVWNQKNLFTGWVDIPLSQQGIQEALTAGEAIKNLPIDCIFTSTLVRSLMTALLAMTNHSSKKIPYIIHEERPDMSRIHSEKELEQMIPLFQSSALNERMYGELQGKNKQEVAEQFGEEQVRLWRRSYKIAPPQGESLFDTAQRTLPYFQKRIFPLIQQGKNIFISAHGNSLRSLIMDLEKLTEEEVLSLELPTGKPIVYEWTEQKFTKSALSFG

SEQ ID NO: 19133 - protein, 965 aa, Psychrobacter arcticus 273-4
MTISQNPTLDTFKGLFNEAEFVYRHLGSNDAKQADLLSAIGYKDMATFINDTVPEPVRLHKELDLPVAMSEHAALAKLRTMADDITVNKSYIGQGYSPVRMPAVIQRNVLENPGWYTAYTPYQAEIAQGRLEALLNFQQVCIDLTGLELAGASLLDEATAAAEAMAMSKRVSKSKSMQFFVDDRVYSQTLDVINTRAKYFGWEVVVGDFELAKSGDYFGALFQYVGVEGDVKDLTDVIAAVKKNKTYVNVVSDIMSLVLLKSPADMGADVALGSTQRFGIPMGFGGPHAAYFAFSDKAKRSAPGRIIGVSKDSQGNTALRMALQTREQHIRREKANSNICTSQVLLANLAGMYAVYHGPGGVKRIATRIHAFATAFADVIKNANDSNLNVVHDQFFDSVVIDCGSEKLATQIFENADNVGYNLWRLGDSKLSVAFSETSDQEDFKILTQLFVTKAHDLPEDARISLDSTHLRTDDILTHPVFNSHHTEHEMLRYLKSLEDKDLAMNRSMISLGSCTMKLNATSEMLPITWPEFANVHPFAPRDQVTGYVAMIDSLQEQLKAITGFDDVSMQPNSGASGEYAGLLAIRRYHESLGETDRDVCLIPMSAHGTNPATAMMMGMKVVVVKTDDNGNVDIDDLTAKSEEHSARLGALMITYPSTHGVFEEGIRKICDLIHKHGGQVYMDGANMNAQVGMMQPADVGADVLHMNLHKTFCIPHGGGGPGMGPIGMKSHLAPFMANHTLSPVHNAQKDCSAVSAAPYGSASILPISWMYIAMMGRDGLLKATELALLNANYVAAELKDYYPVLYTGKNGRVAHECIIDIRPLKEETGISESDIAKRLMDYGFHSPTMSFPVAGTLMIEPTESESKEELDRFISALKSIKAEAMKAKAGEDNWTLENNPLVNAPHTAAMVIDGEWTYPYSRETAAFPLPYIRTNKFWPSVARVDDAYGDKNLMCSCPSIENYM

SEQ ID NO: 19134 - protein, 465 aa, Staphylococcus aureus subsp. aureus MRSA252
MAKKAPDVGDYKYGFHDDDVSIFRSERGLTENIVREISNMKNEPEWMLDFRLKSLKLFYKMPMPQWGGDLSELNFDDITYYVKPSEQAERSWDEVPEEIKRTFDKLGIPEAEQKYLAGVSAQYESEVVYHNMEKELEEKGIIFKDTDSALQENEELFKKYFASVVPAADNKFAALNSAVWSGGSFIYVPKNIKLDTPLQAYFRINSENMGQFERTLIIADEGASVHYIEGCTAPVYTTSSLHSAVVEIIVHKDAHVRYTTIQNWANNVYNLVTKRTFVYENGNMEWVDGNLGSKLTMKYPNCVLLGEGAKGSTLSIAFAGKGQVQDAGAKMIHKAPNTSSTIVSKSISKNGGKVIYRGIVHFGRKAKGARSNIECDTLILDNESTSDTIPYNEVFNDQISLEHEAKVSKVSEEQLFYLMSRGISEEEATEMIVMGFIEPFTKELPMEYAVEMNRLIKFEMEGSIG

SEQ ID NO: 19135 - protein, 297 aa, Dechloromonas aromatica RCB
MSIFINKNTRIITQGITGKTGQFHTEKCQEYANGKECFVAGVNPKKAGESIFNIPIYASVKEAAAETGATVSVIYVPPPGAAAAIWEAVEADLDMAICITEGIPVRDMLMLRNKMKEKEAKGGKKTLLLGPNCPGLITPDEVKIGIMPGHIHRKGRIGVVSRSGTLTYEAVGQLTEIGLGQSSAVGIGGDPINGLKHIDVMKAFNDDPDTDAVIMIGEIGGPDEAEAAMWCKENMKKPIVGFIAGVTAPAGKRMGHAGALISGGADTADAKLEIMEACGFTVTRNPSEMAKLLKALL

SEQ ID NO: 19136 - protein, 925 aa, Arabidopsis thaliana
MRLRHQGGQYLARGMEPVYWSNKVDSTHDLYDNYTLGSYQNNSYNILAHTGFGYDHEFQIYEINSNSWRIIDATLDFKLGYIGRGVSLKGKTYWIASGEEEKRLGKFLISFDYTTERFERLCLPNKYPCYATLALSVVREEKLSMLSQRGIKSKAEIWVTNKIGETQVVSWSMVLALDLQPKRCIGESGSFLVDEKKRVVVCCDNIRDQGKTTFDSNLPRYHRQKKKGRMIIVFDVESMRLPVTVKATKPSFLVIWIRYSSAASSPTVSLNPSGRLQQTLAGSVEVKGKSLHSGKFSTVKLNPEIAGAGRFFEFRSRFIPASIEFAQESPLCTTLLKDELKIRTVEHLLSALEAKGVDNCRIQIESESSDDREVEVPIFDGSAKEWVDAIQGVGINAAQNHDGESVEKMVAHVNKPVYVCKNDTFVAAFPALETRITCGIDFPQVPAIGCQWFSWRPIHESSFAKDIASSRTFCVYEEVERMREAGLIKGGSLDNAIVCSAEHGWMNPPLRMRRRRCDLQPKRTRMCDLQPKRTSMCDLPPKLVGEKILTRIPITSLRAVRSTCKLWNALTKDRVLVRFHLRRSKEEEEDTMDLSIKQVDLLNQVEISRVYHCDGLLLCVAKDNSRVVVWNPYLGQTRWIRPRTESNIGDSYALGYDINRNHKILRMVQTRNVSVYRYEIYDLRSNSWRVLEVTPNGEMDPNHPLYGVSVKGNTYFFAHEDSSSGEIDEDGDIIDLEDFLLCFDFTTETFGLRLPLPFHSTIDATVTLSCVRDQQLAVLYHNEGLHSDDRFTTVEFWVTTSIEPNSVSWSKFLTVDMRPLALTGVRFDNDMGATFFIDEDEKVAVVFDLDGYLSTESARYHTAFISGKDGFFKPVTLGVAPNVGEPCPRTGHIPTTYRPPLVCSSTYLPSLVQVNQQRKRKERHV

SEQ ID NO: 19137 - protein, 408 aa, Flavobacteria bacterium BBFL7
MKELLKRYENAEPEIVFHWNDPETEAQGWTVINSLRGGAAGGGTRMRAGLDKNEVLSLAKTMEIKFTVSGPAIGGAKSGINFDPRDPRKKGVLERWYKAVSPLLKSYYGTGGDLNVDEIHEVIPITEDCGVWHPQEGVFAGHFSPTEADKINRIGQLRQGVIKVIENPIYSPDVSRKYTVADMITGYGVAEAVKHFYDIYGGDVKGKRAVVQGFGNVGSAAAYYLSQMGAKVVGIIDRVGGLINEDGFSFEEIKEMFLNKDGNALRSSELIPFEEVNEKIWSLKTEIFAPCAASKLVSQDQIDQMIASGLEVISCGANVPFADKEIFFGSIMEHTDEKVSLIPDFISNCGMARVFAYFMERRVQMTDEAIFNDTSMTIRNAIQNTYNNNSSRTQISSTAFEIALKQLV

SEQ ID NO: 19138 - protein, 395 aa, Chromobacterium violaceum ATCC 12472
MSGMVFEVMQETANSAVIKVIGVGGGGCNAIDNMITGNVHGVEFICANTDAQSLQRNRAPQKLQLGTNLTRGLGAGANPEVGRSAALEDRERIAEMLRGSNMVFVTAGMGGGTGTGAAPVVAEVAKEMGILTVGVVTRPFEHEGKRMKVAQNGIEDLKKHVDSLIVIPNEKLMEVLGDDVTMREAFRAADDVLKGAVAGIAEVITCPGLINVDFADVRTVMGEMGLAMMGSAYASGIDRARVAAEQAVASPLLDNITLEGARGVLVNISTAPGCLKMSEYREIMGIIRQYADEDAQIKFGTAEVEDMPEDTIRVTLIATGLGQKKSVRNEDRPEYIKIVKTGTDDRAVEMVNYEDLDAPAIMRTGRRRANPSLDFSNPEVSESYDIPAFLRKQAD

SEQ ID NO: 19139 - protein, 423 aa, Acinetobacter sp. ADP1
MSLSYEIENNGAWQTYLAQVDRVAPYLEADLIPYINTLKRPKRALIVDVPIVMDDGAIQHFEGYRVQHNLSRGPGKGGIRYHPDVELNEVMALSAWMTIKTAVLNLPYGGAKGGIRVDPKKLSARELERLTRRFTSEISPIIGPQNDIPAPDVGTNADIMGWMMDTYSSIKGHTVTGVVTGKPVHLGGSLGRVRATGRGVFVTGLEVAKKINLSIENSRVAVQGFGNVGSEAAYLFNKANAKVVCAQDHTGTIFNDDGLDVKSLQEHVAQTGGVAGFPDSSKIEDAEFWNVEMDILVPAALEGQITAERAQTLKAKLVLEGANGPTYPDADDVLGQRNIIVVPDVLCNAGGVTVSYFEWVQDMSSYFWTEDEINARLDKLMIQAVDDVWKKAQEKSCTMRTAAYILACERILKARKERGIFPG

SEQ ID NO: 19140 - protein, 147 aa, Medicago sativa
MSFTDKQEALVNSSWEAFKQNLPRYSVFFYTVVLEKAPAAKGLFSFLKNSAEVQDSPQLQAHAEKVFGLVRDSAVQLRATGGVVLGDATLGAIHVRKGVVDPHFVVVKEALLKTIKEAAGDKWSEELNTAWEVAYDALATAIKKAMS

SEQ ID NO: 19141 - protein, 176 aa, Pantoea agglomerans
MLVNSLIVILSVIAMEGIAAFTHRYIMHGWGWRWHESHHTPRKGVFELNDLFAVVFAGVAIALIAVGTAGVWPLQWIGCGMTVYGLLYFLVHDGLVHQRWPFHWIPRRGYLKRLYVAHRLHHAVRGREGCVSFGFIYARKPADLQAILRERHGRPPKRDAAKDRPDAASPSSSSPE

SEQ ID NO: 19142 - protein, 218 aa, Glycine max
  misc_feature (101)..(101): Xaa can be any naturally occurring amino acid
MATISAVQVEFLEFPAVVTSPASGKTYFLGGAGERGLTIEGKFIKFTGIGVYLEDKAVPSLAAKWKGKTSEELVHTLHFYRDIISGPFEKLIRGSKILPLXGAEYSKKVMENCVAHMKSVGTYGDAEAAAIEKFAEAFKNVNFAPGASVFYRQSPDGILGLSFSEDATIPEKEAAVIENKAVSAAVLETMIGEHAVSPDLKRSLASRLPAVLSHGIIV

SEQ ID NO: 19143 - protein, 543 aa, Oceanicola granulosus HTCC2516
MSKDRLYLYDTTLRDGQQTQGVQFSTDEKKRIAAILDALGLDYIEGGWPGANPTDSDFFDAAPTTRATMTAFGMTKRSGRSAENDDVLAAVLNAGTPAVCLVGKAHDFHVETALGIPLAENIDNIRASFAHIKAQGREAIFDAEHFFDGWKANRAYALEAVHAAYDAGADWIVLCDTNGGTLPPEIGRIVADVIDSGIPGTRLGIHCHNDTETAVAGSLAAVDAGARQVQGTLSGLGERCGNANLTTLLAVLALKEPYASRYETNTTPESLKGLRRAARQLDDILNRVPQKQAPFVGASAFAHKAGLHASAILKDPTTYEHIDPTAVGNSRVVPMSNQAGQSNLRQRLAEAGLEVERGDPALAAMLETVKTRESEGYAYDGAQASFELIARTELGLMEHKFFEVERYRVISERRRNARGELVIVSEAVVTVALPDGTQTTSFYQNENPTEQQDAGPVNALAVALSKDLGPYQEMIADWRLVDFKVRITNGGTEAVTRVIIDSEDSTGRRWSTVGVSANIVDASFEAMVDAIRWKLVQAGARPC

SEQ ID NO: 19144 - protein, 482 aa, Acinetobacter sp. ADP1
MIQESLQYLLKHPDISFTAPTSGAVIEVNDAAKGTPLAWVKSHDRSGVEAAIQRSAQAQAKWKTQTALQRADVLWAWFHLINEHKENLAQILTAEQGKPLAEARGEIGYAASFIRWFAEQARRIDGEILPPTMAHQRLLVIKQAIGVTAAITPWNFPAAMITRKAAPAIAAGCSMLVKPAELTPLTAYALEVLALQAGLPQDILINISGDSVEVGKTLCESDVVRKLSFTGSTPVGRILMQQSAPSIKKLSLELGGNAPVLVFDDANLDQAVQGIMASKFRNSGQTCVCANRIYVQSGIYDALTTKLVDAVKALKVGDGREEGVTQGPLIDARAVAKVQSHIEDATSKGATLQTGGQLAAQGGTFFEPTVLSGVTQEMRVAKEETFGPLAALFRFETEEQAIAMANDTEFGLAAYLFTQSTARQWRVGEALEYGMVGVNTGAISNEVAPFGGVKQSGLGREGSQHGIEEYLEMKYLCVDLSE

SEQ ID NO: 19145 - protein, 370 aa, Cryptococcus neoformans var. neoformans JEC21
MANILKRSALKLGMIPADGIGKEVLPAAQRVIEALGSSIPKTTFVPLVAGWEEFNKNGKALPDDTVSALRECDGAMFGAVSSPSHKVAGYSSPIVALRKHLDLYANVRPVSSVPIPGQPSPKAVDLVIVRENTECLYIKQEEISGEGEDRVALATRKISAKASSRIGRMAFEIALRRGQEREAARAAGKDVWWKGEPKVTIVHKSNVLSVTDGLFRETVRAVKEGKGGEKYAGVKLEEQIVDSMVYRMFREPEFFDVCVAPNLYGDIISDGAAALVGSLGLVPSINAGDNFIMGEPVHGSAPDIEGKNIANPIASIRSAALLLSSLGYIEPAAKINAAVNAVLVEGQYLTPDLGGKSSTTEVTEAVLKRL

SEQ ID NO: 19146 - protein, 154 aa, Glycine max
KDAREGDDNLSTVHHELHFTVQECIDALGEVIYHIETYDVTTIRASTPMFLMSRKIKSLGVKMVISGEGSDEIFGGYLYFHKAPNKKEFHEETCRKIKALHLYDCLRANKATSAWGVEARVPFLDKSFISVAMDIDPQWKMIKRDSVQIEKWVT

SEQ ID NO: 19147 - protein, 127 aa, Arabidopsis thaliana
  misc_feature (31)..(31): Xaa can be any naturally occurring amino acid
  misc_feature (75)..(75): Xaa can be any naturally occurring amino acid
  misc_feature (88)..(88): Xaa can be any naturally occurring amino acid
  misc_feature (92)..(92): Xaa can be any naturally occurring amino acid
  misc_feature (94)..(94): Xaa can be any naturally occurring amino acid
  misc_feature (100)..(102): Xaa can be any naturally occurring amino acid
  misc_feature (104)..(105): Xaa can be any naturally occurring amino acid
  misc_feature (110)..(110): Xaa can be any naturally occurring amino acid
  misc_feature (112)..(112): Xaa can be any naturally occurring amino acid
  misc_feature (119)..(119): Xaa can be any naturally occurring amino acid
MKNPILKTWRKVKSFGHTSSSTTPSFTKSKXCHGSFRLEEAKSNESKGKPKKESPSHGFFTVYVGPTEQRIVVKXKLLNHPFCSRTFXEDAXTXYGYRRXXXLXXPCEVXFXFKGFAGXKAYPGMSY

SEQ ID NO: 19148 - protein, 426 aa, Bacillus licheniformis ATCC 14580
MAVEQMTMPQLGESVTEGTISKWLVSVGDHVNKYDPIAEVMTDKVNAEVPSSFTGTIAELVGKEGETLQVGDVICKVETNEEAKPEAEAVSKPDQEEAEPAKPEAKDTSQKKRYSPAVLRLAGEHNIDLEQVEGTGAGGRITRKDIQRIIASGAVPQTDAAPEKQPGANAAGAIEPDQKPAQAAPQAAPPQSAAGDVEIPVTGIRNAIATNMVRSKHEIPHAWTMMEVDVTGLVSYRNKIKNEFKKKEGFSLTFFAFFVKAVAQALKEFPQMNSMWAGDKIIQKKDINISIAVATEDALYVPVIKHADEKTIKGIAREISELAHKVRSGKLTSGDMSGGTFTVNNTGSFGSVQSMGIINHPQAAILQVESIVKRPVVMEHGMIAVRDMVNLCLSLDHRVLDGLICGRFLARVKEILEQIDDHTSIY

SEQ ID NO: 19149 - protein, 389 aa, Oryza sativa
EAMLPAVKLSPGPVAFAGTNLRSRSASVSSVSSLKPSKFVVSPLRPLYLAPLDGPRAAGQKAQRQPLEFRCAASAADDKESKTEVVPVRSEAAQKLKISIYFATWWALNVIFNIYNKKVLNAFPYPWLTSTLSLACGSAMMLVSWATRLVEAPKTDLDFWKVLFPVAVAHTIGHVAATVSMSKVAVSFTHIIKSAEPAFSVLVSRFLLGETFPVPVYLSLLPIIGGCGLAAVTELNFNMVGFMGAMISNLAFVFRNIFSKRGMKGKSVSGMNYYACLSIMSLVILTPFAIAMEGPQMWAAGWQKALAEVGPDVVWWVAAQSVFYHLYNQVSYMSLDEISPLTFSIGNTMKRISVIVSSIIIFHTPVRPVNALGAAIAILGTFLYSQAKQ

SEQ ID NO: 19150 - protein, 192 aa, Acinetobacter sp. ADP1
MRGVNKVILVGTLGRDPETKTFPNGGSLTQFSIATSEAWTDKSTGERKEQTEWHRIVLHNRLGEIAQQYLRKGSKVYIEGSLRTRQWTDQNGQERYTTEIRGDQMQMLDTRSQGDQPMSGGNDFNQPRFNNNAPQQNTGYNQGGGYNNSGNNNFNQGSGYGNGGSNNSNQGGYVPKAPQQPAPADLDDDLPF

SEQ ID NO: 19151 - protein, 478 aa, Buchnera aphidicola str. Bp (Baizongia pistaciae)
MNVNLMWFRNDLRLSDNSALHFSCRNNASTVLALFIATPKQWERHCLAPKKKMLIYKNIVALKKKITELGIIFYYYESTDYLESTNYIIEFCKIHKVTSIFFNLEYEFYERQRDKIIKKKLKKNNIIINCFHDSVLITPGSIKNSYGKMYKKFSYFKYKCIKQLQLNIPSCFPKPQNKNLHDHYSLDFTIPIFHTYLEKFDANIFPIGEDIVYEKLKFFIKYAFNKYNFDQEIFELNSTSMLSAHLSIGVISPRQCVTLLFKEYPDIIHKLEECKWINELLWREFYQHLLYFYPNIGQNQSLYHWENRIKWDNNLYYLNLWKQGNTGYPIIDAGMRQLKQLGWISNRLRMITASFLVKNLLIDWRKGEEYFMSQLIDGDFASNNGNWQWIASVGTDSMPYFRIFNPMLQSKKFDINAKFIRKYIPELSNVSTYNIHNPCDNNKTNKIHSKYPQPIINYYHSKKKTLLVFKHAKCSNKL

SEQ ID NO: 19152 - protein, 312 aa, Phaseolus vulgaris
KRLEISFSQPGLFADPEGRGLRVLTKSQLDEILTPAACTIVSSLSNDDVDSYVLSESSLFVYAYKIIIKTCGTTKLLLSIPPILKFADMLSLKVKSVTYTRGSFIFPGAQPHPHRCFTEEVAILNDYFGKLGSGSMAFIMGSPDKKQKWHIYSASADPLISSDTNVCTLEMCMTGLDREKAQIFYREQSASAAIMTVNSGIRKILPMSDICDFDFEPCGYSMNSVEGDAVSTIHITPEDGFSYASFETVGYDFKVLNLNALVDRVLSCFLPDEFSVAVRVDGASKPSEQMCFVDVKGYCREEWIHEGLGMGG

SEQ ID NO: 19153 - protein, 142 aa, Glycine max
MASSFVGTLLPNKFTQNKHLSSVPASRGAPTRRRVHLATTRAESMTTVIEKLGIKIERNPPESKLTQLGVRQWPKWGCPPSKFPWTYEAKETCYLLEGKVKVFPSGSNESVEIAAGDLVVFPKGMSCTWDVSVGVDKHYNFE

SEQ ID NO: 19154 - protein, 454 aa, Burkholderia pseudomallei K96243
MKNLQRHLSARHIRFLALGSAIGTGLFYGSASAIRLAGPAVILAYIVGGAAVYMVMRALGEMAVREPVPGSFGHYATENLGPFAGFVTGWTYTLEMVIVAIADITAFGIYMGFWFPHVPQWIWVLAIVAIICGLNLCHVKVFGELEFWLSIVKVGAIVAMIGGGAAILFTGMRLGSGGAPSLANLWSHGGFLPNGVGGLVASLSVVIFAYGGIEVIGMSAGEAKEPERAIPRAINAVPMRILLFYVLTMIVLMSIFPWTGVGANGSPFVQIFSALGVRSAAEILNLVVISAAISAINSDIFGAGRMMYAMALQGQAPRALAAMSARGVPWVTVLVMAGALLVGVVLNYLMPKDVFLMVAASATFATVWVWLMILLSQIAMRRRLGAAEVAALKFKVPFWPVGPALTIAFMAFVIAMLGYFDDTRVALFVGAAWLAILALVFYTRIRPRLAAVAR

SEQ ID NO: 19155 - protein, 232 aa, Buchnera aphidicola str. Bp (Baizongia pistaciae)
MKVYKLVLMRHGESIWNELNKFTGWHDVDLSNRGVQESLKAAKLLKKHGFYFDYAYSSVLKRSIHTLWNIIKFLDQSWIPVKKSWRLNERHYGALEGLNKDDVIQKYGNDKVQQWRRSFNIAPPKISYLEKKKLAHDSRYNNINFDILPYCESLKLTTQRVLPYWLNEIFPRFQKNTKIIIVAHGNSLRALIKYLNNINDIDILNLNIATGFPIIYEFNSEFKPIQYYYLKQ

SEQ ID NO: 19156 - protein, 550 aa, Photobacterium profundum SS9
MLKNINPTHTQAWKDLTAHYEDAQDLQLSDLFANDSERFNKFSATFGSDILLDYSKNLITEETLTKLFALAEQTELKAAIAEMFSGEKINKTEDRAVLHSALRNRSNTPVVVDGEDVMPKVNAVLEKMKAFTARIVDGDWKGYTGQEITDVVNVGIGGSDLGPYMVSEALVPYKTRLNMHFVSNVDGTHIAETLKDLNPETTLFLIASKTFTTQETMTNAHSARDWFLATAQDQAHVAKHFAALSTNVGSVSEFGIDTDNMFEFWDWVGGRYSLCSAIGLSICLSIGFDNFVELLDGAHEMDQHFAQAPLEENLPVILALIGIWYNNFHGAESEAILPYDQYLHRFAAYFQQGNMESNGKCVDRGGNPVDYQTGPIIWGEPGTNGQHAFYQLIHQGTKLIPCDFIAPSISHNPLTDHHPKLMANFFAQTEALAFGKTKEQVEAEFVAAGKTLDEVKDLVPFKVFDGNRPTNSILIKQVTPKVLGSLMALYEQKIFTQGVIWNIFSFDQWGVELGKQLANQILPELNDADSIAGHDSSTNGLINAYKQWRK

SEQ ID NO: 19157 - protein, 320 aa, Buchnera aphidicola str. Bp (Baizongia pistaciae)
MIKRIGVLTSGGDAPGMNAAIRGVVRTALSRNLEVFGIYDGYLGLYENRMILLDRYSVSDIINKGGTFLGSARFSNFFKKDIRSIAIKNMQQRNIDFLVVIGGDGSYVGAQKLTEMGFPCISIPGTIDNDVAGTDYTIGYFTALETVVEAIDRLRDTSSSHQRISIVEVMGRNCGDLTLSAAIAGGCEFIVLPEIEFTKEELVKEIKNGIKKGKKHAIVAITEYICNVEKLAKYIQRETCRETRATILGHIQRGGAPVVYDRILASRMGEYSVDILLQGFQGRCIGTINEKMVHHDISDALKNMKRPFKFDWLKTAKQLY

SEQ ID NO: 19158 - protein, 964 aa, Silicibacter sp. TM1040
MLRKKTNGVARRPQRTSILSKVGESAVDRRAFLRGSGLAIGGLAAISATGGTVTQANAAASATGAMETIKSVCTHCSVGCTVVAEVQNGVWVGQEPGWDSPFNLGAHCAKGASVREHAHGERRLKYPMKKEGGEWKRISWEQAIDEIGDGMMQIREESGPDSVYWLGSAKHNNEQAYLFRKFAAYWGTNNVDHQARICHSTTVAGVANTWGYGAMTNSYNDIHKSKAIFIIGGNPAEAHPVSLLHVLKAKEENNAPLIVCDPRFTRTAAHADEYVRFRPGTDVALVWGILWHIFENGWEDTEFIRTRVWGMDQIRTEVAKWTPEEVERVTGTPGSQLKRVARTLVNNRPGTVIWCMGGTQHTNGNNNTRAYCILQLALGNMGVSGGGTNIFRGHDNVQGATDLGVLSHTLPGYYGLSAGAWGHWGRVWGEDMDWLKGQFETVKGADGKDKNLMNLTGIPVSRWIDGILEDKENMDQPNNVRAMVLWGHAPNSQTRMTEMKTAMEKLDMLVVVDPYPTVSAVLHDRTDGVYLLPACTQFETRGSVTASNRSLQWRDQVVEPLFESLPDHVIMAKFANKFGWADRLFRNIEMEDAETPNIESITREFNAGMWTVGYTGQSPERIKLHMANQHTFDRTTLQAVGGPADGDYYGMPWPCWGTPEMKHPGTPNLYDMSKPVAEGGLCFRARFGVERDGENLLAEGVSNPGAEIQDGYPEFTMQMLMDLGWDGDLTAEERAAIDAVAGPKTNWKTDLSGGIQRVAIKHGCAPFGNAKARAVVWTFPDPVPLHREPLYTNRRDLVADYPTYEDRKFYRLPTMYASIQKNDVSKEYPIILTSGRLVEYEGGGDETRSNPWLAELQQDMFVEINPRDANDIGIRDGSQVWVEGPEGGKVKVMAMVTERVGAGVAFMPFHFGGHFQGKDLRDKYPDGADPYVLGESTNTAQTYGYDSVTQMQETKATLCKISAA

SEQ ID NO: 19159 - protein, 424 aa, Chlamydia muridarum Nigg
MVTCEAGIASVQQAIKDIADGNFVIVIDRESRENEGDLILAGEKVSAEKMAFLLSHTTGIVCASVTREQARVLDLPAMVQENQCAFKTAFTVSVDASSGITTGVSAADRTRTVQLLSDPTSISQSFVRPGHVFPLVSQPGGVVKRPGHTEASMDLMRLAGMYPCGIFAELVNADHSMMRQQQILDFAEQHGFTVITVDDLITYRWTFDSLVEHVSSARIPTKYGEFFIHVYKSIIDGTEHFALVKGDIREQESVPVRVHSECLTGDVLGSCRCDCGAQLDMAMRYIAEQGLGVIVYLRGQEGRGIGFGHKIQAYALQDLGYDTVEANLQLSFPIDAREYGVAAQILKDLRLTSVRLITHNPKKFFELQRLGIHILDRIVLPVIVSSENERYLRTKKDRMGHWLNFPVLNESEDEYETVERTSCC

SEQ ID NO: 19160 - protein, 569 aa, Xanthomonas campestris pv. vesicatoria str. 85-10
MSLDQTRHHQMFPELDAGQLSITRRFASGPAQRFDAGDPVFEVGDAHAPVWVVLEGAIEVVRRDGLGNEKPITRHTPGQFTGEVSQLAGRASLAAGRAGPDGCLALPFDTAHLRALMISSAEVGEVVMRALILRRVGLIEGDASGSVLIGEPDDPHLTRLQGFLTRNGYPNTVMDVSDDEGRALVERLGIQEHDLPVMVCPSGRVLRQPSDAEAAHCLGMTPDIDPDKRYDVAIVGAGPAGLATAVYAASEGLSVLVLDQRAIGGQAGASARIENYLGFPTGISGQALAGRAYNQALKFGAELAIPIEAATLECGRDDGALKLDLADGKQLLASTVVIASGARYRRPEIDGLDRFEGHGVSYWASPVEARLCEGGVVALVGGGNSAGQAVAFLAPRVKELHLIIRGDGLESSMSQYLIERIAALSNVQLHTGTEVAALDGDPERGLQAAVLRTRKDGATARVALRHLFLFVGADPNTGWLQDCVDTDKRGFVMTGTARGDGVPACLPLETNRPGVFAIGDVRAGSVKRVAAAVGEGAAVVAQIHQYLAHQANPVPVSELASATQESTSA

SEQ ID NO: 19161 - protein, 284 aa, Ricinus communis
AIAQLGWVAGPVILMAFSFITFFTSTLLADSYRSPDPVTGKRNYTYMDAVRANLGGWKVTFCGISQYANLVGITVGYTITASISMVAVKRSNCFHRHGHAAKCHTSNNPYMIIFACIQIILSQIPNFHKLSWLSVLAAVMSFAYSSIGLGLSIAKVAGGEHVRTSITGTTVGVDVTAAQKIWRAFQSIGDIAFAYAYSTVLIEIQDTIKSGPPENKAMKKASFVGIVTTTMFYILCGCIGYAAFGNDAPGNFLTGFGFYEPFWLIDIANVCIAIHLIGAYQVFS

SEQ ID NO: 19162 - protein, 567 aa, Thiomicrospira crunogena XCL-2
MELTGAQILVHYLEDEGVEHIWGYPGGAALPIYDALDTDAKKLKHVLVRHEQAAVHAADGFSRSTGLPGVALVTSGPGATNTVTGIATAYMDSIPLIVITGQVATNMIGLDAFQEIDTVGITRPIVKHNFLVKDVNDLAMTLKKAFYIATTGRPGPVVVDIPKDVQNAKSSYEYPQEVSLRSYVPVTKGHSGQIKKAIDMMLAAKKPIIYTGGGVVLGGASEALTDLARQLGYPVTNTLMGLGAYPAEDKQFVGMLGMHGTYEANLTMHNSDLIIAIGARFDDRVTGNLEKFCPDAKVIHVDIDPASISKNVVVDIPIVGPVKQVLNEMLSLLAKTKKRPDQEALASWWEQIESWRSTNCLRYEQLGHKIKPQAAMETVWQVTNGDAYVTSDVGQHQMFAAQYYKFNKPRRWINSGGLGTMGFGLPAAMGVQAAFPDATVVCVTGEGSIQMNIQELSTCLQYGLPIKVLCLNNGFLGMVRQWQEFFYDRRYSMSYMDSLPDFVKLAEAYGHVGIRIDNPETMKEQLEEAFSDKYKDRFVFIDVITDQQENVYPMIPAGAGLDEMILV

SEQ ID NO: 19163 - protein, 488 aa, Psychrobacter arcticus 273-4
MLKTTLNLSNPDLIKQQCLIKDGWYAANDEATIEVSNPFNGDVIGTVPSLTTADVNDAVTYSHEAQITWAAKTPQERAQLLQKWADLIDANKEDLAIIMTAEQGKPLAESRGEIGYANSFIRWFAEEGKRVYGDVIPATNSQLRYVVLKQPVGVCAAITPWNFPAAMITRKAAPALAAGCTIIIKPATETPFSALALGALAEQAGIPAGVIQVVTGKSSTIGDILTGDARIHKLSFTGSTEVGRTLMAQCAPTIKKLSLELGGNAPFIVFDDADLEKAADGLIASKYRNAGQTCVCANRVYVQDSIKDEFLGIFIKKVAELKVGNGMEEGVNVGPLINEKALQKVQALLKDALDKGATLIAGGSTNNASALAYNPTVITDISADMDIASEEIFGPIAPVFTFSSEEEVIRAANDTIYGLAAYFYSSDYARAWRVTEGLEYGMVGHNTGMLSTEVAPFGGVKQSGFGREGSKYGIEEYVVTKYWCSDVS

SEQ ID NO: 19164 - protein, 286 aa, Bacillus cereus ATCC 14579
MKKAMLALAATSVIALSACGTSSSDKIVTSKAGDITKEEFYDQMKTQAGKQVLNNMVMEKVLIKNYKVEDKDVDKKFDEMKKQYGDQFDTLLKQQGIKEETIKTGVRAQLAQEKAIEKTITDKELKENYKPEIKASHILVKDEATAKKVKEELGQGKSFEELAKQYSEDTGSKEKGGDLGYFTAGKMVKEFEDAAYKLKKDEVSEPVKSQFGYHIIKVTDIKEQKPFDEVKGDIKKDLVQKKAQDAAFMNDLMMKEIKKADVKVDDKDLKDLFEEKKADDKKEEKK

SEQ ID NO: 19165 - protein, 480 aa, Psychrobacter arcticus 273-4
MSELKKSLGTLDVIALAFGAMVGWGWVVLAGGWILSAGTWGAMLAFFIGGLAVILIGVTYAELAASMPITGGEHTYTHRALGVNVSFICSWSILFGYFSVVAFEAVALPTVVEYFIPNYNQGYLWTIAGWDVYATWVGVGMLGSVIVTWLNIRGMEVSAWFQKTAVLGILFVGTLLFIGAVLYNPDTSTAIQSPAFIGGVGGMMAVIVMVPFMFVGFDVIPQAAEEIDLTRPNIGKFLIISIVVAVMWYVGIAWSVGTTLPLVQAESSTLATADAMTNAWQGKWAGILLVIGGVLGILSSWNAFLIGGSRLLYAMSKARMLPAFLGKLHPKYKTPSNAILLIGGLATLAPLFGRKMLVWIVDAGGFGIVIAYTCVAISFLVLRYREPDMVRPFKIPAGKLVGMVTIVLSVGLLMLYMPGMPSALTAVEWWIFFGWTMLGIVLYGYARVKYPGISESIMAEELRELKIVNQLWLKDNSTKK

SEQ ID NO: 19166 - protein, 225 aa, Mycoplasma mycoides subsp. mycoides SC str. PG1
MLLRFGQNITSEMLSDQINQLNNDNSVDAILLQLPLPKHLDEQEFLQAIDPLKDVDGFHYINQGKMLEGYDTIYPCTPIGIINLLKAYNIDVRSKDITIIGTSNIVGKPLAIMLSNMGATISMCNKNTKSLKKYTKRSDIVISTTGKQALIKKDMIKKNAIVIDVGIIKDPITNKIVGDVDFENVKELCSYITPVPGGVGPMTVSMLLENTFKLYKLHIKENYEN

SEQ ID NO: 19167 - protein, 535 aa, Cytophaga hutchinsonii
MQSSLFRTKNPNELHTEVSALKRTLTFKDLTALGIAAVIGAGIFGTIGQAAYDGGPGIIFLFIITSLGCLFSAFCYAEFAASTPISGSAYTYAYISFGELIAWIIGWDLFMEYAVGNMAVAISWSDYFTAFLKGVNIEFPLWLSMDYFTAVHQKSAAAQQAYVHAPRIFDFPVIVDLPAILITVLITILVYIGIQESKRTNNVLVVFKIIVLLLFIIVGFTTVNTANWSPFIPNGWSGIFKGTAAVFFAYIGFDALSTTTEECVNPKRDLPRAIFSSLLISTLIYIAIALVITGMVSYHDLNVGDPLAYALEKTGLHKFAGLLSFSAIVSMTGVLLVFQIGQPRIWMNMSRDGLLPKALSRIHPRYQTPSVATVLTGGSIILPLLFLDLKEVVDLTSIGTLFAFLIVCAGIWLKKEKIKTESFTVPFIGGRYLLPVTMLPVLYLYLHTVSTENVFSFTQIPLYSCILAMIATIFYGSVRNLSLLPGIGVCLNLLLLSTMHHQNWIRFVAWLAIGLIVYMTYGRKHSVLAGPSTKG

SEQ ID NO: 19168 - protein, 235 aa, Glycine max
MNDADVSKQIQQMVRFIRQEAEEKANEISVSAEEEFNIEKLQLVEADKKKIRQEYERKERQVEIRKKIGYSMQLNASRIKVLQAQDDVISSMKEAASKELLNVSHHHHLNLLSHHHHEYRNLLKDLIVQCLLRLKEPSVLLRCRKDDLHLVEHELDSAAQEYAEKANVDPPEIIVDNQVYLPPGPTHHNSHDLYCSGGVVLASRDGKIVCENTLDARLDVVFRKKLPEIRRQLFG

SEQ ID NO: 19169 - protein, 111 aa, Lactobacillus sakei
MTQTITANNIEAFVAEKPLVILDFWADWCMPCKIMTPMIQELHAASNDAFKLGMVDVEDQPELAERYDIQSVPTLLIFKKGKAAEKVTGAFPKEKLKRYLDKKIAESNHEG

SEQ ID NO: 19170 - protein, 265 aa, Brassica napus
MAQTMLLTSGISANHFLRNKNPLAQPKVHHLFLSGNSPVTLPSRRPSLVPLAIFKPKTKAAPKKVEKVKPKVEDGIFGTSGGIGFTKQNELFVGRVAMIGFAASLLGEALTGKGILAQLNLETGIPIYEAEPLLLFFILFTLLGAIGALGDRGKFVDDPPTGLEKAVIPPGKGVRSALGLKEQGPLFGFTKANELFVGRLAQLGIAFSLIGEIITGKGALAQLNIETGIPIQDIEPLVLLNVAFFFAAAINPGNGKFITDDGEES

SEQ ID NO: 19171 - protein, 442 aa, Corynebacterium glutamicum ATCC 13032
MTSPNNYLAKIKVVGVGGGGVNAVNRMIEEGLKGVEFIAVNTDSQALMFSDADVKLDIGREATRGLGAGANPEVGRASAEDHKNEIEETIKGADMVFVTAGEGGGTGTGAAPVVAGIAKKMGALTIGVVTKPFEFEGRRRTRQAEEGIAALKEVCDTLIVIPNDRLLELGDANLSIMEAFRAADEVLHNGVQGITNLITIPGVINVDFADVRSVMSEAGSALMGVGSARGDNRVVSATEQAINSPLLEATMDGATGVLLSFAGGSDLGLMEVNAAASMVRERSDEDVNLIFGTIIDDNLGDEVRVTVIATGFDAARASAAENRRAGISAAPAAEPVQQQVPTTNATLPPEKESIFGGAREENDPYLSRSAGARHRIEETRSGGGLFTTGNDRDYRRDERREDHRDERRDERRDDRSYDRRDDRRDDRRDDRGDDLDVPSFLQ

SEQ ID NO: 19172 - protein, 426 aa, Vibrio parahaemolyticus RIMD 2210633
MDDISTGILFALLACLIVISGYFSGSETGMMSLNRYRLKHLAKSGHKGAKRVEKLLDRPDRLIGLILIGNNLVNILASAIATIIGMRLYGDLGVAIATGALTMVVLVFAEVTPKTVAALYPERVSYASSILLTILMKVLSPLVMLVNFITNGFIRLLGVKADHTVEDHLSSEELRTVVNEAGGLIPRRHQDMLVSILDLEHVTVNDIMVPRNEITGIDINDDWKSIVRQLTHSPHGRIVFYRDQIDEVVGMLRLREAYRLMLEKNEFNKETLLRAADEVYYIPEGTPLNVQMLKFQRNKQRIGLIVDEYGDIIGLITLEDILEEIIGEFTTSISPSLSDEISPQGDGSFLIEGSTNIRDINKGLKWDLPTDGPRTLNGLILEHLEDIPESHLSVRVAGHPMEIVEIEENRIKLVRVYPKKKKSTSK

SEQ ID NO: 19173 - protein, 418 aa, Treponema pallidum subsp. pallidum str. Nichols
MMNIELAPSGEEFTLSPTVIKVIGAGGGGSNAVNRMMSCGLQCVEFIAANTDVQALSYSTAPKKLAIGTKVTRGLGAGGDPEIGEKAAMEDAEAIASALQGANMVFITAGMGGGTGTGAAPVIAKIARELGALTVAVVTKPFRFEGRAKMMLAERGIEKLRTHSDTVIVIPNQNLLSVVDKRCPIKETYLVADDLLRKSVQSISDLITLPGEVNLDFMDVKNTMEGQGYALIGVGEGEGENRAVDAATAAINNPLLEETRIEGATRLLVAVRGSENLSMGEVDGVMSVVAKTIDPDAIIIHGTSIDASMQDRVRVTVIATGVPQASISIAGDTHSSQKIKTSSYGAVSTGVYISSDEWNRAKSSKQPNLPGLATRNSAVQETRMEKNGVKGHTFGVPLPSVNEDLDEPTFLRNRNKGL

SEQ ID NO: 19174 - protein, 161 aa, Pseudotsuga menziesii
MVSGTSSTEEVCQVEARRLWTAMVKDSHNLLPKVLPEIFASVTCHQGDGGVGTIKQLNFTPANKDFSFVKERVDEIDEGKMVYKYTTIEGGSLGKKLSSASFEVKIVPRKEGGCVASWVCNYETLPGAQLEEAKAKEIKENSIGMLKKIEQYLLSNPNLYC

SEQ ID NO: 19175 - protein, 687 aa, Saccharomyces cerevisiae
MTDITPVLCNDVDVNGNNVNDDVSSNLKRPIDQGDPSNGLAEEENPANNQLHLKKARLDGDALTSSPAGLAENGIEGATLAANGENGYNATGSGPEDEQQGLKKEEGGQGTKQEDLDENSKQELPMEVPKEPAPAPPPEPDMNNLPQNPIPKHQQKHALLAIKAVKRLKDARPFLQPVDPVKLDIPFYFNYIKRPMDLSTIERKLNVGAYEVPEQITEDFNLMVNNSIKFNGPNAGISQMARNIQASFEKHMLNMPAKDAPPVIAKGRRSSAQEDAPIVIRRPQTHNGRPKRTIHPPKSKDIYPYESKKPKSKRLQQAMKFCQSVLKELMAKKHASYNYPFLEPVDPVSMNLPTYFDYVKEPMDLGTIAKKLNDWQYQTMEDFEREVRLVFKNCYTFNPDGTIVNMMGHRLEEVFNSKWADRPNLDDYDSDEDSRTQGDYDDYESEYSESDIDETIITNPAIQYLEEQLARMKVELQQLKKQELEKIRKERRLARGSKKRGKRSKGRSGSKNASSKGRRDKKNKLKTVVTYDMKRIITERINDLPTSKLERAIDIIKKSMPNISEDDEVELDLDTLDNHTILTLYNTFFRQYESSSGASNGLDGTSGVTRDASSLSPTSAGSRKRRSKALSQEEQSRQIEKIKNKLAILDSASPLSQNGSPGQIQSAAHNGFSSSSDDDVSSESEEE

SEQ ID NO: 19176 - protein, 607 aa, Bacillus cereus ATCC 10987
MCGITGWVNWNKDLSNEHVILEKMAHSIQHRGPDAEGFWFSPRAAFAHRRLIVIDPEGGAQPKTFRAGDYTYALTYNGEIYNFRELREQLRKCGHTFETHSDTEVLLHAYLEWKEDCVQHLNGIFAFALWDDQKQQLFLARDHLGVKPLFYTERNDSIIFGSEIKALLAHPSVPTEIDADGINEIFGLGLFRTPGCGVFKHIEEVRAGHSITFTRDKKVVTKYWNLESKAHTDSTEDTASHILSILQDTVKRQLIADVPLVCMLSGGLDSSGITALAGKEFAAENKTLHTYSIDFVNSAKDFELTFARTGLDAPWVKRVSEHVGTSHHDIIVNAEELANHLFVPLRAKDLPSAGEMETSLYLLFCEMKKDATVALSGESADEVFGGYPWFHQEELLYVDKFPWLTNWKNTSPLLLHEVSNQCNLEEYIDTRFQEAILEVPTLKGESKKSAKQRQMFYLFLTRFLPFLLDRKDRMSMAVGFEVRVPLCDYRLVEYLWNVPFNIKSIDNIEKGILRRALKPALPDDVRNRRKSAYPTSQDPHYLQTIRHLSLDMCSNKNNPIFSLINHSTLLAIADQSNKDINNFEARSAMEYMLQVNEWLKTYHIHIA

SEQ ID NO: 19177 - protein, 344 aa, Arabidopsis thaliana
MKGLFKSKPRTPADLVRQTRDLLLFSDRSTSLPDLRDSKRDEKMAELSRNIRDMKSILYGNSEAEPVAEACAQLTQEFFKEDTLRLLITCLPKLNLETRKDATQVVANLQRQQVNSRLIASDYLEANIDLMDVLIEGDFENTDMALHYGAMFRECIRHQIVAKYVLESDHVKKFFDYIQLPNFDIAADAAATFKELLTRHKSTVAEFLTKNEDWFFADYNSKLLESSNYITRRQAIKLLGDILLDRSNSAVMTKYVSSRDNLRILMNLLRESSKSIQIEAFHVFKLFAANQNKPADIVNILVANRSKLLRLLADLKPDKEDERFEADKSQVLREIAALEPRDLA

SEQ ID NO: 19178 - protein, 442 aa, Arabidopsis thaliana
AVFNCFIYIERPKILGFALVLFCLNRILKGLCRDCRLQLFYIYREAEEICNHRQRKNKNKMYNLPRDLPEEVLCRIPLTSLRPVRSTCKKWSTLSKCGSFAKKHLAQAKVLADAKEFMVVLMMNFRVYLMRVNLQNNVVESSSSSSSSSSSCIKREAKLISLGDEEADISQVFHCDGLLLCISITESKTRLVVWNPYWGHTRLFEPTHQFNKFDSYSYALGYDKSRKSHKILRGITCLDPFKIYDFNSDLWRDLDVTPEWHLWQMLHGVSLKGNAYWFARENYTETMDTDHFFLLCFDFTSETFGPPLPLPFEFAVSEDTMSVSSVREEQLVVLYQPWDYLQLDIWVTSKIEPNAVSWNSKVFLSVSLKQLVSPQFQLTFGSFFIDEEKKVAVVFDKDYDNKRNIAYIFGVDGSFKAVDLGDSDRKCFPLVCSYVPSLVQLN

SEQ ID NO: 19179 - protein, 203 aa, Zea mays
MSAWAPAAYTLVLLLYLLAGAVVTAKTNNGVDPGPRQQEPSMPVDSSGDEALSALTWMATGSEASKAAEAVVDWHKHDSKRMLHAVYRVGDLDRTIKYYTECFGMKLLRKRDVPDEKYTNAFLGFGPENTNFAVELTYNYGVDKYDIGTGFGHFAIANEDGGKITRDPGPVKGGSTVIAFAQDPDGYMFELIQRAETPEPLCQ

SEQ ID NO: 19180 - protein, 474 aa, Trichodesmium erythraeum IMS101
MSNLILFWHRRDLRISDNVGLTQASQEGQTVVGIFCLDENILKRDDIASARVTYMIGCLQHLQKRYKQIGSQLLIMSGKPIEAIPKLATFLEAKAVYWNLDVEPYSRKRDRQVKENLEAANIQVKTFWEQLLHSPEEIFTSTKKPYSVYTPFWKNWQGKKKSNPLNTPVLKGLTEDQLQYTKKIGVIDLPTAKQLGFNWDNKLILEPGETAALEKLEKFSNGAISSYQEQRNFPSLDGTSQLSVALKFGTIGIRTVWAKTQELIENCYSSEVFENIETWQKEIAWREFYQYVMYHYPELETGPYREHWKNFPWKNNKAHFQAWCEGNTGYPIVDAAMRQLNETGWMHNRCRMIVASFLTKDLIINWQWGEKYFMQNLIDGDLCANNGGWQWSASSGMDPKPLRIFNPVSQTQKYDPEGEYIRQWVCELRSVDTQYLVTGKIPAEEREAIGYPLPIVDHKKQQQLFKDLYREQKN

SEQ ID NO: 19181 - protein, 112 aa, Arabidopsis thaliana
MSGVWVFNNGVIRLVENPNQSGGVSTQSHGRRNVLVYLPTGEAVSSYSSLEQILRSLGWERYFSGDSDLIQYHKRSSIDLISLPRDFSKFNSVYMYDIVVKNPNSFHVRDFN

SEQ ID NO: 19182 - protein, 491 aa, Candida glabrata CBS 138
MKPELKNPDLIKGLGYINGEWVKDSNEFFEVDDPSTGEIIAKLPEHDIAVVDRAVDAAYDAFQKYKNTLPRQRATWLRNLFNLMTENAEDLAKIITWENGKSLPDSRAEIKYAASYYEWYAEEAPRIYGATIQPSIPNNRVITKRQPVGVCGIICPWNFPSAMITRKVGAALAAGCTVVVKPDSHTPLSALAMTVLVEKAGFPKGVFNVVLSQHNTPKLGKRLCEHPKVKKVTFTGSTRIGKTLMEQASSTLKKCSFELGGNAPFIVFDDADLDLAVDQAIASKFRGMGQTCVCTNRFYVQDTIADEFAEKLVTKVKQFKIGDGMKEGVTHGCLTNAKQADKVDEHKKDAIEKGAKVLLEGGRMPDLGKNFYAPVVLKNVPQSAMVAKEETFGPLCPIFTFKTVEEVLGYANDTELGLASYVFTKNVNTLFTVSEALEAGMVSCNTGLFSDSSVPFGGVKESGFGREGSLYGIDDYTTVKSIIIGNLPDSL

SEQ ID NO: 19183 - protein, 335 aa, Streptococcus pneumoniae R6
MKRIAVLTSGGDAPGMNAAIRAVVRQAISEGMEVFGIYDGYAGMVAGEIHPLDAASVGDIISRGGTFLHSARYPEFAQLEGQLKGIEQLKKHGIEGVVVIGGDGSYHGAMRLTEHGFPAIGLPGTIDNDIVGTDFTIGFDTAVTTAMDAIDKIRDTSSSHRRTFVIEVMGRNAGDIALWAGIATGADEIIIPEAGFKMEDIVASIKAGYECGKKHNIIVLAEGVMSAAEFGQKLKEAGDISDLRVTELGHIQRGGSPTPRDRVLASRMGAHAVKLLKEGIGGVAVGIRNEKMVENPILGTAEEGALFSLTAEGKIVVNNPHEADIELSSLNKSLS

SEQ ID NO: 19184 - protein, 326 aa, Buchnera aphidicola str. Bp (Baizongia pistaciae)
MIENTLKIEHHKLIILGSGPAGYTAAIYSARANLEPLLFTGNNKGGQLINTNEIENWPGDSKSLTGLELMERMHNHAKSLNTKIIPNEIIRVNFFKIPFLLVSDTNQYYTSDSVIIATGASPKYLGLTSESKFIGKGVSVCAVCDGFFYKNEDVAVVGGGNTALEEALYLSNIARKVYLIHRRKTFSAEKILISRMLNKTKKNIILRTGCIVNKIIGGVNGVRGVQITCNDSKENKCLINLSGVFIAIGHAPNTKLFKNQLFMKNDYILVKSGIHGNVTQTNIPGIFAAGDVIDHVYKQAITSSASGCMAALDAEKYIDQKYGFKI

SEQ ID NO: 19185 - protein, 517 aa, Gibberella zeae PH-1
MDSSQAPLIAGHSDEEEELEYASEGSRSPEEAGKTGSGMPSAFVLALTFAADDTGVVSATLVSIGTSLSNRELTSMDKSIITSSTSLFALIISPFSSVLADRLGRKHVILYADILFVTGALLQAWSSTVPIMVAGRCIIGAGVGAASFVVPLYIAEVAPAAHRGRLVTLNIMFITLGQVIAYIVGWAFSTYSSPATGWRWMVGLGALPAVLQGGMIAFMPETPRWLVKAGRSNAAKEVIRRANGDTLQHNADAVIREIELEVREEHEAERLRDHQVSDRWTWLGKWGPLVSEGRNRRALAIACLLQGLQQLCGFNSLMYFSATIFTVIGFQSPTLTSMVVAVTNFLGTVAALGLVDRIGRRRVLLYSIPFMIVGLLLSAYGFSFLSLATGINTTASEPPATAGHEMAALTILVSIMVYVAAYALGLGNVPWMQSELFPLAVRSLGSGVATATSWAANFVVGLTFLPLMDLLSPSWTFVLYAIICGGGYFLVWRIYPETAGLSLEEATALLDNGWGVR

SEQ ID NO: 19186 - protein, 507 aa, Parvularcula bermudensis HTCC2503
MSEQYVKEGIEQGTVDAVRSLETYKYGFTTDIESVRAPKGLSEETVRYISAKKEEPEWMLDWRLQAFRRWQKMTEPNWQKVTYPPIDYQDQYYYAEPKAGAKYESIDDVPAEILADFEKLGIPLKEAEVLLGVKGAAETAAGARGDARPGVAVDAVFDSVSVATTFKKELEKAGVLFMSISEAIREHPDLVKRYIGTVVPPTDNYFATLNSAVFSDGTFVYVPAGVRCPMELSTYFRINEANTGQFERTLIVADKGAYVSYLEGCTAPMRDENQLHAAVVELVALEDAEIKYSTVQNWYPGDKDGKGGIYNFVTKRADCRGDRSKVSWTQVETGSAVTWKYPSCILRGDDSQGEFYSIAITNNHQQADTGTKMLHLGQRTKSRIISKGISAGQSDQTYRGLVSIGRKARGARNFTQCDSLLIGDRCGAHTIPYIEDKSASALLEHEATTSKLSEDQLFYTQQRGLDEEAAVALLVNGFCREVLQELPMEFAVEAQKLVAVSLEGSVG

SEQ ID NO: 19187 - protein, 320 aa, Methanosarcina mazei Go1
MTPITLNTLSREAEDITAAYTAAGGDAAVLHNHGLSSLVVSGNKVLSANATEGIVLEKKETEHGVDIKLTIKKGYKIPLPVHLCFGLVPKDGLQEIKMDFVAEEESAVELIAHCTFPNAEKVIHKMDAEMIIGKNAALKYTETHFHGPHGGIQVLPKAHITIEEGGSYYTNFSLVSGRVGYLEFDYSVDAEKDSICEMVTKVYGKADDKIKVLERISLNGENARSVIKSRIAITDNAESVFRGITEGHAPRARGHVDCMEVIQGNAKAEAVPIVRVDNPLAKVTHEAAIGCVDKKEVETLMARGLEEDDAIDIIVKGMLA

SEQ ID NO: 19188 - protein, 206 aa, Bartonella henselae str. Houston-1
MERTLVLIRHGQSEWNLKNLFTGWKDPGLTEKGRTEAIAAGKKLKETGLKFDIAYTSALQRAQKTAQNILEQMEQSDLELIKTPALNERNYGDLSGLNKDEVRQKWGEQQVQIWRRSYTIAPPNGESLRDTGARVWPYYLHHIQPHILRSQTVLIAAHGNSLRALIMALEGLNSEEIISQELATGIPIVYTFNSDSTISSKTIITP

SEQ ID NO: 19189 - protein, 312 aa, Escherichia coli
FGRIGRIVFRAAQKRSDIEIVAINDLLDADYMAYMLKYDSTHGRFDGTVEVKDGHLIVNGKKIRVTAERDPANLKWDEVGVDVVAEATGLFLTDETARKHITAGAKKVVMTGPSKDNTPMFVKGANFDKYAGQDIVSNASCTTNCLAPLAKVINDNFGIIEGLMTTVHATTATQKTVDGPSHKDWRGGRGASQNIIPSSTGAAKAVGKVLPELNGKLTGMAFRVPTPNVSVVDLTVRLEKAATYEQIKAAVKAAAEGEMKGVLGYTEDDVVSTDFNGEVCTSVFDAKAGIALNDNFVKLVSWYDNETGYSNK

SEQ ID NO: 19190 - protein, 428 aa, Mycobacterium tuberculosis
MALVVQKYGGSSVADAERIRRVAERIVATKKQGNDVVVVVSAMGDTTDDLLDLAQQVCPAPPPRELDMLLTAGERISNALVAMAIESLGAHARSFTGSQAGVITTGTHGNAKIIDVTPGRLQTALEEGRVVLVAGFQGVSQDTKDVTTLGRGGSDTTAVAMAAALGADVCEIYTDVDGIFSADPRIVRNARKLDTVTFEEMLEMAACGAKVLMLRCVEYARRHNIPVHVRSSYSDRPGTVVVGSIKDVPMEDPILTGVAHDRSEAKVTIVGLPDIPGYAAKVFRAVARRRRQHRHGAAERLQGRGRQDRHHLHLLPQTSGPPPWKNWTRSETRSASTQLLYDDHIGKVSLIGAGMRSHPGVTATFCEALAAVGVNIELISTSEDQRSRCCAATPNWTRPWSRCMKRSGSAATRRPRCTRGRDGRWACQ

SEQ ID NO: 19191 - protein, 334 aa, Silicibacter sp. TM1040
MTLKIAINGFGRIGRNVLRALLENDTTDVEVVAINDLAPPATQVHLLKFDSVHGRLDAEVTVEGDTMKVGRHEIRLTAIRNPEELPWSDVDIAYECTGLFTTRDKAAAHLKNGSKRVLISAPGTEVDRTVVFGVNDRDLTAEDIVVSNASCTTNCLAPVAKVLDDAFGIKTGYMTTIHAYTGDQPTHDTTHKDLYRARAAALSMIPTSTGAARAISLVLPHLKGRLEGSAIRVPTPNVSVVDLTFQPERVASVEEINAAIAAAAKEGPLQGILGYEEAPLVSIDFNHDKRSSIFAAPQTAVTSEGLVRVVSWYDNEWGFSNRMIDTGRAMGKFL

SEQ ID NO: 19192 - protein, 95 aa, Glycine max
  misc_feature (12)..(12): Xaa can be any naturally occurring amino acid
  misc_feature (14)..(14): Xaa can be any naturally occurring amino acid
  misc_feature (26)..(26): Xaa can be any naturally occurring amino acid
  misc_feature (28)..(28): Xaa can be any naturally occurring amino acid
  misc_feature (31)..(32): Xaa can be any naturally occurring amino acid
  misc_feature (36)..(36): Xaa can be any naturally occurring amino acid
  misc_feature (41)..(42): Xaa can be any naturally occurring amino acid
  misc_feature (47)..(47): Xaa can be any naturally occurring amino acid
SEAAISCSDVIXDXRPCVSYLVSGSXQXPAXXCSGXKALAXXATTSXDKKAACNCIKSTSKSININSQLAQALPGNCGITLPVAISPNADCSKVG

SEQ ID NO: 19193 - protein, 309 aa, Oceanobacillus iheyensis HTE831
MRKIIVGTRKSNLALTQTEWVIDQLKKAGVKNEFEIKKIVTKGDQILDVTLSKVGGKGLFVKEIEKAMFDKEIDLAVHSMKDMPAVIPEGLTISSIPEREDHRDAYLAKDNILLQDLPEGAIVGTSSLRRGAQILAERPDLTIKWIRGNIETRIRKLQEEDYDAIILAVSGLKRVGLSEELITEYLEPEVCVPAVGQGALAIESREDDEELTNIVKKIHDAYTAKTVSAERTFLHLLEGGCQVPIGGYAYLDGDEVVLTALVGDPDGTTILKETVRGTEPTEVGKEAAELLISQGAKEIVDRVKEEMDQ

SEQ ID NO: 19194 - protein, 128 aa, Triticum aestivum
  misc_feature (84)..(84): Xaa can be any naturally occurring amino acid
  misc_feature (104)..(104): Xaa can be any naturally occurring amino acid
  misc_feature (109)..(110): Xaa can be any naturally occurring amino acid
MAARSSSSQPQLVAAAAVLAAALLLLAAGAGTASAAVSCGEVTSSVAPCLGYAMGSAASPSAACCSGVRSLNSRASSTADRQAXCNCLKSMTGRLGRGVSMANXANIPXXCGVSVGVPTHRRWHKITD

SEQ ID NO: 19195 - protein, 500 aa, Coccidioides immitis RS
MAKQYELPFQLDDPSLLHFDSFVNNEWVTAADGNRFEVVDPGTGKPWATCPTSTAKDVPSTVEAAHAAFEEYKKMNPRQKAMLLMKWDELIREARSDLAKILTHETGKPIPEALAEIDYALGFTWWFAGEAERIHGSISTPAAPNRRVFTIKQPIGVAAALVPWNFPIAMVLRKASAAFAAGCTMIVKPSPETPISTLVLGHLAKKAGYPPGVFNVLTTDLDSTPSLSEALCKHPLVKKVTFTGSTRIGKLIASHCAHGLKKLTLELGGNCPFIVFDDANLDQAISQLMTLKWRHAGQACITANRIYVQSGIYDKFVQLFKERTAALVVGHGAKESTTMGPVTTPRTLEKAANQVEDARKLGGKVILGGKPKTDCGGGYFFEPTIITDMTQEMLISREETFAPIAAVYKFDTEEEAVKWANDTSMGLASYAFTKNVDRMWRMLENLEAGMIGMNTGNSSAAESPFGGIKESGYGKESGKDVAVNEYLITKTGTFTLEGQY

SEQ ID NO: 19196 - protein, 307 aa, Rhizobium sp. NGR234
MSIGCKLISGREVAESIIDQVKAHTVALSANGITPGLAVIIVGSDPASQVYVASKGRKAEECGFLSIKHELPHDVPERRLLELIDSLNADPSIHGILVQLPLPRHVDSGKVIQAISPQKDIDGFHFINVGKLGTGALETAFVPCTPAGCMILVERIHGKDLSGLSAVVVGRSNIVGKPMANLLLAANATVTIAHSRTANLEVLCRQADILIAAVGRPEMIRSDWIKPGATVIDVGINRIASRDDGGKTRLVGDVDFDGAVERAGAVTPVPGGVGPMTIAMLMANTLRAACHANDEPAPHFGSGGVLR

SEQ ID NO: 19197 - protein, 176 aa, Magnaporthe grisea 70-15
MADQHPETGLPPNWEVRLSKSKNLPYYFNTSNTTSRWEPPPGTDTDKLKQYMGKYHSSALPSDSPQAGQIRAAHLLIKHRDSRRPSSWKEENITRTKEDARRIIEAHKDRIASGEASLAALATTESDCSSARKRGDLGFFGRGDMQKEFEEAAFALKPGEISGVVDTASGLHLIER

SEQ ID NO: 19198 - protein, 493 aa, Novosphingobium aromaticivorans DSM 12444
MTDNTEVKDQAAREAAARVAEYEHGWVSDIEQEYGPKGLSEDTVRFISAKKDEPEWMLEWRLKAYRHWLTMPTPEWAKLNIPPIDYQEAYYWAAPKAKPKLGSLDEVDPEILRVYEKLGIPLEEQKVLAGVEGARKVAVDAVFDSVSVATTFRKELEAAGVIFRSISEAIREYPDLVRKWLGKVVPMHDNYFATLNCAVFSDGTFVYIPEGVRCPMELSTYFRINAENTGQFERTLIVADKGSYVSYLEGCTAPQRDENQLHAAVVELVALDDAEIKYSTVQNWYPGDAEGRGGIYNFVTKRALCQGARSKVSWTQVETGSAITWKYPSCVLNGEDSVGEFYSVAVTNNHQQADTGTKMIHNGKGSRSTIVSKGISAGKSNNTYRGLVRVAPQAEGVRNFTQCDSLLLGSDCGAHTVPYIEVRNPSATIEHEATTSKISDDQLFYAMQRGLDQESAVALIVNGFAREVLQQLPMEFAVEAQKLLGISLEGSVG

SEQ ID NO: 19199 - protein, 141 aa, Zea mays
  misc_feature (52)..(52): Xaa can be any naturally occurring amino acid
MALAEADDGAVVFGEEQEALVLKSWAVMKKDAANLGLRFFLKVFEIAPSAKXMFSFLRDSDVPLEKNPKLKTHAMSVFVMTCEAAAQLRKAGKVTVTGFALLETIKEALPADMWSLEMKKAWAEAYSQLVAAIKREMKPDA

SEQ ID NO: 19200 - protein, 147 aa, Medicago truncatula
MSFTDKQEALVNSSYEAFKQNLSGYSVFFYTVILEKAPAAKGLFSFLKDSAGVQDSPQLQAHAEKVFGLVRDSASQLRATGGVVLGDAALGAIHIQKGVVDPHFVVVKEALLKTIKEAAGDKWSEELSTAWEVAYDALATEIKKAMS

SEQ ID NO: 19201 - protein, 326 aa, Pediococcus pentosaceus ATCC 25745
MAQKTYIQAITEAQDLALANDENVVIFGEDVGKNGGVFRATDGLQAKYGEDRVFNTPLAESGIGGMAIGMTTQNYRPIMEIQFFGFVYEVMDSLAGQMARGRFRFHGTRTFPIVVRSPYGGGTKTPEMHADSLEGLVAQTPGLRVVMPATPADAKGLLLSAVESNDPVIFLENLRLYRSIRGDVPEGYYTTPLDKANVIREGKDVSIITYGGMVHTSLAAAEELAKDGIDAEVVDLRTVSPLDLDTIGESVEKTGRVVVAQEAQRQAGIGAMVMSEISERFIMSLKAPIGRVAAPDSVYPFALAENEWLPKADDIIEKVKEVVNFD

SEQ ID NO: 19202 - protein, 423 aa, Pediococcus pentosaceus ATCC 25745
MPDIGEGMAEGEIANWLVKVGDTIKEEDAVAEVQNDKLLQEILSPYGGKITKLFVEAGTVVKVGEPLIEFDGDGSGAGAESEVPKETPASTEPEPESSAPVDQTAPEVTKVGAEYTSNGQLLAMPSVREYARKNDIDLTQVPATGRHGHITMADVENFKASPAPAASVPETESEKAPSAPVTPAAPAEVKAGRVPLSPVRKVIAKTLTNQVQTIPHVTIMDEVEVSKLMDLRNQFKEQAKQKGYKLTYMPFIAKALAGAAHKYPELSAMVDIEKQEIVYYEDTNVSFAVDTDNGLFVPNVKNVKSKSIMEVAQEIDDMAIRGRAGDLKPNELKGGTVTITNIGSESGSGFFTPIINPGESAILGIGRIRKTPVVNEDGELAVGNTLKLSLSFDHRLIDGALAQKIMNELKALLSNPAYMLMEV

SEQ ID NO: 19203 - protein, 146 aa, Medicago truncatula
MGFTEKQEALVNSSWELFKQNPGNSVLFYTIILEKAPAAKGMFSFLKDTAGVQDSPKLQSHAEKVFGMVRDSAVQLRATGGVVLGDATLGAIHIQKGVVDPHFVVVKEALLKTIKEVSGDKWSEELSTAWEVAYDALAAAIKKAMG

SEQ ID NO: 19204 - protein, 243 aa, Glycine max
METDRPDGRTPNQLRPLACSCSILHRAHGSASWAQGETKVLAAVYGPKAGTKKNENPEKASIEVIWKPKTGQIGKLEKEYEMILKRTLESICIRTIYPNTTTSVIVQVVHDDGALLPCAINAACTALVDAGIPLKHLAVAICCSVTDSGCIILDPTKEEEEKMKAYINLVFPNTIVSVLPERSSQVGSEPMAHGIMTSVTQGAMSVDDYLHCLDRGRAASARLSEFVRKNIGPKSTCEASKAG

SEQ ID NO: 19205 - protein, 338 aa, Candida albicans SC5314
MSVSKSATTVFVSGASGFIAQNVIKQLLANGYKVIGSVRSESKGKELTDIIQSNDFQFAAIPDISAVGAFDDVLKSNSQISVFIHTASPVTYSAKDVQNELIKPAVEGTRNALNAIKSYGPQIKRVVVTSSFTAIASGKDFDHDKYYTEKDWNPVTIEQALSNPEAAYAYAKKMAEKTVWDFVETESPTFKVTVVNPTVVFGPQAFGVKDKSKLNLSIEMINDILTLKPDDEIPPYASRCIDVRDVAKAHLVAFEKEEAINQRLVLINQPFSNDLLAYIIKKSFPVINIPEGNLERSRECIAKSCIKTDLTKTQEILGFDYVPVEKTILDTIQQLYDA

SEQ ID NO: 19206 - protein, 133 aa, Synechococcus sp. WH 7805
MRMLHTMLRVGDLERSLAFYTDVLGMRLLRRKDYPGGRFTLAFVGYGDESESTVLELTHNWDTAEYDLGSGYGHIALGVDDIQATCAGIAGQGGRVVREPGPMKHGSTVIAFVEDPDGYKIELIELSSRSTSA

SEQ ID NO: 19207 - protein, 334 aa, Erwinia carotovora subsp. atroseptica SCRI1043
MEYMTIKVGINGFGRIGRIVFRAAQERSDIEIVAINDLLDAEYMAYMLKYDSTHGRFNGTVEVKDGHLVVNGKTIRVTAERDPSNLKWNEVNVDVVAEATGLFLTDETARKHIAAGAKKVVLTGPSKDDTPMFVMGVNHKTYAGQEIVSNASCTTNCLAPLAKVINDNFGIVEALMTTVHATTATQKTVDGPSHKDWRGGRGASQNIIPSSTGAAKAVGKVIPELNGKLTGMAFRVPTPNVSVVDLTARLEKPASYKEVCAAIKAAAEGELKGVLGYTEDDVVSTDFNGEKLTSVFDAKAGIALNDNFVKLVSWYDNETGYSNKVLDLIAHISK

SEQ ID NO: 19208 - protein, 284 aa, Bacillus licheniformis ATCC 14580
MTATIIDGKETAKEKRGQLAKEVEELKKQGVTPGLAVILIGDDPASLSYVRGKKKAAEAMGIRFQLDHFDASFTEQELLEVIDQYNQNDDFHGILVQLPLPDHISEQAVIERISPEKDVDGFHPLNVGKMLLGEDTFLPCTPAGIVELLKKTEIDLSGKEVVVVGRSNIVGKPVGQLLLNENATVTYCHSRTADITAHTKKADILIVAVGKANFIKADQIKEGAVVIDVGVNRLDNGKLAGDVDFEEAKEKASYITPVPGGVGPMTITMLAHNTVKSAKRTIQL

SEQ ID NO: 19209 - protein, 394 aa, Photobacterium profundum SS9
MISQQTIDIVKATAPVVAETGPKLTAHFYERMFNHNPELKDIFNMSNQRNGDQREALFNAICAYANNIDNLAALLPAVEKIAHKHTSFMITAEQYQIVGGHLLATIDELLSPGQEVLDAWGEAYGVLANVFITREEAIYQENEEKTGGWRGTREFTLIEKTQESDVITSFTFKPADGGTVSNFKPGQYLGIYLTPDAFEFQEIRQYSLSSAPRTDNYRISVKREEGGKVSNYLHNELTVGDTVQLAAPAGDFFLDVPATTPVTLISAGVGLTPTLSMLDALTEHQASVHWLHATENGSHHAFKDYVNTLADKYDHISATTWYREPLATDRPAEDFDYQGMIDLKAVASQLIDPAMHYYFCGPVGFMQHVAKQLIELDVQEDNIHYECFGPHKVL

SEQ ID NO: 19210 - protein, 403 aa, Vibrio sp. Ex25
MKRVVITGMGIVSSIGNNVEEVLASLKAGKSGITASEQFKEHGLRSQVWGDLKINPAEHIDRKQMRFMGDAAAYAYLSMEQAIADAGLTEDQVSNDRTGIVAGSGGASAYNQTVATDTMRAKGVKRVGPYMVPRTMSSTVSACLATPFKIRGVNYSMSSACATSAHCIGHAMELIQLGKQDIVFAGGGEELDWSQTMMFDAMGALSTKYNDTPDKASRTYDADRDGFVISGGGGMLVIEELEHALARGAKIYGEIVGYGATSDGYDMVAPSGEGAIRCMKMAMQDVDGVDYINTHGTSTPVGDVKELGAIQQLFGENSPAISATKAMTGHALGAAGVHEAIYSTLMLDKNFIAPSINIENLDEAAQGLDIVTEARDAELTTVMSNSFGFGGTNATLVIKKYQG

SEQ ID NO: 19211 - protein, 398 aa, Daucus carota
MALQAASFLPSSFSINKEGKANVSLKETSLFGVTFSDSLRTDFSSLRTRRGCRQISQTGAIRSQAVATTPSVNRATGEGKKTLRKGSVIITGASSGLGLATAKALAETGKWHVIMACRDFLKAERAAKSAGMPKENYTIMHLDLASLDSVRQFVETFRRSERPLDVLVCNAAVYFPTAKEPTYTADGFELSVGTNHLGHFLLSRLLLDDLNKSDYPSKRLIIVGSITGNTNTLAGNVPPKANLGDLRGLAGGLNGMNSSAMIDGAEFDGAKAYKDSKVCNMLTMQEFHRRYHEETGITFASLYPGCIATTGLFREHIPLFRTLFPPFQKYITKGYVSEAESGKRLAQVVSEPSLTKSGVYWSWNKDSASFENQLSEEASDVEKARKVWEVSEKLVGLA

SEQ ID NO: 19212 - protein, 335 aa, Gibberella zeae PH-1
MAETQYPKGVVNVGTRKSPLALAQTQIVVDALKQRFPDHDFPIHSMTTTGDRDQNTALYNFGGKGLWTSQLEERLVNRELDIVVHSLKDMPTVLPEGCVLGCVTSREDPRDTLVIKKELQDKHGWKTLADLPAGSIIGTSSVRRIAQLVRRYPTLKFKDHRGNIQTRLRKLEEDPDLTGIILAAAGLQRMDLGHHITQFLESENGGILYAVGQGALGVECRGDDEKVLGFLKTIENEQTALACEAERALMRALEGGCSVPIGVETKWIDDKLRMKATVVSLRGDEGVDCEIAEAIKTHDEADKFGKKVAETLVEQGAQKILDAINETRQVPETVK

SEQ ID NO: 19213 - protein, 218 aa, Bdellovibrio bacteriovorus HD100
MIKSKVRTASKGFPRAFSCDLPPPPLEYAHQGETMRIFTLIALILCTSFAWAKDTPSSFFDLSANSLSGKKVNFSTYRGKVVLVVNTASQCGFTPQLKELEEMYKKYADRGFVVLGFPSNDFKQEKGTNDEVQTFAAKEFGVTFPLFDKAPVSGKDIQPVYQFLTTQKPGLIFKDVAWNFEKFLINRKGQVVERWSSITKPSSDSITKSVEKALNEPL

SEQ ID NO: 19214 - protein, 636 aa, Lycopersicon esculentum
MATQCYDPENSASRYTLLPDQPDSGHRKSLKIISGIFLSVFLLLSVAFFPILNNQSPDLQIDSRSPAPPSRGVSQGVSDKTFRDVAGASHVSYAWSNAMLSWQRTAYHFQPQKNWMNDPNGPLYHKGWYHLFYQYNPDSAIWGNITWGHAVSKDLIHWLYLPFAMVPDQWYDINGVWTGSATILPDGQIMMLYTGDTDDYVQVQNLAYPANLSDPLLLDWVKLKGNPVLVPPPGIGVKDFRDPTTRWTGPQNGQWLLTIGSKIGKTGVALVYETSNFTSFKLLDGVLHAVPGTGMWECVDFYPVSTKKTNGLETSYNGPGVKHVLKASLDDNKQDHYAIGTYDLGKNKWTPDNPELDCGIGLRLDYGKYYASKTFYDPKKERRVLWGWIGETDSESADLQKGWASVQSIPRTVLYDKKTGTHLLQWPVEEIESLRVGDPTVKQVDLQPGSIELLRVDSAAELDIEASFEVDKVALQGIIEADHVGFSCSTSGGAASRGILGPFGVIVIADQTLSDVTPVYFYISKGADGRAETHFCADQTRSSEAPGVGKQVYGSSVPVLDGEKHSMRLLVDHSIVESFAQGGRTVITSRIYPTKAVNGAARLFVFNNATGASVTASVKIWSLESVNIQSFPLQDL

SEQ ID NO: 19215 - protein, 949 aa, Arabidopsis thaliana
MRLRHQGGQYLARGMEPVYWSNKVDSTHDLYDNYTLGSYQNNSYNILAHTGFGYDHEFQIYEINSNSWRIIDATLDFKLGYIGRGVSLKGKTYWIASGEEEKRLGKFLISFDYTTERFERLCLPNKYPCYATLALSVVREEKLSMLSQRGIKSKAEIWVTNKIGETQVVSWSMVLALDLQPKRCIGESGSFLVDEKKRVVVCCDNIRDQGKTTFDSNLPRYHRQKKKGRMIIVFDVESMRLPVTVKATKPSFLVIWIRYSSAASSPTVSLNPSGRLQQTLAGSVEVKGKSLHSGKFSTVKLNPEIAGAGRFFEFRSRFIPASIEFAQESPLCTTLLKDELKIRTVEHLLSALEAKGVDNCRIQIESESSDDREVEVSKEWVDAIQGVGINAAQNHDGESVEKMVAHVNKPVYVCKNDTFVAAFPALETRITCGIDFPQVPAIGCQWFSWRPIHESSFAKDIASSRTFCVYEEVERMREAGLIKGGSLDNAIVCSAEHGWMNPPLRFDDEACRHKILDLIGDLSLVSRGGNGGLPVAHIVAYKNEEEEVRSSTEENENVRSSTEENEYVRSSTEAGRGEDPHEDSDNISESGAIHLQIMERFNQRSGSGKEEEEDTMDLSIKQVDLLNQVEISRVYHCDGLLLCVAKDNSRVVVWNPYLGQTRWIRPRTESNIGDSYALGYDINRNHKILRMVQTRNVSVYRYEIYDLRSNSWRVLEVTPNGEMDPNHPLYGVSVKGNTYFFAHEDSSSGEIDEDGDIIDLEDFLLCFDFTTETFGLRLPLPFHSTIDATVTLSCVRDQQLAVLYHNEGLHSDDRFTTVEFWVTTSIEPNSVSWSKFLTVDMRPLALTGVRFDNDMGATFFIDEDEKVAVVFDLDGYLSTESARYHTAFISGKDGFFKPVTLGVAPNVGEPCPRTGHIPTTYRPPLVCSSTYLPSLVQVNQQRKRKERHV

SEQ ID NO: 19216 - protein, 408 aa, Methylobacillus flagellatus KT
MALIVQKYGGTSVANPERIGNVARRVARHKALGQQVVVVVSAMSGETNRLISLAKEVMPNPDPRELDVLVSTGEQVTIALLSMALMELGVKAKSYTGGQVSIVTDSAHTKARILKIDEERIRKDLDAGYVVVVAGFQGVDEQGNITTLGRGGSDTTGVALAAALKADECQIYTDVDGVYTTDPRIVPEARRLRSVTFEEMLEMASLGSKVLQIRSVEFAGKYKVKLRVLSSFEEEGEGTLITFEDDKDMEQPVISGIAFNRDEAKITVLGVPDRPGIAYQILGPVADANIDVDIIIQNVGADGTTDFTFTVHKNDLQKALNILREKVQPHTGAREIIGDDKTAKVSVVGVGMRSHVGIASQMFRTLAEEGINIQMISTSEIKISVVIDEKYMELAVRVLHKAFGLEEV

SEQ ID NO: 19217 - protein, 112 aa, Brassica napus
  misc_feature (71)..(71): Xaa can be any naturally occurring amino acid
FRPSSNVKERFFTCLVLTVCIVASLDAAITCGTGTRNLAPCATYLSSGREVPPPCCAGVRKWNGLGRPTRXCKCLKTAAKNVNPSLASSLPGKCGVSIPYPISMSTNCDTVK

SEQ ID NO: 19218 - protein, 500 aa, Legionella pneumophila subsp. pneumophila str. Philadelphia 1
MMIRNSMKSHTELLSWNLLQKEADRVRLNSDSLTCVVPDSNNYESSKQINCIEYDYSRQRVNRTIIDLLIDLANEVKLQEKIDNLINGKKINISENRPALHTALRDLGNKSIMIDGLDIMSAVINTREKIKVISNQIREKKWLGHSGLPITDIVNIGIGGSDLGPRVCINALSNYISKEFNYHFISDVDPASFNDVIAKINPQTTLFIVSSKSFTTKETLLNARKAFALYEDTASIDQHFIAVTAHPERAYQMGIKTVLPIWDWVGGRFSFCSAVNLITAIAIGYEQFVELLAGAHDVDTHVQFTDFKNNIPVLMALIGIWNNNFLNIHNLLILTYSKKLEYFVPYVQQLDMESNGKSIDVNGSMVDYATGPIVWGGLGNQAQHSYFQLLCQGTHRCVGDFITLKTNDEHEINSMCHYKMKVLSEGIQTIENPYGYIPGNMPMNHLILSDCSPYTLGALVALYEHKIFVQSVIWNINPFDQPGIESAKSAHREITLSSES

SEQ ID NO: 19219 - protein, 117 aa, Brassica napus
MAGLVKLSCLVLACMIVAGPIATNAALSCGTVSGNLAACIGYLTQNGPLPRGCCTGVTNLNNMARTTPDRQQACRCLVGAANAFPTLNAARAAGLPKACGVNIPYKISKSTNCNSVR

SEQ ID NO: 19220 - protein, 375 aa, Humicola grisea var. thermoidea
MEEEVAALVIDNGSGMCKAGFAGDDAPRAVFPSIVGRPRHHGIMIGMGQKDSYVGDEAQSKRGILTLRYPIEHGVVTNWDDMEKIWHHTFYNELRVAPEEHPVLLTEAPINPKSNREKMTQIVFETFNAPAFYVSIQAVLSLYASGRTTGIVLDSGDGVTNVVPIYEGFSLPHAIARVDMAGRDLTDYLMKILAERGYTFSTTAEREIVRDIKEKLCYVALDFEQEIQTAAQSSSLEKSYELPDGQVITIGNERFRAPEALFQPSVLGLESGGIHVTTFNSIMKCDVDVRKDLYGNIVMSGGTTMYPGLSDRMQKEITALAPSSMKVKIIAPPERKYSVWIGGSILASLSTFQQMWISKQEYDESGPSIVHRKCF

SEQ ID NO: 19221 - protein, 249 aa, Arabidopsis thaliana
MKFNVANPTTGCQKKLEIDDDQKLRAFFDKRLSQEVSGDALGEEFKGYVFKIMGGCDKQGFPMKQGVLTPGRVRLLLHRGTPCFRGHGRRTGERRRKSVRGCIVSPDLSVLNLVIVKKGVSDLPGLTDTEKPRMRGPKRASKIRKLFNLGKEDDVRKYVNTYRRTFTNKKGKKVSKAPKIQRLVTPLTLQRKRARIADKKKRIAKANSDAADYQKLLASRLKEQRDRRSESLAKKRSRLSSAPAKPVAA

SEQ ID NO: 19222 - protein, 365 aa, Pleurochrysis carterae
DNGSGMCKAGFAGDDAPRAVFPSIIGRPRQPGVMVGMGQKDSYVGDEAQSKRGILTLKYPIEHGIVTNWDDMEKIWHHTFYNELRVAPEEHPVLLTEAPLNPKANREKMTQIMFETFNVPAMYVAIQAVLSLYASGRTTGIVMDSGDGVSHTVPIYEGYALPHAILRLDLAGRDLTDWMVKLLTERGYSFTTTAEREIVRDIKEKLAYVALDFDAEMASCAQSSAVEKSYELPDGQVITLGNERFRCPEALFQPSFLGMETAGVHETTYNSIMKCDVDIRKDLYANIVLSGGTTMYAGIADRMSKEITALAPASMKVKIIAPPERKYSVWIGGSILSSLSTFQQMWISKKEYDESGPSIVHRKCF

SEQ ID NO: 19223 - protein, 117 aa, Brassica napus
MAGLMKLACLVLACMIVAGPITTNAALSCGTVSGNLAACIGYLTQNGPLPRGCCTGVTNLNNMARTTPDRQQACRCLVGAANSFPTLNAARAAGLPKACGVNIPYKISKSTNCNSVR

SEQ ID NO: 19224 - protein, 365 aa, Pleurochrysis carterae
DNGSGMCKAGFAGDDAPRAVFPSIIGRPRQPGVMVGMGQKDSYVGDEAQSKRGILTLKYPIEHGIVTNWDDMEKIWHHTFYNELRVAPEEHPVLLTEAPLNPKANREKMTQIMFETFNVPAMYVAIQAVLSLYASGRTTGIVMDSGDGVSHTVPIYEGYALPHAILRLDLAGRDLTDWMVKLLTERGYSFTTTAEREIVRDIKEKLAYVALDFDAEMASCVQSSAVEKSYELPDGQVITLGNERFRCHEALFQPAFLGMENAGVHETTYNSIMKCDVDIRKDLYANIVLSGGTTMYAGIADRMSKEITALAPASMKVKIIAPPERKYSVWIGGSILSSLSTFQQMWISKKEYDESGPSIVHRKCF

SEQ ID NO: 19225 - protein, 540 aa, Synechococcus elongatus PCC 6301
MASASSNDRILIFDTTLRDGEQSPGASLNLEEKLVIARQLARLNVDIIEAGFAFASPGDFGAVQRIAAEVGTPDGPTICSLARATRQDIKAAAEALAPAAKGRIHTFIATSDIHLEYKLKKTRAEVLAVIPEMVGYAASLVDDVEFSPEDAGRSDPEFLYECLEAAIAAGAKTINIPDTVGYTTPSEFGALIGGIKQNVCNIDQAIISVHGHNDLGLAVANFLEAVKNGARQLECTINGIGERAGNAALEELVMALHVRRQYFNPFLGRAADSEAPLTQVNTREIYKTSRLVSNLTGMLVQPNKAIVGANAFAHESGIHQDGVLKNKLTYEIVDAETIGLSTNRITLGKLSGRNAFRTRLQELGYDLGEDDLNRAFLRFKELADKKREVTDRDLEAIVNDETQQAPELFKLELVQVSAGDHARPTATVTLRTPEGEELTDAAIGTGPVDAIYRAINRVVNIPNELIEFSVKSVTAGIDAIGEVTIRLRHEDRIFSGHSANTDILVASAQAYIHALNRLAEALQKDKPLHPQEPIVAGMGR

SEQ ID NO: 19226 - protein, 122 aa, Zea mays
SPRRSGDGPQGLPPLGRRASSFAVVCSKNKIKTDKPYEIEGGLNVDVDGNDRKGKGKGENQFVDKYGANVDGYSPIYNEDDWSPTGDVYVGGTTGLLIWNDSLAEMLGDGALLVYNTSALSG

SEQ ID NO: 19227 - protein, 245 aa, Bacillus anthracis str. 'Ames Ancestor'
MIKLVLIRHGQSLWNLENRFTGWTDVDLSENGLSEAREAGAILKKNGYTFDVAYTSVLKRAIRTLWIVLHEMDLAWVPVHKCWKLNERHYGALQGLNKDETAKKYGEEQVHIWRRSIDVRPPALTEDDPRYEMNDLRYKALKKGEFPLTECLVDTEKRVLDYWHSEIAPKLKNGNKVIISSHGNTIRSLVKYLDNLSSDGVVSLNIPTSIPLVYELDENLRPIRHYYLSMDGEVPEGEIPKHITF

SEQ ID NO: 19228 - protein, 131 aa, Candida glabrata CBS 138
MSGGKGGKAGSAAKASQTRSAKAGLTFPVGRVHRLLRRGNYAQRIGSGAPVYLTAVLEYLAAEILELAGNAARDNKKSRIIPRHLQLAIRNDDELNKLLGNVTIAQGGVLPNIHQNLLPKKSAKPSASQEL

SEQ ID NO: 19229 - protein, 134 aa, Archaeoglobus fulgidus DSM 4304
MDELELIRQKKLKEMMQKMSGEEKARKVLDSPVKLNSSNFDETLKNNENVVVDFWAEWCMPCKMIAPVIEELAKEYAGKVVFGKLNTDENPTIAARYGISAIPTLIFFKKGKPVDQLVGAMPKSELKRWVQRNL

SEQ ID NO: 19230 - protein, 544 aa, Trichodesmium erythraeum IMS101
MNVQTVVTKPFRDQKPGTSGLRKKVPIFKEPHYLENFIQSIFDSLEGFSGQTFVLGGDGRYYNRQAIQIILKMAAANGVGRMLVGQGGILSTPAASCIIRKNQAFGGIILSASHNPGGPEEDFGVKYNISNGGPAPEKVTSAIYERSKVIDSYKILEAKSINLDQLGSEKLGEMTVEVIDSVADYADLMESLFDFGKLSQLLSSGKFRMCMDSLHAVTGPYAKNIFEQRLGAPLGTVKNGMPLEDFGGGHPDPNLVYAHDLVEIMFGDNAPDFGAASDGDGDRNMILGKNFFVTPSDSLAILAANAKLVPGYSSGLTGIARSMPTSAAADRVAEKMGLDCYETPTGWKFFGNLLDADKATLCGEESFGTGSNHVREKDGLWAVLFWLNILAARQESVEDIVKEHWKTYGRNYYSRHDYEGIESDKASTLMENLRSLLPSLPGKQYGQYEVKYADDFRYTDPIDGSVSQKQGIRIGFSDGSRMVFRLSGTGTQGATLRLYVESYEPDTTKQDQDTQIALSPLISLADEIAQIKNITGQEKPTVIT

SEQ ID NO: 19231 - protein, 480 aa, Fagus sylvatica
MGEEGNSWIRRTKFSHTVCHRLDASRLASFPIIIRPERNSGLKSRPGATSSSEKFGTIYNKQRSLSPLPESRLSDVFKEARSETKRFMTPLPRRREQAKGVMGKFVHKDFHEVKASDSKSLANSSALRHLSSMKVNDKSKYRKESSWAKYFDHGGGRVNAVETSDEWTVDLSKLFLGLKFAHGAHSRLYHGIYNDEPVAVKIIRVPEDDENGALGARLEKQFNREVTLLSRLHFHNIIKFVAACRKPPVYCVVTEYLSEGSLRAYLHKLERKSLPLQKLIAFALDIARGMEYIHSQGVIHRDLKPENVLIDQEFHLKIADFGIACEEAYCDSLADDPGTYRWMAPEMIKHKSYGRKVDVYSFGLILWEMVAGTIPYEDMNPVQAAFAVVNKNLRPVIPRYCPPAMRALIEQCWSLQSEKRPEFWQVVKVLEQFESSLARDGTLNLVQSLTCQDHKKGLLHWIHKLGPVHPNGSMPKPKLT

SEQ ID NO: 19232 - protein, 465 aa, Brucella melitensis 16M
MSGNFGGPMDDRCIIIGAGHAGSQAAVSLRQEGYAGEIILINDETDIPYHKPPLSKSYLKAPEKGSLVLRPESAYRDNNIEMLFGAHVDAVSIAERTVTLGDGRVLPWSELVFATGARARIPDVPGVALEGVVTLRRMEDARRIAAMMPDVRNVVIIGGGFIGLEMAHSAIALGKKTVLIEAAPRVLGRSVAAPVSAHVEARSRAADITLLTGLGVASIEGENGRAIGVTAGDGTFFPADLVVIGTGAVPNVELAAKAGLSIDNGIRVDEHMRTSAPHVYAIGDCASYAHFHAGRHVRLESVQNATDQAKHFARTIVGRETPYREVAWFWSDQGDMKLQTAGLSFDADRHVLSGEPEENAFSVFSFQGRQAGGGRFHQSPGRSYDCASSACGGDQPKRGRYYGWYAAPQGIAGGCGAIKVLWKRPDLGGGEESVRFLIAEGMGGGETPGDILETEGPRGFIRSQS

SEQ ID NO: 19233 - protein, 558 aa, Glycine max
  misc_feature (373)..(373): Xaa can be any naturally occurring amino acid
MASTSLFNFRLPLFNFNPLHHRRIKRPKSLLSSPRNSPRLVSSINDHLALTRVTYPLLQSHSAPKRRFHVGVQKEYSDGESSESIVSDATYQEEFSWSSVVLPFLFPALGGLLFGYDIGATSGATISLQSPELSGISWFNLSAIQLGLVVSGSLYGALLGSLVAFAIADFLGRKKQLITAALLYLFGGVITAYAPELGVLLAGRLIYGLGIGLGMHGAPLYIAETCPSQIRGTLVSLKELFIVLGILLGYFVGSFLIETVGGWRFMYGFSAPVAVLMGLGMWTLPNSPRWLLLRAVQGKGSFQDLKEQAIASLSKLRGRPPGDKESEKQIEETLVSLKSVYADQESEGNFLEVFQGPNLKAFIIGGGLVLFQXGQPSVLYYAGPILQSAGFSAASDATKVSVVIGLFKLLMTWIAVLKVDDLGRRPLLIGGVSGIALSLVLLSAYYKFLGGFPLVAVGALLLYVGCYQISFGPISWLMVSEVFPLRTRGKGISLAVLTNFASNAVVTFAFSPLKEFLGAENLFLLFGAIATLSLLFIIFSVPETKGMSLEDIESKILK

SEQ ID NO: 19234 - protein, 931 aa, Bartonella henselae str. Houston-1
MLERPFFSRHIGLRPDEKQKMLDIVAVDSIDTLVSQALPHSIHLGRPLNLPKAVSEGQALEELSKMMERNYLHKSFIGQGYHGTYVPPVILRNLFENPAWYTAYTPYQAEISQGRLELLFYFQTLISELTGLPVAAASLLDEATALAEAITVAFRFTREKKMKISLQSLLHPQILSVVQTRAETQGLQVSKNSEICSDTAAIVLSWPDTKGSFNDYSEVIKEAKAKGALVIVVADPLALTLMEAPAKWGADIVVGSMQRYGVPMGFGGPHAGYLAVSDALTRLIPGRIVGQSVDTKGRVGFRLALQTREQHIRRDKATSNICTAQALLANMATAYAVWHGPQGLQEIAQRVHHLTCRFVGGLEAVGISCEGEYFFDCVSIVVKGKAREIACQAKAGGRLIRVLDDDRVVINFDELSTQEDAHALAQLFGAGLVDQASPRLMGKGRDTTFLSQPFFHAVHSETDMMRFLRRLSDKDLALDRAMIPLGSCTMKLNAAAELMPVSWPTVANIHPFASREDAVGYQEMIHQLNAWLCEITGFAQVSFQPNSGAQGEYAGLLAIRRYHQSRGEHQRTLCLIPASAHGTNPASAHMAGMEVVVVKCLNDGDVDLDDLKMKAQLYKERLAALMITYPSTHGVYEESIKDICSLIHENGGQVYFDGANLNALVGLARPADIGADVCHMNLHKTFAIPHGGGGPGVGPIGVVEHLKPFLPGHEQEGTTHAVSAAPYGSASILVITWMYIRMMGAEGLKYATQTAILNANYIAARLSQVYSILYRGKHGRVAHECIVDTRVLKEQYGVSVDDIAKRLIDYGFHAPTMSFPVPGTLMIEPTESEPKAEIDRFCDALLSIAEEAKKIGSGVWPKDDNPLVHAPHTLVDTLDDTWARPYSRQEAAFPNCSLDPANKYWPPVSRIDNVAGDRMLICSCPPLGNTY

SEQ ID NO: 19235 - protein, 127 aa, Glycine max
MAASMITSPIVAPTSLPSLSRRGSSFAVVCSGGKKIKVDKPLGLGGGLTVDIDANGRKVGKKGVYQFVDKYGANVDGYSPIYTPEEWSESGDRYAGGTTGLLIWAVTLAGLLGGGVLLVYNTSALAG

SEQ ID NO: 19236 - protein, 115 aa, Triticum aestivum
MARGATTQLVLVAMVAAMLLVACDAAISCGQVTSALSPCISYARGNVANPPAACCSGVRSLAGAARSTADKQAACKCIKSAAGGLNAGKAAGIPSKCGVSVPYAISSSVDCSKIR

SEQ ID NO: 19237 - protein, 512 aa, Zymomonas mobilis
MESPSYKNLIKAEDAQKKAGKRLVSSEWYPGFHVTPLTGWMNDPNGLIFFKGEYHLFYQYYPFAPVWGPMHWGHAKSRDLVHWETLPVALAPGDSFDRDGCFSGCAVDNNGILTLIYTGHIVLSNDSPDAIREVQCMATSIDGIHFQKEGIILEKPPMPQVAHFRDPRVWKENDRWFMVVGYRTDDEKHQGIGHVALYRSENLKDWIFVKTLLGDNSQLPLGKRAFMWECPDFFSLGNRSVLMFSPQGLKASGYKNRNLFQNGYILGKWQAPQFTPETSFQELDYGHDFYAAQRFEDKDGRQILIAWFDMWENQKPSQRDGWAGCMTLPRKLDLIDNKIVMTPVREMEILRQSEKIESVVTLSDAEHPFTIDSPLQEIELIFDLEKSSAYQAGLALRCNDKGQETLLYIDRSQNRIILDRNRSGQNVKGIRSCPLPNTSKVRLHIFLDRSSIEIFVGDDQTQGLYSISSRIFPDKDSLKGRLFAIEGYAVFDSFKRWTLQDANLAAFLSDAC

SEQ ID NO: 19238 - protein, 344 aa, Wolbachia sp. wVes
QALEKSLCDKKIQLGINLTKGLGAGALPDVGKGAAEESIDEIMEHIKDSHMLFITAGMGGGTGTGAAPVIAKAAREARAVVKDKGAKEKKILTVGVVTKPFGFEGVRRMRIAELGLEELQKYVDTLIVIPNQNLFRIANEKTTFADAFQLADNVLHIGIRGVTDLMVMPGLINLDFADIETVMSEMGKAMIGTGEAEGEDRAISAAEAAISNPLLDNVSMKGAQGILINITGGGDMTLFEVDSAANRVREEVDENANIIFGATFDQAMEGRVRVSVLATGIDSCNNNSSVNQNKIPAEEKNFKWPYNQIPISETKEYASTEQTNERVKWGSNVYDIPAYLRRKK

SEQ ID NO: 19239 - protein, 954 aa, Xanthomonas campestris pv. vesicatoria str. 85-10
MSQTPSSLRDLEHHSAFVERHIGPNDAEIAQMLDVVGHACLDALTDAIVPGNIKSPAPLALPEAITEEEALAKIRAIADKNTVFRNFIGQGYYGTHTPKVILRNILENPAWYTAYTPYQAEISQGRMEALINFQTLCADLTGMQIANASLLDEATAAAEAMTLAKRSAKSRSNTFFVHDAVHPQTLELLRTRAEPLDIVLRVGTPEEALQAECFGVLLQYPDSFGHIGDHAALADAVHAQGGLVAVATDLLALTLIAAPGEWGADIVVGNSQRFGVPFGFGGPHAAFMACRDAYKRSMPGRLIGVSIDAAGNPAYRLTLQTREQHIRREKATSNICTAQVLLAVMASMYAVYHGPDGLTRIARRTHRLAAILAAALRSAGVTVGERFFDTLHVKAIDANAIHARARAAGINLRAIDSEAVGISLDETSTRADVVALAALFGAQADVDALDAATADALPQGLLRTTPFLTHPVFNTHHSEHELLRYMRSLADKDLAMDRTMIPLGSCTMKLNATAEMIPVTWPEFGAIHPLAPAEQSAGYAQLIDELEAMLVECTGYDAVSLQPNSGAQGEYAGLLAIRAYHRSRGEAHRDICLIPESAHGTNPASAQMCGMTVVVTKCDANGNVDVDDIRAKAEKYSDRLAALMITYPSTHGVFEEDVVAICEAVHAHGGQVYTDGANMNALVGVAKPGKWGSDVSHLNLHKTFCIPHGGGGPGVGPCAVKSHLAPYLPKTLGGEGDVGMVSAASYGSASILPISWMYVTMMGSAGLRKATQVALLNANYIAKRLAPHYKTLYTGRNGLVAHECILDVRPLEKTSGIGAEDIAKRLIDFGFHAPTLSFPVAGTLMVEPTESESQHELDRFIDAMIQIREEIRAIEDGRLDREDNPLKHAPHTATQVSASEWTHAYPRELAAFPLPSLKQQKYWPPVARVDNVYGDKNVMCACIPVDAYKEDVEA

SEQ ID NO: 19240 - protein, 485 aa, Oceanospirillum sp. MED92
MKLQLNDSSLLQTQAFINGEWVNGDAGETFPVSNPATGEVIAEVASVGAEETARTIDLAEAAMSAWKKLAPAERSGILERWYDLIIENTDDLAAIMTLEQGKPLFEAKGEVMYGASYLKWFAEEGKRIYGDVLPSPGDRRSIVIKQPVGVVAAITPWNFPNAMITRKAAPALAAGCSILLKPAAETPLSALALAELSKRAGVPAGLFNVLPTKSSSTVGGEMTSNTKVKKLTFTGSTPIGKLLIKQCADTVKRTSMELGGNAPVIVFDDADLDLAVKGALASKYRNSGQTCICANRLLVQEGIYDQFVEKFAAAVKEFKLGHGFDEEATHGPVVSKKALSDIDAIVQNAVEQGANVVAGGKPSELGNCFYEPTILTDVNDKMSIFGEEIFGPVAPVFKFSTEEEAIAMANDTEFGLASYVFTQNLGRIWRVSEGIEYGMVGVNETAISSEVIPFGGVKESGQGREGSKYGLEDYLETKYICMGGL

SEQ ID NO: 19241 - protein, 118 aa, Zea mays
MAGLVKLACLVLACMIVAGPITSKAALSCGTVNTNVAACIGYLTQGGPLPRACCTGVSKLNSIARTTPDRQQACRCLKTAASALGSGLNAGRAAGLPKACGVNVPFPISTSINCNGVK

SEQ ID NO: 19242 - protein, 164 aa, Oryza sativa
  misc_feature (110)..(110): Xaa can be any naturally occurring amino acid
  misc_feature (130)..(130): Xaa can be any naturally occurring amino acid
ARRAYNCPFCGEDFDFVAFCCHVDDEHAVEAKSGVCPICATRVGVDLIGHLTMQHGSYFKMQRRRRVRKISSGSHSLLSLLRKDLRDGSLQSFLGGSSYMTRLQRGMSPXLCSFCRLTPLPLCHNTTVSXAEPSLSEKDQKERAQRSKFVRGLVLSTIFEDDNL

SEQ ID NO: 19243 - protein, 716 aa, Oryza sativa
MAAAARDALLDELRALMAAHSPPLHALVVPSEDAHQSEYVSERDKRRQFVSGFTGSADGTIGWVRVAEVGRWNGRHVYAMLAKVVYRFHVSIDYYLPYMVIKSVLYKSDVQGLALITMKEALLWTDGRYFLQAEQQLSDRWKLMRMGEDPPVEVWIADNLSDEAVVGINPWCISVDTAQRYEHAFSKKHQTLFQLSSDLIDEIWKDRPSAEALPVFVQPVEYAGRTVTEKLKELREKFLHEKARGIIIAALDEVAWLYNIRGDDVHYSPVVHSYSIVTLHSAFFYVDKRKVSVEVQNYMTDNGIDIKDYNMVQSDASLLASGQLKGSAVNGSSYGENDMNENSKVWIDSNSCCLALYSKLDQDQVLMLQSPIALPKAVKNPVELDGLRKAHIRDGAAVVQYLAWLDNQMQENYGASGYFSEAKGSQKKQHMEVKLTEVSVSDKLEGFRASKEHFKGLSFPTISSVGPNAAVIHYSPEASSCAELDADKIYLCDSGAQYLDGTTDITRTVHFGKPSEHEKSCYTAVLKGHIALDSAVFPNGTTGHALDILARTPLWRSGLDYRHGTGHGIGSYLNVHEGPHLISFRPSARNIPLQASMTVTDEPGYYEDGSFGIRLENVLIVKEANTKYNFGDKGYLAFEHITWAPYQTKLIDTTLLTPAEIEWVNAYHADCRKILQPYLNEQEKEWLRKATEPIAGLDRPFVLDVQNDKRFVACHA

SEQ ID NO: 19244 - protein, 353 aa, Staphylococcus aureus subsp. aureus MW2
MSRITQVHRILEQKHLDAIIILSDYNRRYLSGFTGTSGALIISKDKQYLITDFRYIDQATKQAPNYEIINRKSTIIGEIKELLHQENFENVGFEGHHVSYDTYLELNKSRISLISISNTVDKIRDVKDAEEIALIQKAANIVDETYEYILTVVKAGMTEKELKAILESKMLELGADGPSFDTIVASGHRGALPHGVASDKIIEKGDMITLDFGAYYNGYCSDITRTFAIGEPDPKLKEIYQIVLESQMKAINEIRPGMTGAEADTISRNYLESKGYGKEFGHSLGHGIGLEIHEGPMLARTIQDKLQVNNCVTVEPGVYIEGLGGIRIEDDILITENGCQVFTKCTKDLIVLT

SEQ ID NO: 19245 - protein, 762 aa, Vibrio vulnificus YJ016
MSFRIKTIIGIACIEIIMLMLLVFSAMNFMRQSNQEQFIQKANATSQMFARASKDALLSLDLATLDDLTQEILSLPDILYVDIRNNDQQLAFAGALPKVSADWQADDHVSLGDLVFDVSEKITVDGLTYGEIRMGFNTTAIQTALDEASKAIVLIAVLEIILVALFSYFLGSYLSQNLYQLTRAAERVANDGPGFQLQLKAKDEIGKVAAAFDSMSHNLATSYQELEQARTQAELANESKSRFLASMSHEIRTPMNGVLGLLGILGETKLDNHQQNLVHTAKESGELLLSIINDILDFSRMEANTLILYPRPFELKSCVEEIVNSFEPLAKTKGLYLSLTFNDECDYVVVGDSNRYRQVLLNLLGNAVKFTQKGSVSLHVTTQNEGDKLYIRCEINDTGIGIAPDAMAILFEEFTMVDQGYSRTREGSGLGLAICKRLAQLMEGEINVESEVGKGSCFVFSVEMPLAEHDTVTQQAQPDNDSVCTLLQGKRILVAEDNTANQMVIKAMFERLGVAIDLANDGYEAVSMASNHHYDIIFMDISMPGKDGMQACKEIRQLPDAKQAATPIIALTAHALYGDKEKFLRSGMNGYLSKPLRSRHLIEELNKILSASNHHDTATKPLETEKTNHMQITLTSEKNTTAPLVDELIIQQMIRDTSAEVMPMLIEHYIEESERRLVKIDQAIAHSDFQQLEFELHTLGSSSLALGNRRLSNLARKLERLCVAKEYDAVMEDASGIAQLAHDSLSALNERKQLGFVEPNSI

SEQ ID NO: 19246 - protein, 114 aa, Zea mays
MASLKAKWTEMDDYGETLMNIHAGLCTYAGQWSLKEEESGRPLPKFGDWDVNDPASADGFTVIFNKARDEKKGGNGQDTESPSKDTRTERVESYAAKPSTKKWFCCVTASPTQS

SEQ ID NO: 19247 - protein, 194 aa, Medicago truncatula
MALIAKPNVFNGLNFHINETQFPFSSFSVIRKRFGDSSHRNVVLKSNGNASILPKIRAQNLPDYVPESKFYKVEAILRPWRIPQVSSGLLKMGIRGVTVSDVKGFGAQGGSKERQGGSEFSEDNFVAKVKMEIVVRKDQVEAVINKIMETARTGEIGDGKIFLIPVSDVIRIRTGERGEQAERMAGGLTDALSV

SEQ ID NO: 19248 - protein, 415 aa, Novosphingobium aromaticivorans DSM 12444
MASEVQAERADVVIVGAGHGGAQAAIALRQNGFEGRVLVIGREPEIPYERPPLSKEYLAREKTFERICIRPAQFWEDKAVEMKLGAEVVSLDPAAHTVKLGDGSAIEYGKLIWATGGDPRRLSCVGADLAGVHAVRTKEDADRLMAELDAGAKNAVVIGGGYIGLEAAAVLTKFGVNVTLLEALPRVLARVAGEALSEFYQAEHRAHGVDLRTGAAMDCIEGDGTKVTGVRMQDGSVIPADIVIVGIGIVPCVGALISAGASGGNGVDVDEFCRTSLTDVYAIGDCAAHANDFADGAVIRLESVQNANDMATAAAKDICGAPVPYKATPWFWSNQYDLKLQTVGLSTGHDNAVLRGDPATRSFSVVYLKGGKVVALDCVNMVKDYVQGKKLVEARAQIAPEQLADAGVPLKEMLA

SEQ ID NO: 19249 - protein, 168 aa, Glycine max
MAALPLATAEVCDANSHLITGGELRALQPVFQIYGRRQVFAGPIVTLKVFEDNVLVREFLEEKGQGRVLVVDGGGSLRCAILGGNPVQQAQNNGWAGIVVNGCIRDVDEINGCDIGVRALASHPMKANKKGMGEKHVPVTIAGTRICDGEWLYADTDGILVSRTELIV

SEQ ID NO: 19250 - protein, 364 aa, Clusia minor
SDSGKDAGRLSAAWQLYKAQEDLIKVAKQFGVKLTMFHGRGGTVGRGGGPTHLAILSQPPDTIHGSLRVTVQGEVIEQSFGEEHLCFRTLQRFTAATLEHGMHPPDSPKPEWRALLDEMAIVATEEYRSVVFKEPRFVEYFRLATPELEYGRMNIGSRPSKRKPSGGIESLRAIPWIFAWTQTRFHLPVWLGFGAAFKHIIKKDIRNLHMLQEMYNAWPFFRVTIDLVEMVFAKGDPGITALYDKLLVSEDLWAFGENLRTNCEETKKLLLQIAGHKDLLEGDLYLKQRLRLRDSYITTLNVCQAYTLKRIRDPSYNVKFRPHISKEIMETSKSANELLILNPSSEYGPGLEDTLILTMKGIAA

SEQ ID NO: 19251 - protein, 414 aa, Rhizobium sp. NGR234
MQFTLPEEGAMHYDCLIVGSGHGGAQAATSLRQNGFQGSIGILSEDRDPPYERPPLSKDYLLGGKTFDRILIRPAEFWTSRSIDLLLGHEVVKVHAKEKQVLCADGATYSYGYLIWSAGGRPRRMSCPGHDLQGIHAVRTRSDVDRLVKDLASAEGVVVVGGGYIGLEAAAALTKLGKTVTVVEAMNRVLARVAAEPLSRFYEREHRDHGVEIRLETGVDKFVGSEGRLTGVLLKDGVTLPADIAIVGIGIVPCVEPLIEAGASGENGLDVDEHCRTSLPDVFAVGDCARVKSAHGLRIESVQNAHDQATAVAKTLCGELTPYSATPWFWSNQYDLRLQTVGLSAGFDRTVVRGDPNTRSFSIVYLREGAVIALDCINSVRDYVEGRMLVERRARVSPDVLANNSIRLKSLALA

SEQ ID NO: 19252 - protein, 364 aa, Clusia multiflora
SDSGKDAGRLSAAWQLYKAQEDLIKVAKQFGVKLTMFHGRGGTVGRGGGPTHLAILSQPPDTIHGSLRVTVQGEVIEQSFGEEHLCFRTLQRFTAATLEHGMHPPDSPKPEWRALLDEMAVVATEEYRSVVFKEPRFVEYFRLATPELEYGRMNIGSRPSKRKPSGGIESLRAIPWIFAWTQTRFHLPVWLGFGAAFKHIIKKDIRNLHVLQEMYNAWPFFRVTIDLVEMVFAKGDPGIAALYDKLLVSEDLWAFGENLRTNCEETKKLLLQIAGHKDLLEGDLYLKQRLRLRDSYITTLNVCQAYTLKRIRDPSYNVKFRPHISKEIMETSKSANELLILNPSSEYAPGLEDTLILTMKGIAA

SEQ ID NO: 19253 - protein, 102 aa, Lactococcus lactis
MLYGKENRDEAEFLEPIFGSESEQVDLPKYKLAQQSIEPRVAYQLVQDEMLDEGNARLNLATFCQTYMEPEAVKLMSQTLEKMRLINRNIQEQLKLKTVAST

SEQ ID NO: 19254 - protein, 353 aa, Bacillus licheniformis ATCC 14580
MKLNKLRELFGGLGIDGILVTSGVNLRYITGFTGSSGLAVISDDQAVFITDFRYTEQAKDQIKSFDIVQHAGGIVQKTAEVIKEMGINKIGFEQDKMTYGTYAAYKEQLGAAELVPVSQSVEKLRLIKSSEEIKILKEAAKIADDAFSHILTVIKPGITEIEVANELEFYMRSQGADHSSFDMIVASGVRSSLPHGVASGKAIEKGDLVTLDFGAYYKGYCSDITRTVAVGEPDDELKRIYQTVFEAQAIGMRSIKPGITGKQADAYTRDYISSQGYGDYFGHSTGHGLGMEVHESPALSARSDQMLEKGMVVTVEPGIYIPGKGGVRIEDDIVLTEEGNESLTHSAKDLIIL

SEQ ID NO: 19255 - protein, 162 aa, Triticum aestivum
  misc_feature (58)..(58): Xaa can be any naturally occurring amino acid
  misc_feature (73)..(73): Xaa can be any naturally occurring amino acid
  misc_feature (78)..(78): Xaa can be any naturally occurring amino acid
  misc_feature (105)..(105): Xaa can be any naturally occurring amino acid
  misc_feature (126)..(126): Xaa can be any naturally occurring amino acid
  misc_feature (129)..(129): Xaa can be any naturally occurring amino acid
MAPSVMASSATTVAPFQGLKSTAGMPVARRSGNSSFGNVSNGGRIRCMQVWPIEGIKXFETLSYLPPLTVEDXLKAVXVPAPSNWVPCPDSSKGPVCPTVENHRXPGYYQRKYWTIWNCQGSVDRXTQXLKDPRRQKGSPILTVKLKLFNPKTPGSGEKPQK

SEQ ID NO: 19256 - protein, 276 aa, Candida glabrata CBS 138
MEEAAADAYKLSYKVGVAENKNAKFRRTMEDVHTYVKNFASRLDWGYFAIFDGHAGIQASKWCGSNLHTIIENKLMADETKDVRDVLNESFVMIDKQINKDLQGNSGCTAAVCVLRWELPDGCTEQEEMDLTKHKRKLYTANVGDSRIVLFRNGQSIRLTYDHKASDPLEMQRVEKAGGLIMKSRVNGMLAVTRSLGDKFFDSLVVGSPFTTSVEITPADQFLIIACDGLWDVIDDQEACEMIQDIEDPHEAARALVRNALERGTTDNVTVMVVTL

SEQ ID NO: 19257 - protein, 241 aa, Clusia criuva
FHGRGRAVGRGGGPTHLAILSQPPDTIHGSLRVTVQGEVIEQSFGEEHLCFRTLQGFTAATLEHGMHPPDSPKPEWRALLDEMAVVATEEYRSVVFKEPRFVEYFRLATPELEYGRMNIGSRPSKRKPSGGIESLRAIPWIFAWTQTRFHLPVWLGFGAAFKHIIKKDIRNLHVLQEMYNAWPFFRVTIDLLEMVFAKGDPGIAALYDKLVVSEDLWAFGEDLRTNYEETKKLLLQIAGHK

SEQ ID NO: 19258 - protein, 403 aa, Listeria monocytogenes str. 4b F2365
MKIIVQKFGGTSVQNEKSRLMAFNHIKQVLKEGYKVVVVVSAIGRYGDPYATDTLLELIGAKNTKLTAREQDTLLSVGETISASVFTNMLKEANIKAEAFSGGQAGIITSDDHLNAKITEVDTARLKDALTNLDVAVVAGFQGITANGDISTLGRGGSDTSAAALGVSLQADYIDIFTDVDGMMTADPRIVEHARSLPRVSYNEVSNMAYQGAKVIHPRAVEIAMTAKIPMRIRSTYLESTGTLVTSLTNDSDHFDVKERIVTGVAHVTNLTQISVQTDTVKAQQLAFKILADAGISLDFINISTNSVIFTVPEEKSHVVKQLLEDADLQTTVRQACAKVSIVGAGITGVPGVTAKIVGALSEKNIPILQSADSHTTIWVLVKEEDLISAVNALHDVFCLEIK

SEQ ID NO: 19259 - protein, 105 aa, Lactococcus lactis
MLYGKENRDEAEFLEPIFGSESEQVDLPKYKLAQQSIEPRVAYQLVQDEMLDEGNARLNLATFCQTYMEPEAVKLMSQTLEKNAIDKSEYPRTTEIENRCVNMIA

SEQ ID NO: 19260 - protein, 525 aa, Bacillus licheniformis ATCC 14580
MSNQGNFKKTISLLDLILIGMGAIFGSAWLFAVSNVASKAGPAGSFSWIIGGVIILLIGLVYAELGAALPRTGGIIRYPVYTHGHLVGYLISFITIVAYTSLISIEVTAVRQYVAYWFPGLTIKGSESPTIIGWLLQFALLCLFFLLNYWSVKAFAKSNLIISVFKYFVPLTIIIVLIFHFKSANFAGEFAPFGFGGVQTSISTGGVMFAYLGLHPIVSVAGEVKNPQRNIPVALLICIIVSACVYTILQVVFIGAIPTDMLNDGWKAIGREFSLPFKDIAVLLGMGWLATLVVLDAILSPGGNGNIFMNTTSRLVYAWARNGTLFKIFAKVNKPTGIPRPSLWLSFALAVFWTLPFPSWDALVNVCSVALILSYAIAPVSAAALNVNAKQLKKPLQIKGMAVIAPVSFIFASYIVYWSGWNTVSWLLGSQLVMFAVYCACKKYVPQDDVSFAQQLKSSWWIVGYYVMLLILSFLGSFGNGLGLLRTPVDLILIALGSIAVFYWAKYTALPKAVIDYDEKKEETV

SEQ ID NO: 19261 - protein, 120 aa, Davidia involucrata
MGRSGVVIKVGIVAVLMCMVVSAPHAEAAITCGTVTVSLAPCLNYLKKGGPVPPACCNGIKSLNAAAKTTADRQAACNCLKTASTSIAGINLSYASSLPGKCGVNVPYKISPSTDCSKVQ

SEQ ID NO: 19262 - protein, 157 aa, Lactococcus lactis
FVDPELEWDFRLKNVISINTSGHKYGLVYTGVGWVLWRDKKYLPEELIFKVSYLGGELPTMAINFSHSASQLIGQYYNFVRYGFDGYKAIHERTHKVAMYLAEEIEKTGMFEIMNDGSQLPIVCYKLKENSNLGWNLYDLADRLFNEGMASACLSTS

SEQ ID NO: 19263 - protein, 112 aa, Azoarcus sp. BH72
MKLITAIIRPFKLDEVREALAHVGVTGLTVTEIKGFGRQKGHAELYRGAEYVVDFVPKVKLETVVADERLEATLEAIQAAAHTGKIGDGKMFVTTVDQTIRIRTGESGADAL

SEQ ID NO: 19264 - protein, 262 aa, Bacillus clausii KSM-K16
MSSSKTLVQTAAHDGIARITLNRPQAANALSLALLDELEAACDWVAQEHNIRVVILAGAGEKAFCAGADLKERANMTESEAIYAVKRIGEVIARVEKLPQPVIADVGGSAFGGGLELCLACDVRIFAEDSFYGLTETKLAIIPGAGGTQRLPRLIGSGKAKELIFTARRLTGTEARKYGLCEWALPREKTSAAASQLAVEMASNGPIALQAAKKAINEGAALPLEAALAVEREAYLQTLQTEDRLEGLASFKEKRPPVYKGK

SEQ ID NO: 19265 - protein, 561 aa, Zea mays
MASIPPPSSSVAALTRQPAQFLKWCSVSKETKASVCSFLATNSNSTRVKSVGLRVALSFKNDGGYPADGFSGNGNTLLPKSTSVRGEDHPVADPVLPMDSMMTPEILSANLALVMDKFSDDDTDTELDLDSPTEGFASIPDAIEDVRQGKLVIVVDDESRENEGDLIMAASLVTPEAMAFIVRHGTGIVCVSMKEDDLERLSLPLMVTTKENEEKLCTAFTVTVDAKEGTTTGVSAKDRAKTVMTLASPDSRPEDFNRPGHIFPLKYREGGVLKRAGHTEASVDLAMLAGLPPVAVLCEIVDDADGSMARLPKLRVFAERENLKIISIADLIRYRRKRDRLVERASVARLPSQWGNGHGYCYRSAIDGIEHLAMVKGDIGDGQDILVRVHSECLTGDIFRSARCDCGDQLAMAIEMIEKAGRGVIVYLRGHEGRGIGLGHKLRAYNLQDDGRDTVEANEELGLPVDSREYGIGAQILRDLGVRSMKLMTNSPAKYSGLKGYGLSIAGRVPLVTPITSENPQILCPIREHGRATEDGEELVKQGYIPDLGILVFSCGRCTSC

SEQ ID NO: 19266 - protein, 487 aa, Glycine max
MSFRSENVNPNPSPTPPLKKRWSDIWTKSKPLNQMVMAMKLHSLSSSPRISTTDKTNPILSPFPITDRTLLLSDALLLKIIALVSDSSTQRNSNSLVCKRWLNLQGRLVRSLRISDWNFLLSGRLIHRFPNLNHVDLLSAALISPKNSGILLSNRVISMHLDSNSSPNWCFFEDNMLPVEVIDNGLTSLASGCPNLRRLHVIGTTEIGLLTVAEECSTLQELELQRCSDNVLRGIAACGNLQILKLVGHVDGFYDSVVSDIGLTILAQGCKRLVKLELSGCEGSFDGIKAIGKCCQMLEELTFSDHRMDDGWLAAISYCENLKTLRFQSCKKIDPNPGMEEYLGCCPALERLHLQKCQLRDRKSVVALFSVCRAVREIVIQDCWGLDNSMFSLAMICWRVKLLYLEGCSLLTTEGLESVIHSWKDLQSLRVVSCKNIKDNEISPALATLFTTLKELRWSPDTKSLLPSSVKGITMGKKGGKFFKRAR

SEQ ID NO: 19267 - protein, 552 aa, Oryza sativa
MVVQLMLFFHDKFMAPMAEEPLPFVLIMIIILLLLVLLHYYLSASTRRSSAASKSNDDVLPPSPPRLPVIGHMHLVGSNPHVSLRDLAEKHAADGFMLLQLGQVRNLVVSSPRAAEAVLRAHDHVFASRPRSAIADILAYGSSNISFSPYGDYWRKARKLVAAHLLSPKKVQSLRRGREEEVGIAVAKLHEANKLAAAGAAVDMRELLGSFTNDVLCRAVCGKSSFRREGRNKLFMELAAGNADQYAGFNLEDYFPSLAKVDLLRRVVSADTKKLKEKWDSVLGDIVSEHEKKSSLRRDDQVQMDDDRDDDQEEQESDFVDILLDRQQEYNLTRHNIHAILMDMFAAGTDTSYIALEFAMSELIRKPHLMTKLQDEVRKNTTTKMVSEDDLNNMPYLKAVVKETLRLHPPVPLLLPRLSMAQCNANGYTIPANTRVIINVWALGRDARCWENSEEFMPERFMDSGDTIDNVDFKGTDFQFLPFGAGRRICPGMNFGMASVELMLSNLMYCFDWELPVGMDKDDVDMTDQFALTMARKEKLYLIPRSHVIKIT

SEQ ID NO: 19268 - protein, 317 aa, Methanosarcina mazei Go1
MDFGASAKNLSTPVKGAKIVPNMTVDELVKEYAGCAFGAGRLAEAVDIYYEMLASGKTTKFFGLAGAMTPAGMRNIIADLIRDGYIDVLVTTGANMVHDTVEALGLHHYKGSDCANDIQLRHECIDRIYDVYLPDQHFTDLEEFLQGVYSGLPQENLSIRQVLTEIGKNLDDDSSILKTAAEMGVPVYCPALQDSVIGLQAWLYKEGNPLHVDAFADMHEFMDICYGAESAGTMLLGGGVPKNYILQSMLVTPRSFDYAIQLTMDRPETGGLSGATLDEAQSWGKVGEDAKSVTVYADSTITLPLIVSAVRTRLSKR

SEQ ID NO: 19269 - protein, 112 aa, Azoarcus sp. BH72
MKFITAIIKPFKLDEVREALSAIGVQGITVTEVKGFGRQKGHTELYRGAEYVVDFLPKVKIEAAIRDELLDQAIEAIEKSASTGKIGDGKIFVFDLEQAIRIRTGETGADAL

SEQ ID NO: 19270 - protein, 659 aa, Schizosaccharomyces pombe
MEYYTSKEVAEWLKSIGLEKYIEQFSQNNIEGRHLNHLTLPLLKDLGIENTAKGKQFLKQRDYLREFPRPCILRFIACNGQTRAVQSRGDYQKTLAIALKKFSLEDASKFIVCVSQSSRIKLITEEEFKQICFNSSSPERDRLIIVPKEKPCPSFEDLRRSWEIELAQPAALSSQSSLSPKLSSVLPTSTQKRSVRSNNAKPFESYQRPPSELINSRISDFFPDHQPKLLEKTISNSLRRNLSIRTSQGHNLGNFGQEILPRSSRRARPSELVCPLSSLRISVAEDVNRLPRIDRGFDPPLTVSSTQRISRPPSLQKSITMVGVEPLYQSNGNEKSSKYNVFSESAHGNHQVLSFSPGSSPSFIEQPSPISPTSTTSEDTNTLEEDTDDQSIKWIRGALIGSGSFGQVYLGMNASSGELMAVKQVILDSVSESKDRHAKLLDALAGEIALLQELSHEHIVQYLGSNLNSDHLNIFLEYVPGGSVAGLLTMYGSFEETLVKNFIKQTLKGLEYLHSRGIVHRDIKGANILVDNKGKIKISDFGISKKLELNSTSTKTGGARPSFQGSSFWMAPEVVKQTMHTEKTDIWSLGCLVIEMLTSKHPYPNCDQMQAIFRIGENILPEFPSNISSSAIDFLEKTFAIDCNLRPTASELLSHPFVS

SEQ ID NO: 19271 - protein, 112 aa, Azoarcus sp. BH72
MKKIEAIIKPFKLDEVREALSEVGIAGLTVTEVKGFGRQKGHTELYRGAEYVVDFLPKIKVEVVVADDMVEQTMDAVIKAAQTGKIGDGKIFVTPVEQVVRIRTGETNEAAI

SEQ ID NO: 19272 - protein, 327 aa, Vibrio angustum S14
MADITLIEAVNLALHYEMQHDPNVVILGEDIGENGGVFRATLGLKHAFGCKRVIDTPLAESLIAGVTVGMASQGLRPIAEFQFQGFIFPAMEHLVCHAARLRNRTRGRLTCPAVFRAPFGGGIHAPEHHSESIEAMFAHIPGLKVVIPSSPQRAYGLLLAAIRSNDPILFFEPKRIYRTVKSHVENNGLALPLEQCFTLRKGTDITLVTWGACVVESLQAADTLSHHGIKLEVIDLASIKPIDMATITASIEKTGRLLVVHEAAKTCGVGAEIITRVAESAMCLLKAPPKRLTGFDTIMPYYRNEDYFMIQHDDIVNAARELMEGWQ

SEQ ID NO: 19273 - protein, 276 aa, Arabidopsis thaliana
MATNIGMMDSAYFVGRNEILTWINDRLHLNLSRVEEAASGAVQCQMLDMTFPGVVPMHKVNFDAKNEYDMIQNYKVLQDVFNKLKITKPLEINRLVKGRPLDNLEFLQWLKRFCDSINGGIMNENYNPVERRSRNGKERSVKGSNKIPKSLQTNNNHPPPNSSSVGLSKASGPKSAKAAEVQALSKELVDLKISTDLLEKERDFYFSKLRDVEILCQTPELDDLPIVVAVKKILYATDANESALEDAQEYLNQSLGVEDDEAEGNGEQLEEEKTQA

SEQ ID NO: 19274 - protein, 400 aa, Vibrio angustum S14
MKAFTLPDLGEGLAESEIVQWHINIGDTVKTDQVVVTVETAKATVDVPAPYSGKIVHRYGNEGDVINIGQCLLEIDELLANTSSVQPEKISESSENNTSPSTTVVGNISQLDKHVDVDPSYDDANQTVNLHSIANQHHPLIATPSARLLAQKLGVNIKEITGSGANHLILDNDVYLAYQQQIPGTELLKGSRRNMAKNMTRSHHDVASVTITEEARLYHWQKNDDITVNLVKAINNACHIEPALNAWFDAETMTRCLHKTVNIGIAVDSSHGLYVPVLHHAEQYHQEGIRRWIDRTAASIRSRKIDRHQLQKATITLSNYGAIAGIYATPVVTPPQVAIIGAGRIMDKVVMEGERVKTIKVLPVSITFDHRACTGGEAARFIKALLNSLESPPCDNIESS

SEQ ID NO: 19275 - protein, 521 aa, Lactococcus lactis
MKERQELGLIGLLPPTVQTIEEQAEQTYEQYLTKPSDLEKRHFLMEIFNTNRTLFYYLFNKHIVEFNPVVYDPTIADTIENYSHLFVDPQYAAYLDINHPENITETLKNAAGDREIRLIVVTDAEGILGIGDWGTQGVDISVGKLMIYTAAAGIDPASVLPVVIDAGTNRKELLEDHLYLGNHQERIYGDQYYSFVDQFVETAESIFPKLYLHWEDFGRSNAATILNNYKTKIPTFNDDIQGTGIVVLGGIFGSLDITGEKLTDQVYLCYGGGSAGAGIAGRVHAEMVSEGLSEEEAYKHFFMIDQQGLLFDDMEDLTPAQKPFAKKRADYKDAGDMTDLLNVVKTVKPTILVGTSTNPGAFTKEVVEAMCANTERPVIFPISNPTKKMETTAEQVIEWSDGKAFVATGVPSGTISYKGVDYQIGQANNSLIYPGLGLGMLASEAKLLTDEMIGAAAHSLSGLVDPGKPGAPVLPPFEFVADVSIKVAEAVAKKAQEQGLTESKETDMAKAVRDLKWYPEY

SEQ ID NO: 19276 - protein, 478 aa, Oryza sativa
MTSLPDRGVSSSSSDPLCEGNIAPCSSSSEQKEDCSLKQSKTSILSCVFNSPFNIFEHEQDSSANRSLKPHSGSYAWSRFLRRIACTGSMWRFLGASKALTSSDVWFLGKCYKLSSEELSNSSDCESGNAAFLEDFSSRIWITYRKGFDAISDSKYTSDVNWGCMVRSSQMLVAQALIFHHLGRSWRKPSQKPYSPEYIGILHMFGDSEACAFSIHNLLQAGKSYGLAAGSWVGPYAMCRAWQTLVRTNREQHEVVDGNESFPMALYVVSGDEDGERGGAPVVCIDVAAQLCCDFNKGQSTWSPILLLVPLVLGLDKINPRYIPLLKETFTFPQSLGILGGKPGTSTYIAGVQDDRALYLDPHEVQMAVDIAADNIEADTSSYHCSTVRDLALDLIDPSLAIGFYCRDKDDFDDFCSRATELVDKANGAPLFTVVQSVQPSKQMYNQDDVLGISGDGNINVEDLDASGETGEEEWQIL

SEQ ID NO: 19277 - protein, 324 aa, Zea mays
MAASLLHASAAAASLLSSTQHARAGAAAFHPLACAPSLRLTRSSFSTNRHLEISLRAISASRRFAGRGAPRDRRVVAALAGEQTEGSEVGDDRNGEIKPEEAQEIWKVMLEQFKAEALRMQALSMQAYDVYSERTREVLLEASEKLKIQADKAQKDLSVVATEIGQEGQEYLMMAARNSPDSIKDITTTFRALGKLNWPSEYEDYHVGIPFGTFLTVGGFLNFMLAGSTSALRFGIILGLALLALGISSLRSQRDGGRRPRLLVKGQAAIASVIFFREFSVLLQNGWFPKIFMVLLSGVVAGFYFYRIAAGSPKELSSNSDSVN

SEQ ID NO: 19278 - protein, 647 aa, Oceanospirillum sp. MED92
MSIITITVPDLSGSTDVDVVEVLVKDGDTISEGDSLIVLETDKASMEVPATHSGVVVSMKVNVDDQVNEGDLLLELDTGASASAPAAEEAPAPAAAPEAAPAPAAAPAAASAVENVLIPDLSGATDVDVVEVLVKDGDTVSEGDSLIVLETDKASMEVPAPKDGVVVSMKINVDDQVNEGDLLMELSVGGAAAPAAAAPAVAPAQEAAPAAAPAPVAGGKENVLIPDLSGASDVDVVEVLVKDGDSVEEGDSLIVLETDKASMEVPAPKAGTVVSMKINEGDTVNEGDLLLELEVSGGAAPAPAAPAAAPAAPAPAAPAPSAPAKAAPAAGNVDKAALEKKNKTVHAGPAVRAIAREFGVDLSLVTGTGRRGRIVKEDVQAYVKGALKQLAEAPKGGAVTGGSGIPAIPEVDFSKFGEIEVEKLSKIAKVTRDNMSRCWLNIPHVTQFDKADITDLEAFRKEMKDEAAKSGVKLTPLPFMLKAIAIALKEHPKFNASLHADGEHIVYKKYVNIGMAVDTPNGLMVPVIKDADKKSIYELSKEAIELAGKAKDRKLKPDEMQGACFTISSLGGIGGTGFTPIVNAPEVAILGVSKADIEPRWNGKEFEPRKMLPLCLSYDHRAINGGDAGKFLTYLNGLLSDIRRLVL

SEQ ID NO: 19279 - protein, 130 aa, Streptococcus mutans UA159
MKFLHTCIRVKDLDASLKFYQEALDFKEVRRNDFPEYKFTLVYLQLEDDPDYELELTYNYDHEAYDLGNGYGHIAVGVDDLEATHQAHQKAGYTVTDLSGLPGKPKMYYFITDPDGYKIEVIRLKQFQEK

SEQ ID NO: 19280 - protein, 528 aa, Nicotiana plumbaginifolia
MGNCCVKPGKSAEKKKNKKNKPNPFSIDYGASGGGVKLVVLKEPTGQNIHDKYDLGRELGRGEFGVTYLCTEVDTGDKYACKSISKKKLRTAVDIDDVRREVEIMKHLPKHPNIVTLKDTYEDDNAVHIVMELCEGGELFDRIVARGHYTERAAAGILRTVVEVVQMCHRHGVMHRDLKPENFLFGNKKETAPLKAIDFGLSVFFKPGERFNEIVGSPYYMAPEVLKRNYGPEVDVWSAGVILYILLCGVPPFWAETEQGVAQAIIRSVIDFKRDPWPKVSDNAKDLVKKMLDPDPSRRLTAERVLEHPWLQNIKKAPNVSLGETVKARLKQFSVMNKLKKKALTVIAEFLSAEEVAGMRDAFEMMDTGKKGQINLGELKDGLQKLGHQTSDVDLQILMEAADVDGDGSLNYAEFVAVSVHLRKMANDEHLHKAFSFFDKNQSGYIEIEELRCALSDEDDNTSEEVINAIMHDVDTDKDGRISYEEFAAMMKAGTDWRKASRQYSRERFNSLSLKLMRDGSLQLENKA

SEQ ID NO: 19281 - protein, 481 aa, Methylobacillus flagellatus KT
MTKSLVWFRRDLRDYDHAALYHALKDSEQVVCAFVFDTDILDGLPRDDRRVEFIWESVRELKLALQERGGDLLVRHGKATEEIPALASVLGVECVYCNRDYEPAAVKRDDTVSQQLGTQGIAFKSFKDQVIFERDEIMTKSGTPFSVFTPYKNACLRKLDDFHLKAYPVDRYIHHLAQSAPQPMPSLESLAFARSNLKQLRLPTGMSGGMALFEDFSERMPRYRDARDFPALKGPSYLSVHLRFGTVSIRHLARTAWQQGGAGAETWLNELLWRDFYFQVLYHHPQVAEGHSFKPEFEHIPFPNGESLFKAWCEGRTGYPLVDAAMRQINQTGYMHNRLRMVAAGFLVKDLLIDWRWGERYFAEKLIDFDLAANNGGWQWAASTGCDAQPWFRIFNPVTQSEKFDPEGKFIRKYVPELQPCDDKEIHAPWLIPPLRQQALGLVIGKDYPAPVVDHAMRREQVLSLYRQASSRKKWPASSVL

SEQ ID NO: 19282 - protein, 640 aa, Corynebacterium glutamicum ATCC 13032
MCGLLGILTANGNAEAFVPALERALPCMRHRGPDDAGTWHDADAAFGFNRLSIIDIAHSHQPLRWGPADEPDRYAMTFNGEIYNYVELRKELSDLGYAFNTSGDGEPIVVGFHHWGESVVEHLRGMFGIAIWDTKEKSLFLARDQFGIKPLFYATTEHGTVFSSEKKTILEMAEEMNLDLGLDKRTIEHYVDLQYVPEPDTLHAQISRLESGCTATVRPGGKLEQKRYFKPQFPVQKVVKGKEQDLFDRIAQVLEDSVEKHMRADVTVGSFLSGGIDSTAIAALAKRHNPDLLTFTTGFEREGYSEVDVAAESAAAIGAEHIVKIVSPEEYANAIPKIMWYLDDPVADPSLVPLYFVAAEARKHVKVVLSGEGADELFGGYTIYKEPLSLAPFEKIPSPLRKGLGKLSKVLPDGMKGKSLLERGSMTMEERYYGNARSFNFEQMQRVIPWAKREWDHREVTAPIYAQSRNFDPVARMQHLDLFTWMRGDILVKADKINMANSLELRVPFLDKEVFKVAETIPYDLKIANGTTKYALRRALEQIVPPHVLHRKKLGFPVPMRHWLAGDELFGWAQDTIKESGTEDIFNKQAVLDMLNEHRDGVSDHSRRLWTVLSFMVWHGIFVENRIDPQIEDRSYPVEL

SEQ ID NO: 19283 - protein, 534 aa, Nicotiana plumbaginifolia
MGNCCSRGQPDDNEHTSNNDQKSNTKNDQSISNNSQQQQNNGSITPSKSPDPSSKPSKNSPIGPVLGRPMEDVRKTYSIGKELGRGQFGITHLCTHKQSGEQFACKTIAKRKLVNKEDIEDVKREVQIMHHLTGQQNIVELKGAYEDKHSVHLVMELCAGGELFDRIIAKGHYTERAAATLLRTIVQIVHTCHSMGVIHRDLKPENFLLLNKDEDSPLKATDFGLSVFYKQGDVFKDIVGSAYYIAPEVLKRRYGPEVDIWSVGVMLYILLSGVPPFWAETEHGIFNAILRGHVDFSSDPWPAISHGAKDIVKKMLTIDPKQRLTAIQVLNHPWIKEDGEAPDTPLDNAVLSRLKQFRAMNNFKKVALRVIAGCLSEEEIMGLKQMFKSMDTDNSGAITLEELKQGLAKQGTKLSDHEIEQLMEAADADGNGTIDYEEFITATMHMNRMDKEEHLYTAFQYFDKDNSGFITIEELEQALREFGMTDGKDIKEIVAEVDSNNDGRINYEEFVAMMRKGTPETAANLKKRRESFVA

SEQ ID NO: 19284 - protein, 932 aa, Vibrio parahaemolyticus RIMD 2210633
MTRYGLRARVITLTLAPTLIIGLLLSGFFSFNRYQDLEKQVITTGNSIIEPLAIASESHLLAESREAVRRLISYAHRKNSKLVRSIAVFDEHHELFVTSNFHPNFEALMFPKDKPIPKLGNSEIYENSLILRVPILSEGHYLSELSNENQGTKAIGYIAVEMDLSSLRLQQYQEVFSAFLVLILGLGLASVFASRLMHDVTQPITHMKNVVDRIRRGHLDVRIEGKMHGELDQLKNGINAMAVSLSEYHVEMQHSIDQATSDLRETLEQLEIQNVELDIAKKRAQEAARVKSEFLANMSHELRTPLNGVIGFTRQMLKTQLSNSQTDYLQTIEKSANNLLNIINDILDFSKLEAGKLALENIPFDFRESLEEVINLQATSAHEKGLEITLKVDPKIPPGLVGDPLRIQQILTNLVGNSIKFTERGNIDVSVEMRSQAGDSVELQFMVRDTGIGISERQQAQLFQAFSQADASISRRYGGTGLGLVITQKLVSQMGGEISLTSRLHQGSTFWFTLRLNSTEMPMSDLIEVELLTGKQLLLVEPNMQAASVTQQILSQEGILVTYRSSLPENEEHYDYVLLNLAANQTYDEQSVAAWIEQAKRMAPSVIMGTPSTELALADQIMTEHQIQCLTKPLSRRKLLQSLINEHVEAPQAITAPVETEESERLPLTVLAVDDNPANLKLISALLKERVETVTACSNGQQAVNLATEKKYDLIFMDIQMPLMDGVTACQNIKELELNKDTPVIAVTAHAMAGERDRLLAAGMDDYLTKPIEEHVLQQVLVHWNPNTCTESIGKVAPSYVDEPESEAPATAENTQPDVIIDWQAALKQSANKEDLAKDMLRMLIDFIPEVEEVVDHALEQDDYSREELIHVIHKLHGSSSYCGVPRLKSLCATLEHALRSGASIEEIEPEMFELQDEMIKVTTTAKLYLEQ

SEQ ID NO: 19285 - protein, 460 aa, Methanococcus maripaludis
MEFSEWYSDILEKAGIYDLRYPIKGCGVYLPYGFKIRRYSFEILRKLLDETGHDETLFPMLIPENLLAKEGEHIKGFEDEVFWVTHGGKTPLEVKLALRPTSETTMYYMMKQWIKVHTDLPLKLYQVVNTFRYETKHTRPLIRLREIMSFKEAHTAHATKKECDAQIEEALTLYKAFFDEIGVPYVISKRPEWDKFPGADYTMAFDTIYPDGKTMQIGTVHNLGQNFAKTFELEFETPDGEKDFVYQTCYGISDRAIASLISVHGDEKGLVIPVDVAPIQIVLIPLLFKGKEEIVMDKIKELNKTLKSEFRVHLDDRDIRPGRKYNDWELKGVPLRIELGPRDIENGHALIVRRDTGEKITVEYSNILEEVEKIVSMYKDNLKIKAEEKIKSFITVVDFESDVNALSEKVKAELLENKGIILIPFEESIYNEEFEELIDASVLGLTTYEGKEYISVARTY

SEQ ID NO: 19286 - protein, 169 aa, Oryza sativa; identical to SEQ ID NO: 577

SEQ ID NO: 19287 - protein, 509 aa, Nepeta racemosa
MVSLSYFLIALLCTLPFLLFLNKWRRSYSGKTPPPSPPKLPVIGNLHQLGLYPHRYLQSLSRRYGPLMQLHFGSVPVLVASSPEAAREIMKNQDIVFSNRPKMSIANRLFFNNRDVAFTQYGEYWRQIRSICVLQLLSNKRVQSFRRVREEETSIMVEKIMQLGSSSSTPVNLSELLLSLTNDVVCRVTLGKKYGGGNGSEEVDKLKEMLTEIQNLMGISPVWEFIPWLNWTRRFDGVDQRVDRIVKAFDGFLESVIQEHKERDGDKDGDGDGALDFVDILLQFQRENKNRSPVEDDTVKALILDMFVAGTDTTATALEWAVAELIKNPRAMKRLQNEVREVAGSKAEIEEEDLEKMPYLKASIKESLRLHVPVVLLVPRESTRDTNVLGYDIASGTRVLINAWAIARDPSVWENPEEFLPERFLDSSIDYKGLHFELLPFGAGRRGCPGATFAVAIDELALAKLVHKFDFGLPNGARMEELDMSETSGMTVHKKSPLLLLPIPHHAAP

SEQ ID NO: 19288 - protein, 241 aa, Clusia obovata
FHGRGGTVGRGSGPTHLAILSQPPDTIHGSLRVTVQGEVIEQSFGEEHLCFRTLQRFTAATLEHGMHPPDSPKPEWRALLDEMAVVATEEYRSVVFKEPRFVEYFRLATPELEYGRMNIGSRPSKRKPSGGIESLRAIPWIFAWTQTRFHLPVWLGFGAAFKHIIKKDIRNLHVLQEMYNAWPFFRVTIDLVEMVFAKGDPGIAALYDKLLVSEDLWAFGDDLRTNYEETKKLLLQIAGHK

SEQ ID NO: 19289 - protein, 607 aa, Glycine max
MTELPSVLPLQIMLILLLIKSGSSNNECGEWSCGSGQPPIRFPFKLIKGIKDECGYPGFCLYCTQKHETMLALSSVKLQVSYINYENHEIVLNDPENCLPHKFLQINDSLIHPYKFDDEAKTSKLSFFNCSSVEHQHLRNYQQSLSDSQDMISCPIYVSDLDDSVLSLDLTSCTKMFDIVTPVSAYGMQRNSLDLRWSEANCSQCKAKGKKCKWKNNRGDIECFDCKDKRKTIHVPKSFIYSAPGSILLGFVVIVVFKIIYHFRQKQEDQARVEKFLEEYRAEKPARFTYADVKRITGGFKEKLGEGAHGAVFRGKLSNEILVAVKILNNTEGEGKEFINEVEIMGKIHHINVVRLLGYCAEGIHRALVYNFFPNGSLQSFIFPPDDKQNFLGWEKLQNIALGIAKGIGYLHQGCNHPIIHFDINPHNVLLDDNFTPKISDFGLAKLCSKNPSLVSMTAARGTLGYIAPEVFSRNFGNVSYKSDIYSYGMLLLEMVGGRKNVDTSSPEDFHVLYPDWMHDLVHGDVHIHVEDEGDVKIARKLAIVGLWCIQWQPLNRPSIKSVIQMLESKEEDLLTVPPNPFHSSTSTIPSGFTSARLPLELEVIQE

SEQ ID NO: 19290 - protein, 241 aa, Clusia schomburgkiana
FHGRGVTVGRGGGPTHLGILSQPPDTIHGSLRVTVQGEVIEQSFGEEHLCFRTLQRFTAATLEHGMHPPDSPKPEWRALLDKMAVVATEEYRSIVFKEPRFVEYFRLATPELEYGRMNIGSRPSKRKPSGGIESLRAIPWIFAWTQTRFHLPVWLGFGAAFKHIIKKDIRNLHVLQEMYNAWPFFRVTIDLVEMVFAKGDPGIAALYDKLLVSEDLWAFGEDLRTNYEETKKLLLQIAGHK

SEQ ID NO: 19291 - protein, 457 aa, Porphyromonas gingivalis
MEDELLNFNYTDSGLPVIIKVIGVGGGGGNAVKNMYHGKVRDVSFLLCNTDLQALDRSEVPDRLVLGREVTNGLGAGSRPEVARRAAEASEADIRKILDDGHTRMVFVTAGMGGGTGTGAAPVIGRIARELNILTVGIVTIPFVFEGKRKILQALEGVEEMRKNVDALLVVNNERLRIIYKDLKLDNAFAKADETLTNAANGIAEMIMKEGTINLDFADVHTTLKDGGIAIISTGYGEGPDRMEQAINEALTSPLLNNNDIFKARRVLFNIYQGTEDPLGTDELSAINELTAKIETGFDTIWGYTTDPELGKKVKITILASGFDLDTTRESIRIGDNLGNVINDPISSREIETQNERDNDLINRYYRPDELEKVKVVDFKPIILNLDELDNDELIMALEEKPAYSRTGVLLSRIDNIRMRIAESAGRLKKDVVRSEESERPAFESERPSSPTTISFN

SEQ ID NO: 19292 - protein, 391 aa, Nicotiana plumbaginifolia
MEEDRLVFETSKGVEPIASFAEMGIKDDLLRGVYQYGFEKPSAIQQRAVLPIISGRDVIAQAQSGTGKTSMIALTVCQIVDTKSSEVQALILSPTRELAAQTEKVILAIGDYINVQAHACIGGKSVGEDIRKLEHGVQVVSGTPGRVCDMIKRRTLRTRGIKLLILDESDEMLSRGFKDQIYDVYRYLPPELQVVLISATLPNEILEITSKFMTDPVRILVKRDELTLEGIKQFFVAVEKEEWKFDTLCDLYDTLTITQAVIFCNTKRKVDWLTSKMRENNFTVSSMHGDMPQKERDAIMAEFRGGTTRVLITTDVWARGLDVQQVSLVINYDLPNNRELYIHRIGRSGRFGRKGVAINFVKSDDIKILRDIEQYYSTQIDEMPMNVADLI

SEQ ID NO: 19293 - protein, 314 aa, Rumex palustris
MEFPIINLEKVNGDERKATMDMIKDACENWGFFELVNHGIPVEVMDTVERLTKEHYKKSMEQRFKELVASNGLVNASAEVNDVDWECTFHLKHLPDSNISELPDLEEEYRKVMKDFALRLEKLAEDLLDLLCENLGLEKGYLKKAFYGARGPTFGTKVANYPPCPKPELIKGLRAHTDAGGIILLFQDDRVSGLQLLKDDEWIDVPPMPHSIVVNLGDQLEVITNGKYKSVLHRVIAQTDGTRMSIASFYNPGSDAVIYPAPELVEEAQEKTQVYPKFVFEDYMKLYSALKFQAKEPRFEAMKAVSTWDPIATA

SEQ ID NO: 19294 - protein, 241 aa, Clusia schomburgkiana
FHGRGGTVGRGGGPSHLAILSQPPDTIHGLLRVTVQGEVIEQSFGEEHLCFRTLQRFTAATLEHGMHPPVSPKPEWRALLDEMAVIATEEYRSIVFKEPQFVEYFRLATPELEYGRMNIGSRPSKRKPSGGIESLRAIPWIFAWTQTRFHLPVWLGFGAAFKHIIKKDIRNLHVLQEMYNAWPFFRVTIDMLEMVFAKGDPGIAALYDKLLVSEDLWTFGEELRTNYEETKKLLLQIAGHK

SEQ ID NO: 19295 - protein, 486 aa, Bifidobacterium longum DJO10A
MDLFRKKSVDQLVAESTPLKRTMRTFDLTMLGIGAIIGTGIFVLTGKGALTAGPALSVSFLLAAVCCGFAGLCYAEFAAMAPVSGSAYSYAYLAFGELIAFVIGWDLILEYALQAATVSAGWSGYFNKLLEGFGLHLPVELTAAYGTNPDVTTYFNLPGFVIVLIITWVLSIGINQTKRTNDVMVLIKLAIIVLFIVCAVWYVKPSNWQPFSPYGVYTFQPGSTQPYGIVPAASIVFFSFIGFDAVSSSAEETINPNKTLPRGILLSLAVSTVLYVIMTLIMTGVVPYKEFAKYIDAPVAGVILETGMNWLAVIVNLGALIGMTTVMLVQLYGQSRICYAMSRDGLFPKFFGHVHEKYRTPFKGTWFFGLLTAFAGGFININVLFELVNIGTLSAFIIVSAGILWMRKTQPNAPRGFRAPGVPVTPILAIVFCFVLIAGLNWETWVRFAVWFGLGLIVYFGYSRKRSKLGLEQKAGADAKVAATED

SEQ ID NO: 19296 - protein, 241 aa, Clusia schomburgkiana
FHGRGGTVGRGGGPSHLAILSQPPDTIHGSLRVTVQGEVIEQSFGEEHLCFRTLQRFTAATLEHGMHPPVSPKPEWRALLDEMAVVATEEYRSIVFKEPQFVEYFRLATPELEYGRMNIGSRPSKRKPSGGIESLRAIPWIFAWTQTRFHLPVWLGFGAAFKHIIKKDIRNLHVLQEMYNAWPFFRVTIDMLEMVFAKGNPEIAALYDKLLVSEDLWTFGEKLRTNYEETKKLLLQIAGHK

SEQ ID NO: 19297 - protein, 396 aa, delta proteobacterium MLMS-1
  misc_feature (2)..(2): Xaa can be any naturally occurring amino acid
MXKEKFERTKPHVNVGTIGHIDHGKTTLTAAITRVLSNKGYASATAFDQIDKAPEEKERGVTISTAHVEYESDNRHYAHVDCPGHADYIKNMITGAAQMDGAILVVGADDGPMPQTREHILLARQVGVPSIVVFLNKCDMVDDPELIELVEMELRELLSKYDFPGDDTPIIHGSALQALENPDDEAAAKPIWDLMAALDDFIPAPERDVDKPFLMPVEDVFSISGRGTVATGRIERGIVKVGDEIEIVGIRDTQKTTVTGVEMFRKILDEGQAGDNVGILLRGTKREEIERGQVLAKPKSITPHTKFKAECYILSKEEGGRHTPFFNGYRPQFYFRTTDVTGVVTLGEGVEMVMPGDNVTVDAELITPIAMDEGLRFAIREGGRTVGAGVINKIIS

SEQ ID NO: 19298 - protein, 224 aa, Colwellia psychrerythraea 34H
MSPFLIAPSILSANFARLGDDVAKVLAAGADVVHFDVMDNHFVPNLTFGPMICKSLRDYGITAPIDVHLMVKNVDTLIPGFAEAGADIITFHPEASDHIDRSLQLIKDNGCKAGLVLNPATPLHCLDFVMDKLDVILLMSVNPGFGGQSFIPTTLDKLRLVKEKIKQSGYDIRLQVDGGVKANNIAEIADAGADMFVAGSAIFSQDDYKVAIDEMRAELAKVSQ

SEQ ID NO: 19299 - protein, 114 aa, Triticum aestivum
MARTTATKLVLVALVAALLLVASDAAISCGQVSSALGPCLSYARGNGASPSAACCSGVRRLAGQVQTAADKKAACLCIKSAAGGVKEGTAAEIPSKCRVSVPYKISSTVNCNKI

SEQ ID NO: 19300 - protein, 512 aa, Parvularcula bermudensis HTCC2503
MTEIRVPTLGESVTEATVGEWLVKEGDRVSVDDPLVELETDKVSVSVPAPMAGVITSITAKEGDTVELDALLGEIGEANGTKASSSASSSNGSEAAASSAPTNKDEGGEPIEVLAPSSGESVTEADVGEWLVKIGDQVAVDETLVSLETDKAAVDVSAPSAGTITEIRQKEGETVTPGTVLAIITQGGGAVPETKSPEKASSAKPDPAAAKSASTTDRAALSPAPRRMIQENGLDPASIAGSGKDGRITKGDVVSYLKDQEAKPTPTPSTPSPSAPRDLGEREERVKMSRLRQTIARRLKESQNTAAMLTTFNDVDMSAVMEVRSQYKDLFEKKHGVKLGFMSFFVKACVHALREIPDVNAEIDGTDIIYKDHYDIGIAVGTEKGLVVPVLRDAEQKSLAEIEKGITDFGRRARDGQLSLEEMQGGTFTITNGGVYGSLMSTPILNMPQSGILGMHRIEKRPIVVGNEIVVRPMMYLALSYDHRIVDGKGAVTFLVRVKENLEDPQRLLLDL

SEQ ID NO: 19301 - protein, 487 aa, Bacillus anthracis str. 'Ames Ancestor'
MTVQTAQIVKNYIGGEWVESISTKMEAVYNPATGEVIAQVPLSTKVDVEQAVLAANEAFKSWSKTAVPRRARILFKYQQLLVDNWEELAKLITIENGKSYNEAYGEVLRGIECVEFAAGAPTLMMGKQLPDIATGIESGMYRYPIGVIGGITPFNFPMMVPCWMFPLAIACGNTFVLKPSERTPLLAARLAELAEEAGLPKGVLNIVNGAHDVVNGLLEHKLVKAISFVGSQPVAEYVYKKGTENLKRVQALAGAKNHSIVLNDANLELATKQIISAAFGSAGERCMAASVVTVEEEIADQLVERLVAEANKIVIGNGLDEDVFLGPVIRDNHKERTIGYIDSGVEQGATLVRDGREDTAVKGAGYFVGPTIFDHVTKEMKIWQDEIFAPVLSIVRVKSLDEAIEIANESRFANGACIYTDSGASVRQFRETIESGMLGVNVGVPAPMAFFPFSGWKDSFYGDLHANGTDGVEFYTRKKMLTSRWEK

SEQ ID NO: 19302 - protein, 241 aa, Clusia nemorosa
FHGRGGHVGRGGGPTHLAILSQPPDTIHGSLRVTAQGEVIEQSFGEEHLCFTTLQRFTAATLEHGMHPPDSPKPEWRALLDEMAVVATEEYRSIVFKEPRFVEYFRLATPELEYGRMNIGSRPSKRKPSGGIESLRAIPWIFAWTQTRFHLPVWLGFGAAFKHTIKKDIRNLHVLQEMYNAWPFFRVTIDLVEMVFAKGDPGIAALYDKLLVSEHLWAFGEDLRTNYEETKKLLLQIAGHK

SEQ ID NO: 19303 - protein, 407 aa, Parvularcula bermudensis HTCC2503
MPSDIQGALSRLSPLLDYEQHLQSIVGLLQSPTELIQRQLIIEREDGRSDALDAWRCRYNDFLGPTKGGLRFSPGVNADEVQRLAFLMTLKCALVGLPFGGAKGGVKVDISQCNDRERARIAHEFGRRFSDILGPERDIAAPDVGTGAPEMAAIARGYDRMGAGRGVVTGKPLDLGGIDLRFGATGKGAAIVVQSMRETLGLAEGKSARIAIQGFGGAGQAFARAMAENGDDLVAFADSTGTVSDPDGLNVEDMIEAKGQGNLSYTEESEAIFDKECDILCLAALGDAINRDRADRVGAKAVIEISNAGVAPEADASLRAKGVKICPDILVNAGGVIASYHEWVAYRTGNAQAIGDAEAQWRKSLISAASAVTEKCSVTDGDLRQAALLCALSRLDGAARHQGVYHR

SEQ ID NO: 19304 - protein, 381 aa, Staphylococcus aureus subsp. aureus MRSA252
MLTEQEKDIIKQTVPLLKEKGTEITSIFYPKMFKAHPELLNMFNQTNQKRGMQSSALAQAVMAAAVNIDNLSVIKPVIMPVAYKHCALQVYAEHYPIVGENLLKAIQDVTGLEENDPVIQAWAKAYGVIADVFIQIEKEIYDQMMWIGFKPFKITNIKQESEDIKSFTVETDAYDFSQYVPGQYITVDVSSDKLPYRAKRHYSIVSGDKNHLTFGVKRDVTTEHEGEVSTILHDEIKEGDMINLAAPVGGFVLENTTEPQLFLGSGIGVTPLVAMYEAASAKGLDTQMVQVAENEQHLPFKDNFNSIANHYDNAKLYTHLKGEQGYIGAEELKAFLANKPEIYICGGTKFLQSMIEALKSLNYDMDRVHYETFIPRLSVVV

SEQ ID NO: 19305 - protein, 210 aa, Mesorhizobium loti MAFF303099
MTPKAVFWDMDGTLVDSEPLHEAALVAAMRNVGLKPPADLHERVLGVAAWPVYEMMRDEFGLDLPFDDWIMRKYEHYLPLVEGLKPRPGAIEVFNELRALGVQQAVVSNSDRMIVDANLRMVGLFYPGMKTISRNDVRDGKPHAEPFLRAAYLADVDPAHAVAVDDSWPGAMAGLAAGMKTIFWPEKPMEGPPGAIVINSAEELRAQLGL

SEQ ID NO: 19306 - protein, 314 aa, Scenedesmus vacuolatus
NGFGRIGRNFLRCLETRQNSLLEVIAINDSGGVKQASHLLKYDSTLGKFDADVKIVDDGHISVNGKSIRVVSSRDPTKLPWGEMEIDLVIEGTGVFIDTPGASKHIEAGAKKVLITAPAKGSDIPTYVVGVNAHDYKHSDAIISNASCTTNCLAPFVKVLDEKFGIVKGTMTNTHSYTGDQRLLDASHRDLRRARAAALNIVPTTTGAAKAVALVLPKLKGKLNGIALRVPTPNVSVVDLVVQVEKKTFAEEINNAFKEAAAGSLNGVLAVSDEPLVSVDFRCTDVSSTIDSSLTMVMGADMVKVVAWYDNEWG

SEQ ID NO: 19307 - protein, 333 aa, Ipomoea purpurea
MLELPKADTNLTVWKGVMEEEGSFDEAIAGCEGVFHVATPMDFDSKDPENEVIKPTINGVLNIINSCVKAKTVKRLVFTSSAGTLNVQPQQKPVYDETCWSDLDFIYAKKMTGWMYFASKILAEKEAWKATKEKKIDFISIIPPLVVGPFITPTFPPSLITALSLITGNEAHYSIIKQGQYVHLDDLCEAHIFLYEHPKAEGRFICSSHHTTIHGLADMITHNWPEYYIPSQFKGIEKELAVVYFSSKKLQDMGFQFKYSLEDMYRGAIETLRKKGLLPYSTKEAAAIEEEQETVPLKVEEPTAIEQKQETVPLKFEEPTAIEQKQEVVPLKA

SEQ ID NO: 19308 - protein, 391 aa, EDTA-degrading bacterium BNC1
MAKGKFERTKPHVNIGTIGHVDHGKTSLTAAITKYFGEFKAYDQIDAAPEEKARGITISTAHVEYETENRHYAHVDCPGHADYVKNMITGAAQMDGAILVVSAADGPMPQTREHILLARQVGVPAIVVFLNKVDQVDDPELLELVELEIRELLSKYEFPGDDIPIVKGSALAALEDSNKEIGEDAVRQLMAEVDKYIPTPERPIDQPFLMPIEDVFSISGRGTVVTGRVERGVVKVGEEVEIVGIRPTSKTTVTGVEMFRKLLDQGQAGDNIGALLRGIDREGVERGQVLAKPGSVTPHTKFKAEAYILTKEEGGRHTPFFTNYRPQFYFRTTDVTGVVTLPEGTEMVMPGDNVTMDVTLIVPIAMEERLRFAIREGGRTVGAGIVASITE

SEQ ID NO: 19309 - protein, 408 aa, Methylobacillus glycogenes
MALIVQKYGGTSVANPERIGNVARRVARHKALGQQVVVVVSAMSGETNRLIGLAKEVMPNPHPRELDVLVSTGEQVTIALLSMALMELGVKAKSYTGSQVSIVTDNAHTKARILKIDEERIRKDLDDGYVVVVTGFQGVDEHGNITTLGRGGSDTTGVALATALKADECQIYTDVDGVYTTDPRVVPEARRLKSVTFEEMLEMASLGSKVLQIRSVEFAGKYKVKLRVLSSFEEEGEGTLITFEDDNNMEQPIISGIAFNRDEAKITVLGVPDRPGIAYQILGPVADANIDVDIIIQNVAADGTTDFTFTVHKNDLQKALDILRDKVQGHIGAREIIGDDKTAKVSVVGVGMRSHVGIVSQMFRTLAEEGINIQMISTSEIQISVVIDEKYMELAVRVLHKAFGLEEV

SEQ ID NO: 19310 - protein, 233 aa, Scenedesmus vacuolatus
LAIPPFNYPVNLAVSKLAPALMAGNTVVLKPPSQGVVAGIHMIKCFQAAGLPAGTVNLVTGKGSEIGDFLTTHPAVNCISFTGGDTGIAISRKAGMVPLQMELGGKDACIVCSDADLDLAATHIIKGGFSYSGQRCTAVKVVLVMQDIADELVRKVHAGVQKLKVGRPEDNADITAVVSEGSANFIQGLVEDAKAKGATFLTDWKREGNLLWPVLLDNVTADMRIAWEEPFGP

SEQ ID NO: 19311 - protein, 370 aa, Anthurium andraeanum
MVPAATPFLPTTAEEATLRPSFIRDEDERPKVPHNQFSDAIPVLSLAGIDDSDGSPRRAELCREIVEACEGWGIFQVVDHGVDPGLVADMTRLATEFFALPPEDKLRYDMSGGKKGGFIVSSHLQGEAVQDWREIVTYFSYPVRARDYTRWPDKPEGWRAVVEAYSEGLMGLACKLLGVLSEAMGLDKEALAKACVDMDQKVVVNFYPRCPQPDLTLGVKRHTDPGTITLLLQDQVGGLQATRDGGKTWITVQPVEGAFVVNLGDHGHLLSNGRFKNADHQAVVNSERSRLSIATFQNPAPEGVVYPLAVREGEKPVLDEPISFSEMYRRKMSRDLELARLKKQAKLQQQDVLAKAEDANKHKALDEILA

SEQ ID NO: 19312 - protein, 239 aa, Thiomicrospira crunogena XCL-2
MAHFTEEMLDTHLTEEHFSHRMGWLRAAVLGANDGIISVVSLLVGVIASGAEKDAILLVAVAALVAGALSMAAGEYVSVSSQSDTEKADLEKEKIALEEDWETEHAELALIYRQRGVSEATANQVATELMEHDALGAHARDELGLSEIHTARPLQAAFASAASFVSGAAVPVILVAILPMENLGIIIASSSLALLAILGAVAAKTGGANMLKGALRMSIWGFLAMALTTYVGLVFGAMG

SEQ ID NO: 19313 - protein, 564 aa, Bacillus licheniformis ATCC 14580
MRRTKEGHLETSLRGKDVLSIPTLNKGVAFSLEERKNLGLEGLLPPTVLSLDQQAERAYEQFSRQPDRLRQNVYLNDLQNRNEVLFYKLLQNHLREMLPVVYTPTVGEAIQEYSHEYRRPHGVYLSIDDMDGIETAFKNLQASADDIDLIVATDSESILGIGDWGVGGINIAIGKLAVYTAAAGIDPSRVIPVVLDVGTNNEKLLNDPLYIGNRHPRVEGERYEQFIDAYVETALKLFPNALLHWEDFGNKNARNIMSKYNHKIATFNDDIQGTGAITLAAILAAVKKTGTSLKDHRVVIFGPGSAGIGIADQIRDTMVLEGLSEEEANRAFWTVDYRGLLTTGMDQIMDFQEPYLRDTEEVKDWKRNEKGEISFEEVIRQVKPTILIGTSGVAGAFSEEIIKEMAAHTERPVILPMSNPTHLAEAVPEDLFKWTDGKALVATGSPFEAVEYNGVKHEIGQSNNAFVFPGLGLGTIVAKAKVITNGMFAASANAVANMVDHEKPGAGLLPKIDDLQDVSVQVAIDVVKAAIKDGVAQVQPEDVEKAVREAMWRPEYKTIVAKQD

SEQ ID NO: 19314 - protein, 552 aa, Solanum tuberosum
  misc_feature (1)..(1): Xaa can be any naturally occurring amino acid
XQVSGHRRYAAVYSEVQNSRLDHPLPLPSVLGSPFKVVDGPPSSAAGHPEEIAKLFPSLYGQPHVSLVPDDSGDVAMNQILKIGVVLSGGQAPGGHNVISGIFDYLQTHCKGSTMYGFRGGPAGVMKGKYVVLTPEFIYPYRNQGGFDMICSGRDKIETPEQFKQAEETAKKLDLDGLVVIGGDDSNTNACLLAENFRSKNLKTRVIGCPKTIDGDLKSKEVPTSFGFDTACKIYAEMIGNVMIDARSTGKYYHFVRLMGRAASHITLECALQTHPNVTLIGEEVFAKKLTLKNVTDYIADVVCKRAESGYNYGVILIPEGLIDFIPEVQQLIAELNEILAHDVVDEAGVWKKKLTPQCLELFELLPLAIQEQLLLERDPHGNVQVAKIETEKMLIQMVETELDQRKQKGAYNAQFKGQFHFFGYEGRCGLPSNFDSTYCYALGYGAGSLLQSGKTGLISSVGNLAAPVEELTVGGTALTALMDVERRHGKFKPVIKKAMVELEGAPFKKFASKREEWALNNRYINPGPIQFVGPVANKVNHTLLLELGVDA

SEQ ID NO: 19315 - protein, 292 aa, Methanocaldococcus jannaschii
MIRIGTRGSKLALYQANKVAELLKNLGYKVEIKIIKTTGDRVLDKKLSDIGIGVFTKELDLAMLNNEIDIAVHSLKDIPTIWNENLMVGAVLERDSYHDLLIWNKDIDFNEDSKIVIGTSSMRRRAFLKFIYPNAKFELLRGNVDTRLRKLKEGLYDAIVLSEAGIIRLGVSLEDFNYKRLDILPAPAQGIIAVACKRDDEEMKSILKEINHERTYLESLCERTALNEFGGGCSVPFGALAVYDEKNELLKLKAAVVTNDELKNASGEVKCKIDEIDKAVELGKKIGLKLKN

SEQ ID NO: 19316 - protein, 129 aa, Listeria monocytogenes
MTAKMLHTCIRVKNLTESITFYEKALGLKEVRRKDFPDFEFTLVYMAFEEGGFELELTYNYDQKEAYDLGNGYGHLAVGVLDVRALLKEHQEAGFTVTDLKGLPGEDPFYYFLTDPDGYKTEIIQDGAL

SEQ ID NO: 19317 - protein, 477 aa, Glycine max
  misc_feature (239)..(239): Xaa can be any naturally occurring amino acid
  misc_feature (260)..(260): Xaa can be any naturally occurring amino acid
MWGWMVGEARRAACNWNWVSLRSMGGGPRTFPGGVNKWKWKRMHEKLARDKQNRLIQQEKQLYPARIRSHIRSSLSPDHRSAAAATHRPLSPNDHFKALADRFVKDGAEDLWNNHDGPLTPNPTTPNLDFCPKHTRGYRAVPEVGNSRVGAHKYRFWRKGSDDSSSGESESEIEVELSMKKRGSSASLGEYDVKRERRVVPKTSPEFEFISYELNKRKLSQIEDQQSEQQQSNESILSXQGMDAVVKAKTGTGKNVAFLXLKAMSSNTSQRVPPIYVRIPAPARELANQVAAVAKVLLKYHDAIRVQTLVGGIRFKVDQKRLESDPCQILVATPGRLLDHIENKSGISLRLMGLRTLVLDEADHLLDLGFRKDVEKIVDCLPRQQQSLLFSATIPKEVRCVSQLVLKREHKYVDTVGMGCVETPVKVKQSYLIAPHESHFQLVHHILKEHILQTPDYKVKHRCCFRFQIALLYILWF

SEQ ID NO: 19318 - protein, 486 aa, Bacillus firmus
MNSGVHVGNSDSLKAVWFRRDFRLHDHTALKHAIEAIEKHGGKWLAFFYLDPKTASVEPVHHDYFFQTVMQFKQMLKTNGGDLYIITGTIEGGQLSKLLQAFPEIDAVYANDDRVGDGRLRDEAAEHFLAKQSIPFYTFEDAYLTEPDQVLKKDGTPYKVFTPYYKAWAKERKRTPAVIKRDVLLGSVHKGTAPDREAETLFNNLIKKCSYDWSAIGEEHAIKRLQMFTKKRLSGYKANRDFPSITGTSRLSPYIKTGAVSSRSIYYHILNAEADSYSAETFLKELAWRDFYRMVHFYEPDCKDREIMEGYRELNWSHDQDDLTSWKRGETGFPIVDAGMRQLLNEGWMHNRLRMITASFLTKDLLIDWRLGERYFERMLIDYDPSSNIGGWQWAASVGTDAVPYFRIFNPVTQSKRFDENGTYIRTYIPELNHVPDHYIHEPWKMSEEEQVKYKCRLDEDYPLPIVDHSKQRKKALSFFKGDDEE

SEQ ID NO: 19319 - protein, 675 aa, Corynebacterium glutamicum ATCC 13032
MAFSVEMPELGESVTEGTITQWLKSVGDTVEVDEPLLEVSTDKVDTEIPSPVAGVILEIKAEEDDTVDVGGVIAIIGDADETPANEAPADEAPAPAEEEEPVKEEPKKEAAPEAPAATGAATDVEMPELGESVTEGTITQWLKAVGDTVEVDEPLLEVSTDKVDTEIPSPVAGTIVEILADEDDTVDVGAVIARIGDANAAAAPAEEEAAPAEEEEPVKEEPKKEAAPEAPAATGAATDVEMPELGESVTEGTITQWLKAVGDTVEVDEPLLEVSTDKVDTEIPSPVAGTIVEILADEDDTVDVGAVIARIGDANAAAAPAEEEAAPAEEEEPVKEEPKKEEPKKEEPKKEAATTPAAASATVSASGDNVPYVTPLVRKLAEKHGVDLNTVTGTGIGGRIRKQDVLAAANGEAAPAEAAAPVSAWSTKSVDPEKAKLRGTTQKVNRIREITAMKTVEALQISAQLTQLHEVDMTRVAELRKKNKPAFIEKHGVNLTYLPFFVKAVVEALVSHPNVNASFNAKTKEMTYHSSVNLSIAVDTPAGLLTPVIHDAQDLSIPEIAKAIVDLADRSRNNKLKPNDLSGGTFTITNIGSEGALSDTPILVPPQAGILGTGAIVKRPVVITEDGIDSIAIRQMVFLPLTYDHQVVDGADAGRFLTTIKDRLETANFEGDLQL

SEQ ID NO: 19320 - protein, 127 aa, Schizosaccharomyces pombe
MAAINIVKKRTKPFKRHQSDLFKRVGESWRKPRGIDSCVRRRFRGTISMPKIGYGNNKKTRYCMPNGLKAFLVRNVSDVELLLMHNKTYAAEIASNVSARKRVEIVEKARALGVKVTNAGAKVRSQE

SEQ ID NO: 19321 - protein, 241 aa, Clusia aripoensis
FHGRGGTVGRGGGPSHLAILSQPPDTIHGSLRVTVQGEVIEQSFGEEHLCFRTLQRFTAATLEHGMHPPVSPKPEWRALLDEMAVVATEEYRSIVFKEPQFVEYFRLATPELEYGRMNIGSRPSKRKPSGGIESLRAIPWIFAWTQTRFHLPVWLGFGAAFKHIIKKDIRNLHVLQEMYNAWPFFRVTIDMLEMVFAKGNPEIAALYDKLLVSEDLWTFGEKLRTNYEETKRLLLQIAGHK

SEQ ID NO: 19322 - protein, 356 aa, Oryza sativa (japonica cultivar-group)
MRLALAASLLVISCFIVVKIRKSGKFQLRIIGKNSNPKENIEELLDNYGSLAPKRYKYSQLKDMTGSFSEKLGEGGYGMVYKGTSPDGHSVAVKFLHDLTRNGEEFVNEVISIRRTSHVNVVTLVGFCLEGSKRALIYEYMPNGSLEKFIYAENSKTTLGWDKLYDIAVGIARGLEYLHRGCNTRIIHFDIKPHNILLDHDFVPKIADFGLAKLCNPKESYLSMAGMRGTIGFIAPEVFSRRFGVVSTKSDVYSYGMMLLEMVGGRKNLKASVDNPSEMYFPDWIYRCLADVGSLHSFDMEHETEEIARKMASIGLWCIQVSPSSRPTMSKVLEMFERSADELEIPPKHCFYSAIQ

SEQ ID NO: 19323 - protein, 241 aa, Clusia alata
FHGRGGTVGRGGGPTHLAILSQPPDTIRGSLRVTVQGEVIEQSFAEEHLCFRTLQRFTAATLEHGMHPPDSPKPEWRALLDEMAVVATEEYRSVVFKEPRFVEYFRLATPELEYGRMNIGSRPSKRKPSGGIESLRAIPWIFAWTQTRFHLPVWLGFGAAFKHIIKKDIRNLHMLQEMYNAWPFFRVTIDLVEMVFAKGDPGITALYDKLLVSEGLWAFGENLRTNCEETKKLLLQIAGHK

SEQ ID NO: 19324 - protein, 372 aa, Arabidopsis thaliana
  misc_feature (358)..(358): Xaa can be any naturally occurring amino acid
MSRVSPKTVDDAVKALVKEGNEKSRTEKPQLLEEDGFFYLVVALKKIPQRNFTNAYRIPLPHPLINTTEDSPELCLIIDDRPESGLTEEDAKKNIKSENIPITKVVKLSKLKSDYGSFESKRKLCDSYDMFFSDRRVIPMLPKLIGKKFFQSKKTPVAIDLKHMNWKEQIEKACGAAMFFMRTGSCSAIKVAKLSMESDDIVENVTATLNGVVDVLPSRWKYIRSLHLKLSESLSLPLYQTVPYLQLKIDPLGVEEVKNGEGLAKSDVDDSSSKSVKTKKKNGKIHEVRYMDSNVSETLGDDEFDRSVGEDEVADDLNASGDKKKRKKMSSSKSAVSGKPDIVKSKNGQKSKKLKKDXDESGGGFKAKTKRR

SEQ ID NO: 19325 - protein, 241 aa, Clusia venosa
FHGRGGTVGRGGGPSHLAILSQPPDTIHGLLRVTVQGEVIEQSFGEEHLCFRTLQRFTAATLEHGMHPPVSPKPEWRALLDEMAVIATEEYRSIVFKEPQFVEYFRLATPELEYGRMNIGSRPSKRKPSGGIESLRAIPWIFAWTQTRFHLPVWLGFGAAFKHIIKKDIRNLYVLQEMYNAWPFFRVTIDMLEMVFAKGNPGIAALYDKLLVSEDLWTFGEKLRTNYEETKKLLLQIAGHK

SEQ ID NO: 19326 - protein, 308 aa, Staphylococcus epidermidis RP62A
MRKLIVGSRRSKLALTQSQQFIDKLKFIDPSLDIEIKEIVTKGDKIVDKQLSKVGGKGLFVKEIQNELFNKEIDMAIHSLKDVPSMIPDGLTLGCIPDREIPFDAYIAKNHIPLQELSEGSIVGTSSLRRGAQILSKYPHLKIKWIRGNIDTRLKKLETEDYDAIILAAAGLKRMGWSDNIVTTYLDRDILLPAIGQGALGIECRSDDKELLDLLSKVHNHDVAQCVTAERTFLSEMDGSCQVPIGGYATIAQDNQIEFTGLIMSPDGKERYEHTALGTDPVKLGIEVSQVLKKQGAYDIIKKLNEAE

SEQ ID NO: 19327 - protein, 347 aa, Anthurium andraeanum
MMHKGTVCVTGAAGFVGSWLIMRLLEQGYSVKATVRDPSNMKKVKHLLDLPGAANRLTLWKADLVDEGSFDEPIQGCTGVFHVATPMDFESKDPESEMIKPTIEGMLNVLRSCARASSTVRRVVFTSSAGTVSIHEGRRHLYDETSWSDVDFCRAKKMTGWMYFVSKTLAEKAAWDFAEKNNIDFISIIPTLVNGPFVMPTMPPSMLSALALITRNEPHYSILNPVQFVHLDDLCNAHIFLFECPDAKGRYICSSHDVTIAGLAQILRQRYPEFDVPTEFGEMEVFDIISYSSKKLTDLGFEFKYSLEDMFDGAIQSCREKGLLPPATKEPSYATEQLIATGQDNGH

SEQ ID NO: 19328 - protein, 369 aa, delta proteobacterium MLMS-1
MMTTSNHDPLRRLQRRLRRRRLDLLLVSQPENRRYLSGFTAADHGINESAGVLLIPAAGAPWLLTDGRYRLQAEEEADGFETMVYPRGLFALLRRLLKRLLPGRLAFESHYLLHSVYLQLSKLAAELEVELVPLVGLVEEQRQLKSASELALIEEAVRLNEAVFAEVYQQLRPGLSEREVAGLIEETMRRRGAEGPSFPTIVAGGPNGAMPHAVPGERPLAEGEPIIIDMGLKIGGYCSDMTRTVVLGQPDAKTIGISRLVRRAQLAGLEALRPGVTGRHVDRLARRVIEAAGYGDYFGHGLGHGVGLNVHEGPSLNYRNRKLLRPGMVLTVEPGIYLPGWGGVRLENMAVVTEQGCRLLNRDTTCLDF

SEQ ID NO: 19329 - protein, 241 aa, Clusia rosea
FHGRGGTVGRGGGPSHLAILSQPPDTIHGSLRVTVQGEVIEQSFGEEHLCFRTLQRFTAATLEHGMHPPVSPKPEWRALLDEMAVIATEEYRSIVFKEPKFVEYFRLATPELEYGRMNIGSRPSKRKPSGGIESLRAIPWIFAWTQTRFHLPVWLGFGAAFKHIIKKDIRNLHVLQEMYNAWPFFRVTIDMLEMVFAKGDPGIAALYDKLLVSEELWTFGEKLRTNYEETKKLLLQIAGHK

SEQ ID NO: 19330 - protein, 832 aa, Arabidopsis thaliana
MAITDFFAGEIATELLKQLFTISTTAWRYKNTAKQLLTLIDSIRPTIKEIQYSGVELPAHRQAQIGMLFDTLEKGKKLTDKVLSSKRWNLYRQLTLARKMEKLEKTISNFLKNEVFTHILADVHHLRADTSVRLDRVDMSLDRVIQQVGSMKIGGGGLISEAMKRAEAMEIETNDDSEKFGVGLELGKVKVKKMMFESQGGVFGISGMGGVGKTTLAKELQRDHEVQCHFENRILFLTVSQSPLLEELRELIWGFLSGCEAGNPVPDCNFPFDGARKLVILDDVWTTQALDRLTSFKFPGCTTLVVSRSKLTEPKFTYDVEVLSEDEAISLFCLCAFGQKSIPLGFCKDLVKQHNIQSFSILRVLCLAQVANECKGLPLALKVTGASLNGKPEMYWKGVLQRLSKGEPADDSHESRLLRQMEASLDNLDQTTKDCFLDLGAFPEDRKIPLDVLINIWIELHDIDEGNAFAILVDLSHKNLLTLGKDPRLGSLYASHYDIFVTQHDVLRDLALHLSNAGKVNRRKRLLMPKRELDLPGDWERNNDEHYIAQIVSIHTGEMNEMQWFDMEFPKAEILILNFSSDKYVLPPFISKMSRLKVLVIINNGMSPAVLHDFSIFAHLSKLRSLWLERVHVPQLSNSTTPLKNLHKMSLILCKINKSFDQTGLDVADIFPKLGDLTIDHCDDLVALPSSICGLTSLSCLSITNCPRLGELPKNLSKLQALEILRLYACPELKTLPGEICELPGLKYLDISQCVSLSCLPEEIGKLKKLEKIDMRECCFSDRPSSAVSLKSLRHVICDTDVAFMWEEVEKAVPGLKIEAAEKCFSLDWLDE

SEQ ID NO: 19331 - protein, 416 aa, Campylobacter upsaliensis RM3195
MITYEKKVLKNKLEVYALPVNKNSGVISVDIFYKVGSRNETMGKSGIAHMLEHLNFKSTKNLNAGEFDTIVKGFGGVDNASTGFDYTHYYIKCSKQNLEQSLGLFAELMQNLSLKDEEFQPERQVVLEERRWRTDNNPLGYLYFRLYNHAFLYHPYHWTPIGFYKDIENWSIEDIKSFHKSFYQPQNAILLVSGDVEPKDLFQKASKHFEKIKNTGKIPKIHTKEPKQDGARRAELTKETQTEFLALAFKIPNFKHKDIPALSALAELLGNGKSAIINEILVDKLSLVNEFYAFVNDSVDENLFMFILNCNPGVKAEEVEKKLLAILHSIKQGKISKRSLQRVKNNTRSDFIFSLNNASALSNIYGSYLARGDLEPLLNYEKNIAALELEDLVEVATKYFIRENSTTLILRKENNG

SEQ ID NO: 19332 - protein, 363 aa, Anthurium andraeanum
MATEVMTAVPAGSRVESLASSGIQAIPPEYVRPAEERVSLTDALEAARRAEDGPQIPTVDVAGFSSGDEAARRACAEAVRRAATDWGVMHVVNHGIPLELIRRMQAAGEAFFALPIEEKEKYANDQSSGNIQGYGSKLANNASGQLEWQDYFFHLIFPEDKANFSIWPKQPANYVEETREFGRQLRVVASKMLAMLSLGLGVEEGKLEAEVGGMEDLLLQMKINYYPRCPQPELAVGVEAHTDVSALSFILHNMVPGLQVHNEGQWVTARCVPDSIIMHVGDVVEILSNGQYKSILHRGLVNKEKVRVSWAVFCEPPRDKILLQPLPDILGQGHPAQFPPRTFSQHIQHKLFRKTQGDFATPN

SEQ ID NO: 19333 - protein, 137 aa, Zea mays
  misc_feature (119)..(119): Xaa can be any naturally occurring amino acid
DHQQWRRRWRIAMISSTVLGEAPQGLPTLGRRASSFAVVCSNKKIQTDQPYGIGGALTAQADANGRKVKVKGVYHCDHKYGANVNGYSPIYNEDDWTPTDDVYVVGTTGLLMCAVTLAXGSSVGGGLLAYRPCALSG

SEQ ID NO: 19334 - protein, 579 aa, Bacteroides fragilis NCTC 9343
MAKKVAEQLVDTLIEAGVRRIYAVTGDSLNEVNEAVRQNEVMKWIHVRHEETGAYAAGAEAQLTGLPGCCAGSSGPGHVHLINGLYDAHRSGAPVIAIASTIPTGEFGTEYFQETNTVKLFNDCSFYNEVATTPEQFPRMLQSALQTATTRKGVAVVGLPGDLAKKPAVKVESSEQIYPLASSVCPAEEDLIRLAGMLNHYERITLFCGIGCKGAHEEIIRMSETLNAPVAYTFKGKMEVQYDNPYEVGMTGLLGMPSGYYSMHEAEVLVMLGTDFPYSAFLPDDIKIVQVDIKPERLGRRAKVDLGLCGDVRSTLRALLPMLQQKKNDSFLRKQLKRYEGVKKDLAAYTEDKGKMDQIHPEYVMSEINNISSDDAIYTVDTGMTCVWGARYLQATGKRHMLGSFNHGSMANALPQAIGAALACPDRQVIALCGDGGLSMTLGDLETVVQYKLPIKIIVFNNRSLGMVKLEMEVDGLPDWQTDMLNPNFAQVAEAMGMTGFNVSDPEEVLNTLCNAFELEGPVLINVMTDPNALAMPPKIELGQMVGFAQSMYKLLINGRSQEVIDTINSNFKHIREVF

SEQ ID NO: 19335 - protein, 286 aa, Idiomarina loihiensis L2TR
MPAQIIDGKTIAATVRQAVKQQVKERIDSGLRAPGLAVVLVGSDAASEVYVGNKRRACEDVGFRSFDYDLPITTTQKELEKLIEELNDDDAVDGILVQLPLPAGLDATPILERIRPDKDVDGFHPFNIGRLSQRIPALRPCTPKGIMTLLEHTHVDLHGLNAVVVGASNIVGRPMSLELLLAGATTTVCHRFTKDLSDHVKRADIVVVAVGKAEFIPGEWIKPGAIVIDVGMNRLPDGRLTGDVEFSVAAERAGWITPVPGGVGPMTVASLIENTLQACVDYHDVR

SEQ ID NO: 19336 - protein, 415 aa, Picrophilus torridus DSM 9790
MEDLDPFTISRQQLQKAAKVMNLDKQALEILSYPREILQVSIPVKMDSGEVKVFTGFRVHYNNARGPTKGGIRYYEKENLSEVMALSAWMTWKTALLDLPLGGAKGGIICNPKELSQGELERLSRGYIDAIADFIGPDKDIPAPDVYTNPQIMAWMMDEYEKVMRRSSPGVITGKPLAVGGSEGRGDATAKGGMYVLREAARSIGLDLSKAKVAVQGFGNAGQYAVKFATEMFGAKVVAVSDSTGGIYAKDGVNYEKLLEHKRKDGTVMNYDGSENISEEEVLEQDVDVLIPAAIEDQIRGDNASKIKAKIILELANGPTTPEADEILYKNNVLVLPDFLSNAGGVTVSYFEWVQNVTGDYWDEETVYSKLDKKMTAATRSVLETSKRYEVDPRTAAYIIAVKKVADAMKARGWY

SEQ ID NO: 19337 - protein, 959 aa, Vibrio angustum S14
MTNTTFLQALSDDNDFSHRHNGPNALEQQRMLETIGVGSIDQLIAQTVPASIRLTEPMTLPQAQSEAAMLAELKQIAGKNIINKSYIGQGYYNTFTPNVILRNVLENPGWYTAYTPYQPEISQGRLESLLNYQQMIMDLTAMELANASLLDEATAAAEAMTLCKRAGKNKSNAFFISTDLHPQTIDVVTTRAKYVGFEIITGSAEDLAKHDVFGALLQYPASNGELQDLTDIIDAAHDKKTLVAVASDLLALTVLKAPGEMGADVVIGSAQRFGVPMGFGGPHAGFMATKDKHKRTMPGRVIGVSKDAKGNQALRMAMQTREQHIRREKATSNICTAQALLANMAAFYALYHGPEGLKKIGRRVHHFTAVLAAGLRNNGFELENQHFFDTLTIKTGNKTNALYQKALDAGINLRKYKDKLGVSIDETTLAEDIEQLLGLFTNQDLKVSMFSDDIAADEFAAIPPACRRSSAYLTHSVFSRYHSETQMMRYMKQLENKDYSLTHGMIPLGSCTMKLNAVAEMIPVTWPEFGQLHPFAPQAQTLGYQELAKNLSEMLCSITGYDAFSLQPNSGAQGEYAGLIAIQRYHEANGDSHRNVCLIPSSAHGTNPASAAMVSMKVVVVGCDELGNIDIDDLKAKIEKHRDALSCIMITYPSTHGVYEEVVQEVCDLVHEAGGQVYLDGANMNAQVGLTSPGFIGSDVSHLNLHKTFCIPHGGGGPGMGPIGVKSHLTPFLPGHVEDTNSDELQYAVSAAALGSASILPISYAYIAMMGEQGLTQATELAILNANYVMERLRPHYPVLYRGTEGRIAHECIIDLRPIKDASGISEEDIAKRLMDYGFHAPTMSFPVAGTLMIEPTESEDIAELDRFCDAMIAIKEEINLVQSGEWPLDDNPLVNAPHSQVDMMESEWNHAYSREVACFPSAHTKAAKYWPSVNRVDNVFGDRNLVCSCPSIENYIED

SEQ ID NO: 19338 - protein, 228 aa, Agrobacterium tumefaciens str. C58
MHSKVPPQTQIFSQEFAAFLFDMDGTLVNSIAVVERVWREWAVANGIEPNAFLQRIHGMRASEVIRREAVPGLDVDAEADMILRAEMDDVEGIIPIPGAADFLASLPAGKWAIVTSAVRELAEKRLAAAGITPPPVMICADDVVNGKPDPEGYRKAAERLGVAPESCVVFEDAPAGIQAGERMGAAVVVINVTHSHPIETPHLAIGSYGELDVVIDGNGGLKLTSSKA

SEQ ID NO: 19339 - protein, 599 aa, Oryza sativa
MAISGALFLPGIFQSLSILAVLGVLVTKSGAADFQEQPACVPFSCGHLEGIRYPFRLQGDPLGCGDEAYELVCRDGRAIIHINTGKYFVKDISYNESRFWVVDANLDNSSCPLPLWNNLPYFNDMGTKLYTSAVRWATFLNCSRAINNGMYMPVACLSGNTSFVYVLTTSSSYYVQNIEPSCGYLAVIPVDDRTKNVPDYASYADVVKFMRNGFPVSFPRVESPSHSPVIKACARDTFQFILAPLTVLTFLGYKYRKTRISIDAVEKFLRMQQAHGPKRYAYTEITAITGHFREKLGQGGYGSVYKGFLPGDGHVAIKMLSNSMCNGEEFISEVSTISRIHHVNVVRLVGFCSEELRRALVYEYMPCGSLDKYIFSPEKSLSWDKLNEIALGIARGIDYLHHGCDMQIMHFDIKPHNILLDSNFTPKVADFGLAKLYPRDDSLVPVSAARGTIGYIAPEMISRSFGTISCKADVYSFGMLLLDIAGGRRNREQHTSNSAHLYYPALVYDCLTQQEVSEISEDIGIHWVERKLCIVGFWCIQMKPAERPSMSEVVEMLESDDPDNLQVPPRPFFGVDDHISEMDDCCNSSSKSSAISEDD

SEQ ID NO: 19340 - protein, 394 aa, Arabidopsis thaliana
MAIMSDLPRDLLAEILSRVPLASLRSVRFTCKKWNDLSKDRSFLKKQIVEAKKKQLKSKEFEVIMMRNFRVYLTSVDLHNDVNPSFTPKGTLTSFSDDANQHQVDNVSSVFHCDGLLLCITKDLNFRLVVWNPYFGQTRWIQPRNSYHIKDIYAIGYDENKNHKILRLKDQYYDYDSHPRARICEFELYSFESNSWKVVLDVSPDWYIHSYHRGLSVKGNTYWYATEKHGYVNFLICFDFTTEKFGPRLPLPFNATESFTYDDVVTLSSVGEEQLALLFQSDATLMMEIWVTSKVDPTEVLWNKLFLAVDHDMIEFDYELKFVADAGSFFIDQKKNVVVVFDKDMNEHTHRGMAYIVGKNGYFKRVDIGEEAYTSCFPLVCSYVPSSVQIRQLT

SEQ ID NO: 19341 - protein, 102 aa, Pseudomonas stutzeri
MQVNISGVHLEVTDALRDYIEEKFDRLARHFDRIISVQVVLQVEKLKQKAEATLHVAGREVVGNAEHEDMYAAVDLLVDKLDRQLIKHKEKQLDHTQGAVTR

SEQ ID NO: 19342 - protein, 360 aa, Medicago truncatula
MSSIIKFSRFFSAVMTVIIISPSLHSSHYPALAIRSSIIHHIPHHDYRFYFHTSPFFRNADQCEPISREIGACHPSLVHVAITLDVEYLRGSIAAVHSILYHASCPENVFFHFLVTDTDLETLVRTTFPQLRFKVYYFDRNIVKNLISTSVRQALEQPLNYARNYLADLLESCVKRVIYLDSDLVLQDDIAKLWNTDLGLNTIGAPQYCHANFTKYFTAAFWSDPVFSTTFEKRKACYFNTGVMVMDLVKWRKKGYTERIERWMEIQKVERIYELGSLPPFLLVFAGHVAAIEHRWNQHGLGGDNVKGSCRDLHPGPVSLLHWSGSGKPWRRLDESKPCPLDALWEPFDLYGHRRRYESL

SEQ ID NO: 19343 - protein, 112 aa, Glycine max
  misc_feature (68)..(68): Xaa can be any naturally occurring amino acid
ARVPFVDKEFIRVAGNIDPEGKMINKDEGRIEIWTLQMTFDDEDHPYMAKHILYNHNEQSSDGVGYGXIDGLKAYDEQHATDRFMLNTGHTITCNTYTANELYHYRMISERV

SEQ ID NO: 19344 - protein, 466 aa, Mesorhizobium sp. BNC1
MPTQILMPALSPTMEEGNLSKWVKKEGDKVAPGDVIAEIETDKATMEVEAVDEGTLGKILVEEGAQGVRVNTPIAILLADGESADDLGKDAVTPPPARAQAPAEVHADQQAEGFPRPAATPKAATQPMPSDPDIPEGTEMVEMTVREALRDAMAEEMRRDADVLIMGEEVAEYQGAYKVTQGLLQEFGAKRVIDTPITEHGFAGVGIGAAFAGLKPIVEFMTFNFAMQAMDQIVNSAAKTLYMAGGQMGAPIVFRGPNGAAARVAAQHSQDYAAWYSHIPGLKVVMPYTAADAKGLLKAAIRDPNPVIFLENEILYGQSFQVPKLDDFVLPIGKARIHKQGRDVTIVSFGIGMTYAIKAEEELRGMGIDVEIIDLRTIRPMDLDTVVESVKKTNRLVTIEEGFPQSSVGDHIASKVMQRAFDYLDAPIITIAGKDVPMPYAANLEKLALPSVVEVVEAVKAVTYRA

SEQ ID NO: 19345 - protein, 241 aa, Clusia rosea
FHGRGGTVGRGGGPTHLAILSQPPDTIHGSLRVTVQGEVIEQSFGEEHLCFRTLQRFTAATLEHGMHPPDSPKPEWRALLDEMAVVATEEYRSVVFKEPRFVEYFRLATPELEYGRMNIGSRPSKRKPSGGIESLRAIPWIFAWTQTRFHLPVWLGFGAAFKHIIKKDIRNLHVLQEMYNAWPFFRVTIDLVEMVFAKGDPGIAALYDKLLVSEDLWAFGEDLRTNYEETKKLLLQIAGHK

SEQ ID NO: 19346 - protein, 367 aa, Brassica juncea
MALSAIGFEGYEKRLEVSFFEPSFFQDSKGLGLRALTRSQLDEILTPAACEIVSSLSNDHLDSYVLSESSFFVYPYKVIIKTCGTTKLLLSIPPLLKLAGELSLSVKSVKYTRGSFLCPGGQPFPHRSFSEEVSVLDGHFTKLGLNSVAYLMGNDDENKKWHVYAASAQTSSDCNNNVYTLEMCMTGLDKEKASVFYKNETGGENGSMTDNSGIRKILPKSQICDFEFEPCGYSMNSVEGDAISTIHVTPEDGFSYASFEAVGYDFNTLDLSQLVTRVLSCFEPKQFSVAVHSSVGSNAYKPEISVDLEDYGCRERTFESLGEESGTVMYQTFEKLGKYCGSPRSTLKCEWSSNNSCSSEDEKDEGI

SEQ ID NO: 19347 - protein, 132 aa, Picrophilus torridus DSM 9790
MILQFKNNMDEDLEKIKRARLNEIMNELQNRIKTLNESNFGTFVSEGVSVIDFWAPWCAPCHILSPLIEDLAEKYTKVKFGKVNGDENMRLLYQYNITGLPTVLFFKNGMLADRSVGVVPENVLEEKLKWLL

SEQ ID NO: 19348 - protein, 362 aa, Bacteroides thetaiotaomicron VPI-5482
MAKKIAEQLIDTLVESGVERIYAVTGDSLNEVNEAVRKNNKIQWIHVRHEETGAYAAAAEAQLTGRIGCCAGSSGPGHVHLINGLYDAQRSGAPVIAIASTIPSGEFGTEYFQETNTIKLFNDCSYYNEVATTPGQFPRMLQSAIQTAITRKGVAVVGLPGDLAKASSVSVDSSVKNYPAPPEVCPAEEDLIQLAELLNNHKRITLFCGIGCRGAHEEVIALSEKLNAPVVYTFKGKMEVQYENPYEVGMTGLLGMPSGYYSMHEAEVLLMLGTDFPYSAFLPDDIKIAQIDIKPERLGRRAKVDIGLCGDVRMTIQALLRMLDPKTDDTFLLKQLKRYEGVKKDLAAYTENKGDHCCPIKI

SEQ ID NO: 19349 - protein, 539 aa, Burkholderia vietnamiensis G4
MCKAAVTGIGCRSSMADLNPQITPAWQALERLAGHYALGFDLRQAFATEPKRFQQHSVRAPHMLVDLSKNLWDEPVVEQLLALAMQMGLPDRRSQLLNGEIVNHTEHQAAVHAALRLAFTSGTATALPAMAQNCADLSAMLAMAEIIRADVTVHDVVHIGIGGSSLGPELALQALRPYWRTQQRIHVVSNLDGHDLAETLAQCHPAHTLFVAASKSWSTFETLQNLHSATGWLQQSGINPADRIVAITAKPHVAQAAGVKHILRMPADLGGRYSVWSAVGLPVAVAIGKAGFRELLAGAAAMDAHFAQAPLVQNAPVLLGLLDVWYNSFLRMPSRCVAPYHHRLRRLPAYLQQLDMESNGKTVRQNGDAVAYATGMALWGESCTNGQHAFFQWLHQGPQRTQVEFVAASQAEHALPGHHTPLLANAVAQAQALMLGSKAGLGQLPGHQDFPGNRPSTFLLLDGPLSPPALGALLALYEHRTFVSGVVWGINSFDQWGVELGKELAQDILQRVPGGHWQGLDASTAGLLNAACVTSEAHS

SEQ ID NO: 19350 - protein, 335 aa, Nepenthes alata
YQWAFAIAAAGITSGSIAERTQFVAYLIYSSFLTGFVYPIVSHWFWSVDGWASASRASNLLLGSGVTDFAGSGVVHMVGGVSGLWGALIEGPRIGRFDRSGRSVILRGHSGSLVVLGTFLLWFGWYGFNPGSFLTILKAYGNNGGYFGQWSAVGRTAVTTTLAGSTAALTTLFGKRLLVGHWNVTDVCNGLLGGFAAITSGCSVVDPWAAIICGFVSSWVLIGFNKLAEKVKYDDPLEAAQLHGGCGMWGLIFTGLFATKKYVSEVYGGSPDRPHGLFMGGGGKLLAAQLIQIVVIFGWVTATMGPLFYGLKWLKLLRVKSEHEMAGMDMTSHGG

SEQ ID NO: 19351 - protein, 323 aa, Yarrowia lipolytica CLIB122
MTRSKFTEYKQVLRNSCVGKPQYTEKDYPDLDGKNFLVTGATGGVGLEATKLLLEKKSHVIMVGRSKTKSQSTLDELQKTYSHGTFDFVEADLSDLTTVERAGEYIRSKYTTLDGAILNAGVMAPPYSLTPQGHESQWGINVVAHFLLSKYISPALISAAQTAPKDTVRLVWVSSSVVAMSPYEGGIKFDDINHSKVKNPSPWTLYSQSKIGDAYLAYLWSKHHPDSGVLSVSLDPGNLASDLSRHTSWLSSIKNYVLYPPKYGAYTELSALLNPSVKNNEHLIPWGIEGHLRQDVDDGRRGKDGEELWQGLNKDVEGFFKEE

SEQ ID NO: 19352 - protein, 156 aa, Brassica napus
MATRLKSMATLPKLIQTMRNEAPKHSNPVLPSLRRAFSLYDQINLIDNVPEDQLRFQEFNETSFTVNGVKYEGSLLCVGNLLMSWTPRQFSDITPDSLSIFQTVRPIPELLIVGCGRNIHPVTPELRQFVKSIGMKLETVDSRNAASTYAGLHLAF

SEQ ID NO: 19353 - protein, 312 aa, Bacillus clausii KSM-K16
MEKKKIGLLVMAYGTPRKKEEIEPYYTHIRHGRKPSEEALADLQERYEAIGGTSPLARITDEQANGLAAVLNEQQEDIVFVPYLGLKHIDPFIEDAVQKMKNDGIETAVSIVLAPHFSTFSVQSYNKRAQEEADRIGGPTIYTIESWYKEPGFLQFWKEQIENEMKKADSIDDLCVIFSAHSLPEKIIQANDPYPEQLRETADLLADMANVPNYEIGWQSEGNTPEPWLGPDVQDLTRELYAKKGYKTFMYCPVGFVAEHLEVLYDNDYECKLVTDELGVRYLRPPMPNADTRFLKALADVVTKRLAAVVTK

SEQ ID NO: 19354 - protein, 728 aa, Glycine max
  misc_feature (445)..(445): Xaa can be any naturally occurring amino acid
TVGQRSWSSIISSPLRVLLPSFLFSESMVTSLAIIILVLLFQQTCLAKQHHHHPPCYSSCGEIHNITYPFRLKGDPIGCGDQDYELDCVENVTVMTLFSGKFHVQEINYKRYEIRLTDAGVVEDIACSIPRYFFNLYNFTYIGGLNYSAYGPLSFSGYPQYAVFLNCTTPVTDDPRYVAVKVNGNCDSSSVGHIYAILVTDDDDRFGFTLTDIKVGCRLKVATFANWKYNNREVNVSYSDINKWLHHGIWMSWFFPVICRDRCGKGVSCYIDQTTRETRCADSYCQIFGIQTYKCGIRNQILEYMRQILGYTVGYLKSVIMGYVNRIRYREQLTSWDSEAEFFEQNAIAIFLATRLLFGITLLLMLYIYMWRRRHYSMYENIEIFLLDSNLNPIRYEYREIRKMTKDFKVKLGEGGFGSVYKGKLRSGLDVAIKMLTKSKTRGQXFISEVATIGRIHHVNVVRLIGYCAEGEKHALVYEFMPNGSLDKYIFSKEESVSLSYDKTYEICLGIARGIAYLHQDCDVQILHFDIKPHNILLDDNFIPKVSDFGLAKLYPIKDKSIILTGLRGTFGYMAPELFYKNIGGVSYKADVYSFGMLLMEMGSRRRNSNPHTEHSSQHFFPFWIYDHFMEEKDIHMEEVSEEDKILVKKMFIVSLWCIQLKPNDRPSMKKVVEMLEGKVENIDMPPKPVFYPHETTIDSDQASWSDSTSSCKNIDKTKSNFSLENNS

SEQ ID NO: 19355 - protein, 108 aa, Escherichia coli
SDKIIHLTDDSFDTDVLKADGAILVDFWAEWCVWCKMIAPILDEIADEYQGKLTVAKLNIDQNPGTAPKYGIRGIPTLLLFKNGEVAATKVGALSKGQLKEFLDANLA

SEQ ID NO: 19356 - protein, 692 aa, Gloeobacter violaceus PCC 7421
MREALALSTAQICINNYQNFAVDPLLRRQPPVQVLRVLSSAELEACFSRSPWKFVAAVPIFCNGTLAGNLWICDEQERLLSAAQSALLEHAAGLVGERLEAEERLDEIHQRNLMYEKYIEMAPDQIGLLDSELRTLTVNAALSRFSGMPKEWILGKSLWEMGIPESILAQMADWEQLIRRVFETGEPGTTSFAYSVGDASCKLYCYSLAVPQFNCRGEVVAVLNITYDRAALEMPFNPEDWAGMGEQLMREVAAHRVTQEELARLNAELEERVRERTVRYKLLNQKLRAEIGERQRIEVELQAAQARAEAAARAKSDFLAAASHELRTPMHGIISMTDLLLESDLGAEQRELAAIIGYCGETMLSLINNILDISKIEAGRMELDVVPFELPRLIDSVVAMFAEQLRSKDLRLQVLIDPEVPAQLEGDPVRLAQVLTNLVGNSLKFTPRGQIAIRVHPAAQGGDDLRLRFEVVDTGIGMAPETTGRLFQSFFQADTSTTRKYGGTGLGLAISRQLVELMGGQIGVESRLEQGSTFWFVLPLKVSAPVEPPPPSAPMTVRLPQYGPILIVEDNAVNQKVLLRHLERLGCGAEVAETGAEALTVLASRSFALVLMDCQMPVMDGFQATAEIRRREDSARRTPIVGITANASAGVYDLCLAAGMDDCLIKPVRRDQLTAAIERWALPVVGTEWATG

SEQ ID NO: 19357 - protein, 404 aa, Idiomarina loihiensis L2TR
MRRAVITGLGIVSSIGNNQEEVLESLRTGKSGITRSESFAEMGLRCQVWGEVKLDPKDHIDRKALRFMGDSAAYAYIAMAQAIEDSGLTEEQVSHPRTGLVVGSGGASGEHQVAAADILRERGVKKVGPYMVPRCMASTTSACLATPFKIKGVNYSISSACATSAHCIGHALELIQFGKQDRVFAGGGEELHWTLGMEFDAMGALSTKYNDTPEKASRTYDQGRDGFVPAGGGGILVIEELEAAKARGAKIYGEIVGYGATSDGYDMVAPSGEGAVRCMKMAMETVDTPIDYLNTHGTSTPVGDVKELEAIREVFPEKTPMISATKAMTGHALGAAGVHEAIYSLLMLKNGFVTPSINIEALDEKADGMNIIQQTTEAPLRTVMSNSFGFGGTNASLVMRQYSE

SEQ ID NO: 19358 - protein, 350 aa, Glycine max
METLCSALVFPSFRIRTSAFSKCGIRASIAVEQQTSQTKVALLRIGTRGSPLALAQAYETRDKLMASHAELAEEGAIQIVIIKTTGDKILSQPLADIGGKGLFTKEIDEALINGDIDIAVHSMKDVPTYLPDKTILPCNLPREDVRDAFISLSAASLADLPSGSIVGTASLRRKSQILHRYPSLNVEENFRGNVQTRLRKLSEGIVQATLLALAGLKRLNMTENVTSILSIDDMLPAVAQGAIGIACRSNDDKMAEYLASLNHEETRLAVSCERAFLEKLEGSCRTPIAGYASRNEDGNCLFRGLVASPDGIRVLETSRIGPYAFEDMIKMGKDAGEELLSRAGPGFFSR

SEQ ID NO: 19359 - protein, 466 aa, Xylella fastidiosa Ann-1
MMSHPLSSLRDLEYHGAFVERHIGPNDVEIAQMLRVVGYDSLESLTDAIVPEKIRSTVALDLPKGITEEEALAKIRVIANKNQVFRSFIGQGYYGTHTPKVILRNILENPAWYTAYTPYQAEISQGRMEALINFQTMCADLTGMEIANASLLDEATAAAEAMSLAKRSAKSRSDLFFVHDAVHPQTLELLRTRAEPLGIVLRVGTPEEALQADVFGILLQYPDTFGRIGDHRVLADAVHARGGLVAVASDLLALTLITPPGEWGADIVVGNSQRFGVPFGFGGPHAGFMACRDIYKRSIPGRLIGVSVDAAGHPAYRLALQTREQHIRREKATSNICTAQVLLAVMASMYAVYHGPQGLLRIAWRTHRMAAILAAALRGAGLTVGEYFFDTLHIVGIDALAIHCAAAAAGMNLRMIDNAQLGISLDETVTRSDVVALGQVFGVQVDVEALDAITADALPAGLLRSS

SEQ ID NO: 19360 - protein, 200 aa, Aspergillus nidulans FGSC A4
MTSRLVLVIGDLFIPDRAPDLPAKFRKLLTPGKIGQILCLGNLTDRSTFEFLRQVAPDLQLVKGDFDVDSPNLPLSKVVTHGSLRIGFTHGHTIIPQGDADALLIAARQMDVDILLWGGTHRFEAFELEGRFFVNPGSATGALSTGYWPEGEEPTPSFCLMDIQGDVLVLYVYQLKTDSNGVETVAVEKVSYRKNSVLSS

SEQ ID NO: 19361 - protein, 98 aa, Triticum aestivum
  misc_feature (40)..(40): Xaa can be any naturally occurring amino acid
MADWGPVVIATVLFVLLTPGLLFQLPAHGRIVGFGTMHTXSGVAILVHAVLYFALITIFLIAIGVHIYAGLRPGVFNHTPSSLPLIIGPASFLVMYYY

SEQ ID NO: 19362 - protein, 578 aa, Arabidopsis thaliana
MCGILAVLGCVDNSQAKRSRIIELSRRLRHRGPDWSGLHCYEDCYLAHERLAIVDPTSGDQPLYNEDKTIAVTVNGEIYNHKALRENLKSHQFRTGSDCEVIAHLYEEHGEEFVDMLDGMFAFVLLDTRDKSFIAARDAIGITPLYIGWGLDGSVWFASEMKALSDDCEQFMCFPPGHIYSSKQGGLRRWYNPPWFSEVVPSTPYDPLVVRNTFEKAVIKRLMTDVPFGVLLSGGLDSSLVASVALRHLEKSEAACQWGSKLHTFCIGLKGSPDLKAGREVADYLGTRHHELHFTVQDGIDAIEEVIYHVETYDVTTIRASTPMFLMSRKIKSLGVKMVLSGEGSDEIFGGYLYFHKAPNKKEFHEETCRKIKALHQYDCLRANKSTSAWGVEARVPFLDKEFINVAMSIDPEWKMIRPDLGRIEKWVLRNAFDDEKNPYLPKHILYRQKEQFSDGVGYSWIDGLKDHANKHVSETMLMNASFVFPDNTPLTKEAYYYRTIFEKFFPKSAARATVPGGPSVACSTAKAVEWDAAWSQNLDPSGRAALGVHVSAYGEDKTEDSRPEKLQKLAEKTPAIV

SEQ ID NO: 19363 - protein, 320 aa, Mycoplasma penetrans HF-2
MRIDSNYLNNPNFFDVLIVGAGPAGLTAALYCKRANLKVAFYEKETPGGKVVKTSFVENYPGFTSVSGPDLAMNFFKQVSELGVKFIFGEVTKIRKVGDIFHVFSADGQARYAKAVIIATGMTEKKIGVKNEAEYYGRGVSYCAICDAALYKDKPVAVIGGGNTALEESLYLADIVSKVYLIHRRQGFRADAMVVEKVKANKKIELVLDAIPHEFLGDGKTINGIIIKNVNDNRLLKINVDCIFPFIGFVPTNKMVEGLEITDPNTGFILVNEKMETSIPGLFSTGDVNNKTVRQISTAVGDGTIAAIEAKRYIENNFSE

SEQ ID NO: 19364 - protein, 75 aa, Brassica napus
  misc_feature (10)..(10): Xaa can be any naturally occurring amino acid
  misc_feature (21)..(21): Xaa can be any naturally occurring amino acid
FIFAEREWPXACVNHWCDFVXNRHSKAISMDTWAQLLEFFRTVDLELSNYGAEGAWPYLIDEFVEYLYDKSIVEK

SEQ ID NO: 19365 - protein, 228 aa, Bacteroides thetaiotaomicron VPI-5482
MKGDIKKIHPEYVMSEIDKLASDDAIFTVDTGMTCVWGARYLQATGKRHMLGSFNHGSMANALPQAIGAALAYPDRQVVALCGDGGLSMTLGDLETVVQYKLPIKIIVFNNRSLGMVKLEMEVDGLPDWQTNMLNPDFAQVAEAMGMTGFNVSNPEEVLTTLLNAFELDGPVLVNIMTDPNALAMPPKIELGQMVGFAQSMYKLLINGRSQEVIDTINSNYKHIREVF

SEQ ID NO: 19366 - protein, 898 aa, Streptococcus pneumoniae TIGR4
MSLQKLENYSNKSVVQEEVLILTELLEDITKNMLAPETFEKIIQLKELSTQEDYQGLNRLVTSLSNDEMVYISRYFSILPLLINISEDVDLAYEINHQNNIDQDYLGKLSTTIKLVAEKENAVEILEHLNVVPVLTAHPTQVQRKSMLDLTNHIHSLLRKYRDVKLGLINKDKWYNDLRRYIEIIMQTDMIREKKLKVTNEITNAMEYYNSSFLKAVPHLTTEYKRLAQAHGLNLKQAKPITMGMWIGGDRDGNPFVTAKTLKQSALTQCEVIMNYYDKKIYQLYREFSLSTSIVNVSKQVREMARQSKDNSIYREKELYRRALFDIQSKIQATKTYLIEDEEVGTRYETANDFYKDLIAIRDSLLENKGESLISGDFVELLQAVEIFGFYLASIDMRQDSSVYEACVAELLKSAGIHSRYSELSEEEKCDLLLKELEEDPRILSATHAEKSELLAKELAIFKTARVLKDKLGDDVIRQTIISHATSLSDMLELAILLKEVGLVDTERARVQIVPLFETIEDLDHSEETMRKYLSLSLAKKWIDSRNNYQEIMLGYSDSNKDGGYLSSCWTLYKAQQQLTAIGDEFGVKVTFFHGRGGTVGRGGGPTYEAITSQPLKSIKDRIRLTEQGEVIGNKYGNKDAAYYNLEMLVSAAINRMITQKKSDTNTPNRYETIMDQVVDRSYDIYRDLVFGNEHFYDYFFESSPIKAISSFNIGSRPAARKTITEIGGLRAIPWVFSWSQSRVMFPGWYGVGSSFKEFINKNPENIAILRDMYQNWPFFQSLLSNVDMVLSKSNMNIAFEYAKLCEDEQVKAIYETILNEWQVTKNVILAIEGHDELLADNPYLKASLDYRMPYFNILNYIQLELIKRQRRGELSSDQERLIHITINGIATGLRNSG

SEQ ID NO: 19367 - protein, 379 aa, Nepenthes alata
AVIGSGVLSLAWAIAQLGWVAGPAVLIAFSAITYFTSTMLADCYRAPDPVTGKRNYTYMDVVKAYLGGRKVQLCGLAQYGNLVGVTIGYTITASISMVAVKRSNCFHKHGHRDGCHTSNNPFMIAFACIQIVFSQIPNFHELFMASPIVAAAMSFAYSSIGIGLSIAKVAGGAHARTSLTGVAVGIDVTSTEKVWRTLQAIGDIAFAYAYANVLVEIQDTLKSSPPENKVMRRASLIGGRPPHSFYVLCGCMGYAAFVYDAPGNFLTGFGFYEPFWLIDFANVCIAIHLIGAYQVFGQPIFAFVEGWCRDMWPENKFITREHPIEVPFVGVYYLNLFRLVWRTTYVIITAIVAMLFPFFNDFLGLIGAASFWPLTVYFP

SEQ ID NO: 19368 - protein, 377 aa, Nepenthes alata
AVIGSGVLSLAWAIAQLGWIAGPAVMLLFSFVIYYTSILLADCYRVDDPIFGNRNYTYMDAVRSNLGGVKVKVCGLIQYLNLIGVAIGYTIAASISMMAIRRSNCFHNSGAKKPCHMSSNPYMIMFGILEIILSQIPDFDQIWWLSIVAAVMSFTYSTIGLSLGIAQVAANKAFKGSLTGISIGAVTQTQKIWRSFQALGDIAFAYSYSIILIEIQDTVKSPPSEAKTMKKASLISIVVTTAFYMLCGCMGYAAFGDIAPGNLLTGFGFYNPFWLLDIANAAIVVHLVGAYQVYCQPLFAFVEKSASGKWPKNAFINKGIKIQIPGFGAYDLNIFRLAWRTAFVITTTIISMLLPFFNDIVGILGAFGFWPFTVYFP

SEQ ID NO: 19369 - protein, 93 aa, Arabidopsis thaliana
  misc_feature (25)..(26): Xaa can be any naturally occurring amino acid
MAVPLLTNKVVKNSGAEFIIPKSDXXITVKESWRRPKGIDSRVRRKFKSVTLMPNVGYGSDKKTRHYLPNGFKKFVVHNTSELQLFIIHNRTY

SEQ ID NO: 19370 - protein, 911 aa, Mycoplasma penetrans HF-2
MNKKNDKRLIENKSFSINEMNETINFILSLLTKVFKKHTSEKLYKIALEVKNKIKEKNNKNLFEYVQKISKKLSNLDFTYLCRYFAYHELLTNLVEDIYQANYENKWEDKYLDVDDYLVRFFKDIKKNKINVSKLKDIDISIVLTAHPTQVVRETILRLTRKIMEYLDKQSNYNSLFNIHLLDKEQNIEVLIDILWQVAILRDEKITVNNEIKNILNYFDTTFFSILPKINYKFNKLKNENYVLDESDNVCIKIGSWIGGDRDGNSFVNESSLEIAFEGQVKKVFNFYFSKLNNLYNDLLLHDSVSKISKSIYEFTKDVYLKNREREPYSKAVVKIISKLWNTLQSFGYDISSFSNFKIVDIDGKYNSTKDFLNDLYLILNSLKKNNSYEIAKRNLVDLIYSVKSFEFHLMSIDIRQNSKKHKELIDEIFSTNNIHQNYIYLSNEKKEELLLNIFEKEMIWDFDKLNDFNKSEINIFKKINQIKSLLGNNSISSYIISNTESFVDILETLFLYKIVNNTNDFNLNIVPLFETIEDISNAPLIVEKMITSPITRPIIENFWNNKIEVLLGYSDSCKDGGNFTSSWKLYTIQNELTAIVKKHNIKISFFHGRGGTIGRGGGPSYYAINSQPKDSINDKLRFTEQGEIIWAKYSNPRKGWFNLETILTATAQAIVDKTKNKYEDDEFKNNMEYLSKVSFDKYQNLVYKNQSFESVFFDITPINQISKLNIGSRPISRLNNKKLSDLRSIPWVFSWSQVRAMIPGWYGIGTALEQFINQNKKNLSILKKWYKNISFFNSLLSNIEMLLAKVNLDITKHYFDSSNNKDADAIYLDILSEYNKTLKMILLISDKKELLEDFRDLKISLEDRIPYLNILNYFQLELIRKNKLNKKNKWIQEAILISINGIATGLRNSG

SEQ ID NO: 19371 - protein, 350 aa, Bartonella henselae str. Houston-1
GTIGHVDHGKTSLTAAITKYFGEFKAYDQIDAAPEERARGITISTAHVEYETEKRHYAHVDCPGHADYVKNMITGAAQMDGAILVVSAADGPMPQTREHILLARQVGVPAIVVFLNKVDQVDDAELLELVELEVRELLSKYDFPGDDIPIVKGSALAALEDKDKSIGEDAVRLLMSEVDNYIPTPERPVDQPFLMPIEDVFSISGRGTVVTGRVERGVIKVGEEVEIIGIRPTSKTTVTGVEMFRKLLDQGQAGDNIGALLRGIDREGIERGQVLAKPASVTPHTRFKAEAYILTKDEGGRHTPFFTNYRPQFYFRTTDVTGIVTLPEGTEMVMPGDNVAMDVSLIVPIA

SEQ ID NO: 19372 - protein, 376 aa, Nepenthes alata
AVIGSGVLSLAWATAQLGWIAGPTAMLLFSFITFYTSRLLADCCRSGDSFTGERNPTYMDAVRSNLGGIQVKICGLVQYANLFGVSIGYTIAASISMMAIKRSNCFHASDDKNPCQYPASPFMIIFGLTEIIFAQIPDFHRLWWLSIVAAVMSFTYSTVGVSLGIAQVAENGKIKRSLTGISIGTVSQAQRIWRRFQALGDIAFAYSYSLVLVEIQDTIKSPPSEIKTMKKATVMSIAVTTLIYLLCGCMGYAAFGDLAPGNLLTGFGFYNPYWLLDLANAAIVVHLLGAYQVCCQPIFAFIETTASNAFPDNEFITKEVEIPIPGFKPYKLNLFRLVWRTSFVGVTTTISILLPFSNGVVGLLGALAFWPLTVYY

SEQ ID NO: 19373 - protein, 297 aa, Nepenthes alata
DQFDDTDPREKIKKGSFFNWFYFSVNIGALISSSLIVWVQENLGWALGFGIPAISMGIAIASFFSGTALYRLQKPGGSPLTRMCQVLVASFRKSKLALPEDSNLLYETSDENSVIEGGRKLEHTNDLKCLDKAAVVSDKEIKCEDFSNPWRLCTVTQIEELKILIRMFPIWATGIVFSAIYAQMSTMFVEQGEVMDRTIGSFTIPAASLSMFDTISVIFWVPVYDKILVPLARKSTGKQRGFSELQRMGIGLFISILSMAAAALVEMKRLQLAKELGLVDEDVAVPLSIFWQIPPYF

SEQ ID NO: 19374 - protein, 513 aa, Ralstonia eutropha JMP134
MSDKLIIFDTTLRDGEQSPGASMTREEKIRIAKQLERLKVDVIEAGFAASSNGDYEAIRSIAQVVKDSTICSLARANDKDIARAAEALKPANSFRIHTFIATSALHMEKKLRMTPDQVYEQARLAVRFARQFTDDIEFSPEDGSRSDMDFLCRVLEGVIAEGATTINLPDTVGYAVPEGYADLIRSVRERIPNSDKAVWSVHCHNDLGMAVANSLAAVKLGGARQIECTINGLGERAGNTSLEEVVMAVKTRRDYFNLDVGVDTSQIVPASKLVSQITGFVVQPNKAVVGANAFAHASGIHQDGVLKARDTYEIMRAEDVGWTANKIVLGKLSGRNAFKQRLQELGVELESEAEVNAAFGRFKELADQKAEIFDEDIMAIVSNEAQHDANEHYRFISLSQRSETGERPHARVVFNMDGQEHSGEGEGNGPVDATLHAIESQVNSGAEMVLYSVNAITGGTEAQGEVTVRLSKAGRIVNGVGTDPDIVAASAKAYLAALNKLHDKAVQKINPQI

SEQ ID NO: 19375 - protein, 223 aa, Brassica napus
  misc_feature (214)..(214): Xaa can be any naturally occurring amino acid
MPRVITNETYGCPPIRALTFDSLGLIKVTEARGKERGTPTVVNTWGEMNASRCVLAASMDDRPSNPLLAVARKDGNVEVLNPCNGDLHFAYSLFGDYGSSPEDDEVSGLHLFRKQKDDQAERSCTLLTCTKKGLVRLRTVQFPDASGDSTDDAAPKTWKACGSGEVLFGKVDGSENFGLFGGKRVEVNIWDLEQCTKIWSAKSPPKDNLGIFTXTWFTCAAFL

SEQ ID NO: 19376 - protein, 776 aa, Halobacterium sp. NRC-1
MIGAGIFVLPKIAAEQAGPASMVSFFVGGMVSLFAALSLSELATGMPKAGGSYYYVNRALGPFFGSIVGWGMWAGLTFASAFYMIGFGQYLLPGLGEYVGVLAGWGDLGITVAALAMAALLTAVNYYGVKETSALQNVIVLTLVGLVLAFLGLGAVTGPTITEFNPNGWPAVAATIGTVYVTFIGFEVIATSAEEIKNPSRNLPLAMIAAVVTPTLMYVGVMFVSTGTIDIPVLAGSDVPVALVAREIFQPLAGAVSWLPFVSVQPATAGSVGALAMIVGAVLATVSSANASILSAARVNFAMGRDKILVNWLNEVHDRFRTPYRAIAATGVITLLLIGIGVGVGTLAEVASFMYLVTYALVHVSVVVLRRANPDTYDPAFRIPAVLYPVVPVLGAAACVAVLVQMSVTFSPMTIGVASVAVVLPVTPTPVGAIGTVLVAFGIAWYYCYARARAPSQSLVGDALAPSSSPDTDTPDTYTVVVPVANPDTEHDLLRMAAASAHAHTDAHAEVIAVNVIEVPRQTSLSQDLAFEEERVERQQELLDAASAAAADLDVRLRTRAVASHDTGAAILDVIEDTAADHVLLGWGGTRRRDHVLGSTIDPVVGHASCDATLVRLGPAAAGDASDIMVLAGEGPHAPVAARRAAEFVAADETDASLTLLNVQPPADDDDDADASATERGAAVIDALAERAGIKYMTYDTEVVVSTDTEAAVIDAAADFDMVYAGATRSGPVSQAVFGSIPEAVGAGVDQTVVMARGPDNTPMSVRDAITRRFGG

SEQ ID NO: 19377 - protein, 341 aa, Staphylococcus epidermidis RP62A
MATNIAINGMGRIGRMVLRIALNNKNLNVKAINASYPPETIAHLLNYDTTHGVYDKKVEPIESGIKVNGHEIKLLSDRNPENLPWNEMDIDVVIEATGKFNHGDKAVAHINAGAKKVLLTGPSKGGDVQMIVKGVNDNQLDIDTYDIFSNASCTTNCIGPVAKVLNDKFGIINGLMTTVHAITNDQKNIDNPHKDLRRARSCNESIIPTSTGAAKALKEVLPEVEGKLHGMALRVPTKNVSLVDLVVDLEQNVTVTQVNDAFKNADLSGVLDVEEAPLVSVDFNTNPHSAIIDSQSTMVMGQNKVKVIAWYDNEWGYSNRVVEVADKIGQLIDDKAMVKAI

SEQ ID NO: 19378 - protein, 178 aa, Prunus avium
MASAEIEFRCFVGGLAWATDNDALERAFSPFGEIIESKIINDRETGRSRGFGFVTFSNEKAMRDAIEGMNGQNLDGRNITVNEAQSRGSGGGGGGNGGGYSRGGGGGGYGGGGGYGGGGRREGGGGGYSRGGGGGGYGSGGGGYGGGGRREGGYGGGEGGGARYSRGSGGSEGGSWRS

SEQ ID NO: 19379 - protein, 547 aa, Thiomicrospira crunogena XCL-2
MKASNLFVQCLENEQVEYVFGIPGEENMDMMDALLDSDIEFITCRHEQGAAFMADVYGRLTGKAGVCLSTLGPGATNLVTGVADANMDNSPVVAIAGQAATTRLHKESHQVVDLVNLFKPISKYATQILEPETIPEVIRKAFKLAQAEKPGAAFIDFPENVSEMLTPEKPLPVIQSRLSLADHKLIEKAASIIQQAKKPLILVGNGAVRANASRQLEAFSKHYQIPLVNTFMAKGAVPHYKNPLSVGTTGLQKGDYENGGFAESDLVICIGFDMVEYHPHLWNPNREHTIIHIDTCPAEVDYSYIPDVELIGNIGRNLSALMEKLPHKEYEPIPFPLREAMIQEMERCSDSDAWPMKPQKIIWDLRTAMNREDIAICDVGAHKMWMARFFRSELPNTCIISNGFASMGIAVPGAIGAKLAFPEKAIVAVTGDAGFMMNSQEIETALRCNTPIVILIWNDNQYGLINWKQKRRYGRSAYIDFQNPDFVKYAESFGATGVRINSANELLPALKTALKANTVTIIDCPVDYSENDRLTELLGNVLSEIES

SEQ ID NO: 19380 - protein, 342 aa, Legionella pneumophila subsp. pneumophila str. Philadelphia 1
MSMEVTLTRRSSMTIRVAINGYGRIGRCILRSIFEYNRQNEFEVVAINDLSGIDVTAHLTRYDSTHGPFRSDVSIEGNMLIVDGHGIQVIAERDPAKLPWKQLDIDIVFECTGFFTSRDAAMGHINAGAKKVLISAPAKGVDTTVVYGVNHSVIKASDVIVSNASCTTNCLAPVVKVLNDAIGIESGLVNTVHAYTKDQMLLDGSHKDLRRARSATQSIIPTKTGAAAAVGLVLPELAGKLDGFAMRVPVLNVSVVDLTFQAKRATSVEEINDIMRKAKNRILQINEDPLVSCDFNHNPASAIFDTTETKVIGNLVKVVAWYDNEWGFSNRMIDTAHQMMNC

SEQ ID NO: 19381 - protein, 830 aa, Arabidopsis thaliana
MRVSDFFAGEIATELLKQLFTISTTAWRYKNTAKQLLTLIDSIRPTIKEIQYSGVELPAHRQAQIGMLFDTLEKGKKLTDKVLSSKRWNLYRQLTLARKMEKLEKTISNFLKNEVFTHILADVHHLRADTSVRLDRVDMSLDRVIQQVGSMKIGGGGLISEAMKRAEAMEIETNDDSEKFGVGLELGKVKVKKMMFESQGGVFGISGMGGVGKTTLAKELQRDHEVQCHFENRILFLTVSQSPLLEELRELIWGFLSGCEAGNPVPDCNFPFDGARKLVILDDVWTTQALDRLTSFKFPGCTTLVVSRSKLTEPKFTYDVEVLSEDEAISLFCLCAFGQKSIPLGFCKDLVKQVANECKGLPLALKVTGASLNGKPEMYWKGVLQRLSKGEPADDSHESRLLRQMEASLDNLDQTTKDCFLDLGAFPEDRKIPLDVLINIWIELHDIDEGNAFAILVDLSHKNLLTLGKDPRLGSLYASHYDIFVTQHDVLRDLALHLSNAGKVNRRKRLLMPKRELDLPGDWERNNDEHYIAQIVSIHTGKCFSTLQIFLVLSWEMNEMQWFDMEFPKAEILILNFSSDKYVLPPFISKMSRLKVLVIINNGMSPAVLHDFSIFAHLSKLRSLWLERVHVPQLSNSTTPLKNLHKMSLILCKINKSFDQTGLDVADIFPKLGDLTIDHCDDLVALPSSICGLTSLSCLSITNCPRLGELPKNLSKLQALEILRLYACPELKTLPGEICELPGLKYLDISQCVSLSCLPEEIGKLKKLEKIDMRECCFSDRPSSAVSLKSLRHVICDTDVAFMWEEVEKAVPGLKIEAAEKCFSLDWLDE

SEQ ID NO: 19382 - protein, 425 aa, Bacillus subtilis
MSAKQVSKDEEKEALNLFLSTQTIIKEALRKLGYPGDMYELMKEPQRMLTVRIPVKMDNGSVKVFTGYRSQHNDAVGPTKGGVRFHPEVNEEEVKALSIWMTLKCGIANLPYGGGKGGIICDPRTMSFGELERLSRGYVRAISQIVGPTKDIPAPDVYTNSQIMAWMMDEYSRLREFDSPGFITGKPLVLGGSQGRETATAQGVTICIEEAVKKKGIKLQNARIIIQGFGNAGSFLAKFMHDAGAKVIGISDANGGLYNPDGLDIPYLLDKRDSFGMVTNLFTDVITNEELLEKDCDILVPAAISNQITAKNAHNIQASIVVERANGPTTIDATKILNERGVLLVPDILASAGGVTVSYFEWVQNNQGYYWSEEEVAEKLRSVMVSSFETIYQTAATHKVDMRLAAYMTGIRKSAEASFPRMGLI

SEQ ID NO: 19383 - protein, 247 aa, Chlorobium tepidum TLS
MKKLVLLRHGESQWNRENRFTGWVDVDLSEKGREEARTAGQLLKDEGFVFDLAYTSVLKRAIRTLWTVLDEMNLMWIPVTKNWRLNERHYGALQGLNKAETAQRHGDEQVLIWRRSYDTPPPALTESDEFWPGKDPRYASLSSQELPATECLKDTVARFLPYWHETIAPQIRDGKNVIITAHGNSLRALVKYLDNISDEDIVGLNIPTGIPLVYELDDDLKPLKSYYLGDQEELKKKVEVVVKQGKA

SEQ ID NO: 19384 - protein, 124 aa, Legionella pneumophila str. Paris
MTESLFERLGGQNAVNTAVDIFYRKMLMDDRVNYFFDDVDMEQQILKQKGFLTMVFGGPNQYTGKSMREGHQHLLARGLNDSHVDIVIEHLGETLKELGANEEDIQKVAAIANSVRDDVLGRSS

SEQ ID NO: 19385 - protein, 661 aa, Zea mays
MASLWKTKVLPGLNKIFDKDGKKAAAAGFFKSFNKEEIGKEIEEKKAELEPKVAEAYEASPPEVKALFKDKKPVKISKKNSTAVTKFLDELAKIDFPGAKVVSEAVAKSGASPLSPAITFILDKVAPYIPKEEPKAEDAVAEATSREVAVEVEDAEPAIADAAAETPSEAKKGEEEKPAAEEAAPPAAAATEEKTDNSIKNHWNSSLKKKLEAYSNSSVLSAPKLFVHDDFKDKMKPVATDSHLDLNQMPSVGSKDVPGRAYCTILSPPSQAYNLDSSGLFSFSIPTTQPLTSYAMSSLVDGSAVTLAAQGLQSDSVRDKGLEIDSVHEKGVEVGSTPDPAGVELESAPAKRGAELSSKIELHSILGPLCYQIPNMEDVVPISTPLRSEHNSAQKTSQHCMSPNGYTSPSATIGNVSSQLTVDSILRIAADTFPCTPSILRKRKRDKATPASGNELKTGGVCILNIINCAFLTLSIINLFFHTFQGINGNLMKPDRTLWNPFRTNQPHANVVVQAKSKSITFSGDKELPAMEMTYGTQANSLPCHLMEYENSGQIGVEFIRTEAQLGDVLTKPCIRSCRSVSSAGLRIVLQSIQFGQCSLVRVAGLRKDRENGPCQSVFFVRAFGSPFSSSVLLVKKKDGSWRFYVDYNHLNAITVKGKYP

SEQ ID NO: 19386 - protein, 130 aa, Methanosarcina acetivorans C2A
MTCDPAGGRAINAAGVQFPPVHYNGDIFLPGQANNFYTYPAVGLAVYVTRAKRATDEMFIKAARATANQRTDEQLKKGLLFPPQSSILETEVRTAVQIATLIFNRDLARVDQPEDINVWLRATLYKPQYS

SEQ ID NO: 19387 - protein, 345 aa, Thermus thermophilus HB27
MERRSVQKKDLLSTPVVPIDIKAFDAGPILEAMGKTAFQARNLHRAAEIYLEMLEDDCAVILTLAGSLVSAGQGLIVHDLIRKGLVDVIVATGANIVDQDFFEALGHRHYQGDPRADDEALRRLWIDRIYDTYIDEEELRHTDYTVAEIADGLEPRPYSSREFIWHMGRYLAERGLGEKSIVRAAYEEGVPIFVPAFSDSSAGFGLVYHQVKHPEAHVTIDSVADFRELTEIKLKAGTTGLVMLGGGVPKNFAQDVVVAAEVLGHRVEMHKYAIQITVADERDGGLSGSTLSEAQSWGKVDARLSQMVFAEATLAFPLLASYVWHRAPARAKRRYAELFREKAPA

SEQ ID NO: 19388 - protein, 657 aa, Triticum monococcum
MESRAISPGETALPYAYAPLAPSDVAEERRGGGGGVRWRACVAVLAASAVVVLVVASALAGSGRVDRVVGGDVVADMPPLAETARSRGRDAGVSEKTSGAADEMVGLLGAGGDADGFPWSNAMLQWQRTGFHFQPEKNWMNDPNGPVYYRGWYHLFYQYNPEGAVWGNIAWGHAVFRDLIHWRHLPLAMVPDQWYDINGVWTGSATVLPDGSLVMLYTGSTNASVQVQCLAVPADPNDSLLRNWTKYEANPILVPPPGIGDKDFRDPTTAWFDESDKTWRTVIGSKDNHGHTGIVMTYKTKDFINYELIPGLLHSVPGTGMWECIDFYPVGGADGSEELYVMKESSDDDRHDWYALGRYDAAANKYTPIDAEMDVGIGLRYDWGKFYASKTFYDPSKNRRVLWGWIGETDSERADVAKGWASLQSIPRTVELDEKTRTNLIQWPVVEIETLRNNSTDLGGTTIDTGSVLPLPFRRATQLDIEATFHLDTSTIAAVNEADVGYNCSTSGGAANRGALGPFGLLVLADGALKEQTAVYFYVSRGLDGGLQTHFCQDESRSSLAQDVVKRVVGFTVPVLDGEDLSVRVLVDHSIVESFAMGGRSTATSRVYPTEAIYAAAGVYLFNNATGAAVTVEKLVVHEMDDSYNQIFTADDASAAL

SEQ ID NO: 19389 - protein, 639 aa, Xanthomonas oryzae pv. oryzae KACC10331
MHARMRALHPAGRAIFARQWLALRPAAGHNRGFPILLPEFPRMAEIKEALVPDIGDYSDVPVIEVLVSVGDTVSKDQSLVTLESDKATMEVPSSVSGVVKEIKVKLGDSLSQGALVALIEVADAGVDAGAAAAAKPAAAAAAPAAPAKAAPASAPAPAAKAEAAAPAASSNGGLTEARVPDIGDYTDIPVIEVLVAVGDTVAKDQSLVTLESDKATMEVPSSAAGVVKELKVKVGDLLSQGSVVAIIAASDGGAGAAQSSVKPTTDTAETAGKVEPVAVPAEPDKLAQREIAQVQGARSGAAAQSAQVSQPSAGNPSSPPVTFDADSVLPSKVPYASPVVRVFARELGVDLNQLKGSEKGGRITREDVQRFVKAALSGGAPAAAGAVPAGGANGLNLLAWPKVDFSKFGETETQPLSRIKKISGANLARNWAMIPHVTQFESADITDLEALRVALNKENEKAGIKLTMLAFLVKASAAALKTFPEFNASLDAAGENLTLKKYINIGFAADTPNGLVVPVIRDVDKKGVLQIAQESGELAKKARDGKLGPADMSGGCFSISSLGGIGGTAFTPIINAPEVAILGVSKSAMQPVWNGKEFVPKLMLPLSLSYDHRVIDGALAARFTTYLSQVLADMRRVLL

SEQ ID NO: 19390 - protein, 502 aa, Buchnera aphidicola
  misc_feature (418)..(418): Xaa can be any naturally occurring amino acid
DGEQALQASLSVKEKLQIALCLEKAGVDIMEVGFPISSPGDFKSVQTISQNIKNSRICSLARCIEKDIDTAGEAMSHCDFFRIHVFLATSTLHMESKLRKNFDEIIDMAIFSVKRALRYTDDVEFSCEDASRTTMDNLCRIVEKLISCGVKTINIPDTVGYTIPNELSLIIKNLFERVPNIHKSTISVHCHNDLGMAVGNSISAIQAGARQIEGTINGIGERAGNTALEEVIMAIKVREDILGLSTNINHKEIYRTSQVISRICNMPIPSNKAIVGSNAFSHSSGIHQDGVLKNRENYEIMDPSSIGLKKVKLNLTSRSGRAAVKYYMNEMGYKDSDYNIDELYVDFLKLADKKGQVFDYDLEALAFINKKQDELEHFCLKFFSVQSISNNLSTASVTLLCGDKIYTESSTTSNGPVXAIYQALNRITHFPIILQKFQLIAKGQGKDALGQVDILVKYKKRQFHGVGLATDIIESSAQAMINVLNNIWKVKQVNKNLKNLKK

SEQ ID NO: 19391 - protein, 364 aa, Buchnera aphidicola
MKKKYRIAVLPGDGIGPEVMREAYKILNILKYHFSLPLEIEEFDVGGSAIDKEGVALPKKTLLGCENADAILFGSVGGRKWDSLPIDQRPERASLLPLRKHFNLFANLRPAQLYSELKYLSPLAFLIVIKNGFNILCVRELTGGIYFGQPSGRSKTNNFEYAFDTEVYYDYEINRIAHLAFQLAQTRNYKVCSIDKSNVLNSSILWREIVKKVSLSYPNVHLSHLYIDNATMQIIKDPNQFDVLLCSNLFGDIISDECAIITGSIGMLPSASLNEKKFGLYEPAGGSAPDIEGKNIANPIAQILSVSMLVRYSMNLKNIADKIDYSVISILKKGYKTADIAHDNNYLKTNEMGDVIADALISGE

SEQ ID NO: 19392 - protein, 307 aa, Schizosaccharomyces pombe
MGNHNINAEEIALYDRQIRLWGFNAQQALKQSRVLLITASPLANEIAKNLVLSGIGKLCVLDSMTVYEKDVEEQFFIEASDIGQLRANVFKKKLHELNPLVEIDTDTSLISEIDEGKISKFSMVIATQLDYEEFCRINELTRICNASFYATSCFGLYGFAFCDLINHNFAIDRVVDNTKVEEDMFIVQKPMKEAFQSILGETLKPRLAKKIPTLYPAMLSLLKSKKSDPDSIRQVCIEQKLNEKTVLNGEFLSKFSSNISFQWTPVMSVVGGVVSQDALNSISKKQFPIDNFWIFDAESGLAPIYRL

SEQ ID NO: 19393 - protein, 112 aa, Ralstonia eutropha JMP134
MKLIIAVIKPFKLDEVREALSDVGVSGITVTEVKGFGRQKGHTELYRGAEYIVDFLPKVKIEVAVPDDVVERAIEAIEKSARTGKIGDGKIFVAPIEQVIRIRTGETGSDAL

SEQ ID NO: 19394 - protein, 370 aa, Corynebacterium glutamicum ATCC 13032
MNERTSDAFDALLVLSFGGPEGHEEVRPFLENVTHGRGIPPERLDEVAVHYHHFGGISPINALNREIIANVEKELASRDHKLPVYFGNRNWKPFDNEAAEQMADDGVKNALVLATSAWGGYSGCRQYQEDIQGMIKHLESQGQSITFTKLRQFYDHPRFVSTMAQLVQDSYAKLPDELRDEARLVFTAHSIPLTADNAAGTPEDGSLYSTQVKEASALIAEAVGVSDFDVVWQSRSGSPHTPWLEPDIVDHAVELNEKGQKALVVCPVGFISDHMEVIWDLDSELMEEAEKRNMVVERVATVGPTDEFAALVVDLIEEAELKRVIERLGKLPARGSSVNGAPCGDGCCGTAKHKTARVNPNARSAAPAAN

SEQ ID NO: 19395 - protein, 442 aa, Solibacter usitatus Ellin6076
MTDVVMPQMGESIVEGTLTKWLKKPGERIERDEPLFEISTDKVDTEIPSPAAGTLAEVLVEEGKTVGINTVVARISEGGSADGGAAAAKPVAAPAPPPPAAAAPPAAQAPVAPPPPPVQAAPPPPPAEAESPSGPLSPLVKKMAREMNLDLAQVKGTGAGGRITKQDVEAYVAAGKPAAAPPSPAPAATPVQAAAPAPTPAPAMAPLAPAGQAKTRIEPMSTMRIKIAEHMVMSKRTSPHVTTIHRVDMTKVAKMRERFKAQFQANYGFGLTYLPFITRATVAGLRQYPLLNASLDGNNIIYHNEIHIGIAVALENGLIVPVVRSADEKNVLGLQRSIVDLAARARSRQLKPDEIQGGTFSITNFGSFGSLVGTPVINQPQVAILGVGTVDKTPVVIDDAIAIRSICHLSLSFDHRLIDGALADQFMTKVKQVLENWSEEVL

SEQ ID NO: 19396 - protein, 486 aa, Buchnera aphidicola
  misc_feature (153)..(172): Xaa can be any naturally occurring amino acid
QIALCLEKAGVDIMEVGFPISSPGDFKSVQIISQHIKNSRICSLARCIEKDIDAAGEAMSVSDAFRIHIFLATSTLHMESKLRKNFDEIIDMAIFSVKRALRYTDDIEFSCEDASRTTIDNLCRIVEKLISFGVKTINIPDTVGYTVPNELSXXXXXXXXXXXXXXXXXXXXHCHDDLGMAVGNSISAIQAGARQIEGTINGIGERAGNTALEEVIMAIKVREDILGLSTNINYKEIYRTSQIVSRICNMPIPSNKAIVGSNAFSHSSGIHQDGVLKNRENYEIMDPSSIGLKRVKLNLTSRSGRAAVKYYMSEMGYKEDDYNIDELYTDFLKLADKKGQVFDYDLEALAFINKQQDESEYFSLKFFSVQSISNNLSTASVTLLCGKKIYTEASTTSNGPVDAIYQALNRITHFPIILQKFQLIAKGKGRDALGQVDILVEYKKRKFHGVGLATDIMESSAKAMVNVLNNIWKAKQVNKNLKNLKK

SEQ ID NO: 19397 - protein, 86 aa, Pyrococcus horikoshii OT3
MMIMSGTKKVGSAGRFGARYGLKIRRRVAAVEAKMRQKHVCPVCGRRAVKRISTGIWQCTKCGAIFAGGAYLPVTPAGKVARRIME

SEQ ID NO: 19398 - protein, 363 aa, Buchnera aphidicola
  misc_feature (76)..(94): Xaa can be any naturally occurring amino acid
MKTKYRIAVLPGDGIGPEVMREAYKILNILKNYFSLPIETREFNVGGAAIDQDGVALPKTTLLGCENSDAILFGSXXXXXXXXXXXXXXXXXXXLLPLRKHFNLFGNLRPAQLYSELIHLSPLRSDIINNGFNILCIRELTGGIYFGKPAGRLKKNNIEYAFDTEIYYNYEINRIAHLAFQLAKTRNYKVCSIDKSNVLNSSILWREIVQKVSKNYPDVHLSHLYIDNATMQIIKNPNQFDILLCSNLFGDIISDECAMITGSIGMLPSASLNEKKFGLYEPAGGSAPDIEGKNIANPIAQILSVSMLVRYSMNLKTIADKIDQSVISVLKKGYRTADISNNSHYLKTNEMGDVIASALISGE

SEQ ID NO: 19399 - protein, 289 aa, Halobacterium sp. NRC-1
MSILVDDDTRVVVQGITGGEGKFHAEQMIEYGTNVVAGAVPGKGGQEVAGVPVYDTVNQAVVAENADASVVLVPPAFAADAVFEALDTPLDLVVAITEGIPSQDMAKVYKRLSEVDTRLLGPNCPGIITPGEAKLGILPGNIFEAGNVGLVSRSGTLTYQVVDSLTARGVGQTTAIGIGGDPIIGTDFIDALELFEADPETEAVVMCGEIGGEDEEAAAAYIDEHMDTPVAGFIAGRTAPPGKRMGHAGAIVSGSGTGTADSKISALNDAGVPVGDTPEEVADDIEELL

SEQ ID NO: 19400 - protein, 405 aa, Candidatus Blochmannia floridanus
MKRVVVTGLGIISSIGNNQDEVLVSLKNGRSGITFSKELQESGMRSCVWGNIKLNIDGLIDRKIARFMSDAAIYAYLSMDQAVQDSGLSKDMIINDYTGLIVGSGGGSPRNQVLGSNGMRTRGLRGVGPYMVTKSMASGISACLATFFKIKGMSYSISSACSTSTHCVGHAFELIQSGKQVIVFAGGGEELCWEMACEFDAMGALSTKYNDIPEKASRPYDLNRDGFVIAGGGGIVVVEELTHALDRNAHIYGEIVGYGATSDGFDMVAPSGEGAIRCMQIALRNVDDSVDYLNMHGTSTQIGDIKELQALYKVFGNQHPYFSSTKSMTGHALGAAGVHEIIFTLLMLKHNFIAPSINIDQLDPYLENMKVIRKTIHQKLTVVMTNSFGFGGTNATLVMQKYSGS

SEQ ID NO: 19401 - protein, 173 aa, Synechococcus sp. CC9605
MSIFVGNLPFRAEQEDVIELFAQFGEVTNCALPLERDTGRKRGFAFIEMADESTEEAAIEGLQGAELMGRPLRINKAEPRGSAPRRGGGGYGGGGGGGYGGGGGGYRGGGGGGYGGGGAGDRPSGARGWEDRSYGARDSAGEGNAYDEGRSRRRRGSSSGGGDEYSGYGGAEG

SEQ ID NO: 19402 - protein, 502 aa, Buchnera aphidicola
DGEQSLQASLSVKEKLQIALCLEKAGVDIIEVGFPISSPGDFKSVQTISQKIKNSKICSLARCIEKDIDTAAEAMSVCNSFRIHIFLATSTLHIESKLRKNFNEIIEMAIFSVKRALRYTDDIEFSCEDASRTTMDNLCRIVEKLIYCGVKTINIPDTVGYTVPNELSGVIKNLFERVPNIHKSIISVHCHNDLGMAVGNSISAIQAGARQIEGTINGIGERAGNTALEEVIMAIKVREDILGVSTNINHKEIYQTSQIISRICNIPVPSNKAIVGSNAFSHSSGIHQDGVLKNRENYEIMDPNSIGLKKVKLNLTSRSGRAAVKYYMNYMGYKDSDYNIDELYFNFLKLADKKGQVFDYDLEALAFMNKKHDESEYFSLQFFSVQSISNNLSTASVKLLCGKKTYTESSTTSNGPVEAIYQALNKITQFPIVLQTFQLIAKGKGKDALGEVKILVEYKKRQFHGLGLAANIIESAAQAMINVLNNIWQAKQVNKKLKNLKK

SEQ ID NO: 19403 - protein, 364 aa, Buchnera aphidicola
MKTQYRIAVLPGDGIGPEVMREAYKILKILKNNFLLSFEIEEFNVGGIAIDQEGLALPKKTLLGCEKSDAILFGSVGGKKWDNFPIEERPERAALLPLRKHFNLFANLRPAKIYSELKHLSPLRSNIVRDGFDILCIRELTGGIYFGQPSGRRLEKNNIEYAFDTEIYYDYEINRIAHLAFQLAQSRSHKVCSIDKSNVLNSSILWKEIVQKVSKNYPDVDLSHLYIDNAIMQIIKNPNQFDVLLCPNLFGDIISDECAIITGSIGMLPSASLNEKKFGLYEPAGGSAPDIAGKNIANPIAQILSLSMLVRYGMNLKDIADKIDKSVLSVLKKGYRTADISNNNNYLKTNEMGDVIANALISGE

SEQ ID NO: 19404 - protein, 131 aa, Glycine max
  misc_feature (50)..(50): Xaa can be any naturally occurring amino acid
EASVSRNRSTIIVPAGSSRDEGWAAFRNVLAEINEASRLFILPNQQNSEXQSVSKVIRADQKRFFFDLGSNNRGHFLRISEVAGSDRSSIILPLSGLKQFHEIVGHFVEITKDRIEGMTVANVRTVDPPQR

SEQ ID NO: 19405 - protein, 655 aa, Lycopersicon esculentum
MADTLAALRSLMSSHSPSLHALIIPSEDYHQSEYVSARDKRRAFVSGFTGSAGLALITMDEALLWTDGRYFLQAAQQLSDQWKLMRMGEDPPVDIWMANNLPKDAAIGVDTWCVSVDTAQKWECAFAKKQQKLVQTTRNLVDDVWKNRLPAQANPVIVHPLQFAGQSVAEKLKELRKKLVMGKACAIIITALDEVAWLYNVRGSDVSYCPVVHAFAIVTIDSAFFYVDKQKLSPEANSYMEENGIMVRDYGDVSSDVVLLASDQLTSCSSTKGSKGNPKIDVRNATYVGNSDSHAAEFVNDLIWVDPGACCFALYSKLSADKVLLQQSPLALAKALKNPVEIEGLKKAHFRDGAAVVQYLVWLDKQMQEIYGASGYFMEAESTKQKKQLGTKRLTEVSVSDKLEEFRASKEHFRGLSFRTTSSVGSNAAIIHYKPEAETCAELDPDCIYLFDSGAQYLDGTTDITRTIHFGKPSPHEKSSYTAVLKGHISLGNARFPNGTNGQALDILARIPLWKDGLDYRHGTGHGIGSYLNVHEGPHNISFRPSARDVPLQVSMAVTDEPGYYEDGNFGIRIENVLIVKEGHTKFNFGNKGYLSFEHITWAPYQRKLIDVSLLIPEEIEWLNEYHAKCREILTPYLNTSEMEWLKKATEPIAA

SEQ ID NO: 19406 - protein, 262 aa, Bacillus anthracis str. 'Ames Ancestor'
MLQLQNISVDYATPHVVKISLNRERQANSLSLALLEELQNILTQINEEANTRVVILTGAGEKAFCAGADLKERAGMNEEQVRHAVSMIRTTMEMVEQLPQPVIAAINGIALGGGTELSLACDFRIAAESASLGLTETTLAIIPGAGGTQRLPRLIGVGRAKELIYTGRRISAQEAKEYGLVEFVVPVHLLEEKAIEIAEKIASNGPIAVRLAKEAISNGIQVDLHTGLQMEKQAYEGVIHTKDRLEGLQAFKEKRTPMYKGE

SEQ ID NO: 19407 - protein, 165 aa, Triticum aestivum
VAGSAQGGYLKDLSAPSGFKYVEGSRPWKLVERVDVALPSATQNELDEEDAKALVAAGCGFVAEGANMPCTLEAINVFEAARKEKGSKGVWYGPGKAANCGGVAVSGLEMAQNSARLQWTEEEVDAKLKNIMQTAFKTCYETAQEFAGEGELPSLVSGANIAGFL

SEQ ID NO: 19408 - protein, 897 aa, Bradyrhizobium japonicum USDA 110
MNEQVDQGHLRTPPGRLFRKYLYSIVALAFAALAINTGFDVWFSYREQKQLLAATQREQAASAAIQIGQFIGQIENQIRWLSRLPPELSTNEDERLNAIRLLRLSPAIAEIAELDAQGREQVRVSRRVADRVGSKIDLSASPAFRGANESRTYYGPVYFIGDTEPFMTLAARGVGRGPNVIVAEVNLRFIWDLVAGIRVGNTGKAYVVDRMGLLIAHPDLWPALRRSDLSGHADVRAALDGAGPPSGGLVKEDLSGQRVLSTYATVPSLGWLVFVELPLTEAYAPIYASIGRSTFLLVALLACAVLVSLFLSRRMTVPIQILTQGARRIGSGDLGLRLAIKTGDELEALGDQFNRMAAHLRESYATLERKVIERTSELEKARDHALAEHDAAERARSIAVQANETKSRFLAVVSHELRTPLNGVMGVLQLLDDGSLGEAQRRHLATAAASGETLIALVDAILEYARLEASAETLEMRDFRLDQLIEAAADLMRPQAFGKGLTFDLASDVTVNTSVHGDPVRLNRILLNLIGNAIKFTPRGGIGLKASAEQHEDHILLSITVRDTGIGIAPDMHERIFEDFVQADDSIARRFGGTGLGLAIARRLTRLMRGELTVESTPGAGSTFALEVPLGLAASGIAQGALPPPSRRLRVLLVDDDPVNCQVGEAILNRLGHHPTIARNGASAVALARDQAFDIILMDLHMPDMDGVEAASQIGKLGLPRMPRIIAVTADVSRSARERLASAGIAKVVSKPILINALREAIEDDPPDQPAEVRLAAGALIDRHFLDDQKELLGATQIAKLHQLLRQTSQQRIEDIAEAAAIDDHLQLARSAHQLGSAASALGLVRLFERCREVELAVATMSASECHGAARELAALQKASMSALDELLLPVEQRSVS

SEQ ID NO: 19409 - protein, 394 aa, Schizosaccharomyces pombe
MADEIMENVELTTSEDVNAVSSFEEMNLKEDLLRGIYAYGYETPSAVQSRAIIQICKGRDVIAQAQSGTGKTATFSIGILQSIDLSVRDTQALILSPTRELAVQIQNVVLALGDHMNVQCHACIGGTSVGNDIKKLDYGQHVVSGTPGRVTDMIRRRNLRTRNVKMLILDEADELLNQGFKEQIYDIYRYLPPGTQVVVVSATLPQDVLEMTNKFTTNPVRILVKRDELTLEGLKQYFIAVEKEEWKFDTLCDLYDTLTITQAVIFCNSRRKVDWLTEKMREANFTVTSMHGEMPQKERDAIMQDFRQGNSRVLICTDIWARGIDVQQVSLVINYDLPANRENYIHRIGRSGRFGRKGVAINFVTNEDVRILRDIEQYYSTVIDEMPMNIGDMV

SEQ ID NO: 19410 - protein, 260 aa, Zea mays
VGYSIVDIAPLIAAAVPMKFKKVRTVQQALTSHFWVQDIQRNLSLAEIEQYLQLWEVIESFQLQNSNDQHVWIFSNDGLYTSKSAYKALFIGAESFEPWKRIWKSWAAPKCKTFVWLAINNKCWTADRLKKRGLQHPEFCVLCDQEDETVQHILSNCVFTRQFWHNILTPIGLSSVGPKRRDSVFAEWWRKASTKIPKSKKKGFNSMIILGAWSIWKQRNRCVFEGARPCLNTLEDGFKDEMRLWVSAGAKNLRSLFDPG

SEQ ID NO: 19411 - protein, 410 aa, Aspergillus nidulans FGSC A4
MFITSAAAFVWANLNPTNYIGSVSFCPERDIPDLAGKVVLVTGETIRQIIKHNPEQVFLAARSEEKAQNAIRELESTAPNIKITWLPLDLASTKSIHDAAETFRAHASRLDILILNAGVMSLPPGETDLGHEIQLGTNHTGHFLLTKLLLPVLLETAQKPDSDVRVISLSSIGHNLAPDFETILHQDELKKCNTNARYGASKAANIIFAAELARRYPSLTAVSVHPGIIVTELYAATSASNPIAALAVKLLGLIATKVEQGAWNQLWAAVGAKKGELVNGAYYTPVGIVKQRNRYVVDQKMGRRLWEWTETELKRDHKEGFIERMLQPHPHHQRRRSSVGEGEIEKPDLAIGLERQSSTERNEQGQNQAESGGQNVLRPQRRNSRLQRLKEFMHSEEELDDAGKTYAKLM

SEQ ID NO: 19412 - protein, 162 aa, Pseudomonas syringae pv. syringae B728a
MHYLTPDLCDAYPDLIQVVEPMFSNFGGRDSFGGQIVTLKCFEDNSRVREQVELDGKGKVLVVDGGGSLRCALLGDMLADKAAKNGWEGMLIYGCIRDVDVIAQTDLGVQALASHPKKTEKRGIGELNVPVTFGGVTFRPGEYLYADNNGVIISPSTLTMPE

SEQ ID NO: 19413 - protein, 189 aa, Psychrobacter arcticus 273-4
MNNNDTFNNDHSIQEQPESSVKADGVQPISAQTTGYTFNHTMLRVKDPVRSLEFYTGVLGMTLLAVKKFPAMGFDLYFLAKLTESERENLPSGNDLEIFAFRQRGILELTHNYGTETKADFSYHDGNQEPQGFGHICFNVPDLNAAVAWFDENHVEFKKRPDEGSMKNIVFIKDVDGYWIEIVQADLMA

SEQ ID NO: 19414 - protein, 444 aa, Prevotella bryantii
MKATEVIEKLKAKFPGQPEYIQAVSQVLGTIEEEYNKHPEFEKANLIERLCVPDRILQFRVSWVDDNGNVQTNLGYRVQHNNAIGPYKGGLRFHKSVNASILKFLAFEQTFKNSLTTLPMGGAKGGSDFDPHGKSDMEVMRFCQAFMNELYRLIGPDEDVPAGDIGVGGREVGYMFGQYKKLTHQFQGILTGKGLEFGGSLIRPEATGYGNVYFLEDMLKTRGESLEGKTVLVSGSGNVAQYTIEKLLQLGAKPVTCSDSNGYIYDPDGIDAEKLAFIMELKNVKRGRIKEYAEKYGVKYVENARPWGEKADIATPCATQDEINEAEAKTLIANGVFAVSEGANMPTEPAAIKVFQDAKILYCPGKASNAGGVATSGLEMSQNSERLSWTREEVDTKLHNIMDEIHANCVKYGTEPDGYINYVKGANVAGFMKVAKAMMAQGIY

SEQ ID NO: 19415 - protein, 181 aa, Clostridium acetobutylicum ATCC 824
MSVYDFKAKTIEGKEVSLDTYKGKVLIIANTASKCGFTPQYEGLEKLYKEYKDKGLEILGFPSNQFAEQEPGDNNEVKNFCKLNYGVTFQLFEKTDVRDENAHPLFNYLTENAPFKGFDLNHPTGKMLSEVLEKNFPKFLEGNSVKWNFTKFLIDRDGNVVKRFEPTSEPSDMVKDIEKLL

SEQ ID NO: 19416 - protein, 375 aa, Halobacterium sp. NRC-1
MDGDGDGDEFGDPRIVIVGCGGAGNNTVNRLYNIGVEGADTVAINTDKQHLKMIKADTKILVGKSLTNGLGAGGDPSMGERATEMAQGTIKEVLGDADLVFVTAGMGGGTGTGAAPVVSKIAKEQGAIVVGMVSTPFNVERARTVKAEEGLEKLREKADSIIVLDNNRLLDYVPNLPIGKAFSVMDQIIAETVKGISETITQPSLINLDYADMTAIMNQGGVAVMLVGETQDKNKTNEVVKDAMNHPLLDVDYRGASGGLVHITGGPDLTLKEAEGIADNITERLDASANVIWGARIQESYKGKVRVMAIMTGVQSAQVLGPSTQKQADKSRRELQDVDSKQRAADDAGAGGFGGAHSDGGQDEVEQENGLDVIR

SEQ ID NO: 19417 - protein, 413 aa, Listeria monocytogenes
MDKRRVVVTGVGAVTPIGNDAETSWENAKKGVNGVAKMTRLNPDDFPVKIAAELKDFDVEKYLEKKEARKMDRFTHYAIASAEMAVQDSGLVIDDSNANRVGVWIGSGIGGMETFETQYEIFLNRGHRRVSPFFVPMMIPDMGSGQVSIRFGAKGINSTTVTACATATNSIGDAFKVIERGDADAMITGGAEAPITKMSLAGFTANKALSLNPDPETACRPFDKDRDGFIIGEGAGIVILEEYEHAKARGAKIYAEIVGYGATGDAYHITAPAPNGEGAARAMKMAIDDAGLTPDKVDYINAHGTSTPYNDEYETQAIKTVFGEHAKKLAISSTKSMTGHTLGASGGIEAIFALLTIRDNIIAPTIHLKNQDEVCDLDYVPNEAREANVNVVISNSFGFGGHNATLVFKRIED

SEQ ID NO: 19418 - protein, 424 aa, Thermus thermophilus HB27
MKSEPLSYLGKDGGPWEIFTEQVDRVVPYLGRLAPLAESLKRPKRVLIVDVPVRLDDGSVAYFEGYRVHHNTARGPAKGGVRYHPEVTLSEVMALAGWMTIKNAAVGLPYGGGKGGIRVDPRKLSPGELERLTRRYTSEIGILLGPDRDIPAPDVNTGEREMAWMMDTYSMNVGRTVPGVVTGKPIALGGSLGRRDATGRGVFITAAAAAEKIGLQVEGARVAIQGFGNVGNAAARAFHDHGARVVAVQDHTGTVYNEAGIDPYDLLRHVQEFGGVRGYPKAEPLPAADFWGLPVEFLVPAALEKQITEQNAWRIRARIVAEGANGPTTPAADDILLEKGVLVVPDVIANAGGVTVSYFEWVQDFNSYFWTEEEINARLERVLRNAFEAVWQVAQEKKIPLRTAAYVVAATRVLEARALRGLYP

SEQ ID NO: 19419 - protein, 624 aa, Methylococcus capsulatus str. Bath
MCGISGLVQLEGVADTSAMRRSVETMVKALAHRGPDDSGVAGDGSAVFGMARLAIRGCHDGRQPMVDAETGVMMVCNGEIDNHAELRGWLAERGRAVEHATDVAVIPGLYLELGDGFVERLVGAFALAVWDPRRGRLLLARDRAGERPLFYACRDGRVSFASQAAALVAGSPEPYPADEAAVQAFLKAGYFEAPASPFAGMRKVLPGERIAIDVKGVERSRYWRLNFTRGPARKNPLDEFDAVFREAVRRQSEVEVDFGAFLSGGVDSSLVTAVMRSVHPDRKLKAFGLRFSESSYDEGVFAERVAESLGVDYTPIWVRPEDFPETLADLVRQSGEPLADPAWVPTALLARRASDEVRVALVGEGADELFGGYPTYFGARLAERYSRLPGGLRALIRKAVEAWPVSDKKVTVSFLLKRFVQGDELDFLARHVLWTSSIPPALLRRLGVTPPETPHVAGPQETMLDRLQQHDLETSLAEGLLTKADRASMRSALELRAPFLDKDVIEFAATLPERERVQGLETKVFLKRVALRYLPKDIVYRKKRGLSVPLSAWLRGPLHDWAEARISSPRLEELGINRAAALELLREHERRSADHARALWTLIVVSEWLEWKAGMEAHPAAFTA

SEQ ID NO: 19420 - protein, 381 aa, Bacteroides thetaiotaomicron
MDDKGNIQTNMGYRVQHNNAIGPYKGGIRFHASVNLSILKFLAFEQTFKNSLTTLPMGGGKGGSDFSPRGKSNAEVMRFVQAFMLELWRHIGPETDVPAGDIGVGGREVGFMFGMYKKLAHEFTGTFTGKGREFGGSLIRPEATGYGNIYFLMEMLKTKGTDLKGKVCLVSGSGNVAQYTIEKVIELGGKVVTCSDSDGYIYDPDGIDREKLDYIMELKNLYRGRIREYAEKYGCKYVEGAKPWGEKCDIALPSATQNELNGDHARQLVANGCIAVSEGANMPSTPEAVRVFQDAKILYAPGKAANAGGVSVSGLEMTQNSIKLSWSAEEVDEKLKSIMKNIHEACVQYGTEADGYVNYVKGANVAGFMKVAKAMMAQGIV

SEQ ID NO: 19421 - protein, 419 aa, Thermus thermophilus HB27
MPLKAYRPPEDPGLWDTYLEWLERALKVAGVHPTTLEYLAHPKRLVTLSLPVVMDDGKVRIFQGYRVVHDIARGPAKGGVRLDPGVTLGQTAGLAAWMTLKAAVYDLPFGGAAGGIAVDPKGLSPQELERLVRRYTAELVGLIGPDSDILGPDLGADQQVMAWIMDTYSMTVGSTVPGVVTGKPHALGGSEGRDDAAGLGALLVLEALAKRRGLDLRGARVVVQGLGQVGAAVALHAERLGMRVVAVATSMGGMYAPEGLDVAEVLSAYEATGSLPRLDLAPEEVFGLEAEVLVLAAREGALDGDRARQVQAQAVVEVANFGLNPEAEAYLLGKGALVVPDLLSGGGGLLASYLEWVQDLNMFFWSPEEVRERFETRVARVVDAVCRRAERGGLDLRMGALALALERLDEATRLRGVYP

SEQ ID NO: 19422 - protein, 229 aa, Listeria monocytogenes
MKLVLIRHGQSEWNKLNLFTGWHDVDLSQEGVVEAMTAGKRIKEAGLEFDVAFTSVLTRAIKTLNYVLEESDQMWVPVHKSWRLNERHYGALQGLNKQETAEKYGADQVQKWRRSYDTLPPLLEENDERQAKNDRRYQLLDTHAIPSGENLKVTLERVIPYWMDTIAPEIKEGRRVVIAAHGNSLRALVKFLEGISDDEIMDLEIPTGVPLVYELNADLKPVNKYYLDK

SEQ ID NO: 19423 - protein, 412 aa, Rhodococcus opacus
MTSDIVVIGGGVAGVSAVQSLRSEGYDGRLFLIGKERELPYDRTSLSKAVLAGDLADPPPLSPADWYDELQVETVLDRTVLQVDVTRKEVLLDGGRSLEVDRVLLATGASARVPSFSGADLPGVTTLRTVDDAQRLRQDWEPGQRLVVVGGGLIGCEVATTARKLGLEVSILEASDELLQRVLGRRIGGWCRARLEELGISVMVNTGVAEFDGVDRITAVIGTDGRRFPADSAIVCVGAEPETAIAEQAGLACSRGIIVNDSGGTALEGVFAAGDAASWPLRTGGRRSLETYINSQKEATAVASAMLGKAVHAPQLPLSWTEIAGHRIQMIGDIEGSGEYVMRGAPDDGPALLFRLTDGKLTAALSVDAPREFAMATRLVESGAQVGRDVLADTSVELRELNRAARERTTAA

SEQ ID NO: 19424 - protein, 813 aa, Arabidopsis thaliana
MNCNVLFLLSVLVSVTAGVTAAYHPTDVFLFNCGDTSNNVDNSGRNWTVESRQILSSNLVNASFTSEASYQKAGVSRIPYMKARIFRSEFTYSFPVTPGSIFLRLYFYPTQYKSGFDAVNSFFSVKVNGFTLLRNFNADSTVQASIPLSNSLIKEFIIPVHQTLNLTFTPSKNLLAFVNGIEIVSMPDRFYSKGGFDNVLRNVSSDVDFQIDNSTAFESVHRLNVGGQIVNEVDDSGMFRRWLSDDSFGNSGSIVNVPGVKINYTEKTPAYVAPYDVYATGRLMGNSSNLMFNLTGMFLTVDAGYNYLVRLHFCETLPQVTKAGQRVFSIFVEDKMAKKETDVIRLSGGPRIPMYLDFSVYVGFESGMIQPELRLDLVPLKDTNQTYYDAILSGVEILKLNDSDGNLARPNPELLVSTDSTPDDSNVTPPIKGKPHVLVIILIVVGSVIGLATFIVIIMLLIRQMKRKKNKKENSVIMFKLLLKQYIYAELKKITKSFSHTVGKGGFGTVYRGNLSNGRTVAVKVLKDLKGNGDDFINEVTSMSQTSHVNIVSLLGFCYEGSKRAIISEFLEHGSLDQFISRNKSLTPNVTTLYGIALGIARGLEYLHYGCKTRIVHFDIKPQNILLDDNFCPKVADFGLAKLCEKRESILSLIDTRGTIGYIAPEVVSRMYGGISHKSDVYSYGMLVLDMIGARNKVETTTCNGSTAYFPDWIYKDLENGDQTWIIGDEINEEDNKIVKKMILVSLWCIRPCPSDRPPMNKVVEMIEGSLDALELPPKPSRHISTELVLESSSLSDGQEAEKQTQTLDSTII

SEQ ID NO: 19425 - protein, 402 aa, Methylobacillus flagellatus KT
MLSATARPYIEASVPVLREHGLKITQTFYHNMLSAHPELKNLFNMGNQANGIQQQSLAAAVFAYAANIDNPAALAPVVKRIVHKHAAVGIKPEHYPIVGQYLIGAIKQVLGEAATDELLAAWGEAYWSLANLLIEEEKSLYASTASTAGALMTLKVARKVFESEHIVSFYLQHPDGRKPGDFLPGQYISVEMQFEQNKRRQLRQYSLSDSSTAPWWRISVKREQEAEKPEGLLSNWLHDEVKVGDLIHATPAFGDFVLDPVISDQPLLLISAGIGITPMLSMLNSVRDLAPQRPVFFAHAARSPAWQSHSLDLQEARYRMTNLQTALFYESLEGAHGSIGGVYQGRMDITDLWPAVLHHADIYLCGPLGFMQAQREQLLQAGVAASHIKREVFGPDLLDHLL

SEQ ID NO: 19426 - protein, 588 aa, Arabidopsis thaliana
MGGGGNLVDGVRRWLFQRPSSSSSSSSSNNNNNNHEQPIFNSSSFSSSSNPNHSANSGELIIEEDLDFSGLTLINVPKRNHLPMDPHKKGETEFFTEYGEANRYQIQEVVGKGSYGVVASAVDSHTGERVAIKKINDVFEHVSDATRILREIKLLRLLRHPDVVEIKHIMLPPSRREFRDIYVVFELMESDLHQVIKANDDLTPEHYQFFLYQLLRGLKYVHAANVFHRDLKPKNILANADCKLKICDFGLARVSFNDAPTAIFWTVSHLTQCESKTDYVATRWYRAPELCGSFFSKYTPAIDIWSVGCIFAEMLLGKPLFPGKNVVHQLDLMTDFLGTPPPESISRIRNEKARRYLSSMRKKQPVPFSHKFPKADPLALRLLERLLAFDPKDRASAEDVKREPTTQPISKLEFDFERKKLVKDDVRELIYREILEYHPQMLEEYLRGGDQLSFMYPSGVDRFKRQFAHLEENQGKPGAAGGGRSTALHRHHASLPRERVPAPNGETAEESSDVERRAAAAVASTLESEEADNGGGYSARNLMKSASISGSKCIGVQSKTDKEDTIAEEEDNETVAELTDKVASLHNS

SEQ ID NO: 19427 - protein, 105 aa, Zea mays
MSSGRRSSRTRRAGSSSLSSSSTSRSISEDQISELLSKLQALLPESQARNGGAHRGSAARVLQDTCSYIRSLHQEVDNLSETLAELLASADVTSDQAAVIRSLLM

SEQ ID NO: 19428 - protein, 296 aa, Symploca atlantica PCC 8002
NSRLCMSSAVSGYIQSFGSDGPPCCYEDLELTDCAFLIGTNAAECHPIVFNRLRKHHKKNRHVKMIVVDPRRTETAEAADLHLAIRPGTDIDLLNGIAHLLMRWGLMDTLFIDECTADFPAYAEVIGHYSPELVARKCGISLDELETAARYWGKSQRVLSLWSMGINQSSEGTAKVRTLINLHLMTGNVGKPGAGPFSLTGQPNAMGGREAGGLAHILPGYRLVKNSQDRREVEDFWGLKPGQISPFSGRSAWEMITGLEQGDVGLLWIAATNPAVSMPDLERTKAALKQSPFTVY

SEQ ID NO: 19429 - protein, 141 aa, Brassica rapa
MAASVMLSSVTLKPAGFTVEKMSARGLPSLTRASPSSFRIVASGVKKIKTDKPFGVNGSMDLRDGVDASGRKGKGYGVYKFVDKYGANVDGYSPIYNEDEWSASGDVYKGGVTGLAIWAVTLAGILAGGALLVYNTSALAQ

SEQ ID NO: 19430 - protein, 960 aa, Medicago truncatula
MKETGHEYACGDMLEPRESDIPVLFLVLVVLPLVAYILLGKWSETAKKRNRINLLAQLAAEEAFKAEAKMAVADVIPPQPQVFYTPKNYSPKNELHHECARCSAPAKTRCSRCKLVRYCSGNCQIIHWRLFHKQECLPLETHNSSSFPMAFPVEEFGHGSAFYENSNNPYFGCNLNQTLRASEPLDNLVHPPTGTTAASATVDFSPFNGSQPSALESRPSHKSNRETRRRDSGSIYESSDCKATTSQETFMRQKSRKSNDSVSEEETSKINSNGFGVYTHEQDGSRNTMDEDDNYQNQYENAFAPRNKNGSYNVSSAANSDEGVDEFETNVVTKGGHHHSDEAAQHKCSSETTVKGSAKAKKPSHTSKAKLSKSPKSTSKTSIDFCDPEIEKKGKIPDEPKVAGSRSTLPLHGINGVTSTGLMKMMGLRKSTKHTALASSESNGVRSKKAKNIKMLFPYEDFVKIFQSEIFGIFPRGLLNCGNSCYANAVLQCLTSTKPLVVYLLYGSHSESCCAKDWCLMCELEQHMMILREIGAPLSPSRILWHMRSINCNMGDGSQEDAHEFLRLLVASMQSICLEGLGGERKVDPRLQETTFIQHTFGGRLQSKVKCLNCSHESERYENIMDLTLEILGWVESLEDALTQFTSPEDLDGENMYRCGRCTAYVRARKQLSIHEAPNILTIVLKRFQEGRYGKINKCITFPEMLDMIPFMTGTGDIPPLYVLYAVVVHLDTLNASFSGHYVSYVKDLQGNWFRIDDTEVQPVLVNQVMSEGAYILFYTRSSPRPPAEFTGKAAQQSVSDSSKLYSLETQKLSKPGHSRHVSQSFVSEPSPNTRPEIATHLMDTSNGFVKRSTNRNVHPVIQTYAENVRHEFSDATTSSDWSIFTSSDEASFTTESTRDSFSTVDYADPFSNMDPISSLFNYTPENNNYMKISHSRPLTRFFPKKGHIERVQKTTIWES

SEQ ID NO: 19431 - protein, 491 aa, Buchnera aphidicola
VKEKLQIALSLEKAGVDIMEVGFPISSPGDFKSVQTISKNIKNSRICSLARCLEKDIDAAGEAMSVCDSFRIHIFLATSTLHMESKLRKNFNEIVDMAVFSVKKALRYTDDVEFSCEDASRTTIDNLCRIVEKLIKSGVKTINIPDTVGYSIPNELTCIIQNLFERVPNIHKSIISVHCHDDLGMAVGNSISAIQAGARQIEGTINGIGERAGNTALEEVIMAIKVRKDILGVSTNINHKEIYRTSQIISRICNMPIPSNKAIVGSNAFSHSSGIHQDGVLKNRENYEIMDPKSIGLKKVKLNLTSRSGRAAVRYYMNEMGYKDSDYNIDELYADFLKLADKKGQVFDYDLESLAFINKQQDELEYFRLQFFSVQSISNNLSTASVKLLCGKKIYTESSTTSNGPVDAVYQALNRITHFPIILQKFQLMAKGKGKDALGQVDILVEYKKRKFHGVGLATDIIESSAQAMVNVLNNIWKAKQVNKNLKNLKK

SEQ ID NO: 19432 - protein, 363 aa, Buchnera aphidicola
MKQKYRIAILPGDGIGPEVMREAYKILSILKDHFSLSLEIQEFNIGGSAIDQEGIALPKKTLLGCQNSDAILFGSVGGKRWDHLPINERPERASLLPLRKHFNLFANLRPAKLYSELQHLSPIRSNIIKNGFDILCVRELTGGIYFGKPSDRVKKNNVEYAFDTEVYYDYEINRIAHLAFQLARTRKFKVCSIDKSNVLNSSILWREVVEKVSKMYPDVHLSHLYIDNATMQIIKNPNQFDVLLCSNLFGDIISDECAVITGSIGMLPSASFNEKNFGLYEPAGGSAPDIAGKNTANPIAQILSLSMLVRYGMKLNKIADKIDDAVALSLKAGYRTADISNDNNFLKTNEMGDVIANFLINGK

SEQ ID NO: 19433 - protein, 296 aa, Symploca atlantica PCC 8002
NSRLCMSSAVSGYIQSFGSDGPPCCYEDLELTDCAFLIGTNAAECHPIVFNRLRKHHKKNRHVKMIVVDPRRTETAEAADLHLAIRPGTDIDLLNGIAHLLMRWGLMDTLFIDECTADFPAYAEVIGHYSPELVARKCGISLDELETAARYWGKSQRVLSLWSMGINHSSEGTAKVRTLINLHLMTGNVGKPGAGPFSLTGQPNAMGGREAGGLAHILPGYRLVKNSQDRREVEDFWGLKPGQISPFSGRSAWEMITGLEQGDVGLLWIAATNPAVSMPDLERTKAALKQSPFTVY

SEQ ID NO: 19434 - protein, 248 aa, Ralstonia eutropha JMP134
MYKLVLIRHGESTWNLENRFTGWVDVDLTDTGAAQARLAGKLLKEAGFAFDVAYTSVLKRAIRTLWHVQDEMDEMWIPVRNEWRLNERHYGALAGLNKAETAAKFGDEQVLVWRRSYDTPPPALEPTDPRASYDDPRYANVPREQIPLTECLKDTVARVLPLWNESIAPDIQSGKRVVIAAHGNSIRALVKYLDQISDDDIVGLNIPNGTPLVYELDASLRPLRHYYLGDQEAIAASLAAVASQGKAR

SEQ ID NO: 19435 - protein, 406 aa, Vibrio vulnificus YJ016
MSVTASQVHGAVQTLTQSSDTLFLLLGAIMVFLMHAGFAFLEVGTVRHKNQVNALVKILADFGISTLAYFFIGYWVAYGAHFFADAETLAQGNGYELVKFFFLLTFAAAIPAIVSGGIAERARFYPVLIATFFTVGIVYPLFEGIIWNGNFGVQAWFEATFGVGFHDFAGSVVVHGVGGWIALVAVIFLGMRRGRVRAGKHTNFAPSNIPFLALGAWILCVGWFGFNVMSAQTLNGISGLVAMNSLMAMAGGIVAALIAGKNDPGFIHNGPLAGLVAVCAGSDLMHPLGALVTGSVAGVLFVYLFTYLQNKTKIDDVLGVWPLHGVCGAWGGIAAGIFGQSSLGGLGGVSFTVQLLGTLLGISVALIGAGIVYGAINRFSGLRLSQEDEFNGADLAIHKISSVNAE

SEQ ID NO: 19436 - protein, 296 aa, Symploca atlantica PCC 8002
NSRLCMSSAVSGYIQSFGSDGPPCCYEDLELTDCAFLIGTNAAECHPIVFNRLRKHHKKNRHVKMIVVDPRRTETAEAADLHLAIRPGTDIDLLNGIAHLLMRWGLMDTLFIDECTADFPAYAEVVGHYSPELVARKCGISLDELETAARYWGKSQRVLSLWSMGINQSSEGTAKVRTLINLHLMTGNVGKPGAGPFSLTGQPNAMGGREAGGLAHILPGYRLVKNSQDRREVEDFWGLKPGQISPFSGRSAWEMITGLEQGDVGLLWIAATNPAVSMPDLERTKAALKQSPFTVY

SEQ ID NO: 19437 - protein, 503 aa, Buchnera aphidicola
  misc_feature (17)..(17): Xaa can be any naturally occurring amino acid
DGEQALQASLSVEEKLXIALCLEKTGVDIMEVGFPISSPGDFKSVQTISKKIKNSQICSLARCIEKDIDIAGEAMSVCDFFRIHIFLATSRLHMKSKLRKNFDEIIDMAIFSVKRALRYTDDVQFSCEDASRTTIDNLCRIVEKLINSGVKTINIPDTVGYSIPNELSFIIKNLFQRVPNIDKAVISVHCHDDLGMAVGNSISAIQAGARQIEGTINGIGERAGNTALEEVIMAIKVREKNLGVYTNINHKEIYRTSQMISRICNMPIPSNKAIVGSNAFSHSSGIHQDGVLKNRENYEIIDPVSIGLKNVQLNLTSRSGRAAVKYYMNEMGYKDSDYNIDELYSDFLKLADKKGQVFDYDLESLAFISKQQDELEYFCLKFFSVQSISNGLSTASVKLLCGKKVYTESSTTSNGPVDAIYQALNRITHFPITLQKFQLIAKGKGKDALGQVDILVEYKKRKFHGVGLATDIIESSAKAMINVLNNIWKAKQVNKKLKILKKK

SEQ ID NO: 19438 - protein, 364 aa, Buchnera aphidicola
MKKKYRIAVLPGDGIGPEVMQEAYKILNILKDHFLLPLEMKEFNIGGIAIDQEGIALPKNTLLGCENSDAILFGSVGGKKWDYLSIDKRPERAALLPLRKHFNLFSNLRPAKLYADLKYLSPLRSNIIKDGFDILCVRELTGGIYFGKPNGHSKKNDIEYAFDTEVYYDYEISRIAHLAFQLARNRKKKVCSLDKSNVLKSSILWKEIVEKISKNYPDVHLSHLYIDNAIMQIIKDPSQFDVILCSNLFGDIVSDECAAITGSIGMLPSASLNEKNFGLYEPAGGSAPDIAGKNIANPIAQILSVSMLVRHGMNLKKIADKIDESVVSVLKQGYRTADISNNSHNYLKTSEMGDIIANFLINGK

SEQ ID NO: 19439 - protein, 654 aa, Lycopersicon esculentum
MADTLAALRSLMASHSPPLNALIVPSEDYHQSEYVSARDKRRDFVSGFTGSAGIALISMNEALLWTDGRYFLQAAQQLSEQWKLMRMGEDPALDIWMADNLPKDAAIGVDPWCISVDTAQKWERAFAKKQQKLVPTARNLVDEVWKNQPPAETNPLIVHPLEFAGRSVADKLKDLRAKLVKEKARAIIITALDEVAWLYNVRGTDVSYSPVVHAFAIVTLTSAFLYVDKRKLSSEANSYMKENGIFVREYGDVSSDAVLLASDQLTPSSADKTPSGLNTETNCGKDTENGEIQTAELVNDLIWVDTGACCFALYLKLNADKVLLKQSPLALAKALKNPVEMKGLKNAHIRDGAAVVQYLAWLDRQMQEIYGASGYFAEAESMSMNKLKDLKRLTEVSASDKLEEFRASKEHFRGLSFPTISSVGSNGAIIHYSPEAETCAELDPDQMYLCDSGAQYLDGTTDITRTVHFGKPTAHEKTCYTAVLKGHISLGNARFPNGTNGYALDVLARTPLWKYGLDYRHGTGHGIGSYLNVHEGPHQISFRPSAQNVPLQVSMTVTDEPGYYEDGKFGIRLENVLIVKEGNTKFNFGDKGYLTFEHITWAPYQRKLIDVSLLVPEEIQWLNEYHCKCSEILAPYLNQSEMEWLKNATAPIAA

SEQ ID NO: 19440 - protein, 219 aa, Synechococcus sp. WH 7803
NSRLCMSSAVAGYTRSLGSDGPPCCYEDLDHCSVVILIGTNTAECHPVLFQRLLKRKKRDPNGLTIVVVDPRSTDTAKIADYHLVLAPGTDLALLHGLARLIIQDNGFDSDSIDTATEGFAGFTQTIKTWTPGKTSKFCGIAEKDLRAVARLWSRKERILSLWSMGVNQRREGTAVVGGLINLHLLTGEIGKAGAGPFSLTGQPNAMGGREAGGLAHLL

SEQ ID NO: 19441 - protein, 272 aa, Zea mays
MAATTVASRKRGTAAFLDDPFSFPGDLPCLQTKRGRCSSSIVAADLGLSFPLEFDPVEALHLIFPGEDRQVLQNDLQASGNVLDAAIRAYKDYLAERSKESASAINYVPSDNEEGDSILSESESDVYLKEETIPTNCSGWAEVIVKEMSSASDLTDAKNRAFKILKLFEKSADRSSSPDEKREGNKEHKIVKQMLGSLLHQNGVLKRAFLIQHNRLKEYQEMVQERSQFNQILEKYREQIKALEEKNSALSFHLQNMNQCRNTYWHHNPDVF

SEQ ID NO: 19442 - protein, 341 aa, Synechococcus sp. CC9605
MTLRVAINGFGRIGRNVLRGWISRGADTGLEIVGMNSTSDPATSAHLLTYDSILGRLDPSVDIKTTDSSMFVNGKEIKFFADRNPLNCPWKEWGVDLVIESTGVFNTDEKASMHIQAGAKKVILTAPGKGDRVGTFVVGVNDDQYRHEDWDILSNASCTTNCLAPIVKVLDQNFGLDWGLMTTIHSYTGDQRILDNSHRDLRRARAAALNMVPTTTGAAKAVALVYPEVKGKLTGFAMRVPTPNVSAVDLTFGPSRAASVDDIKAAIKSASENGMKGIIKYGDLPLVSTDYAGTNESTIFDADLTYAMGDKAVKILAWYDNEWGYSQRVVDLAEVVAKNWK

SEQ ID NO: 19443 - protein, 449 aa, Oceanobacter sp. RED65
MSDLDSFYQWLEERNPGQEEFIQAVKEVVCDVHGLVEDEERYQNWNILERLTEPDRIISFRVTWQDDDGRIRVNRGWRVQYCGVIGPYKGGLRFHPSVNESILKFLGFEQTFKNALTTLPMGGAKGGSDFDPRNCSDGEIMRFCQAFMNELYRHIGENTDIPAGDINVSSREIGYLFGQYRRLANSFSGTLTGKDIEFGGSHVRLEATGYGLVYFISEMLKQDDEELKDKTIAISGAGNVALHAAKKAIQMGGKVITLSSSKGYLYVEQGLEEYHINELIERQGKCYSDSTELLKSINGDSNAKWHDDKTPWEVECDIALPCATQNELKLDDAKKLVKNKVKYVAEGSNMPCTQDAIDCFEESSIKHAPGKASNAGGVALSGFEMAQNASFTPMGYDDLDEKLKAIMTNIHTQCCEEGQQDNGFIHYRKGANLAAFKRVADAIVSQGVG

SEQ ID NO: 19444 - protein, 409 aa, Carboxydothermus hydrogenoformans Z-2901
MIHVTTLPNKITVLVEEIPYIRSAAIGLWFKVGSRHERRDESGISHFIEHMMFKGTVNRTAKEIAESLDQVGGQLNAFTTKEYTCYYARVLDEHTLLALEILHDMVFNSKFAEEDIEKEKNVVIEEIRMYEDAPDELIHDLLTEVMWNNHPLGRPILGEIQDIESLTREKVVNYYKRYYTPDNLIIAVAGRVNYQQLLDKIMELFGSIQGEQKGDKITIPEFNLHSFSRRKDSEQVHLCLGTKGYAINDDRIYGLNILSTILGGGISSRLFQELRERHGLVYSVYSYTTAYQDAGLFGIYAGLGPNKVNEALELIQKQLKELKTGDISAEEVERARQQIKGNLLLSLESVTTRMSRLAKSFLYHGKIISPEEIVEKVFNVSLEDIKAMAEEISDLNNFTKVSIGPWEGF

SEQ ID NO: 19445 - protein, 555 aa, Oceanobacter sp. RED65
MKVSDLFVKVLKQHGVRYLFGIPGDAINDLMESVRKEEGIEFIQVKHEEAGALAASVQAKLTGKLTACVGTSGPGAIHLLNGLYDAKMDHAPVLAITGQVETQYMGTNYHQEVDLERLFSDVSCYSQTVTTANQLPDVLLEACRAAISGRTVAHLNLPSDIAQKQINEDVSELSDTVFETHTIPSTSDCNEALKLIDDAQRICILAGIGTACAKPELLELSEKLKAPIVRTLRAKEVIDDQHPNCIGGLGLLGGKPAIEAMNDCDLLLMIGTDFPYKEFYPKNAKVIQIDIEATQIGKRHPVNVGLVGHARFVIQALLEQLTPRSDDAFLSVLQDAMQSWRKSQYKSETSSDFPIKPQRLIHEVSRVAPDDAIFVCDTGTVNAWTARHLHVKPSQRYTLSSALGTMGVGLPGAIGAKLAYPDRTVISLVGDGGFAMTMTDLVTAVNYDLPMVIIILNNQKLGFIKLEQEAAGLPAFGIDLKNADFVAFAKACGADGISVEQPENLETAIEQGLLSHKPFVIDVSINPDELIMPPKIEASQAMNFVKAKAKEWLGQ

SEQ ID NO: 19446 - protein, 109 aa, Glycine max
MAVHGDDDPVVMVDPNLSPPNTYEAVVNGGTFDRLHNGHRLLLTASAELDEVQASAELARRRIVIGVCDGPMLAKKQVTFFHFPHLIVIFGCYEMHIHNSLRILTANYY

SEQ ID NO: 19447 - protein, 284 aa, Shewanella oneidensis MR-1
MTAQIIDGKAIAQSIRTQLREQVTARKEAGQRVPGLAVILVGADPASQVYVGSKRKACEEVGFISRSYDLDTSCSEAELLALIDQLNDDPSIDGILVQLPLPAHIEDSKVIERIRPDKDVDGFHPYNVGRLAQRIPVLRSCTPMGIMTLIKSTGVDTYGLDAVVVGASNIVGRPMTLELLLAGCTTTTCHRFTKNLEQKIRQADLVVVAVGKPGFIPGEWIKPGAIVIDVGINRLENGTLVGDVQYETAAQNASFITPVPGGVGPMTIASLLENTLYAAEQYHD

SEQ ID NO: 19448 - protein, 497 aa, Vitis labrusca x Vitis vinifera
MKKSSAGAPSKPTKPAWVLPYKTQDLRTLYTIGQKLGQGQFGTTFLCTDKATGHNYACKSIPKRKLFCKEDYDDVWREIQIMHHLSEHPNVVRIRGTYEDPVFVHLVMELCEGGELFDRIVQRGHYSEREAAKLIKTIVGVVEGCHSLGVMHRDLKPENFLFDTTAEDAALKATDFGLSVFYKPGETFSDVVGSPYYVAPEVLCKHYGPEADVWSAGVILYILLSGVPPFWAETETGIFRQILQGKLDFESEPWPCISETAKELLRKMLDRNPKKRLTAHEVLSHPWVVDDRMAPDKPLDSAVLSRLKQFSAMNKLKKMALRVIAEGLSEEEIGGLRELFKMIDTDNSGTITFDELKDGLKRVGSELMESEIRDLMNAADIDNSGTIDYGEFLAATVHLNKLEREENLVSAFSFFDKDKSGYITIDELQQACKEFGLSEAHLDDMIKEIDQDNDGQIDYGEFAAMMRKGNGGIGRRTMRNNLNLGDVLGIPDMRLTN

SEQ ID NO: 19449 - protein, 228 aa, Erythrobacter sp. NAP1
MPKLILVRHGQSQWNLENRFTGWWDVDLTEKGVAEAKAAGTLMKEKGVLPTTCFTSFQTRAIKTLNLALEEMGRLWLPVTKDWRLNERHYGGLTGLNKQETRDKHGDEQVHIWRRSFDTPPPPMEPGSEYDPGADPRYEGIDVPYTESLKLTIERVLPYWESDILPVLSSGETVIISAHGNSLRALVKHLSNISDEDITGLEIPTGQPIVYEFDDTMTPGERYYLKDS

SEQ ID NO: 19450 - protein, 143 aa, Oryza sativa (japonica cultivar-group)
MPVPLAPYPTPPVPFTPPNGAQSQLVCSGCRNLLMYPAGATSVCCAVCSTVTAVPAPGTEMAQLVCGGCHTLLMYIRGATSVQCSCCHTVNLAMEANQVAHVNCGNCRMLLMYQYGARSVKCAVCNFVTSVGASPGIDQKPSS

SEQ ID NO: 19451 - protein, 322 aa, Staphylococcus epidermidis RP62A
MKKIAVLTSGGDSPGMNAAVRAVTRTAIYNNIEVYGVYQGYQGLLDDDIHKLELGSVGDTIQRGGTFLFSARCPQFKEEDVRKKAIENLRKRGIEGLVVIGGDGSYRGAQRISEECKEIQTIGIPGTIDNDINGTDFTIGFDTALNTIIESVDKIRDTASSHARTFIVEVMGRDCGDLALWAGLSVGAETIVLPEVNTDIKDVAEKIEQGIKRGKKHSIVMVAEGCMSGQECADELTKYINIDTRVSVLGHIQRGGSPSGADRVLASRLGGYAVELLKQGETAKGVGIRNNQLTSTPFDEIFAESNRKFNSQMYELAKELSI

SEQ ID NO: 19452 - protein, 409 aa, Pseudomonas syringae pv. syringae B728a
MTKLKLVMIGNGMAGVRTLEELLKLSEDLYHITVFGAEPHPNYNRILLSPVLAGEQNFEDIVLNDLDWYQRNGIELLLNRRVVKIDRIKRLVIADDGTQAHYDRLLIATGSRPFILPIPGNTLNGVIGYRDISHTRQMIDTAVTHKRAVVIGGGLLGLEAANGLSLRGMQVTVIHNGQTLLERQLDKTSGRMLQAALEKRGLSFRLDEQTNALLGDDQGRVTAVQFNNGDRIDADLVVMAAGIRPNTELAEQAGLPCNRGILVNDTLQTYDPRIYAIGECVSHRGIAYGLVAPLFEQARVCANHLAQLGFARYPGSVTSTKLKVTGIDLFSAGDFLGGEGTESITLSDPIGGVYKKLVIKNDVLVGACLYGDTADGNWYLQQIRDGQGIDAIRDHLMFGKPAAAQAACA

SEQ ID NO: 19453 - protein, 437 aa, Nostoc sp. PCC 7120
MRRIGEKHMVSMPTLPLEGASPAHICPFDQACSYLEAAAKELRLDQGALEILSHPRKVVTVSIPVRLDNGDIRVLAGHRVQHSDILGPYKGGTRYHPAVTLREVSALAMLMTWKCALLGIPYGGAKGGIAIDPEHYSVGELERITRRYTSELIKDIGPSVDIPAPDVGTSAREMAWMMDTYSMNVGHAVPGVVTGKPISIGGSRGREMATGRGVMIIVREALADMGRTLEGVKVVIQGFGNVGGAAAELLYQAGAKILAVSTGAGGLFASDGLDIPALKAYAAENHRSIVGFPQAVPISNAELLTLPCDVLIPAALENQITEENVDQIQAQIVAEAANGPVTLEANRVLEGRGVTVLPDILANAGGVVVSYLEWVQGLSYLFWDEERVNREMEHLMVQAYHQVIKQSQMRQVPLRLAAYTLGVGRVAQALSDRGLYP

SEQ ID NO: 19454 - protein, 448 aa, Prosthecochloris aestuarii DSM 271
MSTTAYCLEPFMEWIQTKNPAEPEFHQAVFEVARSIIPFVNEHQKYQQACILERMCEPDRIISFRVVWEDDKGNIRMNRGHRVQFNNSIGPYKGGLRFHPSVNTGILKFLGFEQTFKNSLTTLPMGSAKGGSDFDPKGKSDREIMRFCQSFMTELSHYIGHFTDIPAGDIGVGAKEISYLFGEYKRLSHQFTGVLTGKSLEYGGSLIRKEATGYGCVYFMEEMLHEKGESIRGKTCTVSGSGNVALYCAQKINHLGGKVVTLSDSDGFIHIPQGISDEELDAIIELKTFKRGRLAEYAEKTACSYFAAEKPWGIECDLAFPCATENEITKSDAALLAGGGCIALAEGANMPTTQDALEVLRNSGILTAPGKAANAGGVAVSGLEMAQNSMRMAWTTQDLDSRLQAIMKSIHQQCTTYGRTNGYIDYVKGANIAGFIKVADAMLAYGIL

SEQ ID NO: 19455 - protein, 309 aa, Listeria monocytogenes
MTKKVGLLVMAYGTPYKDEDIERYYTDIRHGHKPSEEMIADLRGRYHAIGGLSPLAKITEAQAYGLEKALNDSQDEVEFKAYIGLKHIEPFIEDAVEAMHKDGIEEAISIVLAPHYSSFSVEAYNKRAKEAADKLGGPRINAINDWYKQPKFIQMWADRINETAKQIPADELLDTVLIVSAHSLPEKIKQHNDPYPNQLQETADFIFEKVVVPHYALGWQSEGKTGEPWLGPDVQDLTRELYGREKYKHFIYTPVGFVAEHLEVLYDNDYECKVVTDEVGAAYHRPPMPNSDPEFLEVLRTVVWEKYSN

SEQ ID NO: 19456 - protein, 372 aa, Oceanospirillum sp. MED92
MKLNTPEELLEDIRQGKMVILMDDEDRENEGDLVIAAEMVRADDINFMATHARGLICLTLTRDRCEQLNLPLMVQSNGAQFSTNFTMSIEAAEGVTTGISAADRAHTVRVAVKENAKPEDIVQPGHIFPLMAQPGGVLSRAGHTEAGCDLARMAGFTPASVIVEIMNEDGTMARRPDLEEFAEKHGLKIGTIADLIHYRTANEHTVERSEEGVMATEYGDFNYVTYRDEIQNCTHLAMTLGEVKADEPVYVRVHNRAEVLRDVVGAVNPNEEPKWTMRKALARVAAEGQGVVLLLDTNERIDMSESVDLMLNGRQQSKVNVSASGAYLTVGTGSQILRDLGVGKMRLLSSPMKFNAISGFDLEIEEYIPCEE

SEQ ID NO: 19457 - protein, 333 aa, Methanocaldococcus jannaschii
MHKICVIEGDGIGKEVVPATIQVLEATGLPFEFVYAEAGDEVYKRTGKALPEETIETALDCDAVLFGAAGETAADVIVKLRHILDTYANIRPVKAYKGVKCLRPDIDYVIVRENTEGLYKGIEAEIDEGITIATRVITEKACERIFRFAFNLARERKKMGKEGKVTCAHKANVLKLTDGLFKKIFYKVAEEYDDIKAEDYYIDAMNMYIITKPQVFDVVVTSNLFGDILSDGAAGTVGGLGLAPSANIGDEHGLFEPVHGSAPDIAGKKIANPTATILSAVLMLRYLGEYEAADKVEKALEEVLALGLTTPDLGGNLNTFEMAEEVAKRVREE

SEQ ID NO: 19458 - protein, 353 aa, Bacteroides fragilis NCTC 9343
MDFKIAVLAGDGIGPEISVQGVEVMSAVCEKFGHKVNYEYAICGADAIDKVGDPFPEETYRVCKNADAVLFSAVGDPKFDNDPTAKVRPEQGLLAMRKKLGLFANIRPVQTFKCLVHKSPLRAELVEGADFLCIRELTGGMYFGEKYQDNDKAYDTNMYTRPEIERILKVGFEYAMKRRKHLTVVDKANVLASSRLWRQIAQEMAPQYPEVTTDYMFVDNAAMKMIQEPKFFDVMVTENTFGDILTDEGSVISGSMGLLPSASTGESTPVFEPIHGSWPQAKGLNIANPLAQILSVAMLFEYFDCKAEGALIRKAVDASLDANVRTPEIQVEGGEKFGTKEVGAWIVDYIRKA

SEQ ID NO: 19459 - protein, 500 aa, Bacteroides fragilis NCTC 9343
MDTTLRDGEQTSGVSFVPHEKLMIARLLLEELKVDRVEVASARVSDGEFDAVKMICDWAARRNLLQKVEVLGFVDGHTSLDWIHATGCRVINLLCKGSLKHCTCQLKKTPEKHIEDILAVVDYANELDIEVNVYLEDWSNGMKDSPEYVFRIVDALKETTIKRFMLPDTLGILNPLQVIEFMRKMKKRYPDTHFDFHAHNDYDLAVSNVLAAVLSGVKGLHTTINGLGERAGNAPLASVQAILKDHFNAITNIDESRLNDVSRVVESYSGIVIPANKPIVGENVFTQVAGVHADGDNKSNLYCNDLLPERFGRVREYALGKTSGKANIRKNLESLGLELDEESMKKVTERIIELGDKKELVTQEDLPYIISDVLKHDGMSNKVKLKSYFVTLAHGLKPMATLSIEIDGQVYEESSSGDGQYDAFVRALRKIYKVTLGRKFPMLINYAVSIPPGGRTDAFVQTVITWSFGEKVFRTRGLDADQTEAAIKATIKMLNIIEEY

SEQ ID NO: 19460 - protein, 219 aa, Synechococcus sp. WH 7803
NSRLCMSSAVAGYTRSLGSDGPPCCYEDLDHCSVVILIGTNTAECHPVLFQRLLKRKKRDPNGLTIVVVDPRSTDTAKIADYHLALAPGTDLALLHGLARLIIQDNGFDSDFIDTATEGFAGFTQTIKTWTPGKTSKFCGIAEKDLRAVARLWSRKERILSLWSMGVNQRREGTAVVGGLINLHLLTGEIGKAGAGPFSLTGQPNAMGGREAGGLAHLL

SEQ ID NO: 19461 - protein, 125 aa, Klebsiella granulomatis
REVMTTLWPFLEENPRYRQLALLERLVEPERVIQFRVVWVDDRNQVQVNRAWRVQFNSAIGPYKGGMRFHPSVNLSILKFLGFEQTFKNALTTLPMGGGKGGSDFDPKGKSDGEVMRFCQALMTE

SEQ ID NO: 19462 - protein, 502 aa, Buchnera aphidicola
DGEQALQASLSVKEKLQIALCLEKAKVDIMEVGFPISSPGDFKSVQTISKNIKNSRICSLARCIEKDIDAAGEAMSVCDSFRIHLFLATSILHMESKLRKNFNEIIDMAVFSVKKALRYTDDIEFSCEDASRSTIDNLCRIVEVLINTGVKTINIPDTVGYAVPNEFSFIIKSLFERVPNIHKSVISVHCHDDLGMAVGNSISAIQAGARQIEGTINGIGERAGNTALEEIIMAIKVRENLLGVSTNINHKEIYRTSQIVSRICNMPIPSNKSIVGSNAFSHSSGIHQDGVLKNRENYEIMDPISIGVKKVKLNLTSRSGRAAVKYYMNQMGYKDSDYNIDELYVDFLKLADKKGQVFDYDLESLAFINKQQDELEHFYLKFFSVQSISNSLSTASVKLLCGKDLHTESSTTSNGPVDAIYQALNKITHFPIVLQKFQLIAKGKGKDALGQVDIIVEYKKRKFHGVGLATDIIESSAKAMINVLNNIWKAKQVNEKLKNLKQ

SEQ ID NO: 19463 - protein, 649 aa, Chlorobium tepidum TLS
MKRKYFPFSAILGQEDLKKALLLNAVNPRIGGVLVRGEKGTAKSTAVRALGALLAAARNGSGGEGEVVVTLPLNATEEMVAGGIDFQQTMKEGRRVFQPGLLAKAHKGILYVDEVNLLDDHLVDIVLDAASSGENRVEREGITLSHPSLFVLAGTMNPEEGELRPQLLDRFGLCVEVRGEADPALRVDLMLRREAFDREPEEFSERYRAEEERLGRTIADAQSLLPSVRIPSHLRGFISELCRNSNVAGHRADLVIEQAARANAALRGSREVSVEDVTKVAGFALVHRRRDPVPPPEQKPQEPERQEEQSRDEQSRQEKPEERGDEPQQPQEGDDRRDGNDDSGNEERSQPENRDAAEQQERPDNEGQDELFSIGQSFRVRSIATPKDRKMRRGSGKRSRSRVSQKQGRYTKSTMPRGNNDIALDATLRAAAPFQRHRENPNGMAVVLQNEDIREKIREKRLGNLLIFVVDASGSMGARGRMAASKGAVMSLLLDAYQKRDKLAMVSFRKNEAFVNLPVTSSIELAARMLKEMPVGGRTPFSAGLLKGYEIAQNYLRKEPGGRPLIILVTDGKANRAIGQGKPLDEVFTISEKISREERIRFLVVDTEEPGLVTFGLAKKIAGLLDAWYYRIDDLRADTLVSIVKTMMP

SEQ ID NO: 19464 - protein, 363 aa, Buchnera aphidicola
MKQKYRIAILPGDGIGPEVMREAYKILNILKNDFLLPLEFQEFNIGGIAIDNEGLALPKKTLLGCENADAILFGSVGGKKWDTLPIDQRPERAALLPLRKHFNLFANLRPAKLYSELEYLSPLCSKITKNGFDILCVRELTGGVYFGHPHGRVKKDDIEYAFDTEVYYDYEINRIAHLAFQLARNRKNKVCSIDKSNVLNSSLLWKEIVEKVSNSYSDVRLSHLYIDNATMQIIKNPNQFDVLLCSNLFGDIISDECAAISGSIGMLPSASLNENNFGLYEPAGGSAPDIEGKNIANPIAQILSVSMLVRYGMHLTKIADQIDKSVISVLKRGYRTADISNNNNYLKTHEMGDVIADALINGK

SEQ ID NO: 19465 - protein, 347 aa, Chlorobium tepidum TLS
MKKNYTYPFTAIVGQEEMKLALILNIINPAISGVLIRGEKGTAKSTAVRALADILPEIEVIAGIPFNLAPDEDDETIRECFTVTGHAMPDPDNLEVTMHKVQVVELPVGATEDRVVGTLDLEHALKTGEKRIEPGLLAAAHRGILYVDEVNLLDDHVVDVLLDSAAMGVNTIEREGVSFSHPARFTLVGTMNPEEGELRPQLLDRFGLCVHVGGIADPQDRVTVMERRFAFEQDQERFCSEWQGESSKLAERIVAARELYPSVTISREHLLGIAKSCLKVGVDGHRGDIIIMKTAKTIAAWEGRHCVGSDDIDRAVALALPHRIRRQPLQDMVMDVGSLLGSKCTTN

SEQ ID NO: 19466 - protein, 219 aa, Synechococcus sp. WH 7803
NSRLCMSSAVAGYTRSLGSDGPPCCYEDLDHCSVVILIGTNTAECHPVLFQRLLKRKKRDPNGLTIVVVDPRSTDTAKIADYHLALAPGTDLALLHGLARLIIQDNGFDSDFIDTATEGFAGFTQTIKTWTPGKTSKFCSIAEKDLRAVARLWSRKERILSLWSMGVIQRREGTAVVGGLINLHLLTGEIGKAGAGPFSLTGQPNAMGGREAGGLAHLL

SEQ ID NO: 19467 - protein, 536 aa, Zea mays
MDRVLLSSHLPSHALANTRLQLGPGGLNSIGFAVIKKGCLKLRCYAIGDELGGPGRLSKHFVENSNGPVFQGLDASAGSFRTVGAEITQDTGDFFVSDAEGDPDKPTDGFSSIDQAIGALREGKFVIAVDDENGDNEGDLVMAATLVDQKSVAFMIRNGSGIISVGMEEEDLTRLMIPMMSPITEIEDITAAASTVTVDARVGISTGVSAADRAKTILTLASSDSKPSDLRRPGHIFPLKYRNGGVLKRAGHTEASVDLVALAGLRPVSVLSTVMDPRDGSMAGVTVLQQMAMEHDIPIVSIADLIRYRRKREKLVELIAVSRLPTKWGLFRAYCYQSRLDGTEHIAVVKGDIGDGEEVLVRVHSECLTGDILGSARCDCGNQLELAMQLIEKAGRGVLVYLRGHEGRGIGLGQKLRAYNLQDEGHDTVEANVELGLAVDAREYGIGAQILRDIGVRTMRLMTNNPAKFIGLKGYGLAVVGRVPVISPITKENQKYLETKRTKMGHVYGSDLPGSLPEFANPQEAPTEQDDDDNQN

SEQ ID NO: 19468 - protein, 503 aa, Buchnera aphidicola
DGEQALQASLSVKEKLQIALCLEKSGVDIMEVGFPISSPGDFKSVQTISQKIKNSRVCSLARCIEKDIDVAGEAMSASNSFRIHIFLATSTLHMESKLRKNFNEIIDMAIFSVKRALRYTDDIEFSCEDASRTTIDNLCRIVEKLISCGVKTINIPDTVGYTIPNELSFIIKNLFEKVPNIHKSTISVHCHDDLGMAVGNSISAIQAGARQIEGTINGIGERAGNTALEEVIMAIKVREDILGVSTNINHKEIYRTSQIVSSICNMPIPSNKAIVGSNAFAHSSGIHQDGVLKNRENYEIIDPISIGLKKVKLNLTSRSGRAAVKHYMNEMGYKENDYNIDELYTDFLKLADKKGQVFDYDLEALAFINKQQDESEYFSLKFFSVQSISNNLSTASVTLLCGKKIYTEASTTSNGPVDAIYQALNRITHFPIVLQKFQLVAKGKGKDALGQVDILVEYKKRKFHGVGLATDIMESSAKAMVNVLNNIWKAKQVNKNLKNLKKQ

SEQ ID NO: 19469 - protein, 690 aa, Halobacterium sp. NRC-1
MVDLGRSKKLSPDRRAGAPFPAVVGQDDLKTGLLAVAANASLDGLLVTGEKGTAKSTTARALADLLPDQRAVADCPYGCPPEDPTRQCADCRDRTDPPVESRPVPFVTLPLGASRDRVVGSLSVTDALAGDAEFSPGLLAAANRGILYVDEVNLLDDHLVDVLLDAAASGVNRVERDGVSVTHPAEFTLVGTMNPEEGDLRPQFRDRFALRVAVAGSEEIADRVEIMDRALAGFDGDYAADTAAVRDRLVTARDLLPDVDLPESLAREIAELCRDAGVDGHRADVATARAARTLAALDGRPTVTEADIERAAGFALPHRLQSRPFEDAPDPEDVVDDHFDDDGDQSDEEGDAETSDEAGGDDPEPTDNAEADAEPDGDTGGAEAPTGGPDDSQSEGSQAPADSEAGDDPTDGERGDDEDTEDAAPLVPGQPRGDTVEPGTGVAPDADAPDAERATGDSGRASATPSPDARGARVRTERATPADDVDAAASVRAAAARGSDAVESRDLRQSINAGSASALVVFAVDASASMRGPMRAAKGVALDLLRDAYQHRDEIAVVAFAGDDADVLVPPTDSVALAARHLKDLPTGDRTPLPAGLRAADDVLARADPDASVVVVVTDGQANATDTPTAATRTAASALAERGAHVVVVDAGDNARGLTSDIVDAADGERVPLDALSADRVEHAVGQARK

SEQ ID NO: 19470 - protein, 365 aa, Buchnera aphidicola
  misc_feature (128)..(128): Xaa can be any naturally occurring amino acid
  misc_feature (154)..(154): Xaa can be any naturally occurring amino acid
MKTKYRISVLPGDGIGPEVMREAYKILNILKNHFSLPLEIKEFNIGGAAIDQEGVALPKKTLLGCENSDAILFGSVGGKKWDHLPIDKRPERASLLPLRKHFNLFANLRPAQLYSELKYLSPLRSDIXIKNGFNILCIRELTGGIYFGKPTGRXLKKNNIEYAFDTEIYYDYEINRIAHLAFQLAQTRNYKVCSIDKSNVLNSSVLWRETVQKVSKNYPDVHLSHLYIDNATMQIIKDPNQFDILLCSNLFGDIVSDECAIITGSIGMLPSASLNEKKFGLYEPAGGSAPDIEGKNIANPIAQILSVSMLVRYGMNLKKIADKIDQSVISVLKKGYRTADISNNNNYLKTNEMGDVIANTLISGE

SEQ ID NO: 19471 - protein, 421 aa, Symbiobacterium thermophilum IAM 14863
MGLVVQKFGGSSVATAEKYRRVARRIAWKKRQGNDVVVVVSAPGDMTDDLIERARSITDRPSAREMDVLLATGEQISIALLTMALHELGVDAVSLTGPQAGFQTDDHHRAARIVNIDTARIRRELAAGRVVIVAGFQGMDDHGDITTLGRGGSDASAIALAAYLSADQCQIFTDVDGVYSADPRIVPTARRLDEISYDEVLELAAAGAQVMQLRSVELAKQYGVEFEVLSSLAPLPDEGGEERGTKVVAKLSPNNHRIVSGVAVDSKVAHITLLGLPDRPGVAYRAFKALGDARINLDMIVQSAGTGCGNGPTADISFTCARDDLETALEVCNRLLPEFPGARVVYDTDVAKVSIVGSGVASNYGVAARMFEALAEKDINIELITGSEIKISCLVRASRAMEAVRAVHDKFELGDVAPIVQ

SEQ ID NO: 19472 - protein, 396 aa, Xylella fastidiosa
LIARELRRPTLAVLSRCLQADIETSARALESATKPRLHVFLSTSPLHREHKLRMSKEQVLESVHKHVSLSRTLIDDVEFSAEDATRTEEDFLIEVTRVAIAAGATTINLPDTVGFSTPEEIRNMFTRVIANVEGANKVIFSAHCHDDLGLAVANSLAAIEGGARQIECTINGIGERAGNCALEELTMVLKVRNAFYNIDTSIHTSRIVSTSQLLQRLVGMPVQRNKAVVGANAFAHESGIHQHGMLRHRGTYEIMRPQEVGWVCSHMVLGRHSGRAAVEQRLRALGYLLEEEDLKLVFEEFKQLCEKQRLVTDVDLQVLMQDTTVQHGYRLASMTISDVGNRANALVELSDPQGQRVAETAQGNGPVDALFGALAAATGVKLELDSYQVHSVGIGA

SEQ ID NO: 19473 - protein, 216 aa, Mycoplasma penetrans HF-2
MEKIIELSVLALDQKDENKFKEQLESCLKNNIKDIHYDIMDNKFVPNTSFNNLEFLDYLIEKGCNVSAHLMVENVAHYVDKLITKKVKYITFHCEAQTIEESISIINTIKKHNIKAGIAIKPNSSLKEYESLIKISDKITVMSVEPGFGGQKYIENSEIRIREIKKLSHKNLIVEIDGGINDQTILLCKDDATHFVTGSFLFNNLEKFEELKKLLD

SEQ ID NO: 19474 - protein, 359 aa, Symbiobacterium thermophilum IAM 14863
MQNVSVAVIPGDGIGNETVRAGRRVLDAAAELDGGIKFEYTEFEWGCAYYLRHGEMAPKGFLNTLANFDTILLGAVGYPGVPDHVSLWGLLLPIRRGFEQYVNLRPVRILRGVVSPLRGRNPGDVNFVCIRENTEGEYSNMGGRLHAGLPHEVVVQNTVFTRVGTERIIRYAYQLAANAPRKRLCGATKSNGINYTMPYWDEIFNEIGEREFPEVNRWLCHIDALAANFVLKPDEFDVVVASNLFGDILTDLGGAIMGSIGMAASANINPERRYPSMFEPVHGSAPDIAGRGIANPVGQIWSVSLMLEHLGRADLGKAVLDAVEDVLEEGRVRTPDLGGRNTTDEMTDAVIARLAQRLR

SEQ ID NO: 19475 - protein, 544 aa, Candida albicans SC5314
MSQSPTNVPRSYNSVLDLKLASPTNSASGATGGWIVQKFGGTSVGKFPENIVDNIVKVYSQTNRVAVVCSARSSQTKSEGTTSRLLRSADLAENDKDYQPLLNAIEEDHVTNAERIQSKEIKQELIKDTKQEIEHVRELLHACQIIGEISPRSLDSIMAVGEKLSCLFMTALMKDHGLNAVYINLQDVIPLSYDFQKGFDDSFYQFLSQEIGKRVLQCDKEREEEEDVIPVLTGYFGVVPGGLLNGVGRGYTDLCAALAAVALQADELQIWKEVDGIFTADPRKVPNARLLDSVTPEEAAELTYYGSEVIHPFTMEQVIRAKIPIRIKNVENPTGKGTIIYPDNIGRRGEATPPHPPAAFEQLAMSSLLQRKRSATAITAKQDIVVINIHSNKKTLSHGFLAHVFTTLDKYKLVVDLISTSEVHVSMALSIQSDQESQLKHALVDLRKMGTVDVTKKMTIVSLVGKQMVNFIGIAGNMFKVLADEKINIEMISQGANEINISAVINEKDTIRALKSIHAKLLEGGSAIGDSSAVDTRLEALKLS

SEQ ID NO: 19476 - protein, 502 aa, Buchnera aphidicola
DGEQALQASLSVKEKLQIALCLEKAGVDIMEVGFPISSPGDFKSVQTISQNIKNSRICSLARCIEKDIDAAGEAMSISNSFRIHIFLATSTLHMESKLRKNFNEIIDMAIFAVKRALRYTDDIEFSCEDASRTTIDNLCRIVEKLISSGVKTINIPDTVGYTIPNELSNIIKSLFERVPNIHKSIISVHCHNDLGMAVGNSISAIQAGARQIEGTINGIGERAGNTALEEIIMAIKVREDILGLSTNINHKEIYRTSQIVSRICNVPIPSNKAIVGSNAFSHSSGIHQDGVLKNRENYEIMDPSSIGLKKVRLNLTSRSGRAAVKYYMKEMGYKENDYNIDELYTDFLKLADKKGQVFDYDLEALAFINKQQDESEYFSLKFFSVQSISNNLSTASVTLLCGKKIYTEASTTSNGPVDAIYQALNRITHFPIILQKFQLIAKGKGKDALGQVDILVEYKKRKFHGVGLATDIMESSAKAMVNVLNNIWKAKQVNKNLKNLKK

SEQ ID NO: 19477 - protein, 363 aa, Buchnera aphidicola
MTRKYRIAVLPGDGIGPEVMREAYKILNILKDDFSLPLEIKEFNIGGAAIDQEGVALPKKTLLGCENSDAILFGSVGGKKWDNLPINQRPERASLLPLRKHFNLFANLRPAQLYSELKNLSPLRSNIIKNGFNILCIRELTGGIYFGKPTGRLKKNNIEYAFDTEIYYNYEINRIAHLAFQLSQTRNYKVCSIDKSNVLNSSILWREIVKKVSKHYPDVHLSHLYIDNATMQIIKDPNQFDVLLCSNLFGDIISDECAMITGSIGMLPSASLNEKKFGLYEPAGGSAPDIEGKNIANPIAQILSLSMLVRYSMNLKKIADKIDQSVISVLKKGYRTADISNNNDYLKTNEMGDVIASALISGE

SEQ ID NO: 19478 - protein, 353 aa, Bacteroides thetaiotaomicron VPI-5482
MDFKIAVLAGDGIGPEISVQGVDVMSAVCEKFGHKVSYEYAICGADAIDKVGDPFPEETYEVCKNADAVLFSAVGDPKFDNDPTAKVRPEQGLLAMRKKLGLFANIRPVQTFKCLIHKSPLRAELVENADFICIRELTGGMYFGEKYQDNDKAYDTNYYTRPEIERILKVAFEYAMKRRKHLTVVDKANVLASSRLWRQIAQEMAPNYPEVTTDYMFVDNAAMKMIQEPAFFDVMVTENTFGDILTDEGSVISGSMGLLPSASTGESTPVFEPIHGSWPQAKGLNIANPLAQILSVAMLFEYFDCKEEGALIRKAVDASLDENVRTPEIQVADGAKYGTKEVGQWIVDYIKKA

SEQ ID NO: 19479 - protein, 499 aa, Bacteroides thetaiotaomicron VPI-5482
MDTTLRDGEQTSGVSFVPHEKLMIARLLLEDLKVDRVEVASARVSEGEFEAVKMICDWAARRNLLQKVEVLGFVDGHTSVDWIQRTGCRVINLLCKGSLKHCTQQLKKTPEEHIADIINVVHYADEQDIGVNVYLEDWSNGMKDSPEYVFQLMDGLKQTSIRRYMLPDTLGILNPLQVIEYMRKMKKRYPNTHFDFHAHNDYDLAVSNVLAAVLSGVRGLHTTINGLGERAGNAPLSSVQAILKDHFNAMTNIDESRLNDVSRVVESYSGIVIPANKPIVGENVFTQVAGVHADGDNKNNLYCNDLLPERFGRKREYALGKTSGKANIRKNLEDLGLELDEDAMRKVTERIIELGDKKELVTQEDLPYIVSDVLKHGAIGEKVKLKSYFVNLAHGLKPMATLKIEINGKEYEESSSGDGQYDAFVRALRKIYKVTLGRKFPMLTNYAVSIPPGGRTDAFVQTVITWNYDEQVFRTRGLDADQTEAAIKATMKMLNLLEE

SEQ ID NO: 19480 - protein, 375 aa, Methanosarcina mazei Go1
MTQYKVPVLPGDGIGPEIIAEGRKVIDAAGERFGFDVEWIEYPHGADHYLETGELISEETLKELSGYPAIYLGSIGDPRIAPGVLEKGILLTARFYFDQYINLRPIKLLEGVWTPIKDKTSKDIDFVVVRENTEDFYIGIGGRAKKGASKDLLEVKRTLYSAKFGLDIETDSEEIGYQIGLISKEGTKRVIEYAFDLAENRKKHVSSVDKANVLSDIYGFWREEFNAVAEKHPGFTTDFNFVDAITMWFVKNPEWFDVVVTPNMFGDIITDLGAMIQGGLGLAPGGNINPNGTSMFEPIHGSAPKYKGQNKVNPIATIWAGAMLIEQLGEKEAADTIVNAIQKNILDGKVKTYDMGGKNTTSDVGDDIARIIKGE

SEQ ID NO: 19481 - protein, 559 aa, Vibrio vulnificus YJ016
MSKKMFIRQAGNTLLNTPLLNKGSAFTLEERKNFNLIGLLPANIETIDEQVSRAYEQFSLFNSAMEKHIYLRNIQDTNETLYFRLINQHIEEMMPIIYTPTVGEACQKFSQIYRRNRGLFLSFEDQDELEAILNNAPNTHVKVIVITDGERILGLGDQGIGGMGIPIGKLALYTACGGISPEHTLPIVLDVGTNNSALLSDPMYMGWRHPRITGDQYDDFVDDCLKAIRRRWPNALIQFEDFAQANAMPLLMRYQNQFCCFNDDIQGTASVTVGTLLAAAHATGKKLSAQKVLFAGAGSAGCGIAEAIVAQMVSEGISVQQARSQVFMVDRWGMLEQEMPNLLPFQKPLAQPASLRTEWQIEANREISLLDVIQHAHPDVLIGVTGVPGLFNQEIIEAMAEDCERPVVMPLSNPTSRVEAKPEDILMWTQGQAIVATGSPFPDVVLAGKRYPIAQCNNSYIFPGVGLGVISANAHRVTNEMLQQASITLASLSPMLNGGNMLLPPLSEIQNVSRKIALEVAKKAVEQGKASHRTEERLLERIDEEFWYAQYCEYRRIAS

SEQ ID NO: 19482 - protein, 422 aa, Erythrobacter sp. NAP1
MLNGVFAMSELAIVSAKTSALRARSDEGSIAARIAIRLAEEPGKFLSTVQIGITLIAIVTGALSGASLEAPIGERVALLGVPEDTARQVAFVGVIALTTYFSVVVGELVPKQLALRAAVPIAIVMARPMDLLARLAAPLVWLLDKSSAGIIALFGIRTKGRPSLTAKELQMIFADATRSGVIEQDQHQILTGVVRLAERPVRELMTPRTELDWVDADADLEQVLATISNSPHSLLPVAEGSPDAILGIVKVREVLAALVAKEPVSIRGMAKKAEVVPDQLDAMDALRVLQSAEIAMAVVHDEYGHFEGVVTPVDLLTAIAGTFASDQDQGDTPQIIECTDGSLLVSGALSADGLADRLGLEYGEDREFGTAAGYALSVMKKLPLIGESFTDQGWEFEVVEMDNRRIDKIIVRKRAEDSSEDG

SEQ ID NO: 19483 - protein, 263 aa, Burkholderia thailandensis E264
MSYQAIRIDIDPAAQIATITLDRPDKLNSFTRNMHRELQSALDDVQAANARALILTGAGRGFCAGQDLADLDFTPGAMTDLGDMIEAHFNPLIRRLQALPLPVIAAVNGIAAGAGANLAFACDLVIAAKSSSFIQSFVKIGLVPDSGGTWFLPQRVGFARALGLALTGDKLGAEQAERWGLVWRVVDDAELTGTASQLARQLAQQPTRAIAAIKQAMRSSVTNTLDQQLDVERDLQRELGQSYDYAEGVRAFIEKRAPRFEGR

SEQ ID NO: 19484 - protein, 608 aa, Burkholderia pseudomallei K96243
MATVADFIVERLYDWGVRRLYGYPGDGINGMFGALNRADGKIEFVQVRHEEMAAFMACAHAKFTGELGVCIATSGPGASHLVTGLYDARMDHMPVLAIAGQQARAALGGHYQQELDLSALFKDVAGAFVQTASVPAQARHLVDRAVRTALANRTVVALVLPNDLQELDYEPPKRRHGTVHSGIGYTDPQIVPYEADLRRAADVLNAGSKVAMLVGAGALRATDEVIAVADRLGAGVAKALLGKAAVPDELPWVTGSIGLLGTEPSYRMMSECDTLLVVGSGFPYSEFLPKEGEARGVQIDLKADMLSLRYPMEVNLVGDSAQTLRRLLPLLNERADASWRAQIARWNAAWWNTLDARARVNPGNGRGVNPQRAFTELSPRLPEYAIVTSDSGSCANWYARDLRMRRGMMCSLSGGLASMGAAVPYAIAAKFAHPHRPVIALVGDGAMQMNNMAELITVAKYWKQWADPRWICMVLNNEDLNQVTWEQRVMEGDPKFDASQQVPDVPYHRFAELIGLKGVYVDDADQLGAAWEDVLAANRPAVLEVKCDPEVPPLPPHVTLQQAKHFAQALMRGDPRERSVIVETAKQVLSGAFSGRADRTRDEPDGDA

SEQ ID NO: 19485 - protein, 454 aa, Oceanobacter sp. RED65
METKTATIESLQAMVEAQQASFEMHQAMNMEVFYWWCTAIMVMIHAGFLAYEMGASRSKNALAAGIKNILALAVIIPTFYLFGWWIYNAFPHGFTPIDASAALPWSQSMGPDVQDMGTGIFWAAFALFGATTGSILSGAVIERIRVSAFLILTVCLGSAIWILAGAWGWHPDGWLLTQLGYHDVGASGVVHAIAGFFTLGVLINLGARKGKFIDGVAQTIAPHSLPMTLIGLMMIIFGFFGFLGGCIIFNGGETGWTTIYNTPTNLSAFAFNTLMGFAGGIIGCYIATRDPFWTMSGGLVGIISVAAGLDLYSPSLAFIIATCMGVAAVQFAKLLERLQIDDAVGAVAVHGFTGAVAVVLVGVFAHGTPNVNGAPDITFTGQLISALVMIALGFLPGYGISYALKKANALRVPESAEEIGIDEVEILAKPYPEANTPASIESDVPNKLAEPQGV

SEQ ID NO: 19486 - protein, 287 aa, Streptomyces sp. C5
MTVPTPRHGTPHGGLPGRTVLITGATSGIGRAAALAIARQGARVVLVGRDPERLRTVTNEVARTAGPAPDAFRADFAELRQVRELGERLRDRYPRIDVMAGNAGGMFWSRTTTQDGFEATLQVNHLAGFLLARLLRERLAGGRLILTSSDAYTQGRIDPDDLNGDRHRYSAGQAYGTSKQANIMTATEAARRWPDVLTVSYHPGEVRTRIGRGTVASTYFRFNPFLRSAAKGADTLVWLAAAPAEELTTGGYYSDRRLSPVSGPTADAGLAAKLWEASAAAVGDTAR

SEQ ID NO: 19487 - protein, 168 aa, Brassica napus
MTTTVASPPHHPEELVPSSRVSPKTVDTAVTALLKWRSEKSKTEKPQLLEQDEFIYLIVTLKKIPQTNRTKPHRIPLPHPLINTSEDSSSSSPELCLIIDDRPKSGLTKEDAKKKIKSDNVPITKILKLSKLRSDYKAFESKRKLCDSYEMFFADRRVIPLLPRLIGK

SEQ ID NO: 19488 - protein, 169 aa, Glycine max
MAAQGKMEMGVVLVVMIISMMCVGAKAQQSSCTSALVNLSPCLNFITGNSSTPSSGCCTQLSSVVRSQPQCLCQVLNGGGSSLGVTINQTQALALPGACNVRTPPITQCNAASPVGSPSPNSDPSGTGSTNVPTTDNGSSSATSVKLSIPLMFFVLAATYAPTFGTLIL

SEQ ID NO: 19489 - protein, 689 aa, Brachypodium sylvaticum
MAAAARGRRCRGAVLLLLLLPSVLAPLVLYGYSPTSPLPDSTLARVAFDREDGSNLVWPHMAASEVSLAKDLTIERLGEHKNRVLSATDDWQAVQAARSRSSENSDASVQLKVPVTRDADEMIAEETGSALSGQEGRIKEVVSSQRNADGFGDPGNAKQAEEQDGLATEVEHTDGSGASTENNVAGIHTTESTADSLSNGTIHATPRESYTRATGINADLPTTTSSAGHSTASPDVKIRIIKDQLIRAKTYLGFVASRGNHGFAKELRARMRDIQRALGDATNDGLLPQNVHSKIKAMEQTLGKVKRSHDSCSGAVNRLRTALHSMEERLQSHKNEANYLAQIAAKSLPKGLHCLPLRLTNEYYSTNSNNKDFPNTEKLEDPKLHHYAVFSDNVLAAAVVVNSTLVHATNHVFHIVTDRLNYAAMKMWFLANPLGKAAVQVQNIQEFTWLNSSYSPVLKQLGSRSTIDYYFRSGTARPDENPKFRNPKYLSILNHLRFYLPEIFPKLNKVLFLDDDTVVQQDLSALWSIDLKGKVNGAVETCGETFHRFDKYLNFSNPIVANNFHPQACGWAFGMNMFDLSEWRKQNITDVYHTWQKLNEDRLLWKLGTLPAGLVTFWNRTFPLDRSWHLLGLGYNPNVNERDIRRASVIHYNGNLKPWLEIGLSKYRKYWSRYVDFDQIFLRECNINP

SEQ ID NO: 19490 - protein, 325 aa, Thermus thermophilus HB8
MEFNLSALGSAPAAEETYDVVIIGGGPAGLTAGIYAGRAQLKTVIVEKGLPGGQIAQTDEVENYPGFPEGISGPELASRMVRQAEKFGARIVMDEVLGLEKAEGGYLVRGYERNYRARAVIVATGANPRRLGVPGEDKFYGRGVSTCATCDGFFYRDKEVVVVGGGDAAVEEGIFLTKFARKVTLVHRRDELRANKVAQKRAFQNPKMHFLFSHVVTEILGEDQVTGVRLKNLKTGEEYVYPTDGVFVFIGHEPNTAFLKGVVELRPDGYIAVRDEVFTSEPGIFAAGDVADPIYRQLTTSVGAGTRAAMMAERYLAEEAEKVKG

SEQ ID NO: 19491 - protein, 358 aa, Bradyrhizobium japonicum USDA 110
MPDTVQEVLQAFARGELVVVTDDEDREGEGDLIVAASLCTAEKMAFIIRHTSGIVCAPVTTEDARRLRLDPMVAHNDSAHTTAFTVSIDYKPDGGTGISAEERASCCRALSNPNVGANDFARPGHIFPLIAKDGGVLLRSGHTEAAVDLCKLSGLPPVGVISELMNDDGSVMKGEQVARFAAQHKLKHVTIADMIAYRQVREKLIERVSTFVTDSPIGPLQGYAYRSPFDSIAHVAFVYNGVGDGKNVLTRFHKPNIVKDIFTGHKRMAAVLEHFERSGRGVLVYLRDGAAGVPVAPLPDETSTEADRNRQWREIGVGAQILRDLGVTSIRHLTSSVHDYKGLSGFGIEIVANELLEI

SEQ ID NO: 19492 - protein, 95 aa, Idiomarina loihiensis L2TR
MQINLTGHHIDITEALRDYVDTKFAKLERHFDHITNVHVILNVEKTIQKAEATLHVNGGELFADAKHEDMYAAIDGLINKLDRQVIKHKEKMKQH

SEQ ID NO: 19493 - protein, 425 aa, Burkholderia thailandensis E264
MAIVEVKVPQLSESVSEATMLQWKKKPGEAVAQDEILIELETDKVVLEVPAPAAGVLAQVLQNDGDTVVADQVIATIDTEAKAGAAAAAAGAAEVQPAAAPAAAPAPAAQPAAAAASSTASASPAASKLMAEKGLGAADVAGSGRDGRITKGDVLSAGSAPKAAPAAAPAKAAAKPSLPDVKVPASATTWLNDRPEQRVPMSRLRARIAERLLESQQTNAILTTFNEVNMQPVMDLRAKYKDKFEKEHGVKLGFMSFFVKAAVHALKKFPLVNASIDGNDIVYHGYFDIGIAVGSPRGLVVPILRNADQLSLAEIEKKIAEFGQKAKDGKLSIEEMTGGTFSISNGGVFGSMLSTPIINPPQSAILGVHATKERPVVENGQIVIRPINYLALSYDHRIIDGREAVLSLVAMKDALEDPARLLLDL

SEQ ID NO: 19494 - protein, 377 aa, Gibberella zeae PH-1
MASTHSSKQRLALAICDFLSASTNDGTLTADDKDSIDVAINCIAESFKVDPSDTSAVSAAIGSQNLLQIYSVFEKARADKPAAAPTPAPVVLTEEQKKEAEALKSKGNAAMAQKDYSAAINFYTQALAINASNAVYLSNRAAAHSANKDHASARSDAESAVSIDPAYTKAWSRLGLARFALGDARGAMEAYDRGIQHEGNGGSDAMKKGYETAKRRVQEMEAEEDSLPRASPSAGNDANAGGMPDLGSLASMFGAGGAGGAGGGMPDLGSIMSNPMFANMAQKLMSNPDLMSNLMSNPRLRDMADRYSTGGGMPDLSSLMADPQIGEMARSMMGDGGNNPFGGAGGAGGASGQPGQGGVLGLFVINRCRIFMQDSVI

SEQ ID NO: 19495 - protein, 420 aa, Bacillus clausii KSM-K16
MTEIKVPELGESITEGTISQWLKEVGDYVEQGEFIAELETDKVNAEIPVDTAGVIKEFKREPGDTVEIGEVIAIIDESGSAGGSSATSESTKEEATAKEEAPQEEKQAEQTQQPEKEEAVSNNRPLASPAARKLAREKGISLDAITPTDPTGKIRRQDIEAHQAKPKQTEAPKAQPSSAPVSEGEAGKPVERQKMSRRRQTIAKRLVDVQHETAMLTTFNEVDMSAVMNLRSRRKDAFSEKHGVKLGFMSFFTKAVVGALKEFPLLNAEIQGDELLIKKFYDIGIAVSTDSGLVVPVLRDADRLSFAGIEKGIGELGKKARDNKLQLADMQGGTFTITNGGVFGSLWSTPILNAPQVGILGMHKIQMRPVAIDNERFENRPMMYLALSYDHRIVDGKEAVSFLVKIKQLIEDPEQLLLEG

SEQ ID NO: 19496 - protein, 265 aa, Nonomuraea sp. ATCC 39727
MSEPRVRYEKKEHVAHVTMNRPHVLNAMDRRMHEELAEIWDDVEADDDVRTVVLTGAGTRAFSVGQDLKERALLDEAGTQASTFGSRGQAGHPRLTDRFTLSKPVVARVHGYALGGGFELVLACDLVIASEEAVFGLPEVRLGLIPGAGGVFRLPRQLPQKVAMGHLLTGRRMDAATAFRYGLVNEVVPLDELDRCVAGWTDDLVRAAPLSVRAIKEAAMRSLDIPLEEAFTTSYPWEERRRRSGDAIEGVRAFVEKRDPVWTSR

SEQ ID NO: 19497 - protein, 727 aa, Physcomitrella patens
MAACTIVWFRRDLRLEDNPALIAAARAGTVVPVFVWSPAEDGQFHPGRVSRWWLKQSLTHLELSLKKLGSPLILRKSPDTLSVLLEIAEATGATQVFYNHLYDPVSLVRDHRVKQGLSQRGIVVHTFNGDLLYEPWEVYDEEGQAFTVYEAFWKKCMSMPFEPEAPLLPPRRLTGPIGKIVGCNAEELGLEDEFEKSSNALLARAWCPGWGFANKSLDSFLRSPLIDYARDRQKADGASGTPTSLLSPHLHFGELSVRKIFHEVRKRQITWAREGNAGGEASVNMFLRALGFREYSRYLSFHFPFTHERSLLANLKSFPWRADEGYFKAWRQGRTGYPLVDAGMRELWATGWAHNRIRVVVASFSVKFLQLPWRWGMKYFWDVLLDADLECDVLGWQYISGSLPDGHELDRIENPEVEGYRFDPDGDYVRRWIPELARLPNEWVHHPWDAPPSALRAAGVELGTNYPRPIVEIGAARERLQASLAEMWERDAAMKAALANGLEEGLGETVEVAGTGGPEHERMDVPRVMVHMQRDADMSCNSSRRDQLVPEIVPNQFHIRAHESIMNRSAAMVEDGEEAGRAAVPMVFASVRRGMGGNYGGHHVEGNGGEVAQASAPIQWPTVTAVDYELDSTAESASVTGRGGSEGGTVPVWSQSVSARTPIQVREGLVPEVRRGPGLSRRQLQASVQRVNLEGMTSNKQAEEEDFYVPKLVKWTQPRKRRVKQDG

SEQ ID NO: 19498 - protein, 466 aa, Picrophilus torridus DSM 9790
MENKKENFSEWYNEIIDLAKLSDKRYAIKGMNVWLPYGLKIMRLIDNIIRDNVDNKSFQEVSFPVLITRSQLETEFEHIKGFENEIYWVTKGGSEKLDIELALRPTSESAMYTMFPLWIRSHQDLPLKIYQIVSVYRYETKHTRSFIRVREIHFFEAHTAHVDYGDAERQMSEYMDIWSSIAEKLCLPYNIDMRPDWDKFPGAKYTLAFDTLMPSGRSLQIGTIHEYGENFARNYDIKYLDINGDLKYVSQTTFGLSERLLAAVIGIHGDDTGLILPASIAPVQAIIIPIPGKSFKEVLDYSGKILSMLKDINVRAEIDSRENYTPGYKYNDWEMRGVPLRIEIGSREMESSTVTVVSRLNKKRLNISIKEINNIKNMLNEHDKQLTLNAWKMMEENTVFIDDINNIPMNKDVLIKAYWCGSRECSDALEQKKDVTALGTLYNLNDSGKCIVCGNPGRLSMFARSY

SEQ ID NO: 19499 - protein, 498 aa, Bacteroides fragilis NCTC 9343
MSDRLFIFDTTLRDGEQVPGCQLNTVEKIQVAKALEVLGVDVIEAGFPISSPGDFNSVIEISKAVTWPTICALTRAVQKDIDVAVDALKFAKHKRIHTGIGTSDSHIKYKFNSTREEIIERAVAAVKYARRFVDDVEFYAEDAGRTDNEYLARVIEAVIKAGATVVNIPDTTGYCLPSEYGAKIKYLVDHVAGIENAIISTHCHNDLGMATANTMAGILNGARQVEVTINGIGERAGNTALEEIAMIIKSHHEIDIETNINTQKIYPTSRMVSSLMNMPVQANKAIVGRNAFAHSSGIHQDGVLKNVQTYEIIDPHDVGIDDNSIVLTARSGRAALKNRLSILGVTLDQEKLDKVYEEFLKLADRKKDIHDDDILVLAGADRSGNHRIKLEYLQVTSGVGVRSVASLGLNIAGEKFEAAASGNGPVDAAIKALKRIIDRHMTLKEFTIQAISKGSDDVGKVHMQVEYDNQMYYGFGANTDIIAASVEAYIDCINKFTK

SEQ ID NO: 19500 - protein, 572 aa, Burkholderia mallei ATCC 23344
MASTIADYLARTLAAAGVTKIWGVTGDSLNGLSDSLRRDGGIRWMHTRHEEVAAFAAGAEAAQTGRLAVCAGSCGPGNLHLINGLFDCHRNHVPVLAIAAQISSTEIGLGYFQETHPQELFRECSHYVEFVTNASQFPRVLERAMRAAIGEHGVAVIVLPGDVALSAAPARTPSWFDFASPVTTPADADLERLAALLDGSDAVTLLCGSGCAGAHDEVVALADALAAPVVHALRGKQHIEYDNPNSVGMTGLIGFSSGYHAMQSCDTLLMLGTDFPYRNFYPTRARIAQIDRRASALGRRAPLDVGLVGDVRATLSALLPRIRRKTRRGFVERALAHYAAARKGLDELARPSPAGRPIHPQYLTRVVDELAAADAIFAADVGTPTLWAARYLTMNGRRRLHGSFNHGSMANALPQALGAQAAHPGRQVVSLSGDGGLSMLLGDLLSARQLDLPIKVIVYNNSSLGFVAMEMKAGGYLDTGTDLHETDFAAIAKGAGLYSLRVTESEALPDALGKLLAHPGPALLDVVTDKHELAMPPKIEWAQAKGFSLYMLRAVLSGRGDEVLELAQTNLR

SEQ ID NO: 19501 - protein, 159 aa, Clostridium acetobutylicum ATCC 824
MSVYDFKAKDISGEEISLSKYEGKVLLIVNTASKCGFTPQYKELEDIYKKLGNEKFEILGFPCNQFANQEPGGSGDIKNFCEINYGVTFPLFEKIDVKGENAHPLFKYLASQAGGILGKEIKWNFTKFLIDKKGDVVDRFAPVTKPSKIKDKIVKLMEE

SEQ ID NO: 19502 - protein, 337 aa, Picrophilus torridus DSM 9790
MEEIVKIGGSILTGTESIERIAELFNDSRIIVTSALKGVTDRLIRIYNENDQESLKDLIEEHKTILTAISDNFDEHLKEIANDMNYYLSCRYKSAFITSGERLAALILYAAISKRNDRFLLLNRPVIITDDSMDDAYAIMDETEKNLKNLVGYEHNYVIPGFMGLSRSGRITSLGRGGSDYSATVIARALNINVVRFITDVPGIMTADPKVVKNAYTVKEVSIYEAMEMARFGVKKFNRKTFEPVLGSNIEIRIESLVSGEMTLISNKTENTVKCLMFDESKNSVTIIGHGILNDKLQNIIITLSDNFVSNGLSITSMLKPGRSFEDVYKEVIGCQR

SEQ ID NO: 19503 - protein, 181 aa, Clostridium acetobutylicum ATCC 824
MSIYDFKVKDINGEDISMEEYRGKALLIVNTASKCGFTPQYEDLEALYKKFKGENFEVLGFPCNQFENQEPGTNNDIKKFCQINYGVTFKIFDKVDVNGENEAPLYRYLKEQAPFKELDESTPTAKIIAAFLREKLPETLIGDSIKWNFTKFLIDKNGRVVNRFESGVEPMEIESYIKALI

SEQ ID NO: 19504 - protein, 457 aa, Zea mays
MDSMMTPEILSANLALVMDKFSDDDTDTELDLDSPTEGFASIADAIEDVRQGKLVIVVDDESRENEGDLIMAASLVTPEAMAFIVRHGTGIVCVSMKEDDLERLCLPLMVTTKENEEKLCTAFTVTVDAKEGTTTGVSAKDRAKTVMTLASPDSRPEDFNRPGHIFPLKYREGGVLKRAGHTEASVDLAMLAGLPPVAVLCEIVDDADGSMARLPKLRVFAERENLKIISIADLIRYRRKRDRLVERASVARLPSQWGNGHGYCYRSAIDGIEHLAMVKGDIGDGQDILVRVHSECLTGDIFRSARCDCGDQLAMAIEMIEKAGRGVIVYLRGHEGRGIGLGHKLRAYNLQDDGRDTVEANEELGLPVDSREYGIGAQILRDLGVRSMKLMTNSPAKYSGLKGYGLSIAGRVPLVTPITSENRKYLETKRTKMGHVYGLANAQVNQPSGSQSTEEKH

SEQ ID NO: 19505 - protein, 745 aa, Legionella pneumophila str. Paris
MLDRASVVDEQFLKRVLQGDFPQLRSSMSPDTAELDKKTAIEFFDSQIKSRLLDIIARQLKEKGLSFYTIGSSGHEGNAVLGQVFRASDMAFLHYRSGAFFLQRAKQLPGIDGVKDILLSLVAAANDPISGGRHKVFGSVPLNIPPQTSTIASHLPKALGAALSITRARELGLPSKLAPDSVILCSFGDASTNHATSQATLNACSWITQQNYPLPIVFICEDNGIGISVPTPSSWIKSSVSSRPGIHYIECDGLNIADVFAKAQEADYLARVKKQPVFLHMRCVRLLGHAGSDIESQYNTQEEIEQREANDPLLHTAGILYREGWMSLQAMVELYQDNRALIEAKALEAIREPRMSSAEEIMASIVPRVEKKPKYPLPDDNRREQVFAGAYNQLTLKRNLCQQINFALTDLMMQYPNMLIFGEDVGKKGGVYRVTADLQARFGQRRVFDTLLDETTIIGTAIGLAHNGFIPVPEIQFLAYLHNAEDQLRGEASTLSFFSSGQYQNPMVLRIASLAYQKGFGGHFHNDNSIAVLRDLPGVIVACPSNGPDAAKMLRTCMRLAYEEGRVVVFLEPIALYMTKDLYSPGDNGWLFEYPSPDEMISQGEVGVYGEGDTVILTYANGYYLSRQAEKVLREVHNISVKIIDLRWLSPLPKDAILKEIAKAKRILIVDEGRQSGSISEGLMTLLMEEASPRLKIKRITGKDCFIPLGTAWQYLLPSQESIIDAVIALQSDKREKESGRLVVS

SEQ ID NO: 19506 - protein, 481 aa, Corynebacterium glutamicum ATCC 13032
MTSATTNPGVNEPLTDDQIIESIGPYNYGWHDSDDAGASAQRGLSEDVVRDISAKKSEPEWMLQQRLKALSIFDKKPVPTWGADLSGIDFDNIKYFVRSTEKQAQSWEDLPEDIKNTYDKLGIPEAEKQRLVAGVAAQYESEVVYHQIREDLEEKGVIFLDTDTALKEHPEIFQEYFGTVIPAGDNKFSALNSAVWSGGSFIYVPKGVHVDIPLQAYFRINTENMGQFERTLIIVDEDAYVHYVEGCTAPIYKSDSLHSAVVEIIVKKGGRCRYTTIQNWSNNVYNLVTKRTKVEEGGTMEWVDGNIGSKVTMKYPAVWMTGPHAKGEVLSVAFAGEGQFQDTGAKMTHMAPYTSSNIVSKSVARGGGRAAYRGLVQINANAHHSTSNVECDALLVDDISRSDTYPYNDIRNDHVSLGHEATVSQVSEEQLFYLMSRGLAEEEAMAMIVRGFVEPIAKELPMEYALELNRLIELQMEGSVG

SEQ ID NO: 19507 - protein, 406 aa, Xylella fastidiosa
QSDYEDMTLIARELRRPTLAVLSRCLQADIETSARALESATKPRLHVFLSTSPLHREHKLRMSKEQVLESVHKHVSLSRTLIDDVEFSAEDATRTEEDFLIEVTRVAIAAGATTINLPDTVGFSTPEEIRNMFTRVIANVEGANKVIFSAHCHDDLGLAVANSLAAIEGGARQIECTINGIGERAGNCALEELTMVLKVRNAFYNIDTSIHTSRIVSTSQLLQRLVGMPVQRNKAVVGANAFAHESGIHQHGMLRHRGTYEIMRPQEVGWVCSHMVLGRHSGRAAVEQRLRALGYLLEEEDLKLVFEEFKQLCEKQRLVTDVDLQVLMQDTTVQHGYRLASMTISDVGNRANALVELSDPQGQRVAETAQGNGPVDALFGALAAATGVKLELDSYQVHSVGIGADA

SEQ ID NO: 19508 - protein, 502 aa, Buchnera aphidicola
DGEQALQASLSVKEKLQIALCLEKIGVDIMEIGFPISSPGDFKSVQIISKNIKNSRICSLARCVEKDIDAAGEAMSASNSFRIHIFLATSTLHMEYKLKKNFHEIIDMAIFAVKRALRYTDDIEFSCEDASRTTIDNLCRIVEKLIYHGVKTINIPDTVGYTVPNELSYIIKNLLERVPNIHKSIISVHCHDDLGMAVGNSISAIQAGARQIEGTINGIGERAGNTALEEVIMAIKVREDILGVSTNINYKEIYHTSKIISRICNMPIPPNKAIVGSNAFSHSSGIHQDGVLKNRKNYEIIDPSSIGFKKLKLNLTSRSGRAAVKYYMSEMGYKDTDYNIDELYADFLKLADKKGQVFDYDLESLAFISKHPEELEHFCLKFFSVQSISNGLSTASIKLLCGQKLYIESSTTSNGPVDAIYQALNKITNFPIILQKFQLIAKGKGKDALGQVNILIEYKKRKFHGIGLATDFIESSAKAMVNVLNNIWQAEQVNKKLQELKK

SEQ ID NO: 19509 - protein, 365 aa, Buchnera aphidicola
  misc_feature (128)..(128): Xaa can be any naturally occurring amino acid
  misc_feature (346)..(346): Xaa can be any naturally occurring amino acid
MKKQYRIAVLPGDGIGPEVMKEAYKILKILQNYFSLHIEIKEFNIGGIALDKEGVALPKDTLLGCENSDAILFGSVGGKKWNNLPIEKRPERASLLPLRKHFNLFYNLRPAKLYSELRFLSPLRSKTXIKNGFDILCIRELTGGIYFGEPRGRLKKNNIEYAFDTEVYYDYEINRIAHVAFQLARTRKNKVCSIDKANVLNSSLLWREIVTKVSKNYPDVHLSHLYIDNATMQIIQNPNQFDILLCSNLFGDILSDECAIITGSIGMLPSASLNEKNFGLYEPAGGSAPDIAGKNIANPIAQILSLSMLVRYGMNLKKIANKIDQSVISVLKKGYRTFDISDDNNXFLKTNEMGDVIADALINGE

SEQ ID NO: 19510 - protein, 185 aa, Xanthomonas oryzae pv. oryzae KACC10331
MLRPYSTQETAMALNDLQHVPGAIAAPAETHGFVFNHTMLRVKDAKQSLDFYTRVLGFRLLDARDFADATFSLYFLALLPEGTAIPDDDAQRRLWMAGIPGVLELTHNHGTDTQDGPVYHDGNSDPRGFGHICVSVPDIHAACARFDSLNVPYQKRLEDGRMKHLAFIKDPDGYWVEIISNTPLA

SEQ ID NO: 19511 - protein, 140 aa, Brassica napus
  misc_feature (134)..(134): Xaa can be any naturally occurring amino acid
MRPLDEKETTQVFEKLFKFTGPNLKHLLERPAVEGPDAEPGRYCLRLHRNRVYYASEALVRRATAVSRPRLAGVGTPIGKFTHHGAFHLTVHALDLLAVHARRRVWLKPDTERSFLFGNSVPKSSLARITENTXAGDGVV

SEQ ID NO: 19512 - protein, 149 aa, Sesbania rostrata
MGAFTESQEALVTSSYETFKQNASDLSVLFYTFILEKAPGAKNLFSFLKDSDGVPKDNPNLKAHAAKVFELVVDSAVQLRTKGAVVIADANLGPVHVQKGVTDAHFVVVKEALLKTVKEATGAKWSDELSNAWEVAYDELAAAIKKAMG

SEQ ID NO: 19513 - protein, 498 aa, Bacteroides thetaiotaomicron VPI-5482
MDNRLFIFDTTLRDGEQVPGCQLNTVEKIQVAKALEALGVDVIEAGFPISSPGDFNSVIEISKAVTWPTICALTRAVQKDIDVAVDALKFAKHKRIHTGIGTSDSHIKYKFNSNREEIIERAVAAVKYARRFVDDVEFYAEDAGRTDNEYLARVVEAVIKAGATVVNIPDTTGYCLPSEYGAKIKYLIDHVDGIDNAILSTHCHNDLGMATANTIAGVLNGARQVEVTINGIGERAGNTALEEIAMIIKSHHEIDIQTNINTQKIYPTSRMVSSLMNMPVQPNKAIVGRNAFAHSSGIHQDGVLKNVETYEIIDPHDVGIDDNSIVLTARSGRAALKNRLSLLGVNLDQEKLDKVYEEFLKLADKKKDINDDDVLVLAGADRSQNHRIKLEYLQVTSGVGVRSVASLGLNISGEKFEACASGNGPVDAAIKALKKIVDRHMTLKEFTIQAISKGSDDVGKVHMQVEYDNQIYYGFGANTDIIAASVEAYIDCINKFKA

SEQ ID NO: 19514 - protein, 219 aa, Synechococcus sp. WH 8020
NSRLCMSSAVAGYTRSLGSDGPPCSYEDLDHCTVAFLIGTNTAECHPVLFQRLLERKKRHPGALTIVVVDPRQTDTAKAADIHLAVAPGSDLALLHGIAHLVMRENGQDPAFIDDCTDNYDSFFDVVARWTPRRVALFCGIPEKRLREVAQLFHRREKVLSLWSMGVNQRREGTAVVGGIINLHLLTGQIGKEGSGPFSLTGQPNAMGGREAGGLSRLL

SEQ ID NO: 19515 - protein, 506 aa, Buchnera aphidicola
DGEQALQASLSVKEKLQIALSLEKCGIDILEIGFPVSSPGDFKSVQTISKNIKNSRICSLARCIEKDIDAAGEAMSSSDSFRIHIFLATSTLHMESKLKKNFNEIIDMAVFSVKKALRYTDDIEFSCEDATRTTMDNLCRIVETLIKSGVKTINIPDTVGYTVPNELSCIIKNLFERVPNIHKSIISVHCHDDLGMAVGNSISAIQAGARQIEGTINGIGERAGNTALEEIIMAIKVREDILSVSTNINYKEIYRTSKIVSQICNMPIPSNKAIVGSNAFAHSSGIHQDGVLKNRKNYEIMEPSSIGLKEVKLNLTSRSGRAAVKHYMDEMGYNNSDYNIDELYIAFLKLADKKGQVFDYDLEALAFINKQQDEWEYFSLKFFSVQSISNSLSTASVKLLCGKKTYTESSTTSNGPVDAIYQALNRIACFPIILQKFQLVAKGKGKDALGQVDILVEHKKRKFHGVGLATDIIEASAQAMINVLNNIWKAKQVNKKLKILKDFKKK

SEQ ID NO: 19516 - protein, 363 aa, Buchnera aphidicola
MKKNYRIAVLSGDGIGPEVMQEACKILNVLKKYFFLSLEIQKFNIGGIAIEREGVALPKTTLLGCENSDSILLGSVGGKKWDNLPVEQRPERAALLPLRKHFNLFSNLRPAKLYPELKCLSPLRSDIVKNGFDILCVRELTGGIYFGEPKGFVNKNNTKYAFDTEIYHEYEIIRIAHLAFKLARSRKKKVCSIDKSNVLQSSILWREVVESVSKKYPDVHLSHLYIDNAAMQIIKDPNQFDVLLCSNLFGDIISDECATITGSIGMLPSASFNEKNFGLYEPAGGSAPDIEGKNIANPIAQILSLSMLVRYGMNLNQIADKIDKAVNNVLKKGYRTSDISHDNNFLKTDEMGDLIVDSLINGK

SEQ ID NO: 19517 - protein, 219 aa, Synechococcus sp. WH 8020
NSRLCMSSAVAGYTRSLGSDGPPCSYEDLDHCTVAFLIGTNTAECHPVLFQRLLKRKKRHPGALTIVVVDPRQTDTAKAADIHLAVAPGSDLALLHGIAHLVMRENGQDPAFIDDCTDNYDSFFDVVARWTPRRVALFCGIPEKRLREVAQLFHRREKVLSLWSMGVNQRREGTAVVGGIINLHLLTGQIGKEGSGPFSLTGQPNAMGGREAGGLSHLL

SEQ ID NO: 19518 - protein, 479 aa, Methanosarcina mazei Go1
MVAMKMQINGKAAGSCGGECFDVRNPATCELLEQVPRGTEEDVALAVEAALSAFEGWASISPQQRGMVFYRAAGLVRQRKEELAALLTQEQGKPLAEARNELEGFSHVLEYYCGLAGSLRGDFIPVTGNGYSFTVKKPLGVCAAIIPWNMPALIMGWKIAPALISGNTFVLKPASSTPLTNLTLASILNEAGLPAGVLNVVTGSGEIAGESLVRSPDVRKISFTGESGTGKRISELAASGMKRVTLELGGSDPMIVCDDANLESAVAGAIRGRFYNCGQTCTAVKRLYVFESVAREFIRKLEEGVKRLKVGNGLDKDTDMGPLNNHSQFEYIKELVAGIEEKGEGRIIAGGKAPSFKGMGKGYFFEPTLVSDVPGDSRLLKEEVFGPLLPIVTVRNLDEAIEEANRSIYGLGASIWTKDLDRIRMGCEQLNAGIIWVNQHLKVAPEVPFGGVKESGFGRENGPDILSEYLETRTIMLKT

SEQ ID NO: 19519 - protein, 355 aa, Burkholderia thailandensis E264
MDTGKPHSRSIKVSFVLRNGPRATRPARHDAEKHVHASLKQLRSAPRLLRRRAFRAWPQNMPAKPAGTMSDRATHRRGASLPTPVEFKETHCMSAELLASRPPESESTLVLTLSNPGARNALHPDMYAAGLEALNTAERDPSIRAVVLTGADRFFCAGGNLNRLLDNRAKHPSVQAASIDLLGEWITAINTATKPVIAAVEGAAAGAGFSLALACDLLVAADDAKFVMSYARVALTPDGGGSWFLVRALPRALAAEILFEGKPAAATRLHELGVVNRLTKPGAARDEAIAWADELGRMSPNALARIKSLIADAQTQPLAAHLAAERDHFVASLHHADALEGITAFLDKRAPVYKR

SEQ ID NO: 19520 - protein, 341 aa, Streptomyces coelicolor A3(2)
MRIGVLTSGGDCPGLNAVIRSVVHRAVVDHGDEVIGFRDGWKGLLECDYLKLDLDAVGGILARGGTILGSSRVRPEHLRDGVERARGHVEELGLDAIIPIGGEGTLKAARLLSDNGLPIVGVPKTIDNDIAVTDVTFGFDTAVTVATEALDRLKTTAESHQRVLIVEVMGRHTGWIALHSGMAAGAHAVVVPERPFDIDELTAKVGERFSAGKRFAIVVAAEGAKPKAGTMDFDEGGKDVYGHERFAGIARQLSIELEERLGKEARPVILGHVQRGGTPTAYDRVLATRFGWHAVEAVHRGEFGKMTALRGTDIEMVSLADAVESLKTVPDARYAEAECVL

SEQ ID NO: 19521 - protein, 101 aa, Pseudomonas fluorescens Pf-5
MQVNISGHQLEVTEPLRVYIGEKLDRLERHFDKITNVQVTMAVEKLKQKIEATLHIHGGEVVANAEHDDMYAAIDLLTDKLDRQLKKHKEKQLHLLQGTGR

SEQ ID NO: 19522 - protein, 293 aa, Ralstonia metallidurans CH34
MSILINKDTKVITQGITGKTGQFHTRGCRDYANGKNCFVAGVNPKKAGEDFEGIPIYASVKDAKEQTGATVSVIYVPPAGAAAAIWEAVDADLDLVVCITEGIPVRDMMEVKDKMRRQNKKTLLLGPNCPGLITPDEIKIGIMPGHIHRKGRIGVVSRSGTLTYEAVGQLTALGLGQSSAVGIGGDPINGLKHIDVMKMFNDDPETDAVVMIGEIGGPDEANAAYWIKENMKKPVVGFIAGVTAPPGKRMGHAGALISGGADTAQAKLEIMEACGIKVTKNPSEMGRLLKAML

SEQ ID NO: 19523 - protein, 212 aa, delta proteobacterium MLMS-1
MTVKSCFPQPDRSRLDSKPPPPEEIRDLVIIGGGPGGLTAGIYAMRAALDTVLVEKGLPGGQLNNTATVENWPGTETISGVELAEKMTAHAKANGLEIMAREVKEIEPGDDHHCVYLDNGEQIPTRAVIIGSGGQPRQLGVPGETENYGKGVSYCAVCDGFFFRDKTVVVVGGGDTAMEEALYLAKIATKVYLVHRRQEFRAGMILQKRVLA

SEQ ID NO: 19524 - protein, 741 aa, Malus x domestica
  misc_feature (699)..(699): Xaa can be any naturally occurring amino acid
  misc_feature (702)..(702): Xaa can be any naturally occurring amino acid
  misc_feature (728)..(728): Xaa can be any naturally occurring amino acid
  misc_feature (738)..(738): Xaa can be any naturally occurring amino acid
MEACNCIEPQWPADELLMKYQYISDFFIALAYFSIPLELIYFVKKSAVFPYRWVLVQFGAFIVLCGATHLINLWTFNMHSRTVAIVMTTAKVLTAVVSCATALMLVHIIPDLLSVKTRELFLKNKAAELDREMGLIRTQEETGRHVRMLTHEIRSTLDRHTILKTTLVELGRTLALEECALWMPTRTGLELQLSYTLRQQNPVGYTVPIHLPVVNQVFSSNCAVKISPNSPVARLRQLAGKHIPGEVVAVRVPLLHLSNFQINDWPELSTKRYALMVLMLPSDSARQWHVHELELVEVVADQVAVALSHAAILEESMRARDLLMEQNIALDLARREAETAIRARNDFLAVMNHEMRTPMHAIIALSSLLQETELTPEQRLMVETILKSSNLLATLINDVLDLSRLEDGSLQLDIATFNLHSIFREVHNLIKPVASVKKLSVALNIATDLPVYAIGDEKRLMQIILNVVGNAVKFSKEGSISITAYVAKSESLRDFRAPDFFPVQSDNHFYLRVQVKDSGLGINPQDIPNLFTKFAQTQTSASQNSGGSGLGLAICKRFVNLMEGHIWIESEGLGKGCTATFIVKLGFPERSNEFKQPFAPKLQANHVQTNFPGLKVLVMDDNGVSRSVTKGLLVHLGCDVTTVSNLDEFLHVISQEHKVVFVDVCMPGIDGYELAVRIHEKFAKRHERPVLVALTGSIXKMXKENCMRVGMDGVILKPVSVDKMRSVXSELLEHRVLXEAM

SEQ ID NO: 19525 - protein, 375 aa, Thermomyces lanuginosus
MEEEVAALVIDNGSGMCKAGFAGDDAPRAVFPSIVGRPRHHGIMIGMGQKDSYVGDEAQSKRGVLSLRYPIEHGVVTNWDDMEKIWHHTFYNELRVAPEEHPVLLTEAPINPKSNREKMTQIVFETFNAPAFYVSIQAVLSLYASGRTTGIVLDSGDGVTHTVPIYEGFALTHAISRIDIAGRDLTDYLMKILAERGYSFTTTAEREIVRDIKEKLCYVAFDFEQELQTAAQSSTLEKSYELPDGQVITIGNERFRAPEALFNPAVLGHESGGIHETTFNSIIKCDVDVRKDLYGNIVMSGGTTMYPGIADRMQKELTALAPSSMKIKIIAPPERKYSVWIGGSILASLSTFQQMWVSKQEYDESGPSIVHRKCF

SEQ ID NO: 19526 - protein, 165 aa, Triticum aestivum
MAAGKRTIGLAMDYSPSSKAAMRWVFENLVKAGDRIILIHVLPKGADASHKGLWKSTGSPLIPLLEFMEMNVQARYGVNPDKEVLEILQAESKSKQVEILAKIYWGDAREKLCEAVDDLKVDSVVLGCRGLGPLKRALLGSVSNYVVNNATCPVTVVRGPNGSLA

SEQ ID NO: 19527 - protein, 310 aa, Carica papaya
MENFPVINMEGLNGEERAATMKKIEDACENWGFFELVNHGIPIELLDTVERLTKGHYRKCMEQRFKEIMASKGLDGIQTEVTDMDWESTFFNCHLPEPNIAEIPDLDDEYRKVMKEFALKLEKIAEELLDLLCENLGLEKGYLKKAFTWSRGPTFGTKVSNYPPCPKPNLIKGLRAHTDAGGIILLFQDDKVSGLQLLKDGKWVDVPPMRHSIVVNLGDQLEVITNGKYKSVEHRVVAQTDGTRMSIASFYNPGSDAVISPAELLVEKETEEKKTAYPKFVFEDYMKLYAGLKFQAKEPRFDAMKAAAKA

SEQ ID NO: 19528 - protein, 603 aa, Aspergillus nidulans FGSC A4
MFTAASASHIRVIVKDDTLGLGARSKRDLLDEPTGLDAFKGLLGRLNGKTDVELQADQRKRDDVKLARYAATKWQAVRFISGGLLAQEKDESKETAECTLKSGAKNANPVDNNCADDKTCATDLSQDSKSKNRRAKDDEKSEKEKERKDGKDKKDKKDKKDKKDKKDKMDKKDKKDKKDKKDKKDTNDKKDTNDKNDKKRKRAEQQEDSDNPVPGPSHAVKEHRPPGRHMIRGRHIAQKRKALMDDKSLNETFMDTEKVAQHSVTEADSAGDYSSQTARKSHLRGNEVLGRVTGNAVNGLSETSNNASGSIRGIESGTSNQQSKGYEKYGSDFLRSLPIWSLYASYFPARLHRSAPLLPTRKYVFGYHPHGIISLGAFAAFCTEALRFSKLFPGITNTLLTLDSNFRIPFYREYALSMGLASVSRESCENLLSKGGIDGEGMGRAITIVIGGARESLNASPGSLRLVLKRRMGFIKLAIRTGADLVPVLAFGENDLYEQVRSDSHPLIHKFQMLVKQTLGFTIPLFHARGVFNYDVGLMPYRRPLNIVVGRPIHVVQQQDRNKINDDYIDQLHSEYVRELERLWEEWKDVYAKDRVSEIEIVA

SEQ ID NO: 19529 - protein, 261 aa, Picrophilus torridus DSM 9790
MKTVNFPFSAIVKQDLVKLGLLINAIDPGIGGILIIGPKGIAKTTMVRSLSKILPEIKSTGCRFNCDPDDENSLCDECLDNLKNKKLKTVYKKIDIKEIPLSATIDRVAGSLDVKAALHGEVRLNEGILGEANRNILYIDEVNLLDDSIVDAILDSAATGINRVERENLSYVHPARFILIGTMNPEEGDLRPQLLDRFGISVTASLPESIEEMVEISKRVEDFNRDPVSFQERYMKNDIYIKNKIINARINLYRITSMMMT

SEQ ID NO: 19530 - protein, 223 aa, Picrophilus torridus DSM 9790
MIQEAVKSLRSGMPVLIFDSDDREGETDMVYASQFIRPESIRSMRKDGGGLICTTIKMEDALLTRLPYIEDLYKTLDIPNITNADDLKYDKNSTFSITVNSRETFTGIPDIDRAKTVKDISFYIDNLRRKKMDYNDFGRIFRSPGHIHLLIASDGYFKKRRGHTELSTYLVEISGLIPSATIVEMLSDTGRSMTMEEAMAYARNHNYTFITGDEIISHWSGSN

SEQ ID NO: 19531 - protein, 630 aa, Shigella dysenteriae
MCGLAGFLESNLNDNNSAKVLHSMGESIYRRGPDGTGIWFENIENKINVGFVHTRLAIIDLSDAGQQPMHSHCGRYVIAFNGEIYNHLELRYLLESNNHISWRGHSDTETLLACFGIWGIDKTLQACVGMFAIALWDKKEHRLTLARDRVGEKPLYWGWQDDALLFGSELKALKTHPAFSAEINRDALCLLLRHNYIPAPHTIYRGIQKLQPGHYLSVELSNDERKETLHQYWSYEKVVQEGLVNPFMGSPIQAVEHLESLIAQSINGQLISDVPLGAFLSGGIDSSLIVSIMQSLSSSPVKTFSIGFDDKKYDEAIFAVEVARHLGTDHTEMYVNDKDIQDVIPLLPEVYCEPFADSSQLPTFLVSKMAQQHVTVALSGDAGDELFGGYTPYSFTPKYWNYARNIPLQIRKFASRYIDKLPVNPKFKKLIECMAVQNPQLFYRNIISHWLNPEELVKNSSEPSTAFSSSTTFPVNGGYVDWMMSVDAQVYMTDDILVKVDRAAMYNSLETRVPLLDHRIIEFAWQLPVSLKINNGVGKWPLREILYKRVPKSMIERPKKGFSVPLSSWLRGPLRDWAEELIAYKRLADEGYFNVAAVRSCWNLHIQGQADYSRKLWSILMFQSWLENQK

SEQ ID NO: 19532 - protein, 286 aa, Halimeda cylindracea
KNMITGAAQMDGAILVVSGADGPMPQTKEHILLAQQVGVPAIVVFLNKIDQVDDADLLELVELEIRETLDRYDFPGDDIPIISGSALAAVEALTTNPMIQRGENEWVDKIYKLMDVIDEEIPLPPRSTDKDFLMAVENVVSITGRGTVATGRVERGQIKVGQNVEIVGLKETKETTVIGLEMFQKTLEESVAGDNVGVLLRGIQKDEIQRGMVLAKPGSITPHTRFKAQVYILKKDEGGRHTSFVAGYRPQFYVRTTDVTGKIDSFQGDDDSEIRMVMPGDRVKII

SEQ ID NO: 19533 - protein, 171 aa, Arabidopsis thaliana
  misc_feature (36)..(36): Xaa can be any naturally occurring amino acid
MGASASVPERSVHQFTVKDSSGKDLNMSIYQGKVLXLIVNVASKCGFTETNYTQLTELYRKYKDQDFEILAFPCNQFLYQEPGTSQEAHEFACERFKAEYPVFQKVRVNGQNAAPIYKFLKASKPTFLGSRIKWNFTKFLVGKDGLVIDRYGTMVTPLSIEKDIKKALEDA

SEQ ID NO: 19534 - protein, 619 aa, Prosthecochloris aestuarii DSM 271
MIAFTDIVGMDLAKQALMLLAIDPSLGGVVIPAAVGSGKSTLARAFQDILPEQTPFVELPLNVTEDRLIGGVDLEATLVKGARVVQHGVLSKAHEGVLYVDSLSLLDSSAVSHVMDAMSRGEVLVEREGLSEVHPSKFMIVGTYDPSDGEVRMGLLDRVGLIVPFTTQNDFRARKQILQCNIGQKDAEDTQDELRMLKGILDAARKLLPQVSMTKEQIQGLIQSAISLGVEGNRVDIFVIRAALASAALAQRTDVDEEDMKLAVKLVLVPRATCMPQREEEVEEQMPPEEEMPPEEPEAEDEEAPPDNSDPDAEEENEETPDMIEELMMDAIETELPENLMNISLASKKKSKSGSRGEALNNRRGRFVRSQPGEIRGGKVALIPTLISAAPWQESRRLERLRKTGKVSTTGLIINKEDVKVKKFRDKSGTLFIFIVDASGSMALNRMRQAKGAVSHLLQNAYVHRDQVALISFRGKEAQLLLPPSQSVDRAKRELDVLPTGGGTPLASAIYLAWETAKQARTKGVSQIMFVLITDGRGNIGLQSMMDKNAPKAPKEEIEKEVEALAASVYADGIASIVVDTQMNYLSRGEAPKLAEKLGGRYFYLPNAKAEQIAEAAMS

SEQ ID NO: 19535 - protein, 394 aa, Chlamydia trachomatis
MSKETFQRNKPHINIGAIGHVDHGRTTLTAAITRTLSGDGLADFRDYSSIDNTPEEKARGIPINASHVEYETANRHYAHVDCPCHADYVKNMITGAAQMDGAILVVSATDGAMPQTKEHILLARQVGVPYIVVFLNKIDMISEEDAELVDLVEMELAELLEEKGYKGCPIIRGSALKALEGDAAYIEKVRELMQAVDDNIPTPEREIDKPFLMPIEDVFSISGRGTVVTGRIERGIVKVSDKVQLVGLRDTKETLLLGLEMFRKNSQKVRAGENVGLLLRGIGKNDVERGMVVCLPNSVKPHTRFKCAVYVLQKEEGGRHKPFFTGYRPQFFFLTTDVTGVVTLPEGVEMVMPGDNVEFEVQLISPVALEEGMRFAIREGGRTIGAGTISKIIA

SEQ ID NO: 19536 - protein, 129 aa, Picrophilus torridus DSM 9790
MSWTEAEVRELKVGRYILIDDSPCRIVDITMSKPGKHGEAKGRIVAIGVFDNQKHSVVYPVKHKVKVPVITKKNAQVLSIANNEVQLMDSETFETFVIPVDPADLEKIKPGMEVPYWEAMGQRKIMLQN

SEQ ID NO: 19537 - protein, 504 aa, Thermosynechococcus elongatus BP-1
MICSEEFWVLGSMVGSVLRLDQVLIPEDAPIRFGTDGWRGIIGAEFTFNRLLRAAKAAAAVLYQTYGDGRTPRIIVGYDRRFLAEHFATAVAQFLTSQGYEVWLSNCAAPTPAFSWAVKAEGAIGGLVITASHNPGIYAGLKVKGAFGGSVPTPVTEAIEAQLAQGEPPPVGEAKTDYQTFDPWPSYCAALRTHVDPSPIREAIATGKLHVCADVMHGVAAGGLERLLDWPIEEFRRDRDPLFGSGAPEPIGRYLAATQERLRQQHSATPTVCLVFDGDADRLAVIDGEGVLYTAQEMIPILIDHLAQHSPYRGAVIKSISSSDLVARVAAHHGLAVIETPIGFKYIGDRMLAGEAVLLGGEESGGIGYGHHLPERDALLSALYLLQALVTSGLSVGEYYQQLQLTTNFYSAYDRVDLTLTSLAQRQKLEALLGEHPFTQILDSPVSHWDTIDGYKFHLADGGWLLIRFSGTEPLLRLYCQGKTPEQVQHILQWASQWAVAVTG

SEQ ID NO: 19538 - protein, 106 aa, Bradyrhizobium sp. BTAi1
MAVGKVSDADFESEVLQADGPVVVDFWAEWCGPCRMIAPALDEISSAMGDKVKIVKLNVDESPKTASKYGVMSIPTLMVFKGGEMASRQVGAAPKAKLQQWISSAV

SEQ ID NO: 19539 - protein, 132 aa, Brassica napus
MCGILAVLGCVDNSQATRSRIIKLSRRLRHRGPDWSGLHCYEDCYLAHERLAIIDPISGDQPLYSEDKTVVVTVNGEIYNHKALRESESLKSHKYHTGSDCEVLAHLYEEHGEEFINMLDGMFAFVLLDTKD

SEQ ID NO: 19540 - protein, 681 aa, Arabidopsis thaliana
MSGSVSGCGSGGCSIVWFRRDLRVEDNPALAAAVRAGPVIALFVWAPEEEGHYHPGRVSRWWLKNSLAQLDSSLRSLGTCLITKRSTDSVASLLDVVKSTGASQIFFNHLYDPLSLVRDHRAKDVLTAQGIAVRSFNADLLYQPWEVTDELGRPFSMFAAFWERCLSMPYDPESPLLPPKKIISGDVSKCVADPLVFEDDSEKGSNALLARAWSPGWSNGDKALTTFINGPLLEYSKNRRKADSATTSFLSPHLHFGEVSVRKVFHLVRIKQVAWANEGNEAGEESVNLFLKSIGLREYSRYISFNHPYSHERPLLGHLKFFPWAVDENYFKAWRQGRTGYPLVDAGMRELWATGWLHDRIRVVVSSFFVKVLQLPWRWGMKYFWDTLLDADLESDALGWQYITGTLPDSREFDRIDNPQFEGYKFDPNGEYVRRWLPELSRLPTDWIHHPWNAPESVLQAAGIELGSNYPLPIVGLDEAKARLHEALSQMWQLEAASRAAIENGSEEGLGDSAEVEEAPIEFPRDITMEETEPTRLNPNRRYEDQMVPSITSSLIRPEEDEESSLNLRNSVGDSRAEVPRNMVNTNQAQQRRAEPASNQVTAMIPEFNIRIVAESTEDSTAESSSSGRRERSGGIVPEWSPGYSEQFPSEENRIGGGSTTSSYLQNHHEILNWRRLSQTG

SEQ ID NO: 19541 - protein, 961 aa, Saccharum officinarum
MASERHHSIDAQLRALAPGKVSEELIQYDALLVDRFLDILQDLHGPSLREFVQECYEVSADYEGKKDTSKLGELGTKLTGLAPADAILVASSILHMLNLANLAEEVELAHRRRNSKLKHGDFSDEGSATTESDIEETLKRLVSLGKTPEEVFEALKNQSVDLVFTAHPTQSARRSLLQKNARIRNCLTQLSTKDVTVEDKKELDEALQREIQAAFRTDEIRRAQPTPQDEMRYGMSYIHETVWKGVPKFLRRVDTALKNIGINQRLPYNVPLIKFCSWMGGDRDGNPRVTPEVTRDVCLLSRMMAANLYIDQVEDLMFELSMWRCNDELRARAEEVQSTPASKKVTKYYIEFWKQIPPNEPYRVILGAVRDKLYNTRERARHLLATGFSEISVDSVFTNIEEFLEPLELCYKSLCDCGDKAIADGSLLDLLRQVFTFGLSLVKLDIRQESERHTDVIDAITTYLGIGSYRSWPEDKRMEWLVSELKGKRPLLPPDLPMTEEIADVIGAMHVLAELPSDSFGPYIISMCTAPSDVLAVELLQRECGIRQTLPVVPLFERLADLQAAPASVERLFSTDWYFDHIKGKQQVMVGYSDSGKDAGRLSAAWQLYVAQEEMAKVAKKYGVKLTLFHGRGGTVGRGGGPTHLAILSQPPDTINGSIRVTVQGEVIEFMFGEDHLCFQSLQRFTAATLEHGMHPPVSPKPEWRKLMEEMAVVATEEYRSVVVKEPRFVEYFRSATPETEYGKMNIGSRPAKRKPGGGITTLRAIPWIFSWTQTRFHLPVWLGVGAAFKWAIDKDIKNFQKLKEMYNEWPFFRVTLDLLEMVFAKGDPGIAGLYDLLLVADDLKPFGKQLRDKYVETEKLLLQIAGHKDILEGDPYLKQGLRLRNPYITTLNVLQAYTLKRIRDPCFKVTPQPPLSKEFADENKPAGLVKLNPASEYPPGLEDTLILTMKGIAAGMQNTG

SEQ ID NO: 19542 - protein, 219 aa, Synechococcus sp. WH 8020
NSRLCMSSAVAGYTRSLGSDGPPCSYEDLDHCTVAFLIGTNTAECHPVLFQRLLKRKKRHPGVLTIVVVDPRQTDTAKAADIHLAVAPGSDLALLHGIAHLVMRENGQDPAFIDDCTDNYDSFFDVVARWTPRRVALFCGIPEKRLREVAQLFHRREKVLSLWSMGVNQRREGTAVVGGIINLHLLTGQIGKEGSGPFSLTGQPNAMGGREAGGLSHLL

SEQ ID NO: 19543 - protein, 105 aa, Rickettsia conorii str. Malish 7
MANNVMDSSFKKEVLESDLPVLVDFWAEWCGPCKMLTPIIDEISKELQGKVKVLKMNIDENPNTPSEYGIRSIPTIMLFKNGEQKDTKIGLQQKNSLLDWINKSI

SEQ ID NO: 19544 - protein, 205 aa, Arabidopsis thaliana
MAQTMLLTSGVTAGHFLRNKSPLAQPKVHHLFLSGNSPVALPSRRQSFVPLALFKPKTKAAPKKVEKPKSKVEDGIFGTSGGIGFTKANKLFVGRVAIIGFAASLLGEALTGKGILAQLNLETGIPIYEAEPFLLFFILFTLLGAIGALGDRGKFVDDPPTGLEKAVIPPGKNVRSALGLKEQGISQHFYFYLCYNDIALNNQCK

SEQ ID NO: 19545 - protein, 528 aa, Kineococcus radiotolerans SRS30216
MTSQEGFVTTTTASTSADAGAPGDPSPAPLVPHWISGAPAPGSGERAGDVYDPATGKRTKRVVLADPADVDAAVAAAKAAFPAWRDTSLARRTAVLFRFRELLNERKGELAEIITAEHGKVLSDALGEVSRGQEVVELACGINHLLKGAFSENASTGIDVYSVRQPLGVVAVISPFNFPAMVPMWFFPVAVAAGNAVVLKPSEKDPSAANFIAQLWKDAGLPDGVFNVLHGDKVAVDGLLAHPDVASVSFVGSTPIAKYVYETATAHGKRVQALGGAKNHMLVLPDADLDLAADAAVNAGFGSAGERCMAVSALVAVDSVADELVARIRQRVATLRTGDGRRGCDMGPLVTGAHRDKVAGYVEAGVREGAELVIDGREVVPDAQDDEAAADGFWLGPTLFDRVDPGMSIYTDEIFGPVLSVVRVAGYDEGLDLINRNRYGNGVAIFTNDGGAARKFRNEVQVGMIGVNVPVPVPVAYFSFGGWKQSLFGDTHAHGVEGVHFFTRGKVVTERWLDPSHGGLNLGFPQND

SEQ ID NO: 19546 - protein, 112 aa, Prochlorococcus marinus str. MIT 9312
MKKIEAIIRPFKLEDVKIALVNSGIVGMTVSEVRGFGRQKGQVERYRGSEFTVEFLQKLKVEVVVEDEKVNSVIDAIAEAAKTGEIGDGKIFITSIDSVVRIRTGDKDEEAL

SEQ ID NO: 19547 - protein, 145 aa, Gossypium hirsutum
MAHFQNQYSAPEVTQTDAYGNPTRRTDEYGNPIPTQETGRGILGIGGHHHGGHHGLHRTGSSSSSSSSSEDEGTGKKKKGLKERLKEKIPGNKEHQSQATSTTTPGQGPTYHQQHREERSDGQDQGEAPWSPQPLISCLWSAISY

SEQ ID NO: 19548 - protein, 406 aa, Xylella fastidiosa
QSDYEAMTLIARELRRPTLAVLSRCLQADIETSARALESATKPRLHVFLSTSPLHREHKLRMSKEQVLESVHKHVSLSRTLIDDVEFSAEDATRTEEDFLIEVTRVAIAAGATTINLPDTVGFSTPEEIRNMFTRVIANVEGANKVIFSAHCHDDLGLAVANSLAAIEGGARQIECTINGIGERAGNCALEELTMVLKVRNAFYNIDTSIHTSRIVSTSQLLQRLVGMPVQRNKAVVGANAFAHESGIHQHGMLRHRGTYEIMRPQEVGWVCSHMVLGRHSGRAAVEQRLRALGYLLEEEDLKLVFEEFKQLCEKQRLVTDVDLQVLMQDTTVQHGYRLASMTISDVGNRANALVELSDPQGQRVAETAQGNGPVDALFGALAAATGVKLELDSYQVHSVGIGADA

SEQ ID NO: 19549 - protein, 506 aa, Ralstonia eutropha JMP134
MNHRTVVTGTGGTRPKPIPAPAECRARLERLARRALPVLLLAALPWTAGAQTPRTVASPMPSGQTAPVDATAQGTTEYKLSNGLRLIVKEDHRAPTVAHQIWYRVGGIDEVSGTTGVAHMLEHMMFKGTPKVGVGEFSKQVAALGGRENAMTNRDFTLYYQQIGKQYLPKMMELEADRMANLIFNKGEFDREMKVVMEERRLRTDDSARGTVYEQLLANVYVAAPYRHPVIGWMDDLVNMRLEDVQSWYRSWYVPNNATVIVTGDVNPAEVRALAERYYGKLKPRPLPLRKEQIDPPQLGIKRVWVKAPAENPYMVMAYKVPRLRDVEKDVDPYALEVLAAVLNGYDNARLTRELVREQRLADDVNVGYDSINRGNSLFVLDGTPADGHTTEQIEAALREEIQRIARNGVSPEELKRVKAQVVASQIYKRDSVFGQGMEIGVAEISDISWRKIDRILDKIKEVTPAQVQAVAAKYFTDDNLTVATLLPQPIDPNKPKAKAPEGLRH

SEQ ID NO: 19550 - protein, 476 aa, Kineococcus radiotolerans SRS30216
MSISDTPTLPLQAPSDLPRTLGALRASGHRHVGVKEELRTNLVARMRAGEDRFPGVVGYEDTVAPELERALLAGHDVVLLGERGQGKTRLLRSLVGLLDEWTPVIEGSELNEHPYAPLTPASRRRVAAEGDDLPVAWLHRSLRYGEKLATPDTSVGDLIGDVDPVKVAEGRALGDPETIHFGLVPRTNRGIFAVNELPDLAERIQVSLLNVLEERDIQVRGYQLRLPLDLLLVASANPEDYTNRGRIISPLKDRFGAEVRTHYPLEVSMEVDLVRQEADTVAEVPEHLLEVLARFTRAVRESPAVDPASGVSARFSIAAAETVAAAALRRHALTGERGDAVARVGDLHTVVSVLGGKVEFEQGEEGREVEVLEHLLRTAIAETYRSLLGGAELSGFAELVTEGRTVETGDLVPAERLLEQVGTVPGLGQVLGRLGLGDEPTPGRAASGVEFVLESLHLTRRLDKLVLDDGRTVYGS

SEQ ID NO: 19551 - protein, 135 aa, Gossypium hirsutum
MAHFQNQYSAPEVTQTDAYGNPTRRTDEYGNPIPTQETGRGILGIGGHHHGGHHGLHRTGSSSSSSSSSEDEGTGKKKKGLKQRLKEKIPGNKEHQSQATSTTTPGQGATYHQQHHEKKGVMDKIKEKLPGHHNP

SEQ ID NO: 19552 - protein, 127 aa, Arabidopsis thaliana
  misc_feature (7)..(7): Xaa can be any naturally occurring amino acid
  misc_feature (9)..(9): Xaa can be any naturally occurring amino acid
  misc_feature (15)..(15): Xaa can be any naturally occurring amino acid
  misc_feature (17)..(17): Xaa can be any naturally occurring amino acid
  misc_feature (22)..(23): Xaa can be any naturally occurring amino acid
  misc_feature (41)..(41): Xaa can be any naturally occurring amino acid
  misc_feature (56)..(56): Xaa can be any naturally occurring amino acid
MVFPVYXGXRTRIVXEXKLLTXXWSRTCLEDAETEYGYRRXDGPIVLPCEVDFFFXKALADMKSNPGHHDHDDDYDDDDGFTNSPICGFVCSPYRSYGGGVTDPLAMKRNGSYKLLRSPSLFKLTRF

SEQ ID NO: 19553 - protein, 297 aa, Rhodopseudomonas palustris CGA009
MSTSPEHKRTALVTGANSGLGKAIVTALAADGLRVGLVARDRGRGEAALADVRAATGNQDLHLFVADLADQESIRALAQDVRARFDRLHLLINNAGTAFPERRLSPQGIERAFAINHLGPFLLTNLLLDLIKASAPARIVNVGTRIDAAIDFDDLNWDKRPYGMMKGYAQSKLGNLHFTFELARRLEGSGVTVNCVFPGVFKSNLGGTDGAQGLFWKLLAKLGGWAIPKPESAAQRVLYLANAPELESVSGQYYANRKTIPAPAQALDAEANRRLWEISERMTGLTQSQTVGDQAAT

SEQ ID NO: 19554 - protein, 52 aa, Arabidopsis thaliana
DPEVQNILSDPVMRQVLVDFQENPKAAQEHMKNPMVMNKIQKLVSAGIVQVR

SEQ ID NO: 19555 - protein, 493 aa, Rhodopseudomonas palustris CGA009
MAGIWTRKSLSSLQIEAAAGDSGDGEVRHLKRSLSAVNLVALGVGGIIGAGIFVLTGHAAAANAGPAVSLSFLLGAITCAFAGLCYAEMASTVPVSGSAYTYAYATIGELVAWIIGWDLILEYAVGAITVAIGWSGYFVSLLGNFGIHLPPQFTTAPLAYDAATHAWSTTGAFLNLPAIAIVVAIATLLVIGIQESARFNNVIVGIKLTVIALFLIFAAPMVTPANWVTAANPDGAFIPPAQENGIFGWSGVLRGAAVVFFAFIGFDAVSTAAQEAKNPQRDMPLGILGSLAICTVLYVSVAFVLTGIVPYDRLNVPDPIAVGIDAAGIGWLSSIVKIGVVTGLTSVILVLMLGQTRVLRAMAHDGLMPRGAAATHPRFRTPHVATIGTGVIVAGLAGVLPIGLVGELVSIGTLFAFAVVCVGVLALRIKHPEQHRPFKVPAIWLVAPAGAIVSFILMLGLPLDTWIRLAVWLAIGLAIYFLYGRHHSKPARR

SEQ ID NO: 19556 - protein, 474 aa, Streptococcus pneumoniae TIGR4
MTRYQNLVNGKWKSSEQEITIYSPINQEELGTVPAMTQTEADEAMQAARAALPAWRALSAVERAAYLHKTAAILERDKEEIGTILAKEVAKGIKAAIGEVVRTADLIRYAAEEGLRITGQAMEGGGFEATSKNKLAVVRREPVGIVLAIAPFNYPVNLSASKIAPALIAGNVVMFKPPTQGSISGLLLAKAFEEAGIPAGVFNTITGRGSEIGDYIIEHKEVNFINFTGSTPIGERIGRLAGMRPIMLELGGKDAALVLEDADLEHAAKQIVAGAFSYSGQRCTAIKRVIVLESVADKLATLLQEEVSKLTVGDPFDNADITPVIDNASADFIWGLIEDAQEKEAQALTPIKREGNLLWPVLFDQVTKDMKVAWEEPFGPVLPIIRVASVEEAIAFANESEFGLQSSVFTNDFKKAFEIAEKLEVGTVHINNKTQRGPDNFPFLGVKGSGAGVQGIKYSIEAMTNVKSIVFDVK

SEQ ID NO: 19557 - protein, 395 aa, Xylella fastidiosa
IARELRRPTLAVLSRCLQADIETSARALESATKPRLHVFLSTSPLHREHKLRMSKEQVLESVHKHVSLSRTLIDDVEFSAEDATRTEEDFLIEVTRVAIAAGATTINLPDTVGFSTPEEIRNMFTRVIANVEGANKVIFSAHCHDDLGLAVANSLAAIEGGARQIECTINGIGERAGNCALEELTMVLKVRNAFYNIDTSIHTSRIVSTSQLLQRLVGMPVQRNKAVVGANAFAHESGIHQHGMLRHRGTYEIMRPQEVGWVCSHMVLGRHSGRAAVEQRLRALGYLLEEEDLKLVFEEFKQLCEKQRLVTDVDLQVLMQDTTVQHGYRLASMTISDVGNQANALVELSNPQGQRVAETAQGNGPVDALFGALAAATGVKLELDSYQVHSVGIGA

SEQ ID NO: 19558 - protein, 297 aa, Wolbachia sp. wcr
SIDEIMEHIKDSHMLFITAGMGGGTGTGAAPVIAKAAREARAAVKDRAPKEKKILTVGVVTKPFGFEGVRRMRIAELGLEELQKYVDTLIVIPNQNLFRIANEKTTFSDAFKLADNVLHIGIRGVTDLMVMPGLINLCFADIETVMSEMGKAMIGTGEAEGEDRAISAAEAAISNPLLDNVSMKGAQGILINITGGGDMTLFEVDAAANRVREEVDENANIIFGATFDQAMEGRVRVSVLATGIDSRDNKSETSPISRQSEDSEKEKFKWPYSQSESMQDKTLETKPAEQVSGGAKW

SEQ ID NO: 19559 - protein, 351 aa, Staphylococcus epidermidis RP62A
MTKIKEIKKVLQQEDADAAWITTPLNIFYFTGYRSEPHERLFALLIPSNEEPVLFCPKMEVEEVKQSPFKGKIIGYLDTENPFDKYSKTFSKMLIESEHLTVKRQRELTKAFNIEHYQDVDQSIKDLRNIKSEDEIINIKKAAALADKCIEIGKSFLKEGVEEREVVNHIENEIKKYGVNEMSFDTMVLFGDHAASPHGTPGDRKLQQNEFVLFDLGVVYHHYCSDMTRTIHFGTPNKEAQNIYNIVLKAETEAIKSIKPGVTIKDIDKIARDIIEEAGYGDYFPHRLGHGLGLEEHEYQDISSVNNNQLEAGMVITIEPGIYVPHVAGVRIEDDILVTENGYEILTQYEK

SEQ ID NO: 19560 - protein, 286 aa, Halimeda incrassata
  misc_feature (209)..(209): Xaa can be any naturally occurring amino acid
KNMITGAAQMDGAILVVSGADGPMPQTKEHILLAQQVGVPAIVVFLNKIDQVDDADLLELVELEIRETLDRYDFPGDDIPIISGSALAAVEALTTNPMIQRGENEWVDKIYKLMDVIDEEIPLPPRSTDKDFLMAVENVVSITGRGTVATGRVERGQIKVGQNVEIVGLKETKETTVIGLEMFQKTLEESVAGDNVGVLLRGVQKNEIXRGMVLAKPGSITPHTRFKAQVYILKKDEGGRHTSFVAGYRPQFYVRTTDVTGKIDSFQGDDDSEIRMVMPGDRVKII

SEQ ID NO: 19561 - protein, 162 aa, Zea mays
MAMMKKKGGAATTAVAAVALVLLAAAAVRADVNCADVDASLRPCVGYVTGKEAAPAAECCAGVKRIRAMPSGPAERRQACECVKQAAANYQPLNADAIRDLPAQCGAPLPFPLTLNFDCTTCVYIYILGLGPPWRKASPFAAPRAIFILLDQGTQGPSAPQQ

SEQ ID NO: 19562 - protein, 286 aa, Halimeda incrassata
  misc_feature (285)..(286): Xaa can be any naturally occurring amino acid
KNMITGAAQMDGAILVVSGADGPMPQTKEHILLAQQVGVPAIVVFLNKIDQVDDADLLELVELEIRETLDRYDFPGDDIPIISGSALAAVEALTTNPMIQRGENEWVDKIYQLMDVIDEEIPLPPRSTDKDFLMAVENVVSITGRGTVATGRVERGQIKVGQNVEIVGLKETKETTVIGLEMFQKTLEESVAGDNVGVLLRGIQKNEIQRGMVLAKPGSITPHTRFKAQVYILKKDEGGRHTSFVAGYRPQFYVRTTDVTGKIDSFQGDDDSEIRMVMPGDRVKXX

SEQ ID NO: 19563 - protein, 393 aa, Staphylococcus epidermidis RP62A
MQFDTIELAIEALRNGESIIVVDDEDRENEGDLVAVTEWMDDNTINFMAREGRGLICAPIDKSIAERLKLQSMEQNNTDIYGTHFTVSIDHYKTTTGISAHERTQTARALIDENTNPEDFHRPGHLFPLIAKENGVLTRNGHTEAAVDLARLTGAQPAGVICEIMNDDGTMAKGEDLQSFKERHHLKMITIKSLVAFRKAVELNVNLKAKVKMPTDFGHFDMYGFTTNYSDEEIVAIVKGDLKSNPNVRMHSACLTGDIFHSQRCDCGAQLEASMKYIDEHGGMIIYLPQEGRGIGLINKLRAYELIEKGYDTVTANLALGFDEDLRDYHVAAEILKYFDISEINLLSNNPKKFEGLEDYGIEIVDRIELIVPETQYNHSYMETKKNKMGHLI

SEQ ID NO: 19564 - protein, 286 aa, Halimeda incrassata
KNMITGAAQMDGAILVVSGADGPMPQTKEHILLAQQVGVPAIVVFLNKIDQVADADLLELVELEIRETLDRYDFPGDDIPIISGSALAAVEALTTNPMIQRGENEWVDKIYKLMDVIDEEIPLPPRSTDKDFLMAVENVVSITGRGTVATGRVERGQIKVGQNVEIVGLKETKETTVIGLEMFQKTLEESVAGDNVGVLLRGVQKNEIPRGMVLAKPGSITPHTRFKAQVYILKKDEGGRHTSFVAGYRPQFYVRTTDVTGKIDSFQGDDDSEIRMVMPGDRVKII

SEQ ID NO: 19565 - protein, 420 aa, Debaryomyces hansenii CBS767
MSIQSNPYGPNPSDFLSNVNKFEVIESTLREGEQFANAFFSTEKKIEIAKALDDFGVDYIELTSPVASEQSRSDCEAICKLGLKAKILTHIRCHMDDARVAVETGVDGVDVVIGTSQFLRQYSHGKDMNYIAQSAIEVIEFVKSKGIEIRFSSEDSFRSDIVDLLNIYRTVDKIGVNRVGIADTVGCANPRQVYELVKTLKSVVSCDIECHFHNDTGCAIANAYTALEAGAKLIDVSVLGIGERNGITPLGALMARMITADRDYVLSKYKLHKLRDLENLVADAVQVNVPFNNPITGFCAFTHKAGIHAKAILANPSTYEILNPSDFGLTRYIHFANRLTGWNAIKSRVDQLNLHLTDDQCKEVTTKIKIMGDVRQLNIDDVDSIIKDFHADLSTPLLKPQAEGDKDVTEEPVSKKQKSG

SEQ ID NO: 19566 - protein, 149 aa, Brassica napus
MTYSQTLGHNNNNNDDKYQICEEIGRGRFGTVTRVYAPATGDFYACKTIEKSSLTDDLDRACIDNEPKLMALLSFHPNIVQIHDLVDTDSTLSIYMELVDPSVSIYDRLVSSGTFSESQTASFAKQILQGLSHCHRYGVVHRDIKPENI

SEQ ID NO: 19567 - protein, 84 aa, Brassica napus
MAKKRKRTDAPAEAAGAEKPDDSAPARPERTLFGFKDLVPDAEPASAGAEAAVAPFRNREKVLITCSRRITYRYRHLMQDVLSL

SEQ ID NO: 19568 - protein, 286 aa, Halimeda melanesica
KNMITGAAQMDGAILVVSGADGPMPQTKEHILLAQQVGVPAIVVFLNKIDQVDDADLLELVELEIRETLDRYDFPGDDIPIISGSALAAVEALTTNPMIQRGENEWVDKIYKLMDVIDEEIPLPPRSTDKDFLMAVENVVSITGRGTVATGRVERGQIKVGQNVEIVGLKETKETTVIGLEMFQKTLEESVAGDNVGVLLRGVQKNEIQRGMVLAKPGSITPHTRFKAQVYILKKDEGGRHTSFVAGYRPQFYVRTTDVTGKIDSFQGDDDSEIRMVMPGDRVKII

SEQ ID NO: 19569 - protein, 115 aa, Triticum aestivum
MARGAAIPLVLVAMVATMLLVATDAAISCGQVTSALSPCISYARGNGANPTAACCSGVRSLAGAARSTADKQAACKCIKSAAGGLNAGKAAGIHSKCGVSVPYAISANVDCSKIR

SEQ ID NO: 19570 - protein, 1010 aa, Synechococcus sp. WH 8102
MIMRSPETSGASMPQSTAHVPDGEQPRASGGSPGAGRLLQHRLELVEDLWQTVLRSECPPEQSERLLRLKQLSDPVALEGRDGESSSEAIVELIRSMDLSEAIAAARAFSLYFQLINILEQRIEEDSYLDSLRPSRSQDDETAAPFDPFAPPLASQTDPATFGEVFERLRRMNVPPAQVETLLRELDIRLVFTAHPTEIVRHTVRHKQRKVASLLQRLQSEPALPRYDEEELRRQLEEEIRLWWRTDELHQFKPTVLDEVDSTLHYFQQVLFEAMPQLRRRLVSSLSRHYPDVQFPQASFCTFGSWVGSDRDGNPSVTPEITWRTACYQRQLMLELYIGSVQSLRNQLSISMQWSQVAPPLLESLEMDRLRFPEIYERRAARYRLEPYRLKLSYILERLELTLQRNHQMSEAGWQSPPEPAATAPTDGIPGHEALHYTAIDQFRSDLELIRNSLVSTELSCEQLDTLLNQVHIFGFSLASLDIRQESTRHSDAIDELTTHLQLPKAYGAMEESERVAWLLEELQTRRPLIPAAVEWSEATAQTFAVFQMLHRLQQEFGQRICHSYVISMSHTASDLLEVMLLAKEIGLVDPQAGKASLLVVPLFETVEDLQRAPAVMDGLFQTPIYRNLLPSVGVQRQPLQELMLGYSDSNKDSGFLSSNWEIHQAQIALQTLASSHGVALRLFHGRGGSVSRGGGPAYQAILAQPSGTLQGRIKITEQGEVLASKYGLPELALYNLETVTTAVVQNSLVTNQLDATPSWNQLMSRVAKRSREHYRALVHDNPDLVAFFQQVTPIEEISKLQISSRPARRKTGARDLSSLRAIPWVFGWTQSRFLLPSWFGVGTALAEEVNDDPEQLDLLRRLHQRWPFFRMLISKVEMTLSKVDLDLAHHYMSSLGNPEQRDAFEGIFKVIADEYGRTLKLVLEITGQSRLLGADQNLQLSVDLRNRTIVPLGFLQVALLRRLRDQNRQPPMSESPGTPEDRRTYSRSELLRGALLTLNGIAAGMRNTG

SEQ ID NO: 19571 - protein, 345 aa, Thermus thermophilus
MKVAVLPGDGIGPEVTEAALKVLRALDEAEGLGLAYEVFPFGGAAIDAFGEPFPEPTRKGVEEAEAVLLGSVGGPKWDGLPRKIRPETGLLSLRKSQDLFANLRPAKVFPGLERLSPLKEEIARGVDVLIVRELTGGIYFGEPRGMSEAEAWNTERYSKPEVERVARVAFEFARKRRKHVVSVDKANVLEVGEFWRKTVEEVGRGYPDVALEHQYVDAMAMHLVRSPARFDVVVTGNIFGDILSDLASVLPGSLGLLPSASLGRGTPVFEPVHGSAPDIAGKGIANPTAAILSAAMMLEHAFGLVELARKVEDAVAKALLETPPPDLGGSAGTEAFTATVLRHLA

SEQ ID NO: 19572 - protein, 459 aa, Dianthus caryophyllus
MSTSKSTIFLLFSIIFIVSSSALDLSIIDRAFNRPDDEIASLYETWLVKHGKNYNGLGEKQLRFNIFKDNLRFVDERNSENLSFKLGLNRFADLTNEEYRSVYLGTRPRSVAVARSGRSKSDRYAFRAGDTLPESVDWRKKGAVAGIKDQGSCGSCWAFSAIAAVEGVNQIVTGDLISLSEQELVECDTSYNDGCDGGLMDYAFEFIIKNEGIDSDEDYPYTGRDGRCDTNRKNAKVVTIDDYEDSPVYDEKSLQKAVANQPVSVAIEGGGRDFQLYDSGVFTGKCGTALDHGVAVVGYGTEDGLDYWIVRNSWGDTWGEGGYIRMQRNTKLPSGICGIAIEPSYPIKSGLNPPNPGPSPPSPVQPPSVCDDNYSCAERTTCCCLFEYAHYCYSWGCCPLEAATCCEDNYSCCPHDYPVCNIYAGTCSMGKNNPIQIPALKRTPAKPHWAFGNVGKSSS

SEQ ID NO: 19573 - protein, 291 aa, Clostridium acetobutylicum
MKLTIATRKSKLAQVQTELIINVLKDKYGISSEKLLMETLGDKILDKSLADIGGKGLFIKDIERILLEDKADAAVHSMKDVPFEVPDMFEIAAVTLRVDVRDVFVSRDGTHFKDLKNGAVIGTSSNRRAAQLKMLRDDIKVVPIRGNVQTRIRKMGEEKLDGIILAAAGLKRLNMENIITDYFSVEEMIPAVGQGALGVEIKKENKNRDLFRKLDNKNSRMCVEAERSFMRTLNGDCHSTIGAYAEIVNGQMNVLGFYEIDGRRVKKDVSGNIEDYMSLGKTLAEKILEDK

SEQ ID NO: 19574 - protein, 456 aa, Nocardia farcinica IFM 10152
MSKKKTTTPLIPSGQGGPSLRQRVDEAVDSGVRRTVLPGGLRVVTEHVPGVRSASIGVWVGVGSRDEGRTVAGAAHFLEHLLFKATPTRSALDIAQAMDAVGGELNAFTAKEQTCYYAHVLDEDLPLAVDMVSDVVLNGLCRSADVDVERQVVLEEIAMRDDDPEDLVGDAFLTALFGDHPIGRPVIGSVESIESMTAAQLRGFHQRRYRPDRMVVAVAGNVEHEHTVELVHRAFENRLDPAAQPAPRREGRFRPHGAPELQWSFRDSEQAHLVFGVRAFGRHEGERRWPLSVLNTVVGGGLSSRLFQRIREERGLAYSVYSSVDTFADTGAFSVYIGCQPENLGEVARLAKGVLEEVAEHGVTDAECARAKGSLRGGLVLGLEDSASRMNRIGRSELSYGNHRSVSETLARIDAVTTEEVAAIARTLLSRPFGVSVAGPYRRTRDLPAAVRRLVA

SEQ ID NO: 19575 - protein, 543 aa, Clostridium acetobutylicum ATCC 824
MNNLKGLELLRNPFLNKGTAFTLEERKKYDLTGLLPCAVMTLEEQEKVVYEKLKSIDDALDKHFYLMNIYDTNRILFYYVVKKHIVELLPIVYTPTIGDAVINYSKNYDTPKDAVFLSINHPENIKKSIEAVSNDLDDIKLIVVTDGEGVLGIGDWGVQGVDISIGKLAVYTVAAGLNPRNVLPIVIDAGTNNEALLNDPFYVGNKHKRVTGEKYYSFIDEFVKTCTSLFPDVLLHWEDFGRGNASTILEKYRNNICTFNDDIQGTGVMMVAALNSVAKVTNTPIKNHKILVFGGGTAGIGVSDQILLEKIRSGLTLDEALKDFYIVDRQGLITEDMQDLTEGQKKYSRKKGEFKKPLKDLAEIVAEVKPTVLIGTSGVHGAFTEAVVKNMAKSTERPAIMPISNPTKLAEAKAEDIIKWSDGNALVVTGSPSSPVEYKGVTYTIGQANNALLYPGLGLGIVVSKSKTVSDGMLAAAAHGVSSLIDLSVKGAPMLPVISKLREASKLVATAVVKEAVKENLNRAPIVDAENAVENEIWEPYYR

SEQ ID NO: 19576 - protein, 91 aa, Malus x domestica
ITCGQVTSSLAPCIGYVRSGGAVPPACCNGIRTINGLARTTADRQTACNCLKNLAGSISGVNPNNAAGLPGKCGVNVPYKISTSTNCATVK

SEQ ID NO: 19577 - protein, 279 aa, Prosthecochloris vibrioformis
MNISLKLVKTTGDVLLDSPLSKIGDMGLFTKDIEKHLLAGEIDLAVHSLKDVPTVRRKAWLSPRSPSVKTPRRHHFQVRQGVDGPSAEAKMATSSLRRMSQLLSLRPDLEIMDIRGNLNTRFKKFDEGDFDAMMLAYAGVYRLEFSDRITEILPHETMLPAVGQGALGIETRTDDAETREIVRVLNDDNTEMCCRAERALLRHLQGGCQIPIGSFGSYIDGTLKLLAFVGSVDGKTGLRNEVTKAVKTPEEAEAVGIELAEILLSMGAEKILADIRKTC

SEQ ID NO: 19578 - protein, 332 aa, Oryza sativa
  misc_feature (163)..(163): Xaa can be any naturally occurring amino acid
  misc_feature (197)..(197): Xaa can be any naturally occurring amino acid
MATVSGTDRLRDLHAFDDTKAGVKGLVDAGVTTVPYFFRHHPDPLPVAAPSEAASAIPLIDLAKADVDRGRVVAEVRTAAETVGFFQVVNHGVAGELMDEMLAAVRRFNEEPLEAKVPYYTRDVASKVRFNSNFDLFRSPAANWRDTMFVEMFPEVPSPEEIXPPPCKGVLEEYPAAVRRLGERLFELLSEALGLPXGDESGGLQAVLPRPPEERWVDVPPVAGALVVNVGDLLQLVSNERLRSVEHRVLPTGAAGPARVSVACFFRLAYSSTRPCVPVVGGGSGARAAAVYRSTTAGEFLAHYNGKGLDGRSALDHFRIPAAAASPPPPPQ

SEQ ID NO: 19579 - protein, 140 aa, Glycine max
MSASVMASLVLLKPSPSPLLGRAKLRGVRPSARPSLLIVASKKAKKVQTAQPYGPGGGVVFKEGVDASGRAAKGKGVYQFADKYGANVDGYSPIYTPEEWSPSGDVYVGGKTGLFLWAVTLSGILLGGALLVYNTSALAS

SEQ ID NO: 19580 - protein, 341 aa, Silicibacter pomeroyi DSS-3
MTLKVAINGFGRIGRGVLRALVESGADDIEVVAINDLASPETLAHLLKYDSVHGRLQAPVLVEGDRMIVGRSSIRLSAIRNPEDLPWADVDIAYECTGLFTEREQAARHLKNGSKRVLISAPGKGADRTVVFGVNDGALTADDVIVSNASCTTNCLAPVAMVLDHAFGIKTGYMTTIHAYTGDQPTHDTAHRDLYRARAASVSMIPTSTGAARAISEVLPHLKGRLEGSAIRVPTPNVSLVDLSFVPERPATREAVNAAIRTAAQGPLAGILAYEEDPLVSIDFNHDSHSSCFAAAQTSVTADGLVRVVSWYDNEWGFSNRMLDTGRRIGALLITPQRLAG

SEQ ID NO: 19581 - protein, 219 aa, Synechococcus sp. WH 8108
NSRLCMSSAVAGYTRSLGSDGPPCSYEDLDHCTVAFLIGTNTAECHPVLFQRLLKRKRKNPGSVKIVVVDPRRTDTAKAADIHLPIAPGSDLALLHGIAHLVLRENGQDPAFIDDHTENYDAFFDVAARWTPRRVALFCNIPEKRLREVAALFHRREKVLSLWSMGVNQRREGTAVVQGLINLHLLTGQIGKQGAGPFSLTGQPNAMGGREAGGLAHLL

SEQ ID NO: 19582 - protein, 441 aa, Halobacterium sp. NRC-1
MSGSPYASPSEADTDAMLDAVGVDRVDELFDIPPEVSFDGEFGIDAKSEQAALRGVRRRLSDNDDLTEFLGRGHYEHYVPSLVDSVSQRSEFITSYTQYQPEITQGFLQVLFEYQSLLVELTGLGVANCSMYDAATALAEAALLAKRVRAADGNRVLVPGFVRDSHVDVLRNYTSGSDVVVERYATDAGNVDLDALEAAMDADVVMVYAENPTTCGTVEEQLCAVGDLADSHDALFCLGSDPVAMSILQRPVDVGADVVVGDASVLGMPTSYGTGLGVFATRKEFLRQVPGRLVGASEDDAGTRAFTLTLQTREQHIRKERATSNICTNQAWVALRAAIHAAWLGADGLVDLAERMVELPRDLAARLDDVSGVTAPVHDDRHHIREFQARTEQPAPAVASALEAEGFGVHAVDDHTIQVCVTDANEHATDAFVAAVREVSE

SEQ ID NO: 19583 - protein, 297 aa, Wolbachia sp. Avitftsz
SIDEIMEHIKDSHMLFITAGMGGGTGTGAAPVIAKAAREARAAVKDRAPKEKKILTVGVVTKPFGFEGVRRMRIAELGLEELQKYVDTLIVIPNQNLFRIANEKTTFSDAFKLADNVLHIGIRGVTDLMVMPGLINLDFADIETVMSEMGKAMIGTGEAEGEDRAISAAEAAISNPLLDNVSMKGAQGILINITGGGDMTPFEVDAAANRVREEVDENANIIFGATFDQAMEGRVRVSVLATGIDSRDNKSETSPISRQSEDSEKEKFKWPYSQSESMQDKTLETKPAEQVSGGAKW

SEQ ID NO: 19584 - protein, 420 aa, Pyrococcus endeavori
MVEQDPFEIAVKQLERAAQYMKISEEALEFLKRPQRIVEVTIPVEMDDGTVKVFTGFRVQYNWARGPTKGGIRWHPEETLSTVKALAAWMTWKTAVMDLPYGGGKGGIIVDPKKLSDREKERLARGYIRAIYDVISPYEDIPAPHVYTNPQIMAWMMDEYEAISRRKTPAFGIITGKPLSIGGSLGRNEATARGASYTIREARKVLGWGDLKGKTIAIQGYGNAGYYLAKIMSEDYGMKVVAVSDSKGGIYNPDGLNADEVLKWKQEHGSVKDFPGATNITNEELLELEVDVLAPAAIEEVITKKNADNIKAKIVAEVANGPVTPEADEILFEKGILQIPDFLCNAGGVTVSYFEWVQNITGYYWTLEEVREKLDKKMTKAFYDVYNTAKEKNIHMRDADYVVAVQRVYQAMLDRGWVKH

SEQ ID NO: 19585 - protein, 219 aa, Synechococcus sp. WH 8108
NSRLCMSSAVAGYTRSLGSDGPPCSYEDLDHCTVAFLIGTNTAECHPVLFQRLLKRKRKNPGSVKIVVVDPRRTDTAKAADIHLPIAPSSDLALLHGIAHLVLRENGQDPAFIDDHTENYDAFFDVAARWTPRRVALFCNIPEKRLREVAALFHRREKVLSLWSMGVNQRRKGTAVVQGLINLHLLTGQIGKQGAGPFSLTGQPNAMGGREAGGLAHLL

SEQ ID NO: 19586 - protein, 297 aa, Wolbachia sp. Ablan289
SIDEIMEHIKDSHMLFITAGMGGGTGTGAAPVIAKAAREARAAVKDRAPKEKKILTVGVVTKPFGFEGVRRMRIAELGLEELQKYVDTLIVIPNQNLFRIANEKTTFSDAFKLADNVLHIGIRGVTDLMVMPGLINLVFADIETVMSEMGKAMIGTGEAEGEDRAISAAEAAISNPLLDNVLMKGAQGILINITGGGDMTLFEVDAAANRVREEVDENANIIFGATFDQAMEGRVRVSVLATGIDSRDNKSETSPISRQSEDSEKEKFKWPYSQSESMQDKTLETKPAEQVSGGAKW

SEQ ID NO: 19587 - protein, 442 aa, Physcomitrella patens subsp. patens
MVFSGAPRLMVVSDLDNTMVDHKDDSYTSLLRFGSLWQADYEHDSLLVYSTGRSPALYAELREEVPLITPGITIMSVGTEIRYGDTMEPDHGWEEELNQGWDREAIVEEGKKLNLKFQVDSEQRPHKVSFYVDKAQADEVIKTLIERFKERQLNAKIIYSGGVDLDVLPTGAGKGQALEYLMKKLKAEGRAPGHTLVCGDSGNDAELFAVSDVYGVIVGNAMEELLKWHSEYQGDKTHIYLAKERCAAGILEAMQHFDLQPNVSPRLKFQAYDAASELSVSTVAHMVVEYLLLMEQWLKAVVENTDAVFNRLKASLAPDASYVHAYGIITNPHEEIDTMRELHGVKKNKPFFIWVDRIRIEQLSDTMYLARFDKWEKSSSGLSCAITTALLQTKSDAPNGLLWKLIHETWLTGREGSGAPKSADSTTHVTGKEGPLKEVLKL

SEQ ID NO: 19588 - protein, 159 aa, Senecio vernalis
MSDEEHQFESKADAGASKTYPQQAGTIRKGGHIVIKNRACKVVEVSTSKTGKHGHAKCHFVAIDIFNGKKLEDIVPSSHNCDVPHVNRTDYQLIDISEDGFVSLLTENGNTKDDLKLPTDDALLTQIKDGFGEGKDLVVSVMSAMGEEQICALKDIGPK

SEQ ID NO: 19589 - protein, 296 aa, Anabaena cylindrica PCC 7122
NSRLCMSSAVSGYIQSFGADGPPCCYDDLELTDCAFLIGTNTAECHPIVFNRLAKYHKKNRHVKMVVVDPRRTPTAEAADLHLAIRPGTDIDLLNGIAHLLMKWNYIDTLFMDECTSNFPTYAEVIRHYSPDVVSRQCGISIEDLETAAKYWGKSKSVLSLWSMGVNQSTEGTAKVRTIINLHLMTGQIGKPGAGPFSLTGQPNAMGGREAGGLAHLLPGYRLVKNDKHRAEVEDFWGLERGRISPVSGLTAWDMITSLESGNVGLLWIAATNPAVSMPDLERTKKALLKSPLTIY

SEQ ID NO: 19590 - protein, 263 aa, Carboxydothermus hydrogenoformans Z-2901
MGNTVLFEQNGKVGIITLNRPEAVNAINEEMQVEMAEILLQVKNNENIRAVVLTGAGPGFCAGGDVKRMLSNFAKTPADQRVTLMENLVHNWLTLLINMEKPVISAVHGYAVGAGLSIALATDIIIAARSTIFSLAFAQVGLLPDLSGLFFLARTLGVHRAKELIFTADRFSAEKAYELGLVNRVVDDDLYLDEAMNLAKQLADGPTRAYGYAKKLLHLATSLDLNTFFEYERLYQSLVAETEDFREGVNAFIEKRPPKFKGR

SEQ ID NO: 19591 - protein, 297 aa, Wolbachia sp. Dlem213
SIDEIMEHIKDSHMLFITAGMGGGTGTGAAPVIAKAAREARAAVKDRAPKEKKILTVGVVTKPFGFEGVRRMRIAELGLEELQKYVDTLIVIPNQNLFRIANEKTTFSDAFKLADNVLHIGIRGVTDLMVMPGLINLDFADIETVMSEMGKAMIGTGEAEGEDRAISAAEAAISNPLLDNVSMKGAQGILINITGGGDMTLFEVDAAANRVREEVDENANIIFGATFDQAMEGRVRVSVLATGIDSRDNKSETSPISRQSEDSEKEKFKWPYSQSESMQDKTLETKPAEQVSGGAKW

SEQ ID NO: 19592 - protein, 296 aa, Wolbachia sp. Cris193
SIDEIMEHIKDSHMLFITAGMGGGTGTGAAPVIAKAAREARAAVKDRAPKEKKILTVGVVTKPFGFEGVRRMRIAELGLEELQKYVDTLIVIPNQNLFRIANEKTTFSDAFKLADNVLHIGIRGVTDLMVMPGLINLDFADIETVMSEMGKAMIGTGEAEGEDRAISAAEAAISNPLLDNVSMKGAQGILINITGGGDMTLFEVDAAANRVREEVDENANIIFGATFDQAMEGRVRVSVLATGIDGRNNKSETSPISQSEDSEKEKFKWPYSQSESMQDKTLETKPAEHLSEGAKW

SEQ ID NO: 19593 - protein, 601 aa, Synechococcus sp. CC9605
MALLVQKFGGTSVGSVERIRAVADRIGRCREEGHDVVVVVSAMGHTTDELTGLANAITSAPTQREMDMLLASGEQVSIALLAMALNAQGVSATSMTGPQVGIATESTHGRARILGIRTDRIRNRLAAGQVVVVAGFQGTSTSSDGLNEITTLGRGGSDTSAVALAAALGADACEIYTDVPGVLSTDPRKVSDAQLMETISCDEMLELASLGASVLHPRAVEIARNYGVNLVVRSSWSDAPGTRITSRSARPISSSGLELGSPVDGMEEVDGQAVLALSQIPDQPGIAARLFETLSEAGINVDLIIQATHEGSSNDITFTVSEADLELARPVCQKVLDQLGGDLASEGGLTKLSISGAGIMGRPGIAAGLFKCLCQQGINLRLIATSEVKVSCVIDSGAGSKAVQAVQEAFALEDSQIRINPTDNGSGEPEVRGVALDRDQVQLSVRHVPDRPGTAAALCSALADNSISLDAIVQSERQHSDGSRDITFILRKDDRARADVALAPLLAQWPGAALEDGEAIARVSAVGAGMPATPGTAGRMFRALADAGINIGLIATSEIRTSCVVAEDAGVQALQVVHAGFGLGGEERHTAQGTASPHDPD

SEQ ID NO: 19594 - protein, 155 aa, Triticum aestivum
  misc_feature (95)..(95): Xaa can be any naturally occurring amino acid
  misc_feature (130)..(130): Xaa can be any naturally occurring amino acid
MAAAWGQKALGALPQLVKSLRSDPVSGSARHRRLPSLRRTFSLYDQINLIDSVPEDELRFQSYDDTGFKINNVKYEGSVLIVENKIMTWAPKTFXEITPESLSIFKVVHPIPEIFILGCGRHVQLVSPEXLRMFNRSTGNETRSIDSRNAASTYN

SEQ ID NO: 19595 - protein, 286 aa, Halimeda monile
KNMITGAAQMDGAILVVSGADGPMPQTKEHILLAQQVGVPAIVVFLNKIDQVDDADLLELVELEIRETLDRYDFPGDDIPIISGSALAAVEALTTNPMIQRGENEWVDKIYKLMDVIDEEIPLPPRNTDKDFLMAVENVVSITGRGTVATGRVERGQIKVGQNVEIVGLKETKETTVIGLEMFQKTLEESVAGDNVGVLLRGIQKNEIQRGMVLAKPGSITPHTRFKAQVYILKKDEGGRHTSFVAGYRPQFYVRTTDVTGKIDSFQGDDDSEIRMVMPGDRVKII

SEQ ID NO: 19596 - protein, 732 aa, Prosthecochloris aestuarii DSM 271
MLAQIEKDQYEKLHEVLRLARANLKNFDESLVQRAFFMCYRAHEGEKRASGEPFFYHPVEVAKIMLTELPLDGVSVAAALLHDVIEDSEYTYEDLVAELGSEVADIVEGLTKISGIMINREITQAEGFRKMLLSMVKDIRVILLKFCDRLHNMRTLGALPEHRRLKIALETRDIYAPLAHRFGLGKMKVELENLAFKYIDPEMFEMIQQKVRLSRGERIAYLDKMIVPIKDDLQKQGFNLEVQGRAKHLFSIYNKMRLKNKRFEDIHDLYGIRIVIDTERISDCFAAYGFITQKYPPLPQHFKDYISIPKHNGYQSLHSAILGPRGHVVEVQIRTRRMHEFAEFGVAAHWRYKEKVSRDDASVNTFLRWARELINDADSAASFMEGFKLNLYHDEIYLFTPKGDMKTLPAGATPIDFAYSIHTEIGNGCIGAKVNGKIVRLNSELRSGDRVEVITSRNQKPKADWLKFVVTHRAKLKIRSAINEERRLQIEKGRGMWEKMLSGTRKLLNDNDIIRQVRKYGIKTPADFFSALANHQIDPEKVIKSFAEEHRRAALDEGADAGSQFDTFAEQARKVPEDEPAGKGRDEVTIEGLPNIAYSYAKCCKPVPGDDIIGFVTKEGVVKIHRKNCVNVSNESLLKSERVVSVSWNRKVETEFLAGIKVIGEDRIGITNQITAVISKSDTNIRSISLHARDGMFIGTVMVYVRNISRLTALMDKIRKITGVFSVERLSN

SEQ ID NO: 19597 - protein, 286 aa, Halimeda simulans
  misc_feature (209)..(209): Xaa can be any naturally occurring amino acid
KNMITGAAQMDGAILVVSGADGPMPQTKEHILLAQQVGVPAIVVFLNKIDQVDDADLLELVELEIRETLDRYDFPGDDIPIISGSALAAVEALTTNPMIQRGENEWVDKIYQLMDVIDEEIPLPPRSTDKDFLMAVENVVSITGRGTVATGRVERGQIKVGQNVEIVGLKETKETTVIGLEMFQKTLEESVAGDNVGVLLRGIQKNEIXRGMVLAKPGSITPHTRFKAQVYILKKDEGGRHTSFVAGYRPQFYVRTTDVTGKIDSFQGDDDSEIRMVMPGDRVKII

SEQ ID NO: 19598 - protein, 345 aa, Thermus thermophilus
MKVAVLPGDGIGPEVTEAALKVLRALDEAEGLGLAYEVFPFGGAAIDAFGEPFPEPTRKGVEEAEAVLLGSVGGPKWDGLPRKIRPETGLLSLRKSQDLFANLRPAKVFPGLERLSPLKEEIARGVDVLIVRELTGGIYFGEPRGMSEAEAWNTERYSKPEVERVARVAFEGARKRRKHVVSVDKANVLEVGEFWRKTVEEVGRGYPDVALEHQYVDAMAMHLVRSPARFDVVVTGNIFGDILSDLASVLPGSLGLLPSASLGRGTPVFEPVHGSAPDIAGKGIANPTAAILSAAMMLEHAFGLVELARKVEDAVAKALLETPPPDLGGSAGTEAFTATVLRHLA

SEQ ID NO: 19599 - protein, 257 aa, Bradyrhizobium japonicum USDA 110
MTSDSPVAYECVGNIARITLNRPPVNALSLEVIRAVVAALRRAADDPDARVVVLASAIARRFSAGLDLDILLGKSGAQIREFLQALYIDLYDAQYGLGKPSIAAVGGAARGGGMTMAVSCDVVLASESATFGYPEIDVGVIPAIHYAHLPRIIGRHRAFELLFTGRVFSAAEARELGVVNRVVGDTELEAEVVRLAAQLAAKSAAVLRMGRAAFMRQIDLDYRRSIASAVDDFCNVATSDEAQEGLRAFVEKRAPKW

SEQ ID NO: 19600 - protein, 105 aa, Halobacterium sp. NRC-1
MYATAVDAGTMANQSSTGSAGRFGARYGRVSRRRVSDIEGTMNEDHACPDCGSEAVSREGTGIWQCGKCGYKYAGGAYQPQTPSGKTVTRSIRTALGETGDSNSE

SEQ ID NO: 19601 - protein, 286 aa, Halimeda micronesica
  misc_feature (286)..(286): Xaa can be any naturally occurring amino acid
KNMITGAAQMDGAILVVSGADGPMPQTKEHILLAQQVGVPAIVVFLNKIDQVDDEDLLELVELEIRETLHQYDFPGDDIAIINGSALAAVEALTTNPMIQRGENEWVDKIYKLMDVIDEEIPLPPRSTDKDFLMAIENVVSITGRGTVATGRVERGQIKVGETIEIVGLKATKETTVIGLEMFQKTLEESVAGDNVGVLLRGVQKNEIQRGMVLAKPGSITPHTRFKAQVYILKKDEGGRHTSFVAGYRPQFYVRTTDVTGKIDSFQGDDDSEIRMVMPGDRVKIX

SEQ ID NO: 19602 - protein, 413 aa, Rhodococcus sp. RHA1
MTSDIVVIGGGVAGVTAAQSLRSEGYDGRLVLIGKERELPYDRTALSKAVLAGDLADPPLLFPADWYDEWQIETVLDRTVLQVDVTRREVLLDGGPWLKVDRVHLATGASARVPSFSGSDLPGVATLRTADDVHRMRRDWEPGQRLVVVGGGLIGCEVATTARKLGLEVSILEASDELLQRVLGRRIGGWCRARLMELGISVVLNTGVAEFKGVDRITTVIGTDGRSFVADRAIVCVGAEPETAIAEQSGLACNRGILVNDSGGTAAEGVFAAGDVASWPLLTGGRRSLETYINSQREATAVASAMLGKAVHGPQLPLSWTEMAGHRIQMIGDIEGSGEYVMRGDPDDGPALLFRLSDGRVTAAVSVDAPRDFAMATRLVERGAQVGREVLGDTSMELRELNRAARERALIAE

SEQ ID NO: 19603 - protein, 491 aa, Synechococcus elongatus PCC 7942
MPRGVAPAFAGRKPKGWAWASTAVPDFQGGFKRLINRFQGSKLWLACVPLAATIAVFWGVAANAQGSADPVPSAQFLVNNLWLMVATVLVIFMNAGFAMVETGLCRQKNAVNVLAKNLIVFTLAATAYWFIGYSLMYGSPVVDGFLYFGKGGPLGFFFDPTVSAETIKNDGLISSLDFLFQAAFAGTAATIVSGSVAERIKFVDFIIFSLILTAVIYPIAGSWQWNVGSGWLNKAGFIDFAGSTVVHSVGGWAALIGAITLGPRMGKFQDGRPGALPGHNLAIATLGALILWIGWYGFNGGSVLAFNTAVPYVAVTTTLGGAAGGISATITSWSTSGKPDLSMVINGILAGLVGVTAGCDGFGMGGSFIVGLIAGVLVVFSVYTFENLKIDDPVGACSVHLVCGIWGTLAVGLFNLEKGLFYGGGFGQLGSQILGIISYGVWTVVASVIIWNILKALLGLRVSLKKSYKAWILANTGWKPTLALPRMHLTP

SEQ ID NO: 19604 - protein, 396 aa, Frankia sp. EAN1pec
MDGRPRGAHPQRLRRPVKPDRLQGLVRQLPEHALRPTLPLRRAGGCRSRPPETAVASARGYMGYMGAGSGAGHTAGSPGDGEIMATSGRITTPFTAESTAAEVVAGIDLGGRRVVVTGASSGIGVETARALAGAGAEVTLAVRDVEAGRWTADDIVAAMGNKEIHVAPLDLADRASVAAFVAGWDGPLHILVNNAGVMATPELRTPEGWELQFATNHLGHFAVASGLRGALAAAGGARVVSVSSSGHLRSPVVFSDIHFRERAYEPWAAYGQSKTANVLFAVEATRRWADDGITVNALMPGAIATRLQRHISTEDLDRLRGQINAPALVWKSVEQGAATSVLLATSPLLDGIGGRYFEDCNEALPNTPGVRGGVAAYALDPEAAARLWDVTVDTLT

SEQ ID NO: 19605 - protein, 515 aa, Thermus thermophilus HB27
MRYADRVAGISWETIEEVRRRLKERPALHFIAGEFVPSESGETFPSLDPATNEVLGVAARGGEREVDRAAKAAHEAFQRWSRTKAKERKRYLLRIAELIEKHADELAVMECLDAGQVLRIVRAQVARAAENFAFYAEYAEHAMEDRTFPVDRDWLYYTVRVPAGPVGIITPWNAPLMLSTWRIAPALAFGNTVVLKPAEWSPFTATKLAEILKEADLPPGVFNLVQGFGEEAGAALVAHPLVPLLTLTGETETGKIVMRNAADHLKRLSPELGGKSPALVFADADLERALDAVVFQIFSFNGERCTASSRLLVEEKIFEDFVGKVVERARAIRVGHPLDPETEVGPLIHPEHLQRVLGYVEAGKREGARLLVGGERAKTSFRGEDLSRGNYLLPTVFVGENHMKIAQEEIFGPVLVAIPFKDEEEALRKANDTKYGLAAYVFTRDLERAHRLALELEAGMVYLNSHNVRHLPTPFGGVKGSGDRREGGTYALDFYTDLKTIALPLRPPHVPKFGK

SEQ ID NO: 19606 - protein, 225 aa, Triticum aestivum
CGARAGRIGTFSFTQDDDLAIHIPTRKTLYSAPFKQPNTHYQPNTDINMADTGLPPGWEVRHSNSKNLPYYFNSAEKLSRWEPPSGTDTEKLKHYMATNHSAGSRPGAVPGVPEGKIRAAHLLVKHRDSRRPSSWREAEITRTKEEAFEIIKEHEQKIKSGSVSLGELALTESDCSSARKRGDLGYFGRGDMQKEFEDASFGLSPGQMSEIVETASGLHLIERLE

SEQ ID NO: 19607 - protein, 239 aa, Synechococcus elongatus PCC 7942
MTALDDKTIVRDYFNATGFDRWSRIYGDGEVNFVQKNIRIGHQRTVDTVLSWLEADGNLSDRSFCDAGCGVGSLSLPLAQRGAQAVYASDISAKMVEEARERASQIPNLNNIQLEVSDLASLSGRYDTVICLDVLIHYPESDAAAMLSHLCSLAEQRVLVSFAPKSPVLNVLKRIGQFFPGASKTTRAYQHSETAIAASLSANGFPKCNVGPSTKHPSILLLLEAVRTANQLLSRGIAD

SEQ ID NO: 19608 - protein, 319 aa, Picrophilus torridus DSM 9790
MMNFNIRGNERNYETDYDVIIIGAGAAGYSAAIYAKRSGLNVAILEREAVGGGNTAVSPLVENYLGFKAIEGADLAREFEKHAREYAKIITEIEARSIEKTSDGFKIKTNREDFTSRYIIITTGTTHRKIGVPGENEYYGKGVSYCSTCDGYLFKDKRVAVIGGGNSGAISAIYLNGIASDTRIISHSDRYKCEDAYVETIKEKNIPFILNAETTEIIGDGKKVTGLKYTDKKTGKETEIEVDGIFVYVGIVPQTEFLKGSGVKMDDRGFIIVDDKMRTSVPGIYAAGDVVKGSEEQIATAVGDGCRAAITMYTDNMHK

SEQ ID NO: 19609 - protein, 593 aa, Paracoccus versutus
MRMTTEESFVKVLQLHGIEHAFGIIGSAMMPVSDLFPRAGITFWDCAHETNAGMMADGFTRSTGRMSMAIAQNGPGVTGFVTPVKTAYWNHTPLLLVTPQAANRTIGQGGFQEMEQMRIFADCVCYQEEVRDASRIPEVLNRVIMQAWRNSAPAQINIPRDFWTQVIDVELPQVVAFERPAGGEQAVAEAAKLLSGAEFPVILSGAGVVLSGAIPELARLAERLDAPVCSNYQHNDSFPGSHPLAMGPLGYNGSKAAMEIIARADVVLALGTRLNPFSTLPGYGIDYWPKDARIIQVDINADRIGLTKKVTVGIQGDAAKVARGILAQLAPTAGDAGRAERKALVAQTRSRWAQELSSLDHEEDDPGTEWNEDARRRDAGLMSPRQAWRAIMQAVPKEAIVSSDIGNNCAIGNAYPSFEAGRKYLAPGLFGPCGYGFPAILGAKIGNPDVPVIGFAGDGAFGISMNEMTACGREDWPAITMVIFRNYQWGAEKRNTTLWYDNNFVGTELDRDTSYAKIAQACGLVGVQVKSQEELTAALHDAVERQMKNRETTFIEVLLNQELGEPFRRDAMKKPVVVAGIDPADMRPQQGAA

SEQ ID NO: 19610 - protein, 299 aa, Prosthecochloris aestuarii DSM 271
MRQLKISKQITNRESLSLDRYLQEIGKYELLTAEDEVKLTMAIKEGYDMPVDTPEYKRAKRALDKLIKGNLRFVVSVAKQYQNQGLTLGDLINEGNLGLIKAAKRFDETRGFKFISYAVWWIRQSILQALAEQSRIVRLPLNRVGTLNKISKAYSQLEQEFERDPNTKELATVLDMDSQDVADTLKIAGRHVSVDAPFAQGDDNRLLDVLQHDGQKPDHGLTRDSLTLEVERSLSVLAPREADVIRSYFGIGMENPLTLEEIGEKFKLTRERVRQIKEKAIRRLRQSAYSKVLKEYIGS

SEQ ID NO: 19611 - protein, 185 aa, Zea mays
  misc_feature (71)..(71): Xaa can be any naturally occurring amino acid
ERRPGQVRGVARGMAYVHGLGFIHRDLKSDNLLISGDKSIKIADFGVARIEVKTEGMTPETGTYRWMAPNXLDEMIQHRPYNQKVDVYSFAIVLWELVTGNVPFANMTAVQAAFAVVNKGVRPAIPHDCLPALGEIMTRCWDANPEVRPPFTEIVRMLEQVEMEVLTTVRKARFRCCIAQPMTLD

SEQ ID NO: 19612 - protein, 208 aa, Cicer arietinum
MGYWKSKVLPKIKKVFVSESSTKKAAAAEVSKSFDESKEVYNKEFEEKKTELQPKVLVVYEALSTQIKSLVKERDEAGLKKNTTEVNKFIEELVKIDFPGSKAVSEASSKFGPALISGPIFYVFEKVSTFIVTEEKVEETTPTTETKTEEETSGVKEKEIVIEEGKKEEKIESVEEKVVADPVSDDKQEEKVVETVVTAVEKEEPIKP

SEQ ID NO: 19613 - protein, 543 aa, Clostridium acetobutylicum ATCC 824
MNNLKGLELLRNPFLNKGTAFTLEERKKYDLTGLLPCAVMTLEEQEKVVYEKLKSIDDALDKHFYLMNIYDTNRILFYYVVKKHIVELLPIVYTPTIGDAVINYSKNYDTPKDAVFLSINHPENIKKSIEAVSNDLDDIKLIVVTDGEGVLGIGDWGIQGVDISIGKLAVYTVAAGLNPRNVLPIVIDAGTNNEALLNDPFYVGNKHKRVTGEKYYSFIDEFVKTCTSLFPDVLLHWEDFGRGNASTILEKYRNNICTFNDDIQGTGVMMVAALNSVAKVTNTPIKNHKILVFGGGTAGIGVSDQILLEKIRSGLTLDEALKDFYIVDRQGLITEDMQDLTEGQKKYSRKKGEFKKPLKDLAEIVAEVKPTVLIGTSGVHGAFTEAVVKNMAKSTERPAIMPISNPTKLAEAKAEDIIKWSDGNALVVTGSPSSPVEYKGVTYTIGQANNALLYPGLGLGIVVSKSKTVSDGMLAAAAHGVSSLIDLSVKGAPMLPVISKLREASKLVATAVVKEAVKENLNRAPIVDAENAVENEIWEPYYK

SEQ ID NO: 19614 - protein, 606 aa, Nostoc sp. PCC 7120
MALIVQKFGGSSVGSVERIQAVAQRVYKTVKAGNSLVVVVSAMGKTTDGLVKLANEISRNPNRREMDMLLSTGEQVTIALLSMALQELGQPAISMTGAQVGIVTEAEHTRARILHIETERVEGHIKEGKVVVVAGFQGISSNGSLEITTLGRGGSDTSAVALAAALQADFCEIYTDVPGILTTDPRIVPEAQLMGEITCNEMLELASLGAKVLHPRAVEIARNYGMPLVVKSSWTDDPGTWVTTPKPQGRSLINLELARPVDDVELDTDQAKVALLRVPDKPGVAAKLFGEISRQKVDVDLIIQSIHEGNSNDIAFTVTTPILKRAEAVAAAIAPSLRSPSHPKSDEAEVMVEQNIAKVSIAGAGMIGRPGVAAQMFATLAEAGVNIQMISTSEVKVSCVIDAQDGDRAIIALRKAFEIETPLHSQLPTPSSLSTHNSPPVRGVALDLNQARLAIRQVPDRPGMAAQLFGILSQHNISVDMIIQSQRCRIVDGVPRRDIAFTVPRMDGETAQKLLCQVAPELGWGDVVLDSAIAKVSIVGAGMVGQPGVAAKMFEALAKHQINIQMIATSEIKISCVVSQEQGVQALQVIHTAFELAGTEKFVVPA

SEQ ID NO: 19615 - protein, 101 aa, Medicago truncatula
MYVQYSEQDGKPLPKFGEWDVNDPSSAEGFTVIFNKARDDKKIASASGRFPSQRRYDSRTGRTNDNNKNLKASSKVIVKLGDLFTIGFVCRKNGFALALRR

SEQ ID NO: 19616 - protein, 454 aa, Neurospora crassa
MSNLPSEPEFEQAYKELAYTLENSSLFQKHPEYRTALTVASIPERVIQFRVVWEDDNGNVQVNRGYRVQFNSALGPYKGGLRLHPSVNLSILKFLGFEQIFKNALYGLSMGGGKGGADFDPKGKSDAEIRRFCCAFMAELHKHIGADTDVPAGDIGVGGREIGYMFGAYRKAANRFEGVLTGKGLSWGGSLIRPEATGYGLVYYVGHMLEYSGAGSYAGKRVALSGSGNVAQYAALKLIELGATVVSLSDSKGALVATGESGITVEDINAVMAIKEARQSLTSFQHAGHLKWIEGARPWLHVGKVDIALPCATQNEVSKEEAEGLLAAGCKFVAEGSNMGCTLEAIEVFENNRKEKKGEAVWYAPGKAANCGGVAVSGLEMAQNSQRLNWTQAEVDEKLKDIMKNAFFNGLNTAKTYVEAAEGELPSLVAGSNIAGFVKVAQAMHDQGDWWSKN

SEQ ID NO: 19617 - protein, 335 aa, Pseudomonas sp. K82
MKLAHSLTVTAVSPQGSDAILLSLGVDGGQRQHFSFQSGQYLTLAVPVQGDEHWRCYSITSAPEDGQAISVLVRRVAGGRVSNWLCDHARAGQRLQVLPPAGRFTLARHGQPVLLYAGGSGIAPIFALAREALLQGAPQVRLFYACRDRATAMLLAELQALQAGSGQRLEIRHWYDAEQGLPTQALLEAQTQGLEAADAYLCGPEAFMHSVLAALAAAGIEPSRVYREDFGAALEGAVETGAEGPDAELTVQLKGQTHTVSVRGGQFLLGAMLDARAGRPHACRVGECASCMCRLVDGEVLRLDSSVLDEDDAAEGWLLACRTRAASAQVRLRFS

SEQ ID NO: 19618 - protein, 471 aa, Rhodobacter sphaeroides 2.4.1
MMADAPLILWFRRDLRLADNPMLAEAAATGRPLIPLFILDPETEALGAAPKWRLGLGVEAFARALEGLGSRLVLRRGPALAVLEALVAETGAAGVHWSRLWEPDWRARDEGVKAGLRQAGIEAASHAGHTIFEPREVETGQGGFYRVYTPFWKAVKDRPVAASSPPPARLLSPAEWPVSERLACWDLGRAMHRGAAVVAPHLAVGEAAAAERLTRFLSGPLDRYAAERDRPDAPVTSRLSENLTYGEISARSLWHAGMRARAEGRAGAEKFLQELAWREFGWHLLYHTPEIARRNWRGDWDAFPWRGDNPDAERWRRGMTGEPFVDAAMRELFVTGTMHNRARLIAGSYLTKHLLTDWRVGQAWFEDCLIDWDPASNALGWQWVAGSGPDASPYFRIFNPATQAEKFDPESAYRQRFLAEIARRPGPEALAFFEAVPRSWGLRPDRCYPRPVVGLAEGRERALAAYGRRNN

SEQ ID NO: 19619 - protein, 369 aa, Medicago truncatula
MEMTLSSSSAFSLPSTPSNPSLFLLSSSCPFASFKIPPFSKCRIRASVAVEQQTQQTKTAIIRIGTRGSPLALAQAHETRDKLIASHTELAEEGAIQIVIIKTTGDKILSQPLADIGGKGLFTKEIDEALINGDIDIAVHSMKDVPTYLPEKTILPCNLPREDVRDAFISLSAASLADLPAGSVIGTASLRRKSQILHRYPSLSVQDNFRGNVQTRLRKLSEGVVKATLLALAGLKRLNMTENVTSTLSIDDMLPAVAQGAIGIACRSNDDKMAEYLASLNHEETRLAISCERAFLTTLDGSCRTPIAGYASRDKDGNCLFRGLVASPDGTRVLETSRIGPYAYEDMMKMGRDAGEELLSRAGPGFFNS

SEQ ID NO: 19620 - protein, 202 aa, Carica papaya
FGGVYRGVYDAQDVAVKVLDWGEDGFATAAEAAALRTSFRQEVAVWHKLDHPNVTKFIGASMGTSNLKIPPKDATSDGHNPLPSRACCVVVEYLPGGTLKKFLIRNRRKKLAIKVVIQLALDLSRGLSYLHSKKIVHRDVKTENMLLDTHRTLKIADFGVARVEAQNPRDMTGETGTLGYMAPEVLDGKPYNRKCDVYSYGV

SEQ ID NO: 19621 - protein, 296 aa, Anabaena cylindrica PCC 7122
NSRLCMSSAVSGYIQSFGADGPPCCYDDLELTDCAFLIGTNTAECHPIVFNRLAKYHKKNRHVKMVVVDPRRTPTAEAADLHLAIRPGTDIDLLNGIAHLLMKWNYIDTLFMDECTSNFPAYAEVIRHYSPDVVSRQCGISIEDLETAAKYWGKSKSVLSLWSMGVNQSTEGTAKVRTIINLHLMTGQIGKPGAGPFSLTGQPNAMGGREAGGLAHLLPGYRLVKNDKHRAEVEDFWGLERGRISPVSGLTAWDMITSLESGNVGLLWIAATNPAVSMPDLERTKKALLKSPLTIY

SEQ ID NO: 19622 - protein, 296 aa, Oscillatoria sancta PCC 7515
NSRLCMSSAVSAYIQSFGSDGPPCCYDDLEQTDCAFLIGTNAAECHPIAFNRLRVHHKKNKKVKMVVVDPRYTQTAEAADLHLAIRPGTDIDLLNGIAHLLMRWGLLDPLFIDECTTGFSDYTDVIRHSPPELVARHCGIRLDELETAARYWGESKQVLSLWSMGMNQSSEGTAKVRTLINLHLMTGNIGKPGAGPFSLTGQPNAMGGREAGGLSHILPGYRVVKNPLHRAEVEKLWGLTPGQISAVPGRTAWEMITALERREIGCFWIAATNPAVSMPDLERTKAALLRSPFTVY

SEQ ID NO: 19623 - protein, 314 aa, Clostridium sticklandii
MSKIYDLVIIGAGPAGLSAGLYGARGKMSTLIIEKDKTGGQIVTTEEVANYPGSIHDASGPSLIARMAEQADEFGTERIKDSIVDFDFTGKIKILKGTKAEYQAKAVIVATGASPKKLDCPGEKELTGKGVSYCATCDADFFQDMEVFVVGGGDSAVEEAMYLTKFASKVTIVHRRDSLRAAKSIQDKAFANPKIDFKWDSVIKEIKGDGIVESVVFENTKTGELSEHFADEEFGTFGIFVFTGYIPQTDIFKDKVDMNQSGYFVTNQNMETNIPGVFAAGDCREKVLRQVVTATADGAIAAIMAEKYIEHEGL

SEQ ID NO: 19624 - protein, 105 aa, Clostridium sticklandii
MFELDKDTFETEVLQGTGYVLVDFWSEGCEPCKALMPDIQEMEKTYGEQVRFTKLDTTKARRLAIKEKVLGLPTIAIYKDGQKIDELTKEDATAANVEAMVKKYI

SEQ ID NO: 19625 - protein, 296 aa, Oscillatoria sancta PCC 7515
NSRLCMSSAVSAYIQSFGSDGPPCCYDDLEQTDCAFLIGTNAAECHPIAFNRLRVHHKKNKKVKMIVVDPRYTQTAEAADLHLAIRPGTDIDLLNGIAHLLMRWGLLDPLFIDECTTGFSDYTDVIRHSPPELVARHCGIRLDELETAARYWGESKQVLSLWSMGMNQSSEGTAKVRTLINLHLMTGNIGKPGAGPFSLTGQPNAMGGREAGGLSHILPGYRVVKNPLHRAEVEKLWGLTPGQISAVPGRTAWEMITALERREIGCFWIAATNPAVSMPDLERTKAALLRSPFTVY

SEQ ID NO: 19626 - protein, 250 aa, Corynebacterium efficiens YS-314
MVMTNGKLILLRHGQSAWNASNQFTGWVDVDLTTIGEAEAKRGGELLVENNVLPDVVYTSLLRRAIRTANLALDAADRHWIPVVRDWRLNERHYGALQGLNKAETKDKYGDEQYMAWRRSYGTPPPELADDAEYSQAGDVRYKDLESVPRTECLKDVVERFIPYFEEEILPRVKKGENVLIAAHGNSLRALVKHLDNISDDDIAELNIPTGIPLVYEITPEGTVVNPGGTYLDPEAAAAGAAAVANQGGK

SEQ ID NO: 19627 - protein, 319 aa, 'Flavobacterium' lutescens
MSSPAAAPAPAPAPDAQVIAHKFGGTSVASAQRYRHVAELLLQRPEPTQVVVVSAMKGVTDALIELATLAAHGQPRWRDAWQALRQRHHEAATELLGEDSADLLQWLDGRFDKLAGLLEALAVIGGLPEEVLERVQGLGEVFSAQLLGRYFNRLGHPCAVLDARDVLVVAHGELGVSVDWERSAANLAAWRVDNPQSRVVVTGFVARDGQGRITTLGRNGSDYSGAIFAALFEAAELHIWTDVDGVLSADPRVVPEAVTLATLSYDEACELAYFGAKVVHPQTMSPAIARQMPIVIRNTFNPSHPGTRIASSSEPSGPI

SEQ ID NO: 19628 - protein, 417 aa, Rhodopseudomonas palustris CGA009
MGRLVMKFGGTSVANIERIQNVARHVKREVDAGHEVAVVVSAMSGKTNELVAWCTEASPLHDAREYDAVVASGEQVTSGLLAIALQSLGIQARSWQGWQIPILTSDAHASARIVGIDGSEIIKRFSERKEVAVIAGFQGIHAETGRITTLGRGGSDTSAVAIAAALKADRCDIYTDVDGVYTTDPRVVPKARRLDKVSFEEMLELASLGAKVLQVRSVELGMVHNMPIFVRSSFDKPEDIDPHGTPPGTLISSEENSMENHVVTGIAFSKDEAQISVRRIEDKPGVAASIFGPLADANINVDMIVQNVSEDGKTTDLTFTVPASDFARAKQTITSAQDKIGYARFDSETDVAKVSVIGSGMRSHAGVAAQAFAALAARNINIRAITTSEIKFSVLIDAAYTELAVRTLHTLYGLDQV

SEQ ID NO: 19629 - protein, 296 aa, Tolypothrix sp. PCC 7101
NSRLCMSSAVAGYIQSFGADGPPCCYEDLELTDCAFLIGTNTAECHPIIFNRLEKYRKKNRKVKLIVVDPRRTPTAENADLHLAIRPGTDIDLLNGIAHLLMRWNQIDVGFIDDCTSNFPAYAEVIRHYSPDVVAHRCGISVADLETAARYWGQSQRVLSMWSMGINQSSEGTAKVRTIINLHLMTGQIGKPGSGPFSLTGQPNAMGGREAGGLSHLLPGYRLVKNPQHRAEVENFWGLKPGQISSEQGMTAWDMITGLENGTVGLLWIAATNPAVSMPDLERTKKALLRSPFTIY

SEQ ID NO: 19630 - protein, 296 aa, Tolypothrix sp. PCC 7101
NSRLCMSSAVAGYIQSFGADGPPCCYEDLELTDCAFLIGTNTAECHPIIFNRLEKYRKKNRKVKLIVVDPRRTPTAENADLHLAIRPGTDIDLLNGIAHLLMRWNQIDVGFIDDCTSNFPAYAEVIRHYSPDVVAHRCGISVADLETAARYWGQSQRVLSMWSMGINQSSEGTAKVRTIINLHLMTGQIGKPGSGPFSLTGQPNAMGGREAGGLSHLLPGYRLVKNPQHRAEVENFWGLKPGQISSEQGMTAWDMITGLENGTVGLLWIAATNPAVSMPDLERPKKALLRSPFTIY

SEQ ID NO: 19631 - protein, 289 aa, Triticum aestivum
  misc_feature (106)..(106): Xaa can be any naturally occurring amino acid
  misc_feature (140)..(140): Xaa can be any naturally occurring amino acid
  misc_feature (156)..(156): Xaa can be any naturally occurring amino acid
  misc_feature (187)..(187): Xaa can be any naturally occurring amino acid
  misc_feature (197)..(197): Xaa can be any naturally occurring amino acid
  misc_feature (211)..(211): Xaa can be any naturally occurring amino acid
  misc_feature (239)..(239): Xaa can be any naturally occurring amino acid
  misc_feature (249)..(249): Xaa can be any naturally occurring amino acid
MAPAAASASASLAATATAPHHALAPPRVSVSVAAAGRNSGLSVSVGVRPVPGISVVNSQRRRMVAAAAATEMAPAARGEGGGKPFVDEMRAVAMRLHTKDQAREGXEKEPQAPPVARWEPTVEGYLRFPVDSKLVFQTLXEDIVDRAAVPWYAEFXRNTGLERSEPLKKDLEWFPEQGHTIPEPTAXGTAYASYLEXLSEKDPQAFICHFXNVYFAHTAGRPNDWQKVAEKILGQERLXFYNWKDLSQXLQNFAQTKQLQLVSKKHARNIFPTQNSPNSPNQDIHSSNM

SEQ ID NO: 19632 - protein, 648 aa, Xanthium sp.
MAAIPHTNPSITTKPPSSPPRPTFLARFTFPITSTSHKRHRLHISNVLSDSKPTITHSPLPTESFISRYAPDQPRKGADVLVEALEREGVTDVFAYPGGASMEIHQALTRSTTIRNVLPRHEQGGVFAAEGYARASGLPGVCIATSGPGATNLVSGLADALLDSVPMVAITGQVPRRMIGTDAFQETPIVEVTRSITKHNYLVLDVEDIPRIVREAFYLASSGRPGPVLIDVPKDIQQQLVVPKWDEPIRLPGYLSRLPKTENNGQLEHIVRLVSEAKRPVLYVGGGCLNSGDELRRFVELTGIPVASTLMGLGAYPASSDLSLHMLGMHGTVYANYAVDKSDLLLAFGVRFDDRVTGKLEAFASRAKIVHIDIDSAEIGKNKQPHVSICGDIKVALQGLNKILEVKNSVTNLDFSNWRKELDEQKVKYPLSFKTFGEAIPPQYAIQVLDELTGGNAIISTGVGQHQMWAAQFYKYNKPRQWLTSGGLGAMGFGLPAAIGAAVARPDAVVVDIDGDGSFIMSVQELATIRVENLPVKILLLNNQHLGMVVQLEDRFYKANRAHTYLGNPSKESEIFPNMLKFAEACDIPAARVTRKADLRAAIQKMLDTPGPYLLDVIVPHQEHVLPMIPAGGGFMDVITEGDGRMKY

SEQ ID NO: 19633 - protein, 953 aa, Staphylococcus aureus subsp. aureus Mu50
MNNKKTATNRKGMIPNRLNKFSIRKYSVGTASILVGTTLIFGLSGHEAKAAEHTNGELNQSKNETTAPSENKTTEKVDSRQLKDNTQTATADQPKVTMSDSATVKETSSNMQSPQNATASQSTTQTSNVTTNDKSSTTYSNETDKSNLTQAKNVSTTPKTTTIKQRALNRMAVNTVAAPQQGTNVNDKVHFTNIDIAIDKGHVNKTTGNTEFWATSSDVLKLKANYTIDDSVKEGDTFTFKYGQYFRPGSVRLPSQTQNLYNAQGNIIAKGIYDSKTNTTTYTFTNYVDQYTNVSGSFEQVAFAKRENATTDKTAYKMEVTLGNDTYSKDVIVDYGNQKGQQLISSTNYINNEDLSRNMTVYVNQPKKTYTKETFVTNLTGYKFNPDAKNFKIYEVTDQNQFVDSFTPDTSKLKDVTGQFDVIYSNDNKTATVDLLNGQSSSDKQYIIQQVAYPDNSSTDNGKIDYTLETQNGKSSWSNSYSNVNGSSTANGDQKKYNLGDYVWEDTNKDGKQDANEKGIKGVYVILKDSNGKELDRTTTDENGKYQFTGLSNGTYSVEFSTPAGYTPTTANAGTDDAVDSDGLTTTGVIKDADNMTLDSGFYKTPKYSLGDYVWYDSNKDGKQDSTEKGIKGVKVTLQNEKGEVIGTTETDENGKYRFDNLDSGKYKVIFEKPAGLTQTGTNTTEDDKDADGGEVDVTITDHDDFTLDNGYYEEETSDSDSDSDSDSDSDSDSDSDSDSDSDSDSDSDSDSDSDSDSDSDSDSDSDSDSDSESDSDSDSDSDSDSDSDSDSDSDSDSDSDSDSDSDSDSDSDSDSDSDSDSDNDSDSDSDSDSDSDSDSDSDSDSDSDSDSDSDSDSDSDSDSDSDSDSDSDSDSDSDSDSDSDSDSDSDSDAGKHTPTKPMSTVKDQHKTAKALPETGSENNNSNNGTLFGGLFAALGSLLLFGRRKKQNK

SEQ ID NO: 19634 - protein, 286 aa, Halimeda opuntia
KNMITGAAQMDGAILVVSGADGPMPQTKEHILLAQQVGVPAIVVFLNKIDQVDDDDLLELVELEIRDTLNKYDFPGDDIPIISGSALAAVEALTTNPMIQRGENEWVDKIYKLMDVIDEEIPLPPRSTDKDFLMAIENVVSITGRGTVATGRVERGQIKVGQTLEIVGLKETKETTVIGLEMFQKTLEESVAGDNVGVLLRGVQKNEIQRGMVLAKPGSITPHTRFKAQVYILKKDEGGRHTSFVAGYRPQFYVRTTDVTGKIDSFQGDDNSEIRMVMPGDRVKII

SEQ ID NO: 19635 - protein, 648 aa, Xanthium sp.
MAAIPHTNPSITTKPPSSPPRPTFLARFTFPITSTSHKRHRLHISNVLSDSKPTITHSPLPTKSFISRYAPDQPRKGADVLVEALEREGVTDVFAYPGGASMEIHQALTRSTTIRNVLPRHEQGGVFAAEGYARASGLPGVCIATSGPGATNLVSGLADALLDSVPMVAITGQVPRRMIGTDAFQETPIVEVTRSITKHNYLVLDVEDIPRIVREAFYLASSGRPGPVLIDVPKDIQQQLVVPKWDEPIRLPGYLSRFPKTENNGQLEQIVRLVSEAKRPVLYVGGGCLNSGDELRRFVELTGIPVASTLMGLGAYPASSDLSLHMLGMHGTVYANYAVDKSDLLLAFGVRFDDRVTGKLEAFASRAKIVHIDIDSAEIGKNKQPHVSICGDIKVALQGLNKILEVKNSVTNLDFSNWRKELDEQKVKYPLSFKTFGEAIPPQYAIQVLDELTGGNAIISTGVGQHQMWAAQFYKYNKPRQWLTSGGLGAMGFGLPAAIGAAVARPDAVVVDIDGDGSFIMNVQELATIRVENLPVKILLLNNQHLGMVVQWEDRFYKANRAHTYLGNPSKESEIFPNMLKFAEACDIPAARVTRKADLRAAIQKMLDTPGPYLLDVIVPHQEHVLPMIPAGGGFMDVITEGDGRMKY

SEQ ID NO: 19636 - protein, 396 aa, Oryza sativa (japonica cultivar-group)
MATFSGTDRLRDLHAFDDTKAGVKGLVDAGVTTVPYFFRHHPDPLPVAAPSEAAAAIPLIDLAKADVDRGHVVSQVRSAAESAGLFQVVNHGVAGELMDAMLAAARRFNEQPAEAKAPYYTRDLGSKVRFFCNFDLFQSPAAQWRDTLYVEMVPDAPSPEEIPPPLRGVAEEFAAAVWRLGERVTELLSEALGLPPGYLAEHAGCMDGMSMVAQYYPPCPEPEKTMGTTRHSDPSFLTVLLQDESGGLQAVLPRPPEERWVDVPPVAGALVVNVGDLLQLVSNGRLRSMEHRVLPTAASAARARVAVACFFRLEYSASLTRPRSYGPIVDSGEGGARRAAAVYRSTTPRDFLAYFNGKGLDGRSALEHFRIPEAAAASSAVDVVSSSTTAAASIPR

SEQ ID NO: 19637 - protein, 243 aa, Arabidopsis thaliana
  misc_feature (82)..(82): Xaa can be any naturally occurring amino acid
  misc_feature (177)..(177): Xaa can be any naturally occurring amino acid
MAKLSFKDSLKALEADIQHANTLALDYPREKDGARVQMRLSYSPTAQFFLFLVQWTDCKLAGFLGLLRGLIYMTHPDGKTTXSVYERKASIREFQAVILPSLSQLQRGVTDIDDSNQKEVCKMRYRKKDESEMSEIEIEREEECGICMEMNSKVVLPNCTHSLCIKCYRDWRGRSQXSCPFCRDSLKRVDSGDLWMFLDQNDTVNLTAIARENQKRLFMYIEKLPLVVPDQVYASSPYDFHVR

SEQ ID NO: 19638 - protein, 339 aa, Streptococcus agalactiae A909
MFLLLCILSMWLMIFGVAFYYFGSLHQSLTSRIIYQFVLTVLITTIAWFMGAYFLGFEGHFKTVFQFQEADGKQIVNCLFQLCFALYAVVMLIGSIIDRVQTKRLLLAVVSWLFLVYTPLAYLIWNSEGVFAKMGVLDFSGGMVVHLSAGLSSYILAHVIGKSEHQHNKIKNDNLFLGMILITFGWFGFNMGPVGEWNSQAIMILLNTIFAIIGGGLAWTLAAKWNGEEEKTGSLLNGIIVGLVTSTAGVGYLLTWQLLAVTFFASLFTYFVTDYVAKAFAIDDVVSSFGMNGIGGLLGSLGVGLFKLSHMPVQLLALATTILLSIIMTYIISKAIFRK

SEQ ID NO: 19639 - protein, 292 aa, Yarrowia lipolytica CLIB122
MLRTISRTRTMVPSRHLISYRFFSDVSTTKGETFTLTKHFLDASNTAHIAVYSLNRPEAMNSISKKLLEEFETYINSLAAEGRHQNVTNTRALILSSELPKVFCAGADLKERKTFTDADTAAFLNKLNGTLDTIQSLHMPTITAIQGFALGGGAEISLATDFRVLSDVAQFGLPETRLAILPGAGGTKRLPKLIGYSRALDLVLTGRRVKADEALHLGIANRTGENALETALEMAKLICEGGPIAINAAKMAVRGQSKEWEIAAYNKVVNSEDKFEALSAFKEKRKPIFKGR

SEQ ID NO: 19640 - protein, 374 aa, Oryza sativa (japonica cultivar-group)
MATVSGTDRLRDLHAFDDTKAGVKGLVDAGVTTIPYFFRHPPDPLPVASPSEAAAAIPLIDLAKADVDRDHVVSQVTAAAETVGFFQVVNHGVAGELMEAMLAAVRRFNEEPLEAKVPYYTRDVASKVRFSSNFDLFRSPAANWRDTLVIEMWPEPPSPEEIPPPCRGVLEEYAAAARRLGERLLELLSEGLGLPAGYLGREAGCTDGLSVAANYYPACPEPEATMGATKHADPSFLTVLLQDTSGGLQALLDQPRRRWVDVPPVAGALVVNVGDFLQLVSNDRLRSVEHRVLPTGAAGPARVSVACFFRVEYASTRPYVPVVVGGGGARAAAVYRGTTAGEFLAHFNGKGLDGRSALDHFRIPAAASSPPPPL

SEQ ID NO: 19641 - protein, 114 aa, Caulobacter crescentus CB15
MKMIVAVIKPSRLDAVLEAVTEAGASGLTVTEVRGYGRQKGKTEVYRGAEYEVKLLPKVKLEIAVPTDVLEPVIEALQRTANTGKIGDGKVFVMDLEQALRIRTGERDAAAIAG

SEQ ID NO: 19642 - protein, 933 aa, Erwinia carotovora subsp. atroseptica SCRI1043
MTKYSLRARMLILILAPTLMIGLLLSSFFVIHRYNQLQAQLADSGTSIIEPLATISAYAITHRQMDTIPALINTLHRRHSAIIRTISVFDARNQLLATTNVRNSVTLQPISSDALSYNRLHLHHTNDALILHMPIVNDSEFMPGGATPVLPGTATPLGYLVIELDTSTIRLQQYQEIFIAALLLLLSLGAAVLFAYRLMRDVTTPIRNMVDTVDRIRRGQLDSRVEGYMLGELDMLKNGINSMAMSLTAYHEEMQQNIDQATYDLRETLEQMEIQNVELDLAKKRAQEAARIKSEFLANMSHELRTPLNGVIGFTRQTLKTPLNTTQTDYLLTIERSANNLLNIINDVLDFSKLEAGKLVLEDIPFSLHSTLDDVVMLLAHTAHEKGLELTLSIQNDVPEQFVGDPLRIQQIITNLLGNAIKFTEQGNIDIRVEKRRQEHHQVQLEVQIRDTGIGIAELQQSQLFQAFRQADTSISRRHGGTGLGLVITQRLVKEMGGDISFQSQLNKGSTFWFHITLPLNPHAMPTEPAYTMLQGKHLAYVEYHPIAAQATLDILSQTPLMVSYSPTFEQLPEGDFDILLLGIPVQYRNMLLDYTPRLRDICRRAPCVILALPSLAQMDAEQLKTFGVHACLSKPLAASRLLPLLQDSTLFQLSFLPDATTSHQSVVRHPARLPLSVMAVDDNPANLKLIGTLLEEQVDTIILCESGTDAISQAKMHQIDIILMDIQMPGMDGICASELIRQIPHHATTPIIAVTAQTMTGEREHLLRSGMDDYLAKPIDEQMLKSVLTRHARKDPLKRDRGNIAGLLNEHDDSQLSLDWALAQQQAANKPELARDLLQMLLDFLPEVRQKIENVLNGQTDDNIIELVHKLHGSCSYSGVPRLKRICRYLEQQLRNGVHASDLEPEWLELLDEIDNVNKAAQPHIKPLHSSL

SEQ ID NO: 19643 - protein, 207 aa, Kluyveromyces lactis NRRL Y-1140
MSRKKNILKVIILGDSGVGKTSLMHRYVNDKYSQQYKATIGADFLTKEVIVNDDKVATMQVWDTAGQERFQSLGVAFYRGADCCVLVYDVTNGKSFDNVKSWRDEFLVHANVSSPETFPFVILANKVDVEESKKVVSSRSAQEQAKSLGNVPLFFTSAKDSINVQDAFEEIARSALQQSQSDADAYEDDLSEAINIQLDGEPSSCNC

SEQ ID NO: 19644 - protein, 185 aa, Brassica napus
MAAAFTCTSLPPLSLRSETKAAASSSLSARRLFAVSPESGGLRIRLSQSPSSLTSIQPRVPRLRRGVVVVCEAQETTTDIVSIVNDSTWDSLVLKADGPVLVDFWAPWCGPCKMIDPLVNELAQQYTGKVKFYKLNTDDSPSTPSKYNVRSIPTIMIFVDGEKKDAIIGAVPKSTLTSSIDKFLQ

SEQ ID NO: 19645 - protein, 627 aa, Pseudomonas aeruginosa
MCGIAGFWNITGTLLGDNARVARQMAAAIHHRGPDESGIWYEAPRAPILVHARLAVLELSPAGSQPMHSDCGRYVLIYNGEIYNHLALRARLSEAGVTHSWRGGSDTETLLACFAQWGVESTLKLTVGMFALALWDRQEKTITLARDRMGEKPLYWGWQNGVLFFASELKALKEHPLFRGDIDRDALALFLRYGYVPAPYSIYKGIGKLRAGSYLVLSERSLNETCEPAAYWSANAAIEEALSNPFQGTDAEAVDLLESQLRTSISDQMVSDVPLGAFLSGGVDSSTVVALMQQQSSRPIRTFSIGFDEPGYDEAVYAKAVAEHIGTDHTELYVNSKDALDVIPSLPKIYCEPFGDSSQIPTLIVSGLARQQVTVALSGDGGDELFGGYNPYQFTPRVWRMLERFPHSMRRFASAFAQDLPLPEKLGKLRDVFASRTAEELFYRLNSHWRNHEYPVIGAQGHTALLDTPERWPRVDSFQHWMMAMDVQGYMPDDILVKVDRAAMANSLETRVPLIDHRVFELAWRMPLHMKIRNGKGKWLLREVLYRHVSRELIERPKKGFSVPVSDWLRGPLKEWAESLLDERRLQQEGYLDSRLIRRIWNDHLAGRRDHSRRLWSVLMFQAWLES

SEQ ID NO: 19646 - protein, 360 aa, Halobacterium sp. NRC-1
MRGAAPDAVLDAVQSGDPLPGTGGFAGELPDGRLARDVLGRRLCYVDGDEWSHDPRDLAAPTLLPAGHVRAPGATGSGRPVWSLPEPAPTGDEPVERVRDAVAGALGGVPAGDDLAVAFSGGVDSALAAAALDAPLYVVGYADSSDIAAARESAAAMGRADDLRVHEVTLADIEAAVPTVARAIGRTNAMAVQIALPLFLVAARAAADGYSRLVVGQGADELFGGYAKVAKAPTDPRTDADTVRGARRETVQSLPAQLERDLRALRAAGVEPVTPLLHDDVVRAALALPGEWLVSGDTRKRALREAARSWLPDAVADRDKKAVQYGSLVAREVDRLARQAGFKRRMDDHVTQYVEARIEE

SEQ ID NO: 19647 - protein, 439 aa, Xylella fastidiosa Ann-1
MFELLIVIALIFLNGFFAMSEMSLMTSRKSRLKQMAHSSKHAAKALTLAQNPESFLSTVQIGITLIGILTGLFGGDAIGTAIGQWLTALTPQLGEYTSIIGKTLSVALITFLTLIFGELVPKRLALTHSEKIASTIAVPMSVLARIAAPGVWVLAKSTQLVLRVFGFGKIPSSAVTEEEIRLLVAESHEAGVIDDYERNMMNRVMRLGDRTADSLMTPRNRIAWLDNSADLEHNLEIMREHQFSRYPVYRSSDQDIVGILEVKSVITRIDSQTQTTLSLFQELCEPVFVSESTHALKLLEIFREEQQSMALVVDEYGEILGLVTISDLMGAVIGRLQNVENTDEDALMVTREDGSFLIDGTLPIEELREVLGTELPDGEENNYHTLAGMCISYFGRIPHVGEYFDWAGWRIEIVDLDGARIDKLLLQRLNKEKNHVPHK

SEQ ID NO: 19648 - protein, 412 aa, Lactobacillus sakei subsp. sakei 23K
MEYSLDAEQENNGAVIKVIGVGGAGGNAVNRMIDEGVKGVHFIAANTDVQALEDSKAETKIQLGPKLTRGLGAGSTPDIGQKAAEESEEVLAEALKGADLIFVTGGMGGGTGTGAAPVVAKVAKDLGALTVGVVTRPFTFEGPKRGKNAASGIAELKQHVDTLVIIANNRLLEIVDKKTPMLEAFHEADNVLRQGVQGISDLITSPGYVNLDFADVKTVMANQGSALMGIGSATGENRTAEATKKAISSPLLEVSIDGAEQVLLNITGGPDLSLFEAQDAAGIVQQAATSEVNLIFGTSINENLGDEVVVTVIATGIDNDGKTPKRPEAAQTTSQPVQPSTPKQTTNDDPFGNWDMRREPNPREQAKATEKFDEVEKKDFDIFKRTAQVDSDAVDTKQDNNDVPPFFKRRRK

SEQ ID NO: 19649 - protein, 471 aa, Legionella pneumophila subsp. pneumophila str. Philadelphia 1
MTIALVWFRQDLRLTDNPAFIEACSHHEIVIPLYIYDDKCSVLGQAQAWWLHYSLIALGKSLNQQGLSLVLRKGSPQEIILELVAQYGVESVYWNRCYEPQVIARDKKIKLALVEREIKVQSFNGNLLHEPWTIKNKNGDFFKVFTPYWKQCRQILNIPSPFILTKRPRGIEIASDDIGKWKLLPAINWAARFSEYWIPGEEGAQKKLDEFIVHHLSGYKRDRDFPAKNATSRLSPHLHFGEISPWVILRALELAKLEHTCDLASVEHFLSELGWREFSVYLLYHFPKLDCENFRKEFDAFPWQNDEQLLTCWQKGMTGYPIIDAGMRELWATGYMHNRVRMIVASFLTKDLLIDWRSGAQWFLDTLVDADLANNSASWQWVAGCGADAAPYFRIFNPILQSQKFDPDGVYIRQWIPELAQLNSQSIHQPWTDADASSIFLGKKYPKPIIDHQEARTKALSYYQQIKKGMD

SEQ ID NO: 19650 - protein, 220 aa, Wolbachia endosymbiont of Tetranychus urticae
TLIVIPNQNLFRIANEKTTFADAFQLADNVLHIGIRGVTDLMIMPGLINLDFADIETVMSEMGKAMIGTGEAEGEDRAISAAEAAISNPLLDNVSMKGAQGILINITGGGDMTLFEVDAAANRVREEVDENANIIFGATFDQAMEGRVRVSVLATGIDSCNNNSSVNQNKIPAEEKNFKWPYNQIPILETKEYASTEQTNERVKWGSNVYDIPAYLRRKK

SEQ ID NO: 19651 - protein, 551 aa, Xylella fastidiosa Ann-1
MTEIKEAFVPDIGDYSNVPVIEVLVAVGDTVSKGQSLITLESDKATMEVPSSTTGIIKEIKVKVGDTLSQGHVVALIEVSEETAEITTPMTVNTPTTRAHNTAPPEDGGSLIEVRVPDIGDYTNVPVIEVLVAVGDTVSKDQSLITLESDKATLEVPSSATGVIKQLKVNIGDTLSQGDIVVVLQSAESIPLTPATNKPALPPNSSPARDAISAPASPAGTPSTPPITFDANTVLPSKVPYASPAVRLLARQLDVDLSRIKGSEKNGRITREDVQKFVNATLGTGMAEGRTPSASITTNGGLNLLPWPNVDFSKFGEIETQPLSRIKKISGANLARNWAMIPHVTQFDQADITQLEALRVQINKENAASNKNGTGIKLTVLAFLIKASAAALKKFPTFNASLDATGETLTLKKYFHIGFAADTPNGLVVPVIRNVDQKGIVEIAQETSDLAKKARDGKLTPADMSGGCFSISSLGGIGGTAFTPIINAPEVAILGVSKSLIQPIWDGTQFAPKMLLPLSLSYDHRVIDGALAAHFTTYLSQILADMRRVLL

SEQ ID NO: 19652 - protein, 310 aa, Bifidobacterium adolescentis
MRDVVIIGSGPAGYTAAIYLGRAGFEPLVVAGALTPGGQLVNTTEVENFPGFPDGIMGPDLMDNMRKQAERFGTHIVWDDVVSVASNADSGIKTVTLDDGDVYDARALVIATGSNYRKLGVPGETEYAGKGVSYCATCDGFFFRNKPIVVVGGGDSAFEEADFLSRFGSSVTLIHRRSTFRASRIMVERAQRNPKIDFMLDAVVQEIRGDENGVQKVEVRNTATEKTSVIPANGVFMAIGHTPATAFLNGLVDVDSAGYITVDGASTRTSEPGVFAAGDCMDSVYRQAISAAGMGCRAALDAQAYLDSLK

SEQ ID NO: 19653 - protein, 455 aa, Aspergillus niger
  misc_feature (72)..(72): Xaa can be any naturally occurring amino acid
MDRRVTIASQVAIAAVAGYCIYKAFNARQQQKSLKDAVPKSSAAPLTPEQIKIIKATVPVLQEYGTKITTAXYMNMSTVHPELNAVFNTANQVKGHQARALAGALFAYASHIDDLGALGPAVELICNKHASLYIQADEYKIVGKYLLEAMKEVLGDACTDDILDAWGAAYWALADIMINREAALYKQSQGWTNWRQFRISKKVPESDEITSFYLEPVDGKPLPAFRPGQYISVSVQVPEEDPQARQYSLSDTSRSDYYRISVKKETGLDPRAPGAKRHPGYVSNVLHDMIKEGDLIDVSHPYGDFFLSTAEATHPIVLLSAGVGMTPMMSILNTITKKSNRKIHFIHGSRTTEARAFKSHVQKLEKEIPNMQVTYFLSRPGDSDQLGVDYHHAGRIDLQKLDGPSHLYLDNPSTEYYICGPDTFMTQMEEALKAYGVGDDRIKMELFGTGGVPHN

SEQ ID NO: 19654 - protein, 492 aa, Cicer arietinum
LHQVIKANDDLSREHHQFFLYQMLRALKYMHSANVYHRDLKPKNILANSNCKLKVCDFGLARVAFNDAPTSIFWTDYVATRWYRAPELCGSFSSKYTPAIDIWSIGCIFAEVLLGKPLFPGKSVVHQLDLITDLLGTPLPETITGVRNDNARKYLAGMRKKLPVPFEQKFPNADPLALRLLQRLLAFDSKNRPTAEEALADPYFKGLAKVEREPSCKPISKLEFEFERRRITKDDVRELIYREILEYHPQLFKDYMNGTEGANFLYPSAIDQLRKQFAYLEENDGKSGSVLPPERKHVSLPRSTVYSGSILPSNQRTPALYEKKKMVEETSKSWGAAGENSRNQLRGVQPPPRVPAKPGRVVGPVLHYEDERITKSSNDPRIVIQNTTQAVSSRDAFQTHPPNTKTTSGIHKEQGKNEFPSLQSNLHATATTDLNNNPYRRRVINNNLNDPVTTIDAKMLQAQSHLGVVGAAAVAVATHSHRYSRGIQYGLF

SEQ ID NO: 19655 - protein, 408 aa, Zymomonas mobilis subsp. mobilis ZM4
MSPRLHRLSNGLAIALQPMSGVETMAVGLYSNVGARSEPNHYSGLAHMVEHMVFKGAAGRNARMIAEAAENCGGQLNAWTARDHTVFQARMLSEYWDLGLELVADLVRSPTLDGEELEREKGVVLSELGESYDTPDDIIHDYLQSVAFKDQALGRPVLGNETSIKAIDRPALSQWVKQYYQPEGFVLAAAGKIDEDAFLKMAESRFSDWGKGQPLAVEKAKFTTGRYDDHRDSDQTHIALGYRGFSYQDIRSHASALLASILGGGMSSRLFQILREEEGLVYSVYSWSQSWIETGIFGIYCAADKKDASKALTLIRQIMADTVESVSEEELQRAKAQARAGLLMNLEGVAARCDHLGRQIQIHNRIVNPSEVVEWIDAVSLDDIRSVGQYSLSQGEALASVGDGLTIS

SEQ ID NO: 19656 - protein, 1385 aa, Staphylococcus aureus subsp. aureus Mu50
MLNRENKTAITRKGMVSNRLNKFSIRKYTVGTASILVGTTLIFGLGNQEAKAAESTNKELNEATTSASDNQSSDKVDMQQLNQEDNTKNDNQKEMVSSQGNETTSNGNKSIEKESVQSTTGNKVEVSTAKSDEQASPKSTNEDLNTKQTISNQEGLQPDLLENKSVVNVQPTNEENKKVDAKTESTTLNVKSDAIKSNAETLVDNNSNSNNENNADIILPKSTAPKSLNTRMRMAAIQPNSTDSKNVNDLITSNTTLTVVDADNSKTIVPAQDYLSLKSQITVDDKVKSGDYFTIKYSDTVQVYGLNPEDIKNIGDIKDPNNGETIATAKHDTANNLITYTFTDYVDRFNSVKMGINYSIYMDADTIPVDKKDVPFSVTIGNQITTTTADITYPAYKEADNNSIGSAFTETVSHVGNVEDPGYYNQVVYVNPMDKDLKGAKLKVEAYHPKYPTNIGQINQNVTNIKIYRVPEGYTLNKGYDVNTNDLVDVTDEFKNKMTYGSNQSVNLDFGDITSAYVVMVNTKFQYTNSESPTLVQMATLSSTGNKSVSTGNALGFTNNQSGGAGQEVYKIGNYVWEDTNKNGVQELGEKGVGNVTVTVFDNNTNTKVGEAVTKEDGSYLIPNLPNGDYRVEFSNLPKGYEVTPSKQGNNEELDSNGLSSVITVNGKDNLSADLGIYKPKYNLGDYVWEDTNKNGIQDQDEKGISGVTVTLKDENGNVLKTVTTDADGKYKFTDLDNGNYKVEFTTPEGYTPTTVTSGSDIEKDSNGLTTTGVINGADNMTLDSGFYKTPKYNLGNYVWEDTNKDGKQDSTEKGISGVTVTLKNENGEVLQTTKTDKDGKYQFTGLENGTYKVEFETPSGYTPTQVGSGTDEGIDSNGTSTTGVIKDKDNDTIDSGFYKPTYNLGDYVWEDTNKNGVQDKDEKGISGVTVTLKDENDKVLKTVTTDENGKYQFTDLNNGTYKVEFETPSGYTPTSVTSGNDTEKDSNGLTTTGVIKDADNMTLDSGFYKTPKYSLGDYVWYDSNKDGKQDSTEKGIKDVKVILLNEKGEVIGTTKTDENGKYRFDNLDSGKYKVIFEKPTGLTQTGTNTTEDDKDADGGEVDVTITDHDDFTLDNGYYEEETSDSDSDSDSDSDSDSDSDSDSDSDSDSDSDSDSDSDSDSDSDSDSDSDSDSDSDSDSDSDSDSDSDSDSDSDSDSDSDSDSDSDSDSDSDSDSDSDSDSDSDSDSDSDSDSDSDSDSDSDSDSDSDSDSDSDSDSDSDSDSDSDSDSDSDSDSDSDSDSDSDSDSDSDSDSDSDSDSDSDSDSDSDSDSDSDSDSDSDSDSDAGKHTPVKPMSTTKDHHNKAKALPETGNENSGSNNATLFGGLFAALGSLLLFGRRKKQNK

SEQ ID NO: 19657 - protein, 227 aa, Synechococcus sp. WH 8101
NSRLCMSSAVAGYSRSLGSDGPPCCYDDLDHCSVAVLIGTNTAECHPVLFQRLLKRKKRDPKGLTIVVVDPRATDTSRIADYHLAIAPGTDLALLHGLARLIVQDNGFDSDFIDEATEGFAAYAKTIRAWTPAKVAALCGISEKELRQVARLWSRSQGVLSLWSMGVNQRREGTAVVSGIINLHLLTGQIGKPGAGPFSLTGQPNAMGARGRRPGPSASRLSLYGQE

SEQ ID NO: 19658 - protein, 1141 aa, Staphylococcus aureus subsp. aureus Mu50
MINRDNKKAITKKGMISNRLNKFSIRKYTVGTASILVGTTLIFGLGNQEAKAAENTSTENAKQDDATTSDNKEVVSETENNSTTENDSTNPIKKETNTDSQPEAKEESTTSSTQQQQNNVTATTETKPQNIEKENVKPSTDKTATEDTSVILEEKKAPNYTNNDVTTKPSTSEIQTKPTTPQESTNIENSQPQPTPSKVDNQVTDATNPKEPVNVSKEELKNNPEKLKELVRNDNNTDRSTKPVATAPTSVAPKRLNAKMRFAVAQPAAVASNNVNDLITVTKQTIKVGDGKDNVAAAHDGKDIEYDTEFTIDNKVKKGDTMTINYDKNVIPSDLTDKNDPIDITDPSGEVIAKGTFDKATKQITYTFTDYVDKYEDIKARLTLYSYIDKQAVPNETSLNLTFATAGKETSQNVSVDYQDPMVHGDSNIQSIFTKLDENKQTIEQQIYVNPLKKTATNTKVDIAGSQVDDYGNIKLGNGSTIIDQNTEIKVYKVNPNQQLPQSNRIYDFSQYEDVTSQFDNKKSFSNNVATLDFGDINSAYIIKVVSKYTPTSDGELDIAQGTSMRTTDKYGYYNYAGYSNFIVTSNDTGGGDGTVKPEEKLYKIGDYVWEDVDKDGVQGTDSKEKPMANVLVTLTYPDGTTKSVRTDANGHYEFGGLKDGETYTVKFETPAGYLPTKVNGTTDGEKDSNGSSITVKINGKDDMSLDTGFYKEPKYNLGDYVWEDTNKDGIQDANEPGIKDVKVTLKDSTGKVIGTTTTDASGKYKFTDLDNGNYTVEFETPAGYTPTVKNTTAEDKDSNGLTTTGVIKDADNMTLDSGFYKTPKYSLGDYVWYDSNKDGKQDSTEKGIKDVKVTLLNEKGEVIGTTKTDENGKYRFDNLDSGKYKVIFEKPAGLTQTVTNTTEDDKDADGGEVDVTITDHDDFILDNGYFEEDTSDSDSDSDSDSDSDSDSDSDSDSDSDSDSDSDSDSDSDSDSDSDSDSDSDSDSDSDSDSDSDSDSDSDSDSDSDSDSDSDSDSDSDSDSDSDSDSDSDSDSDSDSDSDSDSDSDSDSDSDSDSDSDSDSDSDSDSDSDSDSDSDSDAGKHTPVKPMSTTKDHHNKAKALPETGSENNGSNNATLFGGLFAALGSLLLFGRRKKQNK

SEQ ID NO: 19659 - protein, 216 aa, Salinibacter ruber DSM 13855
MCDAIIFDLDGVLVDSDAVITRRWKRWAEERGIPFEEVEAVQTGRPAIEVIEEVAPHLDPEAEIDRLGDEMAADTEGVEAFDGAKALLDRLPEDRWAIATSGRHRTATARMTHVGLPEPEVFVTADDVEQGKPAPEPYQQAATGLGIDPGRCVVLEDAPAGVASARRAGASVLGVSTSTSPNALAAATAVIPHVEALDVRAEEAGLRVDWQHEEQA

SEQ ID NO: 19660 - protein, 355 aa, Gibberella zeae
MSRANPPNAAGSRKISFNVSEQYDIQDVVGEGAYGVVCSAIHKPSGQKVAIKKITPFDHSMFCLRTLREMKLLRYFNHENIISILDIQKPRSYESFQEVYLIQELMETDMHRVIRTQDLSDDHCQYFIYQTLRALKAMHSANVLHRDLKPSNLLLNANCDLKVCDFGLARSAASQEDNSGFMTEYVATRWYRAPEIMLTFKEYTKAIDVWSVGCILAEMLSGKPLFPGKDYHHQLTLILDVLGTPTMEDYYGIKSRRAREYIRSLPFKKKVPFRTLFPKTSDLALDLLEKLLAFNPVKRITVEEALKHPYLEPYHDPEDEPTAPPIPEEFFDFDKHKDNLSKEQLKQLIYQVIMW

SEQ ID NO: 19661 - protein, 365 aa, Zea mays
MALRRLLQGSVLPRVTGRVSAPAVAPFSTESGETIRATLFPGDGIGPEIAESVKQVFNVAGVPIEWEEHYVGTEVDPRTESFLTWESLESVRRNKVGLKGPMATPIGKGHRSLNLTLRKELGLYANVRPCNSLPGYKTRYDDVNLVTIRENTEGEYSGLEHQVVRGVVESLKIITRQASLRVAEYAFHYAKANGRERVSAIHKANIMRKTDGLFLKCCREVAETYPEIQYEEVIIDNCCMTLVKNPGLFDVLVMPNLYGDIISDLCAGLIGGLGLTPSCNIGEGGICLAEAVHGSAPDIAGKNLANPTALMLSAVMMLRHLQFNDKADRIHNAILQTIAGGKYRTADLGGKASTSEFTNAVCDHI

SEQ ID NO: 19662 - protein, 365 aa, Pyrococcus horikoshii OT3
MRAIIIGIGQCGTKIADIFSLVDFEALAINTSKSDLEYLKHIPPERRILVGESIVGGKGVNANPLLGREAMKRDLPMVMKKISSLVGYEDVDIFFLTFGFGGGTGAGGTPVLAEALKEEYPDSLVVAIGALPLKEEGIRPTINAAITIDKLSRIVDSIIAIDNNKLKESDEDISQAYEKINYAIVERIASLLALIDVPGEQTLDASDLKFVLRAMGSFATVGYAKADATKIKSLSRLIIRSFENEGLYLDVNLESALYGLVAIHGPPEVLKAKEIFDALSELSQRIRGKQIFRGFYPDPREREVEVVTLLSGIYESKSIENIVITAKRYAREFMKAKEEGEMKKRELLKGLPDFEDIYPGEVDEG

SEQ ID NO: 19663 - protein, 442 aa, Bacillus licheniformis ATCC 14580
MNAEANGLKKEIGLLFALSLVIGTIIGSGVFMKPGSVLSYSGNAQIALFAWLLGGILTLAGGLTIAELGAQIPKTGGLYTYLEEIYGEFWGFLCGWVQIIIYGPAIIGALGLYFGSLVANLFSWDKSWTALIGIITVAFLCIVNIVGTKYGGAVQTITTIGKLIPIVCIIVFGLWQGDEYIFSSVTESIASQNFGAAVLATLFAYDGWILLAALGGEMKNPEKVLPKAMTGGILIVTACYLFINLALLHILPADQIVKLGENATSTAATMLFGPLGGKLISIGIIVSIFGCLNGKVLSFPRVIFAMAEKKQLPFSRWISHVHPAFHTPWIAVIVQMIIAVILMIISNPEKLSEVSIFMIYIFYVMAFFAVFILRRRKNGQGRSYSVPLYPYLPVAAILGSLFVLVSTLITDFYSCLWSILIGLVGLPVYFWMKKRNKNGSAA

SEQ ID NO: 19664 - protein, 188 aa, Glycine max
NLGPCLCEKRRVMMISGGGGGGGKSSWSSSTSSWVPTTSVSASGKRIQREMVELNNDPPPDCSAGPKGDNLYHWIATIIGTPETPYQGGIFFLDIKFPIDYPFKPPEVVFKTRIYHCNVDPDGRVSMGILKDDWSPALTITKVLLEVRSIMTNPDPYNAVVPGIAHLYSGDRAKHDDIAAEWTVRFAK

SEQ ID NO: 19665 - protein, 807 aa, Geobacter metallireducens GS-15
MGNDMRNDVKSLRAGIFSEIIIVFLPLTMLLIYQTVSDITVSDRLADTHRLLAASSSAYQRYRLFVNGVVDAIDTGRVSEDAVHNLEHTTVELKSITTGDRSSDFSSLAARTNALLAHLRKDRSFGKVLPLRDTINGIDADLSALAAQCDETNRQMILENINSTQSRKIMVFTALALGALVTLALIVMLIRHVTRFELVLRESEERMRVMFESINAGIVLIDCDNNSIVDVNPTALRLHGGTKEELIGYPSERLFHGDNVRTDPEHDEGKAIDISKGMLSLCNGERLPVLESVNYVAINGRRYMLKSFVDLSKQMTLETELLAAKEAAEAASRAKSIFLASMSHEIRTPMNAIIGYAQLLKREGNLAPQQGQYLNVINNSGEHLLKLINDILEMSKIESGTVNLTPVPFNFHNLLHDVESLFADRARQKKLRFDVRLQGEVPVVLDADEMKVRQVLINMIGNALKFTDEGTIAVTVSSSTDSPDKERDTYGETAITVDVEDSGIGISAEEADQVFALFEQTESGRRRIGGTGLGMPISRQFARLMGGDLFLVRGEPGIGSAFRFVFRAKALDLAEFKQPAVDERFFWRIIPDEKEWRVLVVDDQENNRSLLSHMLTRAGFAVREADGGIDGVAQFRAWLPDIVLMDILMPDMDGYEALRQIKATSEGGVTPVIAVTASVMMDEHQKALDLGFDGFIMKPVSMECLFEEIRRLTNVAYLYDDSRSSGDAAAEILPPWVDRLTTLPDVLLGAMRDALEAGDIASLRGLIEQIGESEPIPAEALRRLVDSYSYDELTTLLAGGDARYASA

SEQ ID NO: 19666 - protein, 297 aa, Shigella flexneri 2a str. 301
MKRQGTTLPANNHALKQYAFFAGMLSSLKKQKWRKGMSESLHLTRNGSILEITLDRPKANAIDAKTSFEMGEVFLNFRDDPQLRVAIITGAGEKFFSAGWDLKAAAEGEAPDADFGPGGFAGLTEIFNLDKPVIAAVNGYAFGGGFELALAADFIVCADNASFALPEAKLGIVPDSGGVLRLPKILPPTIVNEMVMTGRRMGAEEALRWGIVNRVVSQAELMDNARELAQQLVNSAPLAIAALKEIYRTTSEMPVEEAYRYIRSGVLKHYPSVLHSEDAIEGPLAFAEKRDPVWKGR

SEQ ID NO: 19667 - protein, 320 aa, Lactococcus lactis subsp. lactis Il1403
MSKKIVTLAGDGIGPEIMSAGLSVLKAVSKKIDFEYELEAKDFGGIAIDKHGHPLPEETLQAVKNADAILLAAIGHPKYNNAKVRPEQGLLALRKELGLYANVRPLKIYPALKKLSPIRNVENVDFLMIRELTGGIYFGQHELADDKARDVNDYSADEIRRILHFAFKSAQSRPRKLLTSVDKQNVLATSKLWRKMADEIADEYPDVRLEHQLVDSCAMLLITNPQQFDVIVTENLFGDILSDEASSLAGSLGVMPSSSHGFNGLALYEPIHGSAPDIAGKGIANPVSMILSIAMMLRESFGQEDGATMIEKAVTQTFTD

SEQ ID NO: 19668 - protein, 616 aa, Candida albicans
ARASADQQQHQHNHHHHHHHHHHNENQSQQQVPIDPAANPANRIGRYQILKTLGEGSFGKVKLAQHLGTGQKVALKIINRKTLAKSDMQGRVEREISYLRLLRHPHIIKLYDVIKSKDEIIMVIEFAGKELFDYIVQRGKMPEDEARRFFQQIIAAVEYCHRHKIVHRDLKPENLLLDDQLNVKIADFGLSNIMTDGNFLKTSCGSPNYMPAPEVISGKLYSSVQKLMIWSAGVILGMSCCVVDYHSMTSSIPALFKKISNGVYTLPNYLSAGAKHLLTRMLVVNPLNRITIHEIMEDDWFKQDMPDYLLPPDLSKNKNSKIDVDEDVIRALSVTMGYDRDCKIVNVIEKANKQVAAGNSSSQQSKSSNEILDAYLLMKENHRLVKDLKKSKSENIESFLSQSPPPSPFPNAGSTSSAPGVQQSLTYQTLATVPDLSTLPNSTIAILPTSLPSIHRAYMAETKQNGDPSQQHAPPPTKKSKTRWHFGIRLRSYPLDVMGEIYRALKNLGAEWAKPTEEELWTIRVRWKYDTSAQFECGSAPNLMKMQIQLFQLEPNNYLVSFKFSGWESAHGNAGTDSPQSHRQQDLDEVGSFSAYPFLHLATRLIMELAVNSQSG

SEQ ID NO: 19669 - protein, 397 aa, Methanopyrus kandleri AV19
MQSPYVREAVREMDLPDEVIVYDTTLRDGEQTPGVSFTPEQKLEIAHLLDELGVQQIEAGFPVVSEGERDAVRRIAHEGLNADILCLARTLRGDVDAALDCDVDGVITFIATSELHLKHKLRMSREEVLERIADTVEYAKDHGLWVAFSAEDGTRTEFEFLERVYRTAEECGADRVHATDTVGVMIPAAMRLFVAKIREVVDLPIGVHCHDDFGMAVANSLAAVEAGAQAISTTVNGIGERAGNAALEEVIMALKELYGIDPGFNTEVLAELSRKVSEYSGIDVPPNKAVVGENAFRHESGIHVAAVLEEPRTYEPIDPKEVGMNRKIVLGKHTGRKAVVAKLEELGVEPEEEIVEEVLKRIKALGDRRVRVTDSKLEEIVRNVLESRGDRDDPGSR

SEQ ID NO: 19670 - protein, 516 aa, Bacillus clausii KSM-K16
MFTPYKHEPFTDFTIEANKQELLTAIKQVEANLGGHYPLVINGERVETDDTISSYNPANKQELIGTTGKATKAHAEQAIEAASTAFESWRTVAPAERANILVRAAAIVRRRKHEFTALLIKEAGKPWKEADADTAEGIDFMEYYARQMVELAEGKSVHSREGELNRYIYTPTGVTVVISPWNFAFAIMAGTTVAPLVTGNTVLLKPASTTPVVAAKFVEVLEEAGVPKGVINFVPGSGSEVGDYLVEHPKTALITFTGSRDVGVRLYEKAAIVQAGQNHLKRVIVEMGGKDTVVVDNEADIDTAVEAIVISAFGFSGQKCSAGSRAVIHEDLYDEVVAKVVEKTEALTVGNPADATNYYMGPVIDQAAFDKITGYIEIGKSEGKLVAGGKSDDAEGYFIHPTVFADVDPKARIMQDEIFGPVLAISKASTFAEALDIANNTEYGLTGAVITNNRAKIEQAKQDFHVGNLYFNRNCTGAIVGYHPFGGFKMSGTDSKAGGPDYLTLHMQAKTISEMF

SEQ ID NO: 19671 - protein, 399 aa, Idiomarina loihiensis L2TR
MFELMDNYESEAVIKVIGVGGGGGNAVQHMVKESIEGVQFIAANTDAQALRNHTADVTIQLGQDITKGLGAGANPEVGRQSAEEDRENIRVHLEGADMVFIAAGMGGGTGTGAAPVVAEVAKELGILTVAVVTKPFPFEGKKRMAVADEGINALAQSVDSLITIPNEKLLKVMGRGTSLLDAFSAANNVLLGAVQGIAELITRPGLINVDFADVRAVMKEMGTAMMGTGVASGEDRAQEAAEMAINSPLLEDIDLSGARGVLINVTAGMDMSIEELDTVGNTVKAFASDNATVIVGTVIDTEMSDELRVTVVATGIGAERKPDISLVNNTNQTTAKREPQPAYRSNDIDRGGAAPRYEEQEELQPEAKAEPKRQPAAKAKQDKELDYLDIPAFLRKQVD

SEQ ID NO: 19672 - protein, 381 aa, Oryza sativa (japonica cultivar-group)
MATFSGTDRLRDLQAFDNTKAGVKGLVDAGVTAIPYFFRHHPDPLPIAAPSEAAAAILVIDLAKADVDRGHVVSQVRSAAETVGFFQVVNHGVAGELMEEMLAAVRRFHEEPLEAKVPYYTRDVASKVWFNSNFGLFRNGFRSPEANWRDTMFVEMFPEAPSPEEIPPPCRGVLEVYAAAVRRLGERLFELLSEALGLPVGYLGRDAGCMDGLSLSVAAHYYPACPEPEATMGATKHSDPSFLTVLLQDTSGGLQAVLPRPPEERWVDVPPVAGALVVNVGDLLQLVSNDRLRSVEHRVLPTGAAGPARVSVACFFRHAYASTRPCVPVVVGGGGARAAAVYRSTTAGEFLAHYNGKGLDGRSALDHFRLPAAASSPPPPL

SEQ ID NO: 19673 - protein, 335 aa, Methanopyrus kandleri AV19
MNASPTVVVIPGDGIGPEVIDAALKVVRAVLGDELEIVEEQAGYSLWKKRGVTIEDETIERCREADAMLFGACTTPEDPEAKSPIVTLRKELGLYANVRPARSWPVPRPVDTEFDLVIVRENTEGLYTGCECEIHDGVTVALRKISEEGTRRVAEVACDLAEERSGRVTIVHKANVLKLTCGTFKRVAAETVERRGLEWDDEYVDAAAYKLVREPDSFDVILTSNLFGDILSDLAAGLMGSLGLAPSANLGDDAALFEPVHGSAPDIAGKGIANPVAAILSAAMMLDHLGYGEEARIIERAVEEVLREGVRTPDLGGSATTEEVAEAIAERVATG

SEQ ID NO: 19674 - protein, 389 aa, Triticum aestivum
MVSIVQLQRRRTEAAASARGILPDREERMDLSVPRGEFPIPMHAAASPYGGIGGGGVAVADHAMELHHDHANHNGQSQSQAQDMPSPPAAVSEDSSGKKRAAAIAGGAGGPAVKYRECLKNHAAAIGGNATDGCGEFMPSGEEGSLEALKCSACGCHRNFHRKELDDFDGDSCASHGYGYGHHAVRRLLGPAVPHHHKSSGGLLVTADHYGAYAAARALPPPPPPPLGHHHQIIMPLNMIQTSESDEMDGSGGGGIMGDGRGGLASGGGGGSSSSKKRFRTKFTAEQKGRMLEFAENVGWRLQKLDDAMVQHFCQEIGVKRRVLKVWMHNNKHNLASRPLPTSPAQPQSQSMPLAMSMPMPMQVPPSQPGPSGHRGPSSPHAQGELKLD

SEQ ID NO: 19675 - protein, 112 aa, Streptomyces coelicolor A3(2)
MKLITAVVKPHRLDEIKEALQAFGVHGLTVTEASGYGRQRGHTEVYRGAEYTVDLVPKIRIEVLVEDDDAEQLIDVVVKAARTGKIGDGKVWAVPVDTAVRVRTGERGPDAL

SEQ ID NO: 19676 - protein, 298 aa, Desulfitobacterium hafniense Y51
MGILINKETKVVVQGITGREGSVRTKYMKDYGTNLIGGTSPGKMGQEVHGVPVFNTVKEIVREQGDIDFSVIFVPGSALKTAVMEAADAGVKNIIPCVEGTPIHDIMEMIAYAKGKGSRLIGPGSIGILTPGEAVVGWLGGNVEWANKFFQKGHIGVFSRSGGQSGTIPWVLREGGFGVSTVIHTGTEPVLGTSMADLLPFFEEDPDTHGVAVYAEIGGTQEEECAEVIAAGKFTKPFVIYVAGAWAPEGQRFSHASNIVERGRGSAKSKMEAITKAGGFVAERPTDIPLILKEKLGK

SEQ ID NO: 19677 - protein, 235 aa, Lactobacillus sakei subsp. sakei 23K
MANLVIVRHGESVANQLKTYTGWSDVALTAKGRQQAHQVGRQIKDAGFQFSHVHTSLLKRAILTSYIVLEELDQLALPMTKSWRLNERHYGALRGLNKDTTRTIFGVHQVARWRRSYTALPPLLIRSSTARRYRLVPRKSRPRGESLAQATQRLLPYWQDQVVPGLLAGQDQLIVAHGSTLRALIKVIEQISDQAIDGVEVANGEALYYQFGTDLTVLKKGRLALGSETDEEKEN

SEQ ID NO: 19678 - protein, 509 aa, Xylella fastidiosa 9a5c
MKQISILVRLFITPYVSYPCGFLHSSRPVMSFLPSFLKRKSIDLITVHEEGRRLVPTLSWPHLIALGIGAIVGTGIYTLIGVGAEKAGPAILLSFVIAGVICACAALAYAEMATMMPVAGSTYTYSYVALGEGIAWIVGWSLILEYSLVVSTVAVGWSGYMSGFLKSVGVDMPLALTAGPYAGGIINLPAVVITCVVAGLLIVGTKESTTLNAVLVVVKIIALSVFVVIALPHFDMAHLKPFMPYGFTKSIDTGGVERGVMAAAAIIFFAFYGFDAISTAAEETKNPSRDLSIGIIGSMIGCTLIYVLVALAAIGAMHYTVFGPSTEPLALILRQLDQGNTARLIGAAAIIALPTVLLAFLYGQSRILFVMSRDGLLPRGLSTVNARTGTPIATTLFTAILVATAAGLVPLGEIAALANAGTLTAFIAVALCLLVLRVREPQRVRAFRTPLAWVVGPIAIAGCLYLFWSLPKMTQSLFLLWNALGLCVYLVYGRHTSLLSKAVSIDTPR

SEQ ID NO: 19679 - protein, 468 aa, Prosthecochloris aestuarii DSM 271
MKFGGTSVGTASAMRRAMAIVADVKKKKSAPLVVLSACSGMTNLLIEIAGAAGEGRLGDALAMAEEVRLHHLSIAGELVKDPVRSAALQEKIEGYVNELEMLVKGVDIVGELTARSFDTFCSFGELLSTTVFSEAMLDAGHACSWVDARSVMITDDNFGTARPLEGRCEENVHSVIKPLLDAGTIVVTQGFIGASADGKTTTMGRGGSDFTAALLGAWLPSDQIQIWTDVDGVMTCDPRIVPQARSIRVLTFSEAAELAYLGAKVLHPDTIAPAVKQNIPVYVLNSLHPDAKGTVITNDPDILDGMSYGGLVKSIAVKKGQCIVNFRSNRMLGRHGFLIEFFNVFARAGVSVEMISTSEVSVSLTVSDTAAVDGLVRELAGMGEVELEHNVATVSVVGDNLRMSRGVAGRIFSALKDVNIRMISQGASEINVGFVVEEREVPKAVENLHHEFFSHDDTRGIFETPAGK

SEQ ID NO: 19680 - protein, 954 aa, Vibrio vulnificus YJ016
MTELLQSLNTQHEFVGRHNGPNHADQQKMLSTINAESLDALIAQTVPAQIRLEKPMQLAEAQSEADMLASIKKFADLNQVKRTFIGQGYYNTFTPNVILRNVLENPGWYTAYTPYQPEISQGRLESLLNYQQMVMDLTGMDIANASLLDEATAAAEAMTLCQRAGKSKSKVFFVADDVHPQTIEVIKTRAKYFGFDVVIGNVDALPQTEAFGALLQYPSTTGEVRDLTDVIAQAQANKTLVSVATDLLASALVKPAGEMGADVVIGSAQRFGVPMGYGGPHAAFMATREQHKRTMPGRVIGVSIDAKGNQALRMAMQTREQHIRREKATSNICTAQALLANMASFFAVYHGEEGIRTIARRTHHMTAILAAGLTKSGYELAHNAFFDTITINTGDKTQALYAKAQAADINLRLLDGQIGISFDETTTVADIDALFAIFDVKESVNALSTDIAGNEFAAIPEACRRTSRFLSHPVFNTHHSETQMMRYLKQLENKDFSLTHGMIPLGSCTMKLNAAAEMIPVTWPEFGALHPFAPIEQAAGYTALAEDLKAKLCEITGYDAFSLQPNSGASGEYAGLIAIQRYHESRGEGHRNVCLIPSSAHGTNPATAAMVSMKVVVVKCDENGNIDLVDLAAKIEKHQENLSSIMITYPSTHGVYEEQVKEVCEMVHAAGGQVYLDGANMNAQVGLTSPGFIGSDVSHLNLHKTFCIPHGGGGPGMGPIGVKSHLAPFLPGHIENGVEGKEFAVSAADLGSASILPISWAYIAMMGADGLTEATKVAILNANYVMERLRPHYPVLYRGTNGRVAHECIIDIRPLKEETGISEEDIAKRLMDYGFHAPTMSFPVAGTLMVEPTESEDLEELDRFCDAMIAIREEMTKVKNGEWPLENNPLVNAPHTQVDLMEEQWDRPYPREIACFPSAATKRSKYWPTVNRVDNVYGDRNLVCSCPGIENYEE

SEQ ID NO: 19681 - protein, 89 aa, Arabidopsis thaliana
GNPGRTTPVRAVVVPSPVKATMVVQFTGWRESVEFPATRRTNKAIISIEGNGGGVSCMKGWPPMGKKKLGTLFYLPDLSAVELVKEVDY

SEQ ID NO: 19682 - protein, 444 aa, Synechocystis sp. PCC 6803
MITSPTNLNSLPIPPGDFGLPWLGETLNFLNDGDFGKKRQQQFGPIFKTRLFGKNVIFISGALANRFLFTKEQETFQATWPLSTRILLGPNALATQMGEIHRSRRKILYQAFLPRTLDSYLPKMDGIVQGYLEQWGKANEVIWYPQLRRMTFDVAATLFMGEKVSQNPQLFPWFETYIQGLFSLPIPLPNTLFGKSQRARALLLAELEKIIKARQQQPPSEEDALGILLAARDDNNQPLSLPELKDQILLLLFAGHETLTSALSSFCLLLGQHSDIRERVRQEQNKLQLSQELTAETLKKMPYLDQVLQEVLRLIPPVGGGFRELIQDCQFQGFHFPKGWLVSYQISQTHADPDLYPDPEKFDPERFTPDGSATHNPPFAHVPFGGGLRECLGKEFARLEMKLFATRLIQQFDWTLLPGQNLELVVTPSPRPKDNLRVKLHSLM

SEQ ID NO: 19683 - protein, 474 aa, Pseudomonas putida KT2440
MQTQMLINGQLVAGQGPAWTVLNPALGTALAQINEATEAQVDSAVRAADQAFDSWSQTSPKERSQALLALADAIEAHGDELARLESQNCGKPLSAALNDEIPAIADVFRFFAGAARCLGGSAAGEYLPGHTSMIRRDPLGVVASIAPWNYPLMMLAWKIAPALAAGNTVVIKPSELTPLTALRLGELAQDLLPPGVLNILFGRGQTVGNPLITHPKVRMVSLTGSIPTGAHIISATADSVKRMHMELGGKAPVLVFDDADIDAAIDGIRTFGFYNAGQDCTAACRLYVQDGIYERFVERLGKAVASLKPGLQESEETELGPLISAQHRDKVAGLVQRAIAQPHIRLVTGGKPIAGDGFFFEPTVLADALQDDEIVRNEVFGPVVSVTRFTDEAQALEWANDSNYGLASSVWTRDTGRAHRLAARLQYGCTWVNTHFMLVSEMPHGGQKHSGYGKDMSMYGLEDYTCVRHVMIKH

SEQ ID NO: 19684 - protein, 329 aa, Burkholderia thailandensis E264
MNSETLPAELPATLTIASRESRLAMWQAEHVRDALRKLYPACDVKILGMTTRGDQILDRTLSKVGGKGLFVKELESALADGRADLAVHSLKDVPMELPAGFALAAVMSREDPRDAFVSNDYASLDALPAGAVVGTSSLRREAMLRARYPRLDVRPLRGNLDTRLAKLDRGDYAAIILAAAGLKRLGLAARIRALLDVEDSLPAAGQGALGIEIAAGRADVAAWLAPLHDHATALAVEAERAVSRALGGSCEVPLAAHAVWRGDELHLTGSVSTTDGARVLAARAQSRAATAADALALGRAVSDELERQGARAIVDALVAASAQAQKGGA

SEQ ID NO: 19685 - protein, 159 aa, Glycine max
  misc_feature (135)..(135): Xaa can be any naturally occurring amino acid
  misc_feature (140)..(140): Xaa can be any naturally occurring amino acid
  misc_feature (149)..(149): Xaa can be any naturally occurring amino acid
RLREDDRRGCLPISRHFSANPRRRRPTNTRKLQTLACQTNPNLDQKDTPTTDEEKLVVEPSTSTTTSSLPQLPTKNINNKIALVSTLAALGLFLSARLDFGVSLKDLSANAMPYEEALSNGKPTVVEFYADWCEXDRVNXVMLNVDNTXWEQELDEFGV

SEQ ID NO: 19686 - protein, 299 aa, Corynebacterium efficiens YS-314
MTLRIGTRGSKLATTQAGHMRDRLKHFGRDAELTIVTTPGDVNMSPVERIGVGVFTQALRDALVADEIDVAVHSFKDLPTAPDPRFHLVVPTRADARDALIARDGLTLEELPEGAKVGTSAPRRISQLKALRPDLEILPLRGNIDTRMGKVTSGELDAVVLAFAGLSRVGMQDRATQVFDPDMLMPAPAQGALAIECRVEDEDIITGLNMLMHADTYVTAVAERTVLNRLEAGCTAPVAAHATLDGYAGDTMTLTAGVFALDGSEQLVFSAQGAGERPEELAEQVAAQLIEQGAATLLG

SEQ ID NO: 19687 - protein, 432 aa, Thermotoga maritima
MFKPNYHFFPITGWMNDPNGLIFWKGKYHMFYQYNPRKPEWGNICWGHAVSDDLVHWRHLPVALYPDDETHGVFSGSAVEKDGKMFLVYTYYRDPTHNKGEKETQCVAMSENGLDFVKYDGNPVISKPPEEGTHAFRDPKVNRSNGEWRMVLGSGKDEKIGRVLLYTSDDLFHWKYEGVIFEDETTKEIECPDLVRIGEKDILIYSITSTNSVLFSMGELKEGKLNVEKRGLLDHGTDFYAAQTFFGTDRVVVIGWLQSWLRTGLYPTKREGWNGVMSLPRELYVENNELKVKPVDELLALRKRKVFETAKSGTFLLDVKENSYEIVCEFSGEIELRMGNESEEVVITKSRDELIVDTTRSGVSGGEVRKSTVEDEATNRIRAFLDSCSVEFFFNDSIAFSFRIHPENVYNILSVKSNQVKLEVFELENIWL

SEQ ID NO: 19688 - protein, 271 aa, uncultured bacterium
NSRLCMSSAVAGYTQSLGSDGPPCCYDDLDHCKVAFLIGTNTAECHPVLFQRLLKRKKRNPGSLKIVVVDPRRTDTAKAADIHLPIAPGSDLALLHGIAHLILRENGQDPTFIDDHTENYEAFFDVVARWTPRRVARFCNLPEKRLREVAQLFHHRETVLSLWSMGVNQRREGTAVVSGLINLHLLTGQIGKEGAGPFSLTGQPNAMGGREAGGLSHLLPGYRLVANDQHRQVVEHAWNLPAGSIAAKPGLAAWQQIEAMERGELDLWWVA

SEQ ID NO: 19689 - protein, 291 aa, Shewanella oneidensis MR-1
MSDDIPPSTNAQKKSWFDRVSQLFQGEPQNREDLVDVIDGAEQRELISEDTREMIKGVLEVSDMRVRDIMIPRAQIVAIQIDNTVEELLRTVIGSGHSRFPVVNEDKDHIEGILLAKDLIPYGFSNSEEPFSLDRVIRPAVVVPESKRVDVLLKEFRSQRYHMAIVVDEYGGVSGLVTIEDILEEIVGEIEDEFDHDSPEDTEIRKVGNTVYMVKALTPIEDFNEEFNTHFSDEEFDTVGGLVSHAFGHLPERNESIMIEGIEFKVINADTRRLIQLRVKLPDHNIGEDVE

SEQ ID NO: 19690 - protein, 271 aa, uncultured bacterium
NSRLCMSSAVAGYTRSLGSDGPPCSYEDLDHCTVAFLIGTNTAECHPVLFQRLLKRKKKHPGSVTIVVVDPRQTDTAKAADIHLAVAPGSDLALLHGIAHLVMRENRQDPTFIDDCTDNYDSFFDVVARWTPRRVALFCGIPEKRLREVAQLFHRREKVLSLWSMGVNQRREGTAVVGGIINLHLLTGQIGKEGAGPFSLTGQPNAMGGREAGGLSHLLPGYRQVTNPAHRAEVEQTWGFPKGKITANPGLTAWQQVEAMERGELDLWWVA

SEQ ID NO: 19691 - protein, 448 aa, Bifidobacterium adolescentis
MLTDEYVKRVYAQVEKRDGDQPEFLQAVREVFESLEPVVEKHPEYEKAGVLERLVEPERVVKFRVAWTDDEGKVQVNRGYRIQFNSAIGPYKGGLRFHPSVNEGVIKFLGFEQILKNSLTSLPMGGGKGGSDFDPKGKSDAEVMRFCQAFMTELCRHIGQFTDVPAGDINVGAREIGYLFGQYKRIRDEYSGVITGKGLEFGGSLARTEATGYGLCYYTQEALRVLKNDSFEGKTVVISGSGNVAIFATEKAQALGAKVVTASDSNGYVYDPDGIKLDIVKDIKLGHRGRIKEYAERVPGAEYHEGCKGVWTVPCDIALPCATQNEIDEESAKALVANGCKVVCEGANMPSTPEAIAVYQDNGLLYGPAKAANAGGVAVSGLEMSQNSYRLSWTFEEVDNKLKSIMENIVANSLAAAKEYGHEGDLMLGANAAGFVKVANAMVAQGVL

SEQ ID NO: 19692 - protein, 271 aa, uncultured bacterium
NSRLCMSSAVAGYTRSLGSDGPPCCYEDLDHCSVAFLIGTNTAECHPVLFQRLLKRKKRNPGSLKIVVVDPRRTDTAKAADIHLPITPGSDLALLHGIAHLILRENGQDPTFIDDHTENYEAFFDVVARWTPRRVARFCNLPEKRLREVAQLFHHRETVLSLWSMGVNQRREGTAVVSGLINLHLLTGQIGKEGAGPFSLTGQPNAMGGREAGGLSHLLPGYRLVANDQHRQVVEQAWNLPAGSIAAKPGLAAWQQIEAMERGELDLWWVA

SEQ ID NO: 19693 - protein, 101 aa, Oryza sativa
  misc_feature (88)..(88): Xaa can be any naturally occurring amino acid
  misc_feature (94)..(94): Xaa can be any naturally occurring amino acid
ELPLMVTTKENEEKLRTAFTVSVDAKEGTTTGVSAKDRANTVLALASPNSKPEDFNRPGHIFPLKYREGGVLKRAGHTEASVDLAMLXGTPAAXPCEIVDV

SEQ ID NO: 19694 - protein, 275 aa, Xerophyta humilis
SLQQVEEVKCLLRIIPIWSTGIIYYIAIVQQQTYVVYEALQSDRHLGNTSFLIPAASYSVFAMLAMTIWIPIYDRIIVPRFRKLTGQEGGITLLQRMGVGLVLAIIGMVVSAIIEIQRRSYAIHRPTIGTAPSGGAISSMSSLWLIPQLVILGLSEAFNAIGQIEFYYKQFPENMRSVAGSLFFLGAATANYLSGALIGVVHRVTGRGAGKNWLAGDLNKGRLDYYYFFIAGLGVLNLVYFMMCAKWYKYKEADSSSNAGEISLVDEIISKEPLV

SEQ ID NO: 19695 - protein, 308 aa, Zymomonas mobilis subsp. mobilis ZM4
MQLPFRLGSRGSPLALIQARSVASALCAAHSWSEDAVVIVPIRTSGDKNRHQALADIGGKALWTKELDIALTTGQIDAAVHSMKDVETFRPSHISIAAMLPREDVHDRLIGIPSLEVLPYSGCVGTASPRRAAQIRRIRPDIEIKLLRGNIDTRLEKLANKQFDATLLAAAGLIRLGRNDVGYDVPLDQMLPAAGQGAIGIEALADSAAWEKVSIIDHYPTHLAVQSERQLLLRLNADCHSPIAVFAEILEKNIRLRACLYTENGKFSASIDKEISQPSDAFEVGSLLLNQSPPEVQALFLPRVLSER

SEQ ID NO: 19696 - protein, 116 aa, Gibberella fujikuroi
MAAPNDAEHEMTFDSADAGASLTYPMQCSALRKSGFVVIKNRPCKIVDMSTSKTVKHGHAKVHLVATDIFTGKKYEDLSPSTHNMDVPNVSRREYQLLDISGGGFLSLMTDDGDTK

SEQ ID NO: 19697 - protein, 366 aa, Thermotoga maritima
MGSDKIHHHHHHMKIAVLPGDGIGPEVVREALKVLEVVEKKTGKTFEKVFGHIGGDAIDRFGEPLPEETKKICLEADAIFLGSVGGPKWDDLPPEKRPEIGGLLALRKMLNLYANIRPIKVYRSLVHVSPLKEKVIGSGVDLVTVRELSYGVYYGQPRGLDEEKGFDTMIYDRKTVERIARTAFEIAKNRRKKVTSVDKANVLYSSMLWRKVVNEVAREYPDVELTHIYVDNAAMQLILKPSQFDVILTTNMFGDILSDESAALPGSLGLLPSASFGDKNLYEPAGGSAPDIAGKNIANPIAQILSLAMMLEHSFGMVEEARKIERAVELVIEEGYRTRDIAEDPEKAVSTSQMGDLICKKLEEIW

SEQ ID NO: 19698 - protein, 405 aa, Bordetella parapertussis
MAITDVLVPQLSESVSEATLLTWKKQAGAAVEADEILIEIETDKVVLEVPAPSSGVLSEIVMGDGSTVTSGEVIARIDTAAKAAAAPAAAAEAPAAAAAAPAAAAPAAASSAASGVASPAAAKILAEKGVDAASVAGTGRDGRVTKGDALAAGNAPAAKAAAPVAPPTLSLDGRPEQRVPMSRLRARIAERLLQSQAENAILTTFNEVNMQAVMDLRARYKDKFEKEHGVKLGFMSFFVKAAVAALKKYPVLNASVDGKDIIYHGYFDIGIAVGTPRGLVVPILRNADQLTIAEIEKTIADFGKRAADGKLGIEEMTGGTFSISNGGVFGSMLSTPIINPPQAAILGIHATKERPVVENGQIVIRPINYLAMSYDHRIIDGREAVLGLVAMKEALEDPQRLLLDL

SEQ ID NO: 19699 - protein, 271 aa, uncultured bacterium
NSRLCMSSAVAGYTRSLGSDGPPCCYDDLDHCSVAFLIGTNTAECHPVLFQRLLKRKKRNPGSLKIVVVDPRRTDTAKAADIHLPIAPGSDLALLHGIAHLILRENGQDPTFIDDHTENYEAFFDVVARWTPRRVARFCNLPEKRLREVAQLCHHRETVLSLWSMGVNQRREGTAVVSGLINLHLLTGQIGKEGAGPFSLTGQPNAMGGREAGGLSHLLPGYRLVANEQHRQVVEQAWNLPAGSIAAEPGLAAWQQIEAMERGELDLWWVA

SEQ ID NO: 19700 - protein, 106 aa, Glycine max
  misc_feature (12)..(12): Xaa can be any naturally occurring amino acid
APPPIMLEHDKXMSVQELPANSTVVDLMERVGANSPRWSPCSFPLKEELRPRVNHKPISDPNRKLSMGDVVELTPALPDKSLSEYREEIQRMYERGGFALATTPRS

SEQ ID NO: 19701 - protein, 422 aa, Streptomyces coelicolor A3(2)
MTGARPDVAVTGIGLVTPAGTGREATWDGVCAGRPTARHVPELKGLPVDFACLVPDFSPRDHVPGSRPWQYDRFTQFALHAALEAVSDAGLDPADWDGDRVAVVFGSSAGGTGTMLDQHRKLLELGTARVSPLLLPMFLPNMATGQLTIHLRARGPALCTVTACASGATAIGTALQLLRSGACDIAVAGASDAVVQPLWVTGFDRMGALSRRGDDPRAASRPFDTARDGFVMAEGGAALVLEPASAARARGRPGYALLAGYGASSDAHHPVAPDPESKGAALAVRRALDDAGARPADVQHINAHGTSTPLNDAAEARLIRRLFPHQPSVTSVKGTLGHLLGAAGAVEAAITALSVAHGRVPPVANLEKQEGDAEINAVTGTSRAQPVDLALSHSFGFGGHNAVLAFRSCPTEPAREPAAPSP

SEQ ID NO: 19702 - protein, 261 aa, Silicibacter pomeroyi DSS-3
MSDTILAQDHGNWVEITLNRPDRLNSFTDEMHLALRAALEGARDNGARAVLLTGAGRGFCAGQDLGDRDPSKMDGPPDLGYTVRTFYAPLVRLIRSLDFPVICAVNGVAAGAGVNIALACDIVLAGESAKFIQSFAKVGLIPDTGGSWHLPRLLGEARAKGLALTAQPLPAKQAEDWGLIWKALPDDQLMTEARAMAEQFANGPTLGFGLTKRCIQAACVDTLEDHLELEADAMKTCGESADYAEGVSAFLEKRAPRFQGK

SEQ ID NO: 19703 - protein, 337 aa, Streptomyces coelicolor A3(2)
MTRRQRVAENLNSALHHLLGAHPGTYLIGEDVADPYGGAFKVTRGLSDRFPDRVLSSPLSEGGIAGVGAGLALAGNRSVVEMMFSDFAALAFDPLLNFAAKSVSMYGRRVPMSMVVRCPTGGNRGYGPTHSQSLQKHFLGIPSLHLREVSPFHDNRRVLTAMLDREEPGVLFEDKVLYTRAMYQAGVVDDLFRYEVLADPSETARVFAPDCGPPDWIVLAPGGLTERAVTALRTLLLEEEITCELLVPSQLYPFDSKALLPVLSRADRICVMEDSTADGTWGELLAQQLHEELWSRLARPVLPLTAEPSIVPTAAHLEHGVLLQPSTIHRAIVEATK

SEQ ID NO: 19704 - protein, 482 aa, Salmonella typhimurium LT2
MQLNDSTLFRQQAFIDGDWRDARGGDVIPVSNPANGKPLGNVPKMGAEETRDAINAANRALPAWRALTAKERANILRRWFNLMMEHQDDLARLMTLEQGKPLAEAKGEISYAASFIEWFAEEGKRIYGDTIPGHQADKRLLVIKQPIGVTAAITPWNFPSAMITRKAGPALAAGCTMVLKPASQTPFSALALAELAQRAGIPAGVFNVVTGSAGDIGGELTSNPLVRKLSFTGSTEIGRQLMEQCAKDIKKVSLELGGNAPFIVFDDADLDKAVEGALASKFRNAGQTCVCANRLYVQDGVYDRFAEKLNQAVNKLAVGDGLQADVAIGPLIDEKAVAKVQEHIADALEKGARVITGGEAHKLGGNFFQPTILADVPDNAKVAKEETFGPLAPLFRFSDEADVIRQANDTEFGLAAYFYARDLSRVFRVGEALEYGIVGINTGIISNEVAPFGGIKASGLGREGSKYGIEDYLEIKYMCIGL

SEQ ID NO: 19705 - protein, 321 aa, Haemophilus somnus 2336
MSINKTLKIATRQSPLALWQANYVKNRLQQRYSHLSVELVPIITKGDVILDTPLAKIGGKGLFVKELENALLNGEADIAVHSMKDVPMQFPKGLELSVICPREDPRDAFVSNKYRTLDELPQGAIVGTSSLRRQCQLKNWRADLDIRSLRGNVGTRLNKLDQGDYDAIILASAGLIRLGLTERIRSFIEIDTILPACGQGAVGIECRVDDRDVQSLLMPLADQTTTYCVLAERAMNFHLQGGCQVPIGAYAILENNQLYLRGLVGDVHGSQILSAEGQFELSLDFESSQSAVQKAEELGVSIAEQLLQQGADKILQAVYQS

SEQ ID NO: 19706 - protein, 164 aa, Thermus thermophilus HB8
MEARTTDLSDLYPEGEALPMVFKSFGGRARFAGRVRTLRVFEDNALVRKVLEEEGAGQVLFVDGGGSLRTALLGGNLARLAWEKGWAGVVVHGAVRDTEELREVPIGLLALAATPKKSAKEGKGEVDVPLKVLGVEVLPGSFLLADEDGLLLLPEPPSGVRSGG

SEQ ID NO: 19707 - protein, 376 aa, Oryza sativa (japonica cultivar-group)
MATVSGTDRLRDLHAFDDTKAGVKGLVDAGVTTVPYFFRHHPDPLPVAAPSEAASAIPLIDLAKADVDRGRVVAEVRTAAETVGFFQVVNHGVAGELMDEMLAAVRRFNEEPLEAKVPYYTRDVASKVRFNSNFDLFRSPAANWRDTMFVEMFPEVPSPEEIPPPCRGVLEEYAAAVRRLGERLFELLSEALGLPAGYLGRDAGGTDGLSVAAHYYPACPEPEATMGATKHSDPTFLTVLLQDESGGLQAVLPRPPEERWVDVPPVAGALVVNVGDLLQLVSNERLRSVEHRVLPTGAAGPARVSVACFFRLAYSSTRPCVPVVGGGSGARAAAVYRSTTAGEFLAHYNGKGLDGRSALDHFRIPAAAASPPPPPQ

SEQ ID NO: 19708 - protein, 144 aa, Fuchsia cylindracea
NVLDKIKEFSERVRNGSWVGATGKVLKDVIAVGIGGSFLGPLFVHTALQTDPEASKNASGRALRFLANVDPIDVARSISGLNAETTLVVVVSKTFTTAETMLNARTLREWISSALGSSAVAKHMVAVSTNLPLVEKFGIDPKNA

SEQ ID NO: 19709 - protein, 558 aa, Bacteroides fragilis NCTC 9343
MCGIAGIFNIKIQSRELRNKALRMARKIRHRGPDWSGMYCGGSAILAHERLSIVDPQSGGQPLYSSDRKQVLAVNGEIYNHRDIRAQYAGRYEFRTGSDCEVILALYRDKGIHFLEELNGIFAFALYDEEKDEYLIARDPIGVIPLYIGKDAEGHVYFGSELKALEGFCDEYEPFLPGHYYHSKEGTMKRWYTRDWMEYKEENDKQADSRSPTRQIQDALENAVHRQLMSDVPYGVLLSGGLDSSVISAIAKKYAAKRIETDGASDAWWPQLHSFAIGLKGAPDLIKAREVAEYIGTVHHEINYTLQEGLDAIRDVIYFIETYDVTTVRASTPMYLLARVIKSMGIKMVLSGEGADEIFGGYLYFHKAPDARAFHEETVRKLSKLHLYDCLRANKSLAAWGVEGRVPFLDKEFLDVAMQLDPEIKMAPGKVIEKKVLREAFADMLPSGIAWRQKEQFSDGVGYSWIDTLKEITATAVSDEQMAHAAERFPIHTPMNKEEYYYRSIFEEHFPSESAARSVPSIPSVACSTAEALAWDTAFKNLNDPSGRAVKGVHEEAY

SEQ ID NO: 19710 - protein, 421 aa, Rhizobium leguminosarum bv. viciae
MTRRFTRRGGKMSKIIIVGGGECGARAAFALREQGFNGDITLIGAEPHLPYERPPLSKTGLASAAPPQYVAGPARYEEARITILTGVPVDTVDRQSKLVRLSDGRKFPYDQLLLATGARPRPFAGVSGDPGLGRICMLRNHGDAVAIHEALAPGKSLAVVGGGFIGLEIAATARKLGAEVLLIESSPRVLSRGVPAEIAKVVTERHRQEGVNILCGEQITSIATENDKVQILFANGTTRLADIVVVGIGVIPNVELAEAAGLLIDNGIAVDATLRTSDPDIFAAGDCCSFPLSHYRERRVRLEAWRNAQDQGMLVAANLLGRGLAIASVPWFWSDQYELTLQIAGLSDGAATTVRRDLDQGAFILFHLDGEDRLIAASGIGPGNAVARDIRLAEMLIAAKRRLDPEALASPKTNLKKLLAA

SEQ ID NO: 19711 - protein, 1038 aa, Arabidopsis thaliana
  misc_feature (509)..(509): Xaa can be any naturally occurring amino acid
MERARRLAYRGIVKRLVNDTKRHRNAETPHLVPHAPARYVSSLSPFISTPRSVNHTAAFGRHQQTRSISVDAVKPSDTFPRRHNSATPDEQTHMAKFCGFDHIDSLIDATVPKSIRLDSMKFSKFDAGLTESQMIQHMVDLASKNKVFKSFIGMGYYNTHVPTVILRNIMENPAWYTQYTPYQAEISQGRLESLLNFQTVITDLTGLPMSNASLLDEGTAAAEAMAMCNNILKGKKKTFVIASNCHPQTIDVCKTRADGFDLKVVTSDLKDIDYSSGDVCGVLVQYPGTEGEVLDYAEFVKNAHANGVKVVMATDLLALTVLKPPGEFGADIVVGSAQRFGVPMGYGGPHAAFLATSQEYKRMMPGRIIGISVDSSGKQALRMAMQTREQHIRRDKATSNICTAQALLANMAAMYAVYHGPAGLKSIAQRVHGLAGIFSLGLNKLGVAEVQELPFFDTVKIKCSDAHAIADAASKSEINLRVVDSTTITASFDETTTLDDVDKLFKVFXASGKPVPFTAESLAPEVQNSIPSSLTRESPYLTHPIFNMYHTEHELLRYIHKLQSKDLSLCHSMIPLGSCTMKLNATTEMMPVTWPSFTDIHPFAPVEQAQGYQEMFENLGDLLCTITGFDSFSLQPNAGAAGEYAGLMVIRAYHMSRGDHHRNVCIIPVSAHGTNPASAAMCGMKIITVGTDAKGNINIEEVRKAAEANKDNLAALMVTYPSTHGVYEEGIDEICNIIHENGGQVYMDGANMNAQVGLTSPGFIGADVCHLNLHKTFCIPHGGGGPGMGPIGVKNHLAPFLPSHPVIPTGGIPQPEKTAPLGAISAAPWGSALILPISYTYIAMMGSGGLTDASKIAILNANYMAKRLEKHYPVLFRGVNGTVAHEFIIDLRGFKNTAGIEPEDVAKRLMDYGFHGPTMSWPVPGTLMIEPTESESKAELDRFCDALISIREEIAQIEKGNADVQNNVLKGAPHPPSLLMADTWKKPYSREYAAFPAPWLRSSKFWPTTGRVDNVYGDRKLVCTLLPEEEQVAAAVSA

SEQ ID NO: 19712 - protein, 87 aa, Fuchsia cylindracea
GGRYSVCSAVGVLPLSLQYGFAIVEKFLQGAHSIDQHFSSAPFEKNIPVLLGLLSVWNVSFLGYPARAILPYSQALEKLAPHIQQVS

SEQ ID NO: 19713 - protein, 167 aa, Triticum aestivum
  misc_feature (21)..(21): Xaa can be any naturally occurring amino acid
  misc_feature (35)..(35): Xaa can be any naturally occurring amino acid
  misc_feature (84)..(84): Xaa can be any naturally occurring amino acid
NNANCFPPEEMDYNNSPQRKXESLLRYIVPSAGIXKREYADFPSPIALQKNNERCKTNENGAKILPDGTPWIPNLMKEITIVVXNGSKSIHVDQKLITGPNPNNRWKKYIPLILAVQYFFVVKGIRRAIHSDISNGKLDDWEQRYRDLVGNGNPVDQKVSSSRNPKA

SEQ ID NO: 19714 - protein, 513 aa, Lactococcus lactis subsp. lactis
MRKIEFFDTSLRDGEQTPGVSFSISEKVTIAKQLEKWRISVIEAGFSAASPDSFEAVKQIADSLNDTAVTALARCVISDIDKAVEAVKGAKYPQIHVFIATSPIHMKYKLKISPEEVLKNIDKCVRYARERVEVVEFSPEDATRTELNFLLEAVQTAVDAGATYINIPDTVGYTTPEEYGKIFKFLIDNTKSDREIIFSPHCHDDLGMAVANSLAAIKAGAGRVEGTVNGIGERAGNAALEEIAVALHIRKDFYQAQSPLKLSETAATAELISQFSGIAIPKNKAIVGANAFAHESGIHQDGVLKNAETYEIITPELVGIKHNSLPLGKLSGRHAFSEKLTELNIAYDDESLAILFEKFKKLADKKKEITDADIHALFTGETVKNLAGFILDNVQIDGHKALVQLKNQEEEIYVSQGEGSGSVDAIFKAIDKVFNHQLKLISYSVDAVTDGIDAQATTLVSVENLSTGTIFNAKGVDYDVLKGSAIAYMNANVLVQKENLQGKVEQISAHDGI

SEQ ID NO: 19715 - protein, 122 aa, Glycine max
MMTSFKVACVVAMMCMVVAMSVTPMAQAAITCGQVAGDVSPCLSYLRSGGKPSDACCNGVKSLSGAAKTTADRQAACNCLKNLANNMGQSLNAGNAASLPGKCGVNIPYKISTSTNCATIKF

SEQ ID NO: 19716 - protein, 234 aa, Triticum aestivum
  misc_feature (227)..(227): Xaa can be any naturally occurring amino acid
NKFVQKSRLVPVRNSRDIVDPRVRNYGVDKYDIGAGFGHFAIANEDVYKLSETIKSSDCCKITREPGPVKGGSTVIAFAQDPDGYMFELIQRGPTPEPLCQVMLRVGDLDRAIMFYEKALGMKLLRKKDVPQYKYTIAMMGYAEEDKTTVLELTYNYGVTEYNKGNAYAQVAIGTDDVYKSAEAVELVTKELGGKILRQPGPLPGLNTKITSFFDPNGWKVVLVDHXDFLKDLT

SEQ ID NO: 19717 - protein, 136 aa, Fuchsia cylindracea
VSIDGLPLPFESGEIDFGEPGTNGQHSFYQLIHQGRVIPCDFIGVVKSQQPVYLKGEVVNNHDELMSNFFAQPDALAYGKTPEQLKKENVSEHLIPHKTFTGNRPSLSILLPSLDAYRIGQLLAIYEHRVAVQGFI

SEQ ID NO: 19718 - protein, 353 aa, Ralstonia metallidurans CH34
MSTTPTSAPETTQTDVLIVGAGPVGLFAAFQAGVLGLKCEIVDVLDRAGGQCTELYPEKPIYDIPAVPGCLAQDLVDRLLEQCAPFAFPMHFSQRAESVSDTTCTNGHPRLLVTTDAGKRFDVAAVLICAGAGAFAPQRVSLPEAAALEDRHLHYAVRDLSRFAGKRVIVAGGGDSALDWAMALRKTAARVTLLHRREGFRAADHTVKAMRDAVAAGEMDFVVGMLGGLQTNGDGALTGAVVKSRDGEQTIPADDLVALYGLVSEPGPIAQWDMDMRAGRIAVDTTTYESSRRGIFAAGDIAFYPNKQKLILSGFHEAALALRKAYHYAFPEKSLVHVHTSNNAALKERLTHG

SEQ ID NO: 19719 - protein, 746 aa, Bradyrhizobium sp. BTAi1
MMGASFRIRLRLRRFTRRHHTLFTILRSAMIFMAGFGGAYGFIKASLSETSGYNPHAFAIGASFLFALACVGLATLSMRLRFMRKKMHKLALHNEVLADRNWELQEAEQRARSLFEQQGDLIVMRESDGTIIFVNDAYCRMAGLDRENLLGSQFSFDLLEQGDSALEPSGTRVHDQRIDSAIGPRWIAWREALVRSDAGHPAVQQCVGRDVTDRTETERALAEARDQANAANRAKSRFLAMASHEIRTPLNGILGMSGLLLETQLTPEQTTYAKAVRSSGEALMSLINELLDYSKIEAGKLALEAQPFALTALIEEITELLAPRAQGKQLEIAAYLDERLPTWVTGDAARLRQVLLNLAGNAIKFTSKGGVALIAEPGIWPNEISFQVRDTGIGIAADAQERIFREFEQADDSVARSFGGTGLGLAISDRIVKRMGGRIALQSQPGAGSTFEVSVPLPPALERGEQNSFRGPDLTGQSIMLIAPAGLQAELIERRLQNWGAQTCLVAETEIAAALLPERAWHAVLIDDAIGSEAARRLGEAAHHHTTRLIVLVTPTSRHELAPAAPFNGYLVKPLRAASLAARVSFDLDAGAAFAEHPIPTIAPSIAARAGTGLAILVAEDNDINALLMRSLLTKLGHHADIAVHGEAALDSWLAARAAGTPYDLILMDVQMPRLDGIAATRRIRAHEASEPGRRTPILALTANALVEDRYACFEAGMDGFLVKPIDRDKLDEALANLAAARQVAA

SEQ ID NO: 19720 - protein, 134 aa, Hauya heydeana
ERVRNGSWVGATGKELKDVIAVGIGGSFLGPLFVHTALQTDPEASKNARGRELRFLANVDPIDIARNISGLNPETTLVVVVSKTFTTAETMLNARTLREWISSALGPSAVAKHMVAVSTNLPLVEKFGIDPNNA

SEQ ID NO: 19721 - protein, 175 aa, Triticum aestivum
MAPTVMASSATSVAPFQGLKSTAGLPVSRRSNGASLGSVSNGGRIRCMQVWPIEGIKKFESLSYLPPLSTEALLKQVDYLIRSKWVPCLEFSKVGFIFREHNASPGYYDGRYWTMWKLPMFGCTDATQVINEVEEVKKEYPDAYVRIIGFDNMRQVQCVSFIAFKPPGCEESGKA

SEQ ID NO: 19722 - protein, 446 aa, Bifidobacterium adolescentis
MSLGLNILLIFIFLLLGSVFAGTELALVSLRGSQIDQMEQEDARGKRVAQIARDPNTFLSTVQIGVTLCGFLSASFGESSIAPYIVPVIEDWGVPHNVAAPLTTIALTLIISYCSIVISELVPKRIAMQRNEQIARAVVPAIHVFAKVCKPIIWLIGKNTNGIVRLLGFDPNETDSEVSDDELRVLVNTNTNLSKDERTILDDVFDASETIVAEVMRPRADVAFLDGSMPIAEAAAYVREMPYSRYPVTGKDFDDVLGFVHVRDLLDIRDPKARTVADVTREGISLPGTSKLLPSLELLRKRGIHLAVVIDEYGGTDGIVTLEDMTEELVGDIRDEYDLPEEKGGERTERAAFVNGVATIEGGMTIEDFADLTGIELEDGPYETVAGYFLAHTGKMGEVGDVLSSDDGYDMVVTEVDGRRIETLEVRRHTADEDGSAAGDSAADAK

SEQ ID NO: 19723 - protein, 176 aa, Oryza sativa
  misc_feature (76)..(76): Xaa can be any naturally occurring amino acid
WIPRAAGIWHEAHADAPAWNHVLRTPTPTPTRTQRVVGYSVPSAAGYLPSSAPPHLHKYHPNPVQQAQNNGGAGIXVVNGCIRDVDEINGCDIGVRALNSPPMKANKKGFGEKHVPVPIAGTRICDGEGLYPDTDGILFSRTELTGGISLCGGVCTRIRRINGVLLLPLLVFCQKL

SEQ ID NO: 19724 - protein, 175 aa, Pantoea ananatis
MLWIWNALIVFVTVIGMEVIAALAHKYIMHGWGWGWHLSHHEPRKGAFEVNDLYAVVFAALSILLIYLGSTGMWPLQWIGAGMTAYGLLYFMVHDGLVHQRWPFRYIPRKGYLKRLYMAHRMHHAVRGKEGCVSFGFLYAPPLSKLQATLRERHGARAGAARDAQGGEDEPASGK

SEQ ID NO: 19725 - protein, 560 aa, Streptococcus agalactiae NEM316
MTESHNQYGADLIVDSLINHDVKYVFGIPGAKIDRVFDTLEDKGPELIVARHEQNATFMAQAVGRITGEPGVVIATSGPGISNLATGLVTATDEGDAVLAIGGQVKRGDLLKRAHQSMNNVAMLEPITKYSAEVHDPNTLSETVANAYRLAKSGKPGASFISIPQDVTDSPVSVKAIKPLSAPKLGSASVLDINYLAQAINNAVLPVLLLGNGASSEGVTAAVRRLLDAVKLPVVETFQGAGIVSRELEDETFFGRVGLFRNQPGDMLLKRADLVIAIGYDPIEYEARNWNAEISARIIVIDVEQAEIDTYFQPERELIGDMAHTLYLLLPAIKGYELPEGSKEYLKGLRNNIENVSDVKFDRDSAHGLVHPLDLIDVLQENTTDDMTVTVDVGSHYIWMARYFKSYEARHLLFSNGMQTLGVALPWAISAALLRPNTKVISVSGDGGFLFSAQELETAVRLHLPIVHIIWNDGKYNMVEFQEEMKYGRSSGVDFGPVDFVKYAESFGAKGYRVDSKDSFEETLKQALIDAENGPVLIDVPIDYKDNVTLGETILPDEFY

SEQ ID NO: 19726 - protein, 468 aa, Zea mays
  misc_feature (34)..(34): Xaa can be any naturally occurring amino acid
  misc_feature (73)..(73): Xaa can be any naturally occurring amino acid
MPVPMNTSYPDVVKFMRSGFALRFPLSYGDNIRXVSQRIRACHGFAVLSMKNQEIVQASGNRSWTFLRSRHYXFCVLDQLGSTNNDVKSVLIDIIVGIIPFVLWGLKSAHVICRFVLMPLAVFVFLAYKYWKTRITIDAVEKFLRMQHMLVPMRYAYTNIIAITAHFRDKLGQGGYGTVYKGVLQPGEVHVAVKMLGNSNCNGEEFISEVATIGKIHHVNVVRLIGFCSEENIRALIYEFMPRGSLDKYIFSSEKTFSWDKLNEIALGIARGLNYLHHGCDMQIIHFDIKPHNILLDSNFVPKVADFGLAKLFPKDDNFVPLSAMRGTIGYIAPEMVSRSFGVISSKSDVYSFGMLLLEMTGGRRNADPHAGSSSQAYYPSLVYKQLSQGDANRISEGVDMHELEKKLCIIGLCCIQIKPQDRPTMSEVIEMLEAGVDGIQMPPRPYFCDEEGDSSYSIISELDIIEE

SEQ ID NO: 19727 - protein, 271 aa, uncultured bacterium
NSRLCMSSAVAGYTRSLGSDGPPCSYEDLDHCTVAFLIGTNTAECHPVLFQRLLKRKKRHPGSVTIVVVDPRQTDTAKAADIHLAVAPGSGLALLHGIAHLVMRENGQDPTFIDNCTDNYDSFFDVVARWTPRRVALFCGIPEKRLREVAQLFHRREKVLSLWSMGVNQRREGTAVVGGIINLHLLTGQIGKEGAGPFSLTGQPNAMGGREAGGLSHLLPGYRQVTNPAHRAEVEQTWGFPQGKIAPEPGLTAWQQVEAMERGELDLWWVA

SEQ ID NO: 19728 - protein, 235 aa, Glycine max
  misc_feature (47)..(47): Xaa can be any naturally occurring amino acid
TYSLCKPCFLYRGSDSWGESDGASIQMRLSYSPAAQFFLFLEQWTDXHLAGVLGLLRILIYKAYEDGKTTMSIYEKKASLKEFYGVVFPSLLQLHRGITDVDDRKQKHLCATKYKLKDLTSKGNLSEIDMERELECGICLEINSKVVLPNCNHSMCMKCYEDWHARSQSCPFCRDSLKRVNSDDLWICISSSEINDLASINKENFKRLFMYIESLPLTARPHIQHVISSPPVIAN

SEQ ID NO: 19729 - protein, 271 aa, uncultured bacterium
NSRLCMSSAVAGYTRSLGSDGPPCCYDDLDHCSVAFLIGTNTAECHPVLFQRLLKRKKRNPGSVTIVVVDPRRTDTAKAADIHLPIAPGSDLALLHGIAHLVLRENGQDPAFIDDHTDNYEAFFDVVARWTPRRVARFCNLPEKRLREVAQLFHRRERVLSLWSMGVNQRREGTAVVCGLINLHLLTGQIGKEGAGPFSLTGQPNAMGGREAGGLSHLLPGYRLVANDQHRQDVEQAWKFPAGSIAATPGLAAWQQIEAMERGELDLWWVA

SEQ ID NO: 19730 - protein, 785 aa, Arabidopsis thaliana
MLTRVWKDPWIPTILARPAKSILNIRDSLLYVNDLIDQNTNLWKLDRLQALIDPVDIPLILGIRPSRTYLSDGFSWSHTKSGNYTVKSGYWVARDLSRPTCDPPFQGPATCQRLTYRHMGTDKGCPRCEEVEETINHLLFHCPPSRQIWALSPIPTSGNIFPRNSLFYNFDFLFWRDREFGIGEKNFREPPPETLVLALQETAVWKQATLKEDDSTRPIVFVGSSQTPSTLLPECQLDASWHVDDTLSGHGWAMECMISIGDTSGTFASDCSDLIAILDNQDDWLTFAAELASYLSSKLVVSLFKTPVKMASLTLRCDSTHLLPSRDVVKGTKPFGTSLVYPRIISKKFNVRMRVIPEEGDVFSSSKSNGSSMGIELQPDLVSFGTLAAEMIPTTMDSPEVEDEEFDLDRPTDGFASIPQAIEDIRHGKMVVVVDDEDRENEGDLIMAASLATPEAMAFVVKHGTGIVCVSMKGEDLERLELPLMVTRKDNEEKLRTAFTVSVDAKKGTSTGVSARDRAQTILTLASKDSKPEDFNRPGHIFPLRYREGGVLKRAGHTEASVDLTVLAGLEPVSVLCEIVDDDGSMARLPRLRQFAQENNLKLISIADLIRYRRKRERLVEFTAVAPIPTMWGPFKAHCFKSLLDGVEHIAMVKGEIGDGKDILVRVHAECITDDIFGNSSGGKQLAIAMRLIEENGRGVFVYLRGPESKGIDLSHKPRTYNTNSDQAEGVSFPVASREYGIGAQILRDLGVREMKVMTNNPAHYVGLKGYGLSISGKVPLITTP

SEQ ID NO: 19731 - protein, 388 aa, Mesorhizobium sp. BNC1
MAETFVIAQGGGPTAVINQTVAGIVMETRKLYPGARVLGARYGIRGIRDGNFVNLSDLPDETLLAMATTPSAALGSTRDKPDAAYCDAILEGLRNVGADAFINIGGNDTAGTQAILAEASGGSIAFIHAPKTIDNDLMENDHTPGFISAAEFVAGAFLSIDLDFRALPGIYVGIVMGRHAGFLTAAASAWSLDEEGGPHLIYVPERPFERARFIEDVRAQISRHGRCIVAMSEGVSGSDGRSLVEHIVPPETLERDQHGNVRLSGTDLGRAIEHMLAESLPGTRARVDTFGYLPRGNIATINEVDAQEAFEAGAFAVRAVERLGGSVALKYNDTETTCQLVPLVDVAGKTRQMPENFLHPAENKVSGACRNYLSRLVPRKYRVARPFV

SEQ ID NO: 19732 - protein, 271 aa, uncultured bacterium
NSRLCMSSAVAGYTLSLGSDGPPCSYEDLDHCTVAFLIGTNTAECHPVLFQRLLKRKKRHPGSATIVVVDPRQTDTAKAADIHLAVAPGSDLALLHGIAHLVMRENGQDPTFIDNCTDNYDSFFDVVARWTPRRVALFCGIPEKRLREVAQLFHRREKVLSLWSMGVNQRREGTAVVGGIINLHLLTGQIGKEGAGPFSLTGQPNAMGGREAGGLSHLLPGYRQVTNPEHRAEVEQTWGFPQGKIAPDPGLTAWQQVEAMERGELDLWWVA

SEQ ID NO: 19733 - protein, 241 aa, Arabidopsis thaliana
MGTEVSTSPTSLIDQTVVPGDVVLDLSNMTNQTIKLGSGLRQDNEVISVMRAGKLRYSKPNKYWVESSHKRYVPRPEDHVLGIVVDCKGENYWIDIKGPQLALLPVLAFEGANRRNYPKFEVSTLLYTRVVKTNTGMNPELSCVDESGKAAGFGPLKDGFMFETSTGLSRMLLSSPTCPVLEALGKKLSFETAFGLNGRCWVHAAAPRIVIIVANALMNSETLSGTQQRIMVEKLLEKISD

SEQ ID NO: 19734 - protein, 398 aa, Shewanella sp. MR-4
MSIEIKVPVLPESVADATIATWHVKVGEQVSRDQNLVDIETDKVVLEVVAPEDGHIGEFLFQEGDTVLGEQVIAKFIAGAVSGQEVTKAEAEAAAPVAAAATEESNDALSPSVRRLLAEHNVDASKVKGTGVGGRITKEDVEAFIKSAPKAAAAPAAPAVQPLAAGRSEKRVPMTRLRKTIANRLLEAKNSTAMLTTFNEVNMKPIMDIRKQYQDIFEKRHGIRLGFMSFYVKAVTEALKRFPEVNASIDGDDIVYHNYFDVSIAVSTPRGLVTPVLRDTDTMSLADIEKAVRDLAIKGRDGKLTVADMTGGNFTVTNGGVFGSLMSTPILNLPQSAILGMHAIKDRPMAVNGQVEILPMMYLALSYDHRIVDGRESVGFLVAIKDFLEDPTRLLLDL

SEQ ID NO: 19735 - protein, 271 aa, uncultured bacterium
NSRLCMSSAVAGYTLSLGSDGPPCSYEDLDHCTVAFLIGTNTAECHPVLFQRLLKRKKRHPGSVTIVVVDPRQTDTAKAADIHLAVAPGSDLALLHGIAHLVMRENGQDPTFIDNCTDNYDSFFDVVARWTPRRVALFCGIPEKRLREVAQLFHRREKVLSLWSMGVNQRREGTAVVGGIINLHLLTGQIGKEGAGPFSLTGQPNAMGGREAGGLSHLLPGYRQVTNPEHRAEVEQTWGFPQGKIAPDPGLTAWQQVEAMERGELDLWWVA

SEQ ID NO: 19736 - protein, 277 aa, Magnetospirillum magnetotacticum MS-1
SERQPRSQGRLEALLNFQQVVEDLTGLDVANASLLDEATAVAEAVALMWRASRAKSGYVVLDADLFPQTLAVTLGRAQAVGLPVVVADLSGGLQAGLAAARAAGAFPTVLDDDAHLVGVVVQQSGASGRVVDWRPVVAEAKDAGALVTVASDLLALTLLVSPGELGADVAVGSAQRFGVPLFYGGPHAAFMAVRKGLERSLPGRLVGVSIDADGDTAYRLALQTREQHIRREKATSNICTAQALLAIVASMYAVYHGPDGLRAIAERTHAHATTLAE

SEQ ID NO: 19737 - protein, 617 aa, Streptomyces avermitilis
MTEQATGAHHPQPRPRSGGQQSAPEHVTGRAQSLIRSLEEVGAETVFGIPGGAILPAYDPLMDSKRVRHVLVRHEQGAGHAATGYAQATGKVGVCMATSGPGATNLVTPIADAHMDSVPLVAITGQVASKAIGTDAFQEADIVGITMPITKHNFLVTKAEDIPRTIAEAFHIASTGRPGPVLVDIAKDALQARPPSSGPPTPDLPGYRPVTKPHAKQIREAAKLITQAKRPVPYVGGGVLKAKATAELKVLAELTGAPVTTTLMALGAFPDSHKLHVGMPGMHGAVTAVTALQKADLIVALGARFDDRVTGKLDTFAPYAKIVHADIDPAEIGKNRAADVPIVGDAREVIADLVQAVQKEHSEGHAGDYTAWWKDLKPWRDTYPLGYEQPDNGSVSPQQVIERIGQLAPEGTIFAAGVGQHQMWAAHYVKYEQPATWLNSGGARTMGYAVPAAMGAKAGQPDRTVWAIDGDGCFQMTNQELTTCALNNIPIKVAIINNGALGMVRQWQTLFYNQRYSNTVLHSGPGRGRKAAERRHPRPRLREAVGGHGLLRDPCESPDDLDKVIAEANSVNDRPVVIDFIVHEDAMVWPMVAAGTSNDEVMFARDVRPDFGDNEDD

SEQ ID NO: 19738 - protein, 491 aa, Bacillus clausii KSM-K16
MIRGKMFINGEWTDAKNGRVREIINPFNQEVIATVPEGSAEDSHAAIAAARAAFDEGVWSAASASERGERVRLIGQKIANQNEEFARLESLDTGKTLEESRTDMEDIANVFFYFAGLADKNGGEVIRSPLPNSTSIVVREPVGVCGLITPWNYPLLQAAWKLAPALVAGNTLILKPSELTPLTTMKLFELFEEVGLPTGVANLVLGTGKEVGAPLAESTDVDLISFTGGIETGKTIMQAASSNVKKMALELGGKNPNIVFADADFETAIDQALNAVFFHAGQVCSAGSRLLVEEAIHDDFVEELVKRTKRIKLGNGFDEKTESGPLISAAHRAKVESYIQIGLDEGATLACGGKRPDAAELQNGFFLEPTIFTNCRSSMRIVQEEVFGPVLTVETFRTTEEAIAKANDTIYGLAGAIFSNDIGKAERIASKLRLGTVWINDFHPYFVQAPWGGYKQSGFGRELGKIGLEEYTETKHIFRNKQPQPIGWFRG

SEQ ID NO: 19739 - protein, 666 aa, Oryza sativa
MASSLLSSPKPSSFSSANPTSTPRPRAQTLSPFRAAAPRFSHGLATAAAAANPSASRRCYHRAFARPVRASMAQPRRPEYVPNRIDDPNYVRIFDTTLRDGEQSPGATMTSAEKLVVARQLARLGVDIIEAGFPASSPDDLDAVRSIAIEVGNTPVGEDGHVPVICGLSRCNKRDIDAAWEAVRHARRPRIHTFIATSEIHMQHKLRKTPEQVVAIAKEMVAYARSLGCPDVEFSPEDAGRSNREFLYHILEEVIKAGATTLNIPDTVGYTLPYEFGKLIADIKANTPGIENAIISTHCQNDLGLATANTLAGAHAGARQLEVTINGIGERAGNASLEEVVMAIKCRRELLGGLYTGINTQHITMSSKMVQEHSGLHVQPHKAIVGANAFAHESGIHQDGMLKYKGTYEIISPDDIGLTRANEFGIVLGKLRLNIAHLTLRKALPGLLGYEITDKEFEDFFKRYKEVAEKKKRVTDEDIEALLSDEIFQPKVFWSLADVQATCGTLGLSTATVKLIGPDGDEKIACAVGTGPVDAAYKAVDDIIQVTVAIFFIVLALVYQFMGWNMDVFIQYIPTVLREYSMTSVTEGIDAIATTRVVVTGDVSDSKHALTGHSFNRAFSGSGAALDIVVSSVRAYLSALNKMSSFVGAIKASSEVSESQRVQTTE

SEQ ID NO: 19740 - protein, 306 aa, Symbiobacterium thermophilum IAM 14863
MCAVAEDRHWDIVIVGAGMAGLATAIWARRLGLEPLVLEAAPRPGGQLNQIRGRIFDYPGLDLPSGEALTERLMRQAAEAGARVDLGRTVRAVSAAERTCLTSEGPVTGRALVIATGLRARRLGVEGERALYEGNWVRRPSHDLPWFRGRRVAVIGGGDRALENAGLLLPVAREVHLLSRGPLRARTDLSAPVLANDRLVHHERARVGRFDVRPDGVTVEVHQADRVWPLEVDAVCIYIGNEPNSQLVAGQVELDPEGYIVTDRFGQTSVPGVFAAGDVCTPPAYQSLANAAGQAMVVAKRIALSL

SEQ ID NO: 19741 - protein, 222 aa, Brassica napus
  misc_feature (91)..(91): Xaa can be any naturally occurring amino acid
NGSSRGFKVQFKDIFKLLPPKIQVGVFSATMPPEALEITRKFMSKPVRILVKRDELTLEGIRQFYVDVDKEDWKLEPLCALYETLAITQSXVIFVNTRRKVDWLTDKMRSRDHTVSATHGDMDQNTRDIIMREFRSGSSRVLITTDLLARGIDVQQVSLVITFDLPTQPENYLHRIGRSGRVGRKGVAITFVTKDDERMLFDIQKFYNVGGEELPSNVADLL

SEQ ID NO: 19742 - protein, 131 aa, Methanopyrus kandleri AV19
MVRNPNLSKEEERLLKLREELKRKKPKFRRQEWHRYKKLGEKWRRPKGRHSKMRRKLKSKPKMPNPGYGSPKKVRGLHPSGYEEVLVYNPKDLEKIDPKRQAARIASRVGRRKRQEILEKAEELGIVVLNA

SEQ ID NO: 19743 - protein, 250 aa, Brassica napus
MNSVSTFSELLGSENESPVGGDYCPMLAASCPKKPAGRKKFRETRHPIYRGVRLRKSGKWVCEVREPNKKSRIWLGTFKTAEIAARAHDVAALALRGRGACLNFADSAWRLRIPETTCAKDIQKAAAEAALAFEAEKSDTTTNDHGMNMASQAEVNDTTDHGLDMEETMVEAVFTEEQRDGFYMAEETTVEGVVPEEQMSKGFYMDEEWMFGMPTLLADMAAGMLLPPPSVQWGHNDDFEGDVDMNLWNY

SEQ ID NO: 19744 - protein, 475 aa, Streptococcus mutans
MTKQYKNYVNGEWKLSENEIKIYEPASGAELGSVPAMSTEEVDYVYASAKKAQPAWRALSYIERAAYLHKVADILMRDKEKIGAILSKEVAKGYKSAVSEVVRTAEIINYAAEEGLRMEGEVLEGGSFEAASKKKIAVVRREPVGLVLAISPFNYPVNLAGSKIAPALIAGNVIAFKPPTQGSISGLLLAEAFAEAGLPAGVFNTITGRGSEIGDYIVEHQAVNFINFTGSTGIGERIGKMAGMRPIMLELGGKDSAIVLEDADLELTAKNIIAGAFGYSGQRCTAVKRVLVMESVADELVEKIREKVLALTIGNPEDDADITPLIDTKSADYVEGLINDANDKGATALTEIKREGNLICPILFDKVTTDMRLAWEEPFGPVLPIIRVTSVEEAIEISNKSEYGLQASIFTNDFPRAFGIAEQLEVGTVHINNKTQRGTDNFPFLGAKKSGAGIQGVKYSIEAMTTVKSVVFDIK

SEQ ID NO: 19745 - protein, 591 aa, Idiomarina loihiensis L2TR
MADQIELKVPDVGGEEVEVIEILVSEGDTVEQEDGIVTVESDKASMDIPASSGGKITELKVKVGDTISEGDVLAMIEASGGADESDESDSEEEAEDKTDDKADEEATKDKAEESEDKQEEEKDEDSEPEKKSSGGGSKVIDVEVPDIGDEEDVEIIEILVSKGDSVSAEDGLITLETDKATMDVPCPEDGEIEEMLVKVGDKVSQGSVIAKLKVSGGADDSEAEEKDSAKEEKSESNKESDKDSGKKSEDKDQKKDSGSSVKPSSERQPPVPDHPSQRSDRKEGILHASPAVRRVAREFGVDLSQVKGSGPKDRILKEDVQEFVKYELSRPKAVAGATGQGGGGLQVIDPPKVDFSKFGEVEEVQLSRIQRKSGPNLHRNWVTIPHVTQFDEADITELENFRKSENEVAKKKDLGFKITPLVFILKACAKGLREFPTFNSSLSESGESLYMKKYVNIGVAVDTPNGLVVPVIRDVDKKGIYELSEELVEISSKARDGKLKATDMQGGCFSISSLGGIGGTAFTPIVNAPDVAILGVSRNEMKPKWNGKEFEPRLTLPLSLSYDHRVIDGAEAARFTAYLSGVLGDIRKLVL

SEQ ID NO: 19746 - protein, 232 aa, Brassica napus
  misc_feature (178)..(178): Xaa can be any naturally occurring amino acid
  misc_feature (207)..(207): Xaa can be any naturally occurring amino acid
MHPFNAMMAARMLTAVGKSNGLESETIPFGSLWWSIYAGVSCFLVLFAGIMSGLTLGLMSLSLVDLEILQRSGSPKEKKQSAAIFPVVQKQHQLLVTLLLFNALAMEGLPIYLDKIFNEYVAIILSVTFVLFVGEVIPQAICSRYGLAVGANLVWLVRILMILSYPISFPVAKMLDWXVLGHGDPLFRRAQLKALVSIHGEAAGRGXELTHDETTIISGALDLTAKTAREAM

SEQ ID NO: 19747 - protein, 485 aa, Methanopyrus kandleri AV19
MHAFLGNAQLPSTPRGDRLEFSEWYAEVLRSAEIMDVRYPVKGMYVWLPYGFEIRQRVVEKLRRKLRETGHEEVLFPTLIPETQLKKESEHIAGFEDEVYWVTHGGLKELDEKLALRPTSETAIYPMFALWIRSHADLPLKIFQIVNTFRYETKHTRPLIRMREITTFKEAHTAHATEEEAEEQVKEAVEIYSSFFDELGIPYIASVRPEWDKFPGAEYTVAFDTLMPDGRTLQIGTVHMLGQNFARTFEVTYETEEGDQEYVYMTCYGISDRVVASMIAIHGDERGLVLPPDVAPYQVVMVPILKKGVRRKILERAAEVEEMLREEGVRVKVDDRDMSPGRKFHYWELKGVPLRIELGARELEEGTAVVFRRDELERETYAFEELPDVVPELLEDIAMELRKRAREKFEKGIFRTDSPEEARRLVGEGIVETGWCGSERCGVRMEEEFGGDVLGTPYPEEDTEFERCPICGETAEYTVRIAKTY

SEQ ID NO: 19748 - protein, 411 aa, Vitis vinifera
MNALAATNRNFKLAARLLGLDSKLEKSLLIPFREIKVECTIPKDDGTLASFVGFRVQHDQWRGPMKGGIRYQPEVDPDEVNALAQLMTWKTAVANIPYGGAKGGIGCNPGELSLSELERLTRVFTQKIHDLIGVSTDVPAPDMGTNSQTMAWILDEYSKFHGYSPAVVTGKPTDLGGSLGRDAATGRGVLFATEALLHEHGKSIAGQRFVVQGFGNVGSWAAQLISGHGGKIVAVSDITGAIKNSKGIDVPSLLKHSVEHRGVKGFNGADPIDPKSILVEDCDVLIPAALGGVINRENANEIKAKFIIEAANHPTDPEADEILSKKGVIILPDIYANSGGVTVSYFEWVQNIQGFMWDEEKVNNELRTYMTRGFKDVKEMCRTHNCDLRMGAFTLGVNRVARATVLRGWEA

SEQ ID NO: 19749 - protein, 42 aa, Brassica napus
ITLEGTHHGPITSKPTMFLEIGDTEEYWKRQDAAQVMALVSE

SEQ ID NO: 19750 - protein, 140 aa, Pinus pinaster
ELQDLQRDPPTSCSAGPVGEDLFHWQATIMGPTESPYAGGVFFVMIHFPPDYPFKPPKVNFQTKVYHPNINSNGSICLDILKEQWSPALTISKVLLSICSLLTDPNPDDPLVPEIAHIYKSQRSRYEETARAWTQKYAMN

SEQ ID NO: 19751 - protein, 318 aa, Pelargonium x hortorum
MESFPVINMEKLNGEERAATMEKIKDACENWGFFELLNHGIPYELLDTVEKMTKEHYRKCMEQRFKEMVASKGLEGVEVEVEDLDWESTFFLKHLPESNISQVPDLQDEYRKVMKEFAAKLEKLAEELLDLLSENLGLEKGYLKKAFYGSKGPTFGTKVSNYPPCPKPDLIKGLRAHTDAGGLILLFQDDKVSGLQLLKDGKWVDVPPMHHSIVINLGDQLEVITNGKYKSIEHRVIAQSDGTRMSIASFYNPGSDAVIYPAPALLEKETEEKQVYPKFVFEDYMKLYSGLKFQAKEPRFEAMKAVEANVTLDPIRTA

SEQ ID NO: 19752 - protein, 510 aa, Mycobacterium bovis AF2122/97
MTTQISHFIDGQRTAGQSTRSADVFDPNTGQIQAKVPMAGKSDIDAAVASAVEAQKGWAAWNPQRRARVLMRFIELVNDTIDELAELLSREHGKTLADARGDVQRGIEVIEFCLGIPHLLKGEYTEGAGPGIDVYSLRQPLGVVAGITPFNFPAMIPLWKAGPALACGNAFVLKPSERDPSVPVRLAELFIEAGLPAGVFQVVHGDKEAVDAILHHPDIKAVGFVGSSDIAQYIYAGAAATGKRAQCFGGAKNHMIVMPDADLDQAVDALIGAGYGSAGERCMAISVAVPVGDQTAERLRARLIERINNLRVGHSLDPKADYGPLVTGAALARVRDYIGQGVAAGAELVVDGRDRASDDLTFGLPEGDANLEGGFFIGPTLFDHVAAHMSIYTDEIFGPVLCMVRARDYEEALRLPSEHEYGNGVAIFTRDGDAARDFVSRGQVGMVGVNVPIPVPVAYHTFGGWKRSGFGDLNQHGPAAIQFYTKVKTVTSRWPSGIKDGAEFVIPTMS

SEQ ID NO: 19753 - protein, 376 aa, Eremothecium gossypii
MDSGEVAALVIDNGSGMCKAGFAGDDAPRAVFPSIVGRPRHQGIMVGMGQKDSYVGDEAQSKRGILTLRYPIEHGIVTNWDDMEKIWHHTFYNELRVAPEEHPVLLTEAPMNPKSNREKMTQIMFETFNVPAFYVSIQAVLSLYSSGRTTGIVLDSGDGVTHVVPIYAGFSLPHAILRIDLAGRDMTDYLMKILSERGYSFSTTAEREIVRDIKEKLCYVALDFEQEMQTAAQSSAIEKSYELPDGQVITIGNERFRAPEALFHPSVLGLEAAGIDQTTYNSIMKCDVDVRKELYGNIVMSGGTTMFPGIAERMQKEITALAPSSMKVKIIAPPERKYSVWIGGSILASLTTFQQMWISKQEYDESGPSIVHHKCF

SEQ ID NO: 19754 - protein, 87 aa, Hauya heydeana
GGRYSVCSAVGVLPLSLHYGFAVVEKFLQGAHSIDQHFSSAPFEKNIPVLLGLSSVWNVSFLGYPARAILPYSQALEKFAPHIQQVS

SEQ ID NO: 19755 - protein, 136 aa, Hauya heydeana
VSIDGLPLPFETGEIDFGEPGTNGQHSFYQLIHQGRVIPCDFIGVVKSQQPVYLKGEVVNNHDELMSNFFAQPDALAYGKTPEQLQKENAPQHLIPHKTFTGNRPSLSILLPSLDAYRIGQLLAIYEHRVAVQGFI

SEQ ID NO: 19756 - protein, 261 aa, Zea mays
  misc_feature (155)..(155): Xaa can be any naturally occurring amino acid
MGNANAKEGENGHMAASPEPAAPNGGGGSSSSAGGAAARPPPLSPPDDVMLERPPPVPYLFVPQVPETPLHRPTELSPLLNHSPVNDSTDQHSQEQGIPTLITWSQGGDEVFLEGSWDNWTSRRALERSGKDHAVLLVLPSGVYHYRIIVDGELXDYVPESLDSVAEFEAPPSPVHSYDLHCPGDEEFAKEPPTLPPQLLMSVLGGDVDSAGSQALKPQHVVLDHLFIEKGWGSQSLLALGVTHRFESKYVSFVLYKPLER

SEQ ID NO: 19757 - protein, 475 aa, Thermus thermophilus HB27
MEVKEAPTEALIGGAWRRLERRFPVVSPATGERVAEVADCGEEEAREALEEAVLAFPAWSRATAYERAQVLRRWYERILEHQEPLARLMALEMGKPLKEGRAEVAYAAGFVEWYAEEAKRVYGETVPSQFPHKRILVRYEPVGPVYGITPWNFPAAMVTRKVAPALAAGCTFVLKPAEESPLTALYLAKLFLEAGGPPGVFQVLPTSRPAEVSRPFLEDERVRKLTFTGSTEVGVRLYGEAAKTLKRVSLELGGGAPVLVFADADLDRAVEETLRAKFRNAGESCVAANRIFVQAEVAEAFAEAYARRVQALKVGDPLSEETDVGPLVNEAALRKVRTHVEDALAKGARLVAGGEAKGLFFAPTVLLDVKPESLLFREETFGPVAPLTVFREEEEAVRWANGFPVGLAAYVFTRDLSRAFRVAEALEYGIVGVNDGVPSTPQAPFGGVKRSGLGREGGKWGLLEYLEVKYVSLGL

SEQ ID NO: 19758 - protein, 482 aa, Bradyrhizobium japonicum USDA 110
MDVNLLISGRDQAASTGKVFERRNPLSQEVASRAAAATVSDADAAVAAASAALAAWSALGPNARRALLLKAADALEAKRDAFIRIMMAEIGTTEVWSAFNVKLATGMLREAASLTTQVAGEVIPSDKPGCLAMAVRQPAGVCLGIAPWNAPIILGVRAVATPLACGNTVVLKASEICPGTHRLIGEVFRDAGFPPGVVNVLTNAPADAPAVVERLIANPAVRRINFTGSTRVGRVIAELAGRHLKPVLLELGGKAPLVVLDDADLDAAVAAVAFGAFINQGQVCMSTERVIVDESVADQFVAKLAKKAGALPAGDPRSGPVVIGSMIDEAPARHVVALIDDAIGRGAVKLAGGERAGTVVPATVLDRVVPGMRIYSEESFGPVVSVIRARGVDDAVRLANDTEYGLSAAVFGRDVARALTVAQRIESGICHVNGPTVHDEAQMPFGGVKGSGYGRFGGQAGIAEFTDLRWITIETQPQHYPF

SEQ ID NO: 19759 - protein, 384 aa, Bacillus cereus ATCC 14579
MLEFDTTQDQLANIKVIGVGGGGNNAVNRMIEHGVQGVDFIAVNTDAQALNLSKAETKMQIGGKLTRGLGAGANPEVGKKAAEESKEQIQEALRGADMVFVTAGMGGGTGTGAAPVVAQVAKELGALTVGVVTRPFTFEGRKRATQAASGIAAFKENVDTLIVIPNDRLLEIVDKNTPMLEAFREADNVLRQGVQGISDLIATPGLINLDFADVKTIMSNRGSALMGIGSGNGENRAAEAAKKAISSPLLETSIDGAQGVIMNITGGANLSLYEVQEAADIVASASDPEVNMIFGSVINEGLKDDIVVTVIATGFDDSIATQPPKPIIRPNANHTQQQQQPVAQPSKQREVKREMKREEPVVHERHSDSDDIDIPAFLRNRRRR

SEQ ID NO: 19760 - protein, 1085 aa, Frankia sp. EAN1pec
MECRTPAGRRRARGPRPAGAMPVNSPNAQRLPDADPVGRVQPQPVAGLGAEDVVELVEVAHDVGAQVRRAVRVGGQVLPLQLEPALGAPHVGPVHEQPTSVLPRRLAVLGDDVGLVGDGQAAEVADVLPDSERAVHLLARQVARLEPVVLLDQRLRLHLEGRLVGGRPPVVEVAGAVVLRALVVEAVTDLVADHRADAAVVLGRVAVRAEERLLENGGREADLVGARVVVGVDGLREHEPLVAVHRRADLGQLPVGLERGGCAGVAHQVAAADRQRRVVPEPVGVADLRPERLELLVRPLLGLLRHPVQLGDRRAVGREQVRDEVVHLRLGVRREVPGDVLPADRLPDRALDERHRALPAGPQLGRAAERAAVEVEVGLGEHVGQVGRGRAQHAADQPVAPHVDRRVGQHGRQVLEERRLPHARLRQRRVRAGQRPTETGDVGVPVERRAERGQLSARHQVVGLLDVAGLGPLPVALREQGFHVEDPLRGALGVGVPAQPEHPGQVVDVLLAGRGELVVVVVRLVRQAEAALAQVEQVAVRVAVVGVDVGAEQSGAADPLELAEERGEAADVAQPARAVQQRPHRAQAERLERLGVHEGVVEVADLPRVLALGGLVPRGEVGDDVADLPLGVIGQLHERAPARPVGRDLRLGEPPAVHVAEQVVLRSDVEVHALAGVVEDVHRTEVSNRLPPGHGATPSCPARPVHPLDGICPHVGIRSVRGHPLSITGGRRAARDQALSGLTNDTLWVSLWPGARSTPAARTRPHCSGPRCGTPPFACSATASGPADLMEMFLPPYADRPVAVVTGASSGIGRATARTLAEQGWQVIGVGRDPVRSAATEAEIAAAARKDGGFTMLRGDFTLMADVRRVAGEIQHLTPRLDILINNAGGVRDRQIISAEGTEATFAVNHLAPFLLTRELTPLLRASAASLPAGSTRVIAVSSSGHRAVDGLDWDDLQSLGEFRPAVAYCRAKLANILFTRELARRAGPDGIVAQAMHPGVVASNFSAHGDAAMRAHMAAADTVPPDEPAETLAWLATEPEGGRTGGRYFHRRAEELPAEAARDDAAAARLWTESERLLDGLGFR

SEQ ID NO: 19761 - protein, 381 aa, Ludwigia peploides
NVLDKIKEFSERIRNGSWVGATGKQLTNVIAIGIGGSFLGPLFVHTALQTDREACECARGRQLRFLANVDPIDVARNIMGLNPETTLVVVVSKTFTTAETMLNARTLREWISSALGPSAVAKHMVAVSTNLPLVEKFGIDPKNAFAFWDWVGGRYSVCSAVGVLPLSLQYGFAIVEQFLLGARSIDQHFNSAPFEKNIPVLLGLLSVWNVSFLGYPARAILPYSQALEKFAPHIQQVSMESNGKGVSIDGLPLPFETGEIDFGEPGTNGQHSFYQLIHQGRVIPCDFIGVMKSQQPVYLKGEVVNNHDELMSNFFAQPDALAYGKTPEQLRKENVPEHLVPHKTFTGNRPSLSILLPSLNAYNVGQLLAIYEHRVAVQGFI

SEQ ID NO: 19762 - protein, 952 aa, Sulfurospirillum multivorans
  misc_feature (187)..(187): Xaa can be any naturally occurring amino acid
MEKTTERALSTTVGRRSFLKMAAVASVFGATSGFAGENVTRAATEEEVKNPFPGSKKVKTICTSCSVGCGVIAEVQNGVWVRQEVAQDHPISLGGHCCKGADMIDMVRSEVRLKYPMVKENGQWKRLSWDDALNRIATKLADLKKKDGADSVQFLGSAKMGNEQAYYFRKFAAFYGTNNTDHQARIXHSSTVAGVANTFGYGAMTNSLGDIQKSKAIIIFGANPAVNHPVGFQHFLKAKERNNSQLIVIDPRFTKTAAKADIFAQIRPGTDIPFMYGMLNIIFKNGWEDKEYIHDRVFGMEKIREEALKWTPELVADVTGVPAEKLIQITTLYAKNRPGTLIWAMGLTQHSIGTSNTRMAPILQLALGNMGKAGGGTNILRGHDNVQGATDMGCLADSLPGYYGLAEGSWKYFAKQWGVDYEYLVSQFKDASWMTKNGFSLARWWAGVEGVKSDDKIENAGTTLKALVVMGNGITSIAQQAKIKEALDNLELIVLADPFVNEAAILTDKKDNVFILPAATQFETSGLVVATNRSAQWRYKVVEPLYESKADQDIMFELAKRLGFYDLYTKAMFMQETKDGKLEMIPEKKAFTWPEDATNEIARIIKTIGLTGWTAERVKKHTDNWHMFDEVTGAGMGPMKGEYYGLPWPCWTKTHGGSPNLYDTSIPVSAGGMGFRNNFGLEKDGVNLLAEKGSFPKGSKIEAGYPEITKANIEAVLGITLTEEEKAAMGANWKVDNSNLIVQKALDAGLCPYGNAKARAIVWNFPDHIPMHREPLHSPRTDLTLKYPAYPDKANHFRVMTKYISVQSAQDYAKDFPINMVTGRLVTMNGAGIENRASKYIAALTPEMFCDIHPDLALKHDIKNGAMMWVHSPEGTKIKVKAKYSHSVLPDMVFMPFHFAGYFQGTDRTGNFPAGTKPYASGESVNTVTNYGYDIITQIPETKGGLCRIEKA

SEQ ID NO: 19763 - protein, 501 aa, Calylophus toumeyi
MASPALISETEAWKDLKAHVEGIKRTHLRELMGDAERCQSMMVEFDNIFLDYSRQQASPDTINKLYKLADAAHLKQKIDRMYNGDHINSTENRSVLHVALRAPRNSTICSDGKNVVPDVWNVLDKIKDFSERVRSGSWVGATGKVLKDVIAVGIGGSFLGPLFVHTALQTDPEASKNARVRELRFLANVDPIDAARNISGLDPETTLVVVVSKTFTTAETMLNARTLREWISSALGPSAVAKHMVAVSTNLPLVEKFGIDPNNAFAFWDWVGGRYSVCSAVGVLPLSLLYGFAVVEKFLQGAHNIDQHFSSAPFEKNIPVLLGLLSVWNVSFLGYPARAILPYSQALEKLAPHIQQVSMESNGKGVTIDGLPLPFESGEIDFGEPGTNGQHSFYQLIHQGRVIPCDFIGVVKSQQPVYLKGEVVNNHDELMSNFFAQPDALAYGKTPEQLKKENVSEHLIPHKTFIGNRPSLSILLPTLDAYRIGQLLAIYEHRVAVQGFV

SEQ ID NO: 19764 - protein, 361 aa, Burkholderia sp. 383
MTDRTYKIAVIPGDGIGREVMPEGLRALDAVTARFGVRFDFVRIDWASCDYYAQHGKMMPDDWKAQLSGMDAILFGAVGWPATVPDHISLWGSLLKFRREFDQYINLRPARLFDGVPSPLAGRRAGDIDFMIVRENTEGEYSSVGGTMFEGTEREIVMQQSIFTRHGTERVLKFAFDLAQRRAKRLTVATKSNGIAISMPWWDARTAEMAERYPDIAVDKQHIDILCARFVLQPDRFDVVVASNLFGDILSDLGPACTGTIGIAPSANLNPDRKFPSLFEPVHGSAPDIAGQFIANPVAMIWSAALMLDFLGNGAGREREAHDAIVAAIEDVLRTGPHTRDLGGNAGTQEVGEAIAARIAG

SEQ ID NO: 19765 - protein, 966 aa, Glycine max
MAARNIEKMASIDAQLRLLAPRKVSDDDKLVEYDALLLDRFLDILQDLHGEDIRQTVQDCYELSAEYEGEHKPEKLEELGNMLTGLDAGDSIVIAKSFSHMLNLANLAEEVQIAYRRRIKLLKKGDFADENSAITESDIEETFKKLVAQLKKTPQEIFDALKNQTVDLVLTAHPTQSVRRSLLQKHGRIRNCLTQLYAKDITPDDKQELDEALQREIQAAFRTDEIRRTPPTPQDEMRAGMSYFHETIWKGVPQFLRRVDTALKNIGINERVPYNAPVIQFSSWMGGDRDGNPRVTPEVTRDVCLLARMMAANMYFSQIEDLMFELSMWRCTDELRVRAHELHRSSKRDAKHYIEFWKQIPPNEPYRVILGDVRDKLYNIRERARHLLANGTSDIPEETTFTNVEQFLEPLELCYRSLCACGDRPIADGSLLDFLRQVSTFGLSLVRLDIRQESDRHTDVMDAITKHLDIGSYREWPEEKRQEWLLSELSGKRPLFGHDLPKTEEITDVLETFRVISELPSDNFGAYIISMATSPSDVLAVELLQRECHVKQPLRVVPLFEKLADLEAAPAAVARLFSIDWYRNRIDGKQEVMIGYSDSGKDAGRLSAAWALYKAQEELVKVAKEYGVKLTMFHGRGGTVGRGGGPTHLAILSQPPDTIHGSLRVTVQGEVIEQSFGEEHLCFRTLQRFTAATLEHGMHPPVSPKPEWRALMDEMAVIATKEYRSVVFKEPRFVEYFRCATPELEYGRMNIGSRPSKRKPSGGIESLRAIPWIFAWTQTRFHLPVWLGFGSAFKHVVEKDPKNLQMLQDMYNQWPFFRVTLDLVEMVFAKGDPGIAALFDKLLVSEELRPFGENLRAKYEETKSFLLQVAGHKDILEGDPYLKQRLRLRDSYITTLNVLQAYTLKRIRDPDYHVKLRPHLSKDYMESSKPAAELVKLNPKSEYAPGLEDTLILTMKGIAAGMQNTG

SEQ ID NO: 19766 - protein, 607 aa, Ashbya gossypii ATCC 10895
MSDKNTRIAIVSDDKCKPKKCRQECKRSCPVVKTGKLCIEVAPTSKVAFISENLCIGCGICVKKCPFGAITIINLPTNLDSQVTHRYSANSFKLHRLPTPRPGQVLGLVGTNGIGKSTALKILAGKQKPNLGRYDDPPEWSDIIKYFRGSELQNYFTKMLEDDIKAIIKPQYVDNIPRAIKGPLQKVGELLKARMEKPEADVKMYIKILELQNVLKRDVSALSGGELQRFAIGMSCVQQANVYMFDEPSSYLDVKQRLNAALIIRSLLDPTTYVICVEHDLSVLDYLSDFICILYGVPSVYGVVTLPSSVREGINIFLDGHIPSENLRFRTEALQFRLAEAGEELHSDAMRAFQYPPMKRTQGDFVLNVEPGEFSDSEILVMMGENGTGKTTLIKLLAGAIAADDGKDIPKLNVSMKPQKIAPKFPGTVRQLFFKRIRAQFLNPQFQTDVCKPLRIDDIIDQEVQHLSGGELQRVAIVLALGLPADIYLIDEPSAYLDSEQRIICSKVIRRFILHNKKTAFIVEHDFIMATYLADKVIVFEGTPSKNAYARTPESLLTGCNKFLKNLNVTFRRDPNSFRPRINKLDSQMDKEQKLSGNYFFLDTASV

SEQ ID NO: 19767 - protein, 491 aa, Gaura lindheimeri
WKDLKAHVEGVKRTHLRELMGDSERCQSMMVEFDNIFLDYSRQQASPDTINKLYKLADAAHLKQKIDRMYNGDHINSTENRSVLHVALRAPRNSAICSDGKNVVQDVWNVLDKIKDFSERVRNGSWVGATGKELKDVIAVGIGGSFLGPLFVHTALQTDPEASKNARGRELRFLANVDPIDAARNISGLDPETTLVVVVSKTFTTAETMLNARTLREWISSALGPSAVAKHMVAVSTNLPLVEKFGIDPNNAFAFWDWVGGRYSVCSAVGVLPLSLQYGFAVVEKFLQGAHNIDQHFSSAPFEKNIPVLLGLLSVWNVSFLGYPARAILPYSQALEKLAPHIQQVSMESNGKGVSIDGLPLPFQSGEIDFGEPGTNGQHSFYQLIHQGRVIPCDFIGVMKSQQPVYLKGEVVNNHDELMSNFFAQPDALAYGKTPEQLKKENVSEHLIPHKTFTGNRPSLSILLPTLDAYRIGQLLAIYEHRVAVQGFVWG

SEQ ID NO: 19768 - protein, 167 aa, Zea mays
MAMETCFRAWTLHAPAGSKDRLLVGNLVLPSKRALAPLSVGRVATRRPRHVCQSKNAVDEVLVADEKNWDGLVMACETPVLVEFWAPWCGPCRMIAPVIDELAKDYAGKITCCKVNTDDSPNVASTYGIRSIPTVLIFKGGEKKESVIGAVPKSTLTTLIDKYIGSS

SEQ ID NO: 19769 - protein, 543 aa, Agrobacterium tumefaciens str. C58
MPGCVKSAIPHLHGCKLRPVYTGPDICPKMDKAAFRLDTLTSHRTLAPARLENDMAAVQETIDQVRQIDVDQYKYGFETEIEVDKAPKGLSEEVIRFISAKKQEPEWMLEWRLEAYKRWLTMEEPTWARVSYPKIDFNDLYYYAAPKSTPGPKSLDEVDPELLKVYEKLGIPLKEQEILAGVENRRVAVDAVFDSVSVVTTFKAELAKAGVIFMSISEAVREYPDLVKKYLGSVVPQTDNFYATLNSAVFTDGSFVFVPKGVRCPMELSTYFRINEKNTGQFERTLIIAEEGAYVSYLEGCTAPQRDENQLHAAVVELVALDDAEIKYSTVQNWYPGDKDGKGGIYNFVTKRGDCRGNRSKISWTQVETGSAITWKYPSCILRGDDSRGEFYSIAVSNGHQQIDSGTKMIHLGKNTSSRIIAKGIAAGFSENVYRGQVSAHRKATNTRNFTQCDSLLIGDKCGAHTVPYIEAKNSSAHFEHEATTSKISEDQLFYCLQRGIPEESAIALIVNGFVKDVIQQLPMEFAVEAQKLIGISLEGSVG

SEQ ID NO: 19770 - protein, 381 aa, Zingiber officinale
MASTVDNILLLLLLLSSSALAAVSSAPYQDVLTLSKQGGAVPVRSDEEVRMLYLEWRVKNHPAEKYLDLNEYRLEVFKENLQFVDEHNAAADRGEHTFLLGMNRFADLTNEEYRTRFLRDFSRLRRSASGKISSRYRLREGDDLPDSIDWRENGAVVPVKNQGGCGSCWAFSTVAAVEGINQIVTGDLISLSEQQLVDCTTANHGCRGGWMNPAFQFIVNNGGINSEETYPYRGQNGICNSTVNAPVVSIDSYENVPSHNEQSLQKAVANQPVSVTMDAAGRDFQLYRSGIFTGSCNISANHALTVVGYGTENDKDFWIVKNSWGKNWGESGYIRAERNIENPNGKCGITRFASYPVKKGANTAAIPNWALTSSGGLKSSA

SEQ ID NO: 19771 - protein, 875 aa, Pseudomonas putida KT2440
MTDIDVRLREDVHVLGELLGETIRQQHGDAFLQKIEDIRHSAKADRRGPGEQLSSTLADLAEEDLLPVARAFNQFLNLANMAEQYQLIRRRDADQPEPFEAQVLPELLGRLKQAGHSNDALARQLAKLDIQLVLTAHPTEVARRTLIQKYDAIAGQLAAQDHRDLTPAERQQVRERLRRLIAEAWHTEEIRRTRPTPVDEAKWGFAVIEHSLWHAIPSHLRKVDKALLEATGLRLPLEAAPIRFASWMGGDRDGNPNVTAAVTREVLLLARWMAADLFLRDIDALAAELSMQQANDTLRKQVGDSAEPYRAVLKQLRDRLRATRAWAHSALTSNQPAGADVLVDNRELIAPLELCYQSLHECGMGVIAEGPLLDCLRRAVTFGLFLGRLDVRQDAARHRDALTEITDYLGLGRYADWDEEQRIAFLQAELKNRRPLLPAHFKPQADTAEVLATCREVAAAPAASLGSYVISMAGAASDVLAVQLLLKEAGLTRPMRVVPLFETLADLDNAGPVMQRLLGLPGYRAGLRGPQEVMIGYSDSAKDAGTTAAAWAQYRAQENLVRICAEHQVELLLFHGRGGTVGRGGGPAHAAILSQPPGSVAGRFRTTEQGEMIRFKFGLPGIAEQNLNLYLAAVLEATLLPPPPPQPAWREVMDQLAADGVQAYRSVVRENPDFVEYFRQSTPEQELGRLPLGSRPAKRRAGGIESLRAIPWIFGWTQTRLMLPAWLGWETALTNALARGQGELLAQMREQWPFFRTRIDMLEMVLAKADAQIAEAYDERLVQPHLRPLGAHLRDLLSQSCQVVLGLTGQPVLLAHSPETLEFISLRNTYLDPLHRLQAELLARSRSREAALDSPLEQALLVTVAGIAAGLRNTG

SEQ ID NO: 19772 - protein, 379 aa, Zingiber officinale
MASTVDIILLLLFSSSALAAVSSVPYQDVLTLSKQGGAVPVRSDEEVRMLYLEWRAKNHPAEKYLDLNEYRLEVFKENLQFVDKHNAAADRGEHTFRLGMNRFADLTNEEYRTRFLRDFSRLRRSASGKISSRYRLREGDDLPDSIDWREKGAVVPVKNQGGCGSCWAFSTVAAVEGINQIVTGDLISLSEQQLVDCTTANHGCRGGWMNPAFQFIVNNGGINSEETYPYRGQNGICNSTVNAPVVSIDSYENVPSHNEQSLQKAVANQPVSVTMDAAGRDFQLYRSGIFTGSCNISANHALTVVGYGTENDKDYRTVKNSWGKNWGESGYIRVERNIGNPNGKCGITRFASYPVKKGTNTAAIPNWALTSSGGLKSSA

SEQ ID NO: 19773 - protein, 483 aa, Rhodobacter sphaeroides 2.4.1
MRAQPAASHFVDGRPLEDETGAPIPVIYPATGEEIARLHEATPAVIEAALASGARAQAAWAAMRPVERARILRRASDLIRAHNEELSLLETLDTGKPLQETLVADWASGADALEFFAGLAPVVTGETVPLGQDFVYTIREPLGLCVGIGAWNYPSQIACWKAAPALALGNAMVFKPSEVTPLGALKLAEILIEAGLPPGLFNVVQGRGAVGASLVTDSRVAKVSLTGSVPTGRRVYAAAAEGVRHVTMELGGKSPLIVFDDADLESAIGAAMLGNFYSAGQICSNGTRVFVQKGIKEAFLARLAERADAIRMGDPLDPEVQMGPLVSQAQLEKVLAYIEKARAEGGRLVCGGEASVSPGCYVQPTVFADVTDAMTLAREEVFGPVMAVLDFETEEEAIARANATDFGLAAGVFTADLTRAHRVVAQLQAGTCWINAYNLTPVEAPFGGVKLSGVGRENGRAAVQHYTQVKSVYVGMGPVDAPY

SEQ ID NO: 19774 - protein, 475 aa, Zingiber officinale
MASFVAVVLLFLLSSSALTAVSVVPPLDILTLSKQAWAAPAGRSDEEVRIIYQEWRVKHRPAENDQYVGDYRLEVFKENLRFVDEHNAAADRGEHAYRLGMNRFADLTNEEYRARFLRDLSRLGRSTSGEISNQYRLREGDVLPDSIDWREKGAVVAVKNQGRCGSCWAFAAIAAVEGINQIVTGDLISLSEQQLVDCSTRNYGCEGGWPYRAFQYIINNGGVNSEEHYPYTGTNGTCNTTKENAHVVSIDSYRNVPSNDEKSLQKAAANQPISVGIDASGRNFQLYHSGIFTGSCNTSLNHGVTVVGYGTENGNDYWIVKNSWGENWGNSGYILMERNIAESSGKCGIAISPSYPIKVGATNLRNPTTSSSSVPSLVESLTACDNYYTCSGSTTCCCMHERGNRCFAWGCCPLEGATCCKDHYSCCPFNYPICSVADDNCLMSKNSPLRVKASRRTPAIPNWVLSSSGGLKSSA

SEQ ID NO: 19775 - protein, 393 aa, Chlamydophila pneumoniae CWL029
MIFEFRFPKIGETSSGGSIVRWLKNLGDHVARDEPLIEVSTDKIATELPSPKAGRLVRFCVNEGDEVASGDVLGLIELEEISEADDESTSCPPTSCETKSEAGSSSSSVWFSPAVLSLAQREGIGLDNLQKIAGTGKGGRVTRQDLEAYISESQQVSIPEIFQGEVNRIPMSPLRRAIASSLSKSSDEVPHASLVVDVDVTDLMNLISGERQRFLDTHGVKLTITSFIVQCLAQTLRQFPLLNGSLDGTTIVMKKSVNVGVAVNLNKEGVVVPVIHNCQDRGLVSIAKALADLSSRARLNKLDPSEVQDGSVTVTNFGMTGALIGMPIIRYPEVAILGIGTIQKRVVVRDDDSLAIRKMVYVTLTFDHRVLDGIYGSEFLTSLKNRLESVTMG

SEQ ID NO: 19776 - protein, 421 aa, Streptomyces tubercidicus
MVDAHQTFVIVGGGLAGAKAAETLRAEGFTGRVILICDERDHPYERPPLSKGFLLGKEERDSVFVHEPAWYAQAQIELHLGQPAVRLDPEGRTVRLGDGTLIAYDKLLLATGAEPRRLDIPGTGLAGVHHLRRLAHAERLRGVLASLGRDNGHLVIAGAGWIGLEVAAAARSYGAEVTVVEAAPTPLHGILGPELGGLFTDLHREHGVRFHFGARFTEIVGEGGMVLAVRTDDGEEHPAHDVLAAIGAAPRTALAEQAGLDLADPETGGGVAVDAALRTSDPYIYAAGDVAAADHPLLDTRLRVEHWANALNGGPAAARAMLGQDISYDRIPYFFSDQYDVGMEYSGYAPPGSYAQVVCRGDVAKREFIAFWLAADGRLLAGMNVNVWDVAESIQQLIRSGAPLEPGALADPQVPLAALLP

SEQ ID NO: 19777 - protein, 331 aa, Silicibacter pomeroyi DSS-3
MGRVGVLLANLGTPDDYSYWPMRRYLNEFLSDKRVIDYPAWKWQPILQGIILTKRPFSSGAAYESIWNHDKGESPLMTITKDQTAKLRAALAERYGDRVMVDFCMRYGNPSTKSKVRQMVTEGCDRILFFPLYPQYAGATTATANDQFFRALMDETWQPAARTVPAYFDQPAYVDALAQSIERAYAAMDSRPDVLVCSYHGMPERYLMQGDPYHCQCVKTTRLLRERLGWDESEVVSTFQSRFGPEEWLKPYTVDHVAELARQGKRNIAVVAPAFSADCIETLEEINEEIRESFEHAGGERFTYIPCLNDEDAHIAALAGVVASNLGGWLD

SEQ ID NO: 19778 - protein, 336 aa, Shewanella sp. MR-4
MSKRTITVIPGDGIGPSIIDSALKILDKAGCDFEYEFADAGLTALEKQGELLPQRTLELIEKNRITLKGPLTTPVGEGFTSINVTLRKKFGLYANVRPVLSFKGTQARYENIDIITVRENTEGMYSGHGQKVSEDGTTAEATSIVTRQGAEQIATFAYELARKENRKKVTIVHKANIMKSTSGLFLKVAREVSQRYPDIKTEEMIVDATCMKLVMNPENFDVIVTTNLFGDILSDLCAGLVGGLGMAPGANIGRDAAIFEAVHGSAPDIAGKNLANPTSVILASIQMLEYLGMADKADMIRKAVSAVIEEGDRTTRDLGGTHGTTDFTQAVLDRLS

SEQ ID NO: 19779 - protein, 354 aa, Carboxydothermus hydrogenoformans Z-2901
MERVEKLKKKLLKEGINAYFITKRENVRYIAGFTGSSGAVLITPEKNYFITDFRYVEQATKQCPGFIIEKHEDTIYSRVAELLKGLKIDTLYFEGDALSFKDYRELSEKASGVNLVSLPEIVDELREIKDKGEVEVIKKACAIADAAFNHLLKKLTPGMSEKEVAWELEKFMREAGAEDIAFETIVASGERGALPHGVASEKKIVSGEMVTLDFGAKYQGYHSDITRTVAIGEPSEKMLEIYDVVLEAQEAALQAVRPGALAVDVDRVARDIIAKAGYAEYFGHGLGHGVGLNIHEGPRLSPKGKAVLQPGMVVTIEPGIYLPGSGGVRIEDTVLVTESGFEVLTRSPKNLIIL

SEQ ID NO: 19780 - protein, 410 aa, Streptomyces tubercidicus
MAQNTAFIIAGAGLAGAKAAETLRAEGFGGPVLLLGDERERPYERPPLSKGYLLGTSEREKAYVHPPQWYAEHDVDLRLGNAVTALDPAGHEVTLADGSRLGYAKLLLATGSTPRRLPVPGADLDGVHTLRYLADSDRLKDLFRSASRIVVIGGGWIGLETTAAARAAGVEVTVLESAPLPLLGVLGREVAQVFADLHTEHGVALRCDTQVTEITGTNGAVDGVRLADGTRIAADAVIVGVGITPNSETAAAAGLKVDNGVVVDERLCSSHPDIYAAGDVANAYHPLLGKHLRVEHWANALHQPKTAARAMLGGEAGYDRLPYFFTDQYDLGMEYTGHVEPGGYDRVVFRGDTGAREFIAFWLSGGRVLAGMNVNVWDVTDPIRALVASGRAVDPERLADADVPLADLVP

SEQ ID NO: 19781 - protein, 151 aa, Geobacter metallireducens GS-15
MLNLRKKILVAIDGSPFSDKAAEEAVRMAAGNPSQFKSKIYAMLVLPNAPRSTFTDFVPPPPITETKEWDELRERVFYVIEKNAREADIPLEIKVVYGDPADELIDFAEKEQIDVIVIGSSGKGFLKRKLLGSVSHKVVKNSPCSVYIVRG

SEQ ID NO: 19782 - protein, 180 aa, Schizosaccharomyces pombe
MRPLTHEETKTFFEKLAQYIGKNITHLIDRPDDPHCFRLQKDRVYYVSERAMKMATSVARQNLMSLGICFGKFTKTNKFRLHITALDYIAQYARYKIWVKSNGEMPFLYGNHVLKAHVGRITDDTPQHQGVVIYSMNDTPLGFGVTARSTLELRRLEPTAIVAFHQADVGEYLRDEDTLF

SEQ ID NO: 19783 - protein, 437 aa, Debaryomyces hansenii CBS767
MSKRIVVTGLGLVTPLGVGVKSSWANLIANKSGLISTTTLPDYESAGWDKIPSKVVGKVPQGPITEGKWTSTDHFEKGEARRFALFSQYGLVATEEALKDANWFPQSEEEQNYTGVAVGSGIGSFEDVYENSVNFSQSGYKKVQPLFVPKILTNMAAGNISIKYGLKGPNHSVSTACATGLHSIGDAYNFIKNGYAKVMVAGGTEATIHPLALAGFARAKSVVTNYNDDPTKASRPFDKDRSGFVLSEGCGMMILEELDHALNRGLTEKDIYGEIKGYGLSGDANHITAPREDGDGAYRAMTMALKFAGVSPEEVDYVNAHATSTVIGDRSENNAIAELFKNNNNLSVSSTKSSIGHLLGAAGAVELIFTVKTIKENMMPPSLNLDNIGGHEDDDSSMFNKFDYIPNESKQKQANYSLCNSFGFGGTNSSLCLSKYK

SEQ ID NO: 19784 - protein, 456 aa, Streptococcus pyogenes MGAS8232
MSKIVVVGANHAGTACIKTMLTNYGDANEIVVFDQNSNISFLGCGMALWIGEQIAGPEGLFYSDKEELESLGAKVYMESPVQSIDYDAKTVTALVDGKNHVETYDKLIFATGSQPILPPIKGAEIKEGSLEFEATLENLQFVKLYQNSADVIAKLENKDIKRVAVVGAGYIGVELAEAFQRKGKEVVLIDVVDTCLAGYYDRDLTDLMAKNMEEHGIQLAFGETVKEVAGNGKVEKIITDKNEYDVDMVILAVGFRPNTTLGNGKIELFRNGAFLVNKRQETSIPGVYAIGDCATIYDNATRDTNYIALASNAVRTGIVAAHNACGTDLEGIGVQGSNGISIYGLHMVSTGLTLEKAKRLGFDAAVTEYTDNQKPEFIEHGNFPVTIKIVYDKDSRRILGAQMAAREDMSMGIHMFSLAIQEGVTIEKLALTDIFFLPHFNKPYNYITMAALGAKD

SEQ ID NO: 19785 - protein, 361 aa, Carboxydothermus hydrogenoformans Z-2901
MAVGILTGGGDCPGLNAVIRALVKTLQQKLPEEKIIGFLDGFRGAIENRSVPLTTKDVVGLLPKGGTILGTSNRDNPFKFPVSVNGTLEFHDVSDTVIENLHKNNIEVLFVIGGDGSLSIAHELSQKGVKVIGIPKTIDNDLDATDFTFGFDSAVRTATKALDMLHTTAESHHRIMVLEVMGRYAGWIALYSGLAGGADVILIPEIPFNWDAVCRKIQQRKAEGKHFSIVVVAEGAYPEGGERVIARYVKESTDPARLGGIGQVVADHLSRCTGLESRVTVLGHLQRGGGPTPFDRILATRFGVAAVNTWLQGNYNVMVAFLGGRVTTVPLSEGIKKLKLVPVDSELIVTAKAIGISFGDE

SEQ ID NO: 19786 - protein, 719 aa, Gibberella zeae PH-1
MAGFFNKIKGSGTATTTTPNKQDAVAKKKEEPVLDLTPLEKMLQNAGSLRDDGTDRFFGLENALFYSESFRNNVVNYPPISPTETNGSRPKVPITIRPPPTDPVENAPKQKGLSTSQVIKQRQNSSHQLPGQVGVRPEDKPDTPEYKKKQAMIKGPILELARENATSYGMDECTFTGLKDIFLALLESNTHTGVLSPQRFLEIFKRDNEMFRNSMHQDAHEFYGLVLNDVINSVESAARQMKLQAPTNGTDGLANSVEHVLGSAMANHVAGTSSPATGWVHDIFEGVLTSETKCLTCETASQRDETFLDLSIDLEEHSSVTSCLRKFSAEEMLCERNKFHCDHCGGLQEAEKRMKVKRLPKILTLHLKRFKYTEDYSRLQKLFHRVVYPYHLRMFNTTDNAEDPDRLYELYAVVVHIGGNAYHGHYVSIIKVPGRGWILFDDEMVEPVDKNFVRNFFGDKPGMATAYVLFYQETTFEKVREEQEKEGMEEVKLASEAANLAQENGDKPDTSPLKRQATQPMSPLAHHESMANLAHARTAPAMPSAPPPDASPPPTATTNGLSRVQTQKEEVKSKEDKKREKKEREAAEKAEKLAEKEREKQAKLDDKKRREDNLRAMQQTRRNENDELAKVLEASKKSAAQEDEARKKENGTPQSNGILDRTKRGSKSMSRKSFSLFHKDKSGAQAPDTPNGDSSEKHDKLKDRLSFSLGRKKSTNLLS

SEQ ID NO: 19787 - protein, 339 aa, Ralstonia metallidurans CH34
MQFHRLTVADVVAETEDARSFALAIPEPLRGAFRYRAGQHLTFRVDVGGETLMRSYSLSSAPESLGLPVVTVKRVAQGRVSNWFHANVGPGSVLDVSEPTGRFVCDDGAAPLVFCAAGSGITPVLSMIRSALATTARHITLFYANRDAASVIFGQAIARLVADHPERLTVRWHYDDEHGIPDAQTLGQMLRRNADFHLYLCGPAPFMAMIQQAAGEAGVAGGRVHLERFDAAPVVASAAVTATAAMTSCDARVTMKGEQHTVRVEGGQSLLQAMLEAGLDVPYACEEGYCGSCAAKCLDGEVAHAHNDVFSPDELAAGWILACQARPRHDRPLIITYDV

SEQ ID NO: 19788 - protein, 875 aa, Carboxydothermus hydrogenoformans Z-2901
MGLKAVGKSRWIENFSQDIAEAANLPAEKWVNSVCPYCGAGCSILYGVREGKVVSVRGNPEAWNRGGVCIKGATLADLYLSNSPGVKDRLKKPLLRDPEKRGSLENFREVSWDEALNYMVKKVKEYTKTKFGDKHPFAMYGSGQVSTEFMYLQAKFNVIGMNIHNDNNGRLCQATKANAMVISFGIDGPPMSFDDVFEADNLFIFGFNIADTLPGWFGKIVEAKVQKGDNLKIAVINPVKISATQILNYKAGDLYLPIIPTTDVAFINSMAHVIIYELEGVNRDYAGDVSRWADDVISGKVKPKHIDTEFIAKYVNFYRGDYQVLARLGKEGPKIFEEIKLPSGLEGFKEYAKFLAAYKPEDVAKTTGLTPEDIRKAAQMFVRNKNTMSMYLQGFGQQSNGVSKHLALVTLHAVTGRIGRAGAGVMPTVGQPNGLGQRVGGAVVGRLPGNRNHPLAAHRASLAKAMARGNQEMEAKILERLEDPVTKYSRLSLTSVDIFKNLKNGNIKGIWTVCTNPMVAFPNLNMVHEALRKADLVVVQDIYPTETMAFADVVLPAAAISGEAYGTYLNSERRVQILEKAVEPPGDALPDEIIHLAFVYKYQKALAEEGRQEDADFLKFLLEPIIQGYEPLFENVQANIRELREAHQEIQKRLFSELAYVSKGIPGNDLSGLSYERLRTEKDAKGYVGFKLPVLDSSHKGLERLYDENYEAIYQKRFATPDGKLRCFLFEQVHPAEEWIDAEYPFMLTLPRIYEHWHTRTRTGRCALPHRLRPEAWLSINPNDAKKLGIKDGDWVEVESRRGKVTVKAKIDTVKTPREGVVWMPWAYGFLGNLFTGQKEAPPGKSAGNVLSTDAYDPVSKQPELKFAAVKIRKV

SEQ ID NO: 19789 - protein, 371 aa, Epilobium canum
ERVRNGSWVGATGKELKDVIAVGIGGSFLGPLFVHTALQTDPEASKNARGRELRFLANVDPIDAARNLSGLNPETTLVVVVSKTFTTAETMLNARTVREWISSALGPSAVAKHMVAVSTNLQLVETFGIDPNNAFAFWDWVGGRYSVCSAVGVLPLSLQYGFAVVEKFLQGAHSIDQHFLSAPFEKNIPVLLGLLSVWNVSFLGYPARAILPYSQALEKLAPHIQQVSMESNGKSVSIDGLPLPFETGEIDFGEPGTNGQHSFYQLIHQGRVIPCDFIGVVKSQQPVYLKGEVVNNHDELMSNFFAQPDALAYGKTPEQLKKENVSEHLIPHKTFTGNRPSVSILLPTLDAYRVGQLLAIYEHRVAVQGFI

SEQ ID NO: 19790 - protein, 407 aa, Moorella thermoacetica ATCC 39073
MRYLIIGNSAAGVAAARAIRQADPAGEITMVGDEPYPFYARVLTSYYLGGLVPRDRLWLVDREWYRRQRIQLLTGRRATGLNTGACRVTLDDGTELAYDRLLIATGASPQRVDFPGAGLAGVFTLRTIDDAAAIGKFARPGGRAVVIGGGLVGLKAAEGLHARGLKVRLVVSSGRLLSQAMDDSGAELVRRAMAAAGFTIHLREDVVALEGRERVMAAVLRSGATVPVDVAVVGKGVRPNVDFLSGSGVVVNRGVVVDDYLSTGIPGVYAAGDVAEAYDRAWQKPRLNAIWGNAVEQGRLAGLNMAGHHTPYRGGIGQNSLVVHGLGVISGGIVNPPGEGYEVITRLDEKRSLYRKIVLQGRRLVGMVSVGPPNGAGSFQALIGREVKEKYIASFLDGSFTWAMVGR

SEQ ID NO: 19791 - protein, 116 aa, Brassica napus
  misc_feature (4)..(4): Xaa can be any naturally occurring amino acid
  misc_feature (18)..(18): Xaa can be any naturally occurring amino acid
  misc_feature (98)..(98): Xaa can be any naturally occurring amino acid
  misc_feature (107)..(107): Xaa can be any naturally occurring amino acid
MDPXYTSFSDSFLSIPDXGSPVSDSSECSPKLASSCPKKRAGRKKFRETRHPIYRGVRQRNSGKWVCEVREPNKKSRIWLGTFPTVEMAARAHDVAAXALRGRSACXNFADSAWRL

SEQ ID NO: 19792 - protein, 371 aa, Epilobium canum
ERVRNGSWVGATGKQLKDVIAVGIGGSFLGPLFVHTALQTDPEASKNARGRKLRFLANVDPIDAARNISGLNPETTLVVVVSKTFTTAETMLNARTLREWISSALGPSAVAKHMVAVSTNLQLVEKFGIDPYNAFAFWDWVGGRYSVCSAVGVLPLSLQYGFAVVEKFLQGAHSIDQHFSSAPFEKNLPVLLGLLSVWNVSFFGYPARAILPYSQALEKLAPHIQQVSMESNGKGVSIDGLPLTFESGEIDFGEPGTNGQHSFYQLIHQGRVIPCDFIGVVKSQQPVYLKGEVVNNHDELMSNFFAQPDALAYGKTPEQLKKENVAEHLIPHKTFTGNRPSLSILLPTLDAYRIGQLLAIYEHRVAVQGFI

SEQ ID NO: 19793 - protein, 537 aa, Desulfitobacterium hafniense Y51
MKGVNYSLSAERLQSFGEISLSKQVLQALSEMGFEEPSPIQKAAIPVAMDGLDLIGQAQTGTGKTAAFGIPICEKINPKFQAVQALILTPTRELAVQVSEEISKIGKYRHIKPLPIYGGQSIDRQIRALRFGSQVVVGTPGRILDHLNRGTLKLQYVKMVVLDEADEMLDMGFVDDIETILKQVPKEERQVMLFSATMPPEIKKLAQNYMSQPKSVAVSRDELTVPLIEQVFYETRDKIKVDALCRIIDMEDIGQAIIFCRTKRGVDELVAALEARGYFADALHGDLSQQQRDRVMKKFRDGKVELLVATDVAARGLDIDNVTHVINFDIPQDPESYVHRIGRTGRAGRKGQAITLVSSREYRQLRLIERLIKTRIVRKELPTLADVSERQAENLKNQLVKILQRSHLGTYRSIVGSLLEEYDSMDVAAAALKFAVEGVEERTEEEDELTFGNTGAAPGMVRLFMNIGRLQQVRPQDIVRWIADESGIPGNIIGMINIYDKFTFVEIPEQHASRVLSCMHQNMIKGRKVNVEPAKAR

SEQ ID NO: 19794 - protein, 369 aa, Yarrowia lipolytica CLIB122
MLNLRTALRAVRPVTLTRSYATSVASFTGQKNSNGKYTVSLIEGDGIGTEISKAVKDIYHAAKVPIDWEVVDVTPTLVNGKTTIPDSAIESINRNKVALKGPLATPIGKGHVSMNLTLRRTFNLFANVRPCKSVVGYKTPYENVDTLLIRENTEGEYSGIEHTVVPGVVQSIKLITREASERVIRYAYEYALSRGMKKVLVVHKASIMKVSDGLFLEVARELAKEYPSIDLSVELIDNTCLRMVQDPALYRDVVMVMPNLYGDILSDLASGLIGGLGLTPSGNMGDEVSIFEAVHGSAPDIAGKGLANPTALLLSSVMMLRHMGLNDNATNIEQAVFGTIASGPENRTKDLKGTATTSHFAEQIIKRLK

SEQ ID NO: 19795 - protein, 350 aa, Triticum aestivum
  misc_feature (203)..(203): Xaa can be any naturally occurring amino acid
  misc_feature (212)..(212): Xaa can be any naturally occurring amino acid
  misc_feature (237)..(237): Xaa can be any naturally occurring amino acid
  misc_feature (310)..(310): Xaa can be any naturally occurring amino acid
MRALPMAVSRGAVACATPAAAAAAVPRRSMLLSTAAAGAALQSDPIRLMSTPKLKLRASAGAAQAAATSFSSNDEAFTWAKKDNRRLLHVVYRVGDINKTIKFYTECLGMKLLRKRDIPEEKYTNAFLGYGPEETNFAIELTYNYGVDSYDVGAGFGHFGIATDDVAKTVELIKAKGGKVTREPGPVKGGKTVIAFIEDPDGXQFEILKSPXTPEPLCQVMLRVGDLDRAISFLREXAGGRKLLRKRDNPEYKYTVAMMGYGPEDQNAVLELTYNYGVTEYDKGSAYAQIAIGTDDVYKTAEVVKLSGGXKVVREAGPLPGIGTKITAILDPDGWKSVFVDNIDFAKELE

SEQ ID NO: 19796 - protein, 91 aa, Prunus persica
ITCGQVSSALAPCIPYVRGGGAVPPACCNGIRNVNNLARTTPDRQAACNCLKQLSASVPGVNPNNAAALPGKCGVHIPYKISASTNCATVK

SEQ ID NO: 19797 - protein, 371 aa, Epilobium brachycarpum
ERVRNGSWVGATGKELKDVIAVGIGGSFLGPLFVHTALQTDPEASKNAKGRELRFLANVDPIDAARNLSSLNPETTLVVVVSKTFTTAETMLNARTVREWISSALGPSAVAKHMVAVSTNLPLVEKFGIDPNNAFAFWDWVGGRYSVCSAVGVLPLSLQYGFSVVEKFLQGAHSIDQHFSSAPFEKNIPVLLGLLSVWNVSFLGYPARAILPYSQALEKLAPHIQQVSMESNGKGVSIDGLPLPFETGEIDFGEPGTNGQHSFYQLIHQGRVIPCDFIGVVKSQQPIYLKGEVVNNHDELMSNFFAQPDALAYGKTPEQLKKENVSEHLIPHKTFTGNRPSVSILLPTLDAYRVGQLLAIYEHRVAVQGFI

SEQ ID NO: 19798 - protein, 672 aa, Streptomyces coelicolor A3(2)
MSTPFPFTAVVGQDDLRLALLLNAVSPAVGGVLVRGEKGTAKSTAVRALSALMPEVDVVSGCRFSCDPDSPDPACPDGPHEPGAFASRPARMVELPVGASEDRLVGALDIERALAEGVKAFEPGLLADAHRGILYVDEVNLLHDHLVDLLLDAAAMGASYVEREGVSVRHASKFLLVGTMNPEEGELRPQLLDRFGLTVEVAASREPDQRVEVVRRRLAYDDDPAGFAARWADEEAAVRARIVGARELLPSVRLGDGALRQIAATCAAFEVDGMRADIVMARTATALAAWAGRTEVLAEDVRQAALLALPHRRRRNPFDAPGLDEDKLDETLEEFGGQDGDGPDGDDDPDPGPGGGPGGQPEPDDAPQGDGDAAARPEAGEGGEPQPSGSGAGEQQPARAAEPFRTKVLSVPGLGEGAAGRRSRARTEHGRTTGARRPQGALTKLHLAATVQAAAPHQRARGRSGPGLVVRRDDLRQATREGREGNLVLFVVDASGSMAARQRMSAVKGAVLSLLLDAYQRRDKVGLVTFRGSAADVALPPTSSVDAAAVRLESLPTGGRTPLAAGLLRAHEVLRVERLRDPARRPLMVVVTDGRATGGPEPVALAGRAARLFAAEGTASVVVDCESGPVRLGLAGQLAGELGGTAVTLDELRADSIAGLVRDVQGSSRRAA

SEQ ID NO: 19799 - protein, 53 aa, Medicago truncatula
MQVPASKVLQETCNYIRNLQREVDDLSLRLSQLLATIDSDSAEASIIRSLLNQ

SEQ ID NO: 19800 - protein, 373 aa, Epilobium brachycarpum
ERVRNGSWVGATGKQLKDVIAVGIGGSFLGPLFVHTALQTDPEASKNASGRKLRFLANVDPIDAARNISGLNPETTLVVVVSKTFTTAETMLNARTLREWISSALGPSAVAKHMVAVSTNLQLVEKFGIDPYNAFAFWDWVGGRYSVCSAVGVLPLSLQYGFAVVEKFLQGAHSIDQHFSSAPFEKNLPVLLGLLSVWNVSFFGYPARAILPYSQALEKLAPHIQQVSMESNGKGVSIDGLPLPFESGEIDFGEPGTNGQHSFYQLIHQGRVIPCDFIGVVKSQQPIYLKGEVVNNHDELMSNFFAQPDALAYGKTPEQLKKENVAEHLIPHKTFTGNRPSLSILLPTLDAYRIGQLLAIYEHRVAVQGFIWG

SEQ ID NO: 19801 - protein, 1301 aa, Ustilago maydis 521
MTPHASNLYISAAFNRANHIADWANAPHSIIAYAANKSIAIWDKPGHASSPGVTQLLATGFSDPITSLKFAQLNAISSHPCIVAGSAQGSLGVWAFRETHGWTRLHTIKAAHQGSISAIGVIRAFDDSFQAGSIFVSGASDGLIKVWLLLDDPSRPPMLVQTIDLKGRFPLDLSILPLPSSTAPHLLMALATTTNKIDIYASSNAASPTTDAAHQLEFQHKLSLEGHEDWVKSLDLCNTFTIADDRERVATVMLATGSQDASVRLWKLAPISQNEPTSSTQQLRSSSPTQDDDFEQMVAKIESDRSTKAGEISTRAHPFFLTCADGTQQSWAITFDALLVGHDNWVTGVRWHPAISTATGQPAQPAQPAALLSSSADNSLILWTPSAHLPEPASTSPFPAFDSTLLSTGGARRTSCPSSLHLASSIWMPSQRFGEVGGASNLGFFGALWQPWSSPSATSDIQQPASAVLAHGWGGSAHIWTLARHEATSTSPRWQVADPVTGHFAAARSLAWEPCGEYLLSCSDDQTTRLHARPMRKNAHSLDSHNATWHEVARPQSHGYDLHSVSWLDRLNFVSAADEKVLRVFAAPRGFVGTAGKSGLHCATLGSEAESRAASRPVAGQDTLLHLSVNPRFGLLASAERHGDLIKQTVQRYCNRQSDSVTAIVSSSLFQRPFDHLSFKQIELYLKWLYAQAWSVAVQRGLMLVNITVLLVPEASLERVARRLYSPDAQVLVDASLDPDSTTRWQNIGVDVRTIESDVGLQGRTEAVGQDDGKGLKCYPVVALGGTFDHLHVGHKILLTMASLIAEQKIIVGVTDDAMLTKKSDAAVLEPIDERIAAVNAFIGLVRLPFTELDQQVVKLEDVAGPAATEANLQALVVTDETLSGAEFIDGKRKENGLASVENWVIGVVGSQGQTELKGDAKALAESKIGSTAIRKWLVAQGARRVQALEATKRHRVSHQLRLSARRQDDTVDQTKDDNIAVRPVGASVPPLGLSNRAVYEGSTIEEAPSASGQPIGSAKESLSAMLRQPPCEEQLSVETLWPELEKLYGHGYEMLWVSANPPNPVDGGRTAGGGRFVASCCKATSQDHAVVRIHDRDENWRECAVLQGHSLSITRIQWSLDSRFVLTCSRDRSWRMFEKVTQAGTAQVRFVPFTGERSHARIIWDCAWSTDVSRPYVFATASRDKTIKIFELQLKQAREKPFDLLQTIKFNEAVTSVTFGADLVIAVGNEDGQVEILQRKFDSNQQPLNEWSTTLKLADIAAEQINQLAFRPPVLDDQDDAILASASEDGCVRLMRISAL

SEQ ID NO: 19802 - protein, 466 aa, Zingiber officinale
MASFVAVVLLLLLSSSALTAVSAVPHLDILPAGRSDEEVRIIYQEWRAKHRPAENDQYVGDYRLEVFKENLRFVDEHNAAADRGEHAYRLGMNRFADLTNEEYRARFLRDLSRLGRSTSGEISNQYRLREGDVLPDSIDWREKGAVVAVKSQGRCGSCWAFAAIATVEGINQIVTGDLISLSEQQLVDCSTRNHGCEGGWPYRAFQYIINNGGVNSEEHYPYTGTNGTCNTTKGNAHVVSIDSYRNVPSNDEKSLQKAVANQPISVGINASGRNFQLYHSGIFTGSCNTSLNHGVTVVGYGTVNGNDYWIVKNSWGESWGDSGYILMERNIAESSGKCGIAISPSYPIKEGATNLRNPTTSSSSVPSLVESLTACDNYYTCAGSTTCCCMYERGNRCFAWGCCPVEGATCCKDHYSCCPFNYPICSVADDNCLMSKNSPLRVKASRRTPAIPNWVLSSSGGLKSSA

SEQ ID NO: 19803 - protein, 166 aa, Megacorax gracielanus
SAILPYSQALEKLAPHIQQVSMESNGKGVSIDGLPLPFETGEIDFGEPGTNGQHSFYQLIHQGRVIPCDFIGVVKSQQPVYLKGEVVNNHDELMSNFFAQPDALAYGKTPEQLKKENVSEHLIPHKTFTGNRPSLSILLPTLDAYRIGQLLAIYEHRVAVQGFIWG

SEQ ID NO: 19804 - protein, 84 aa, Pisum sativum
MCGILAVLGCSDDSQAKRVRILELSRRLKHRGPDWSGLHQHGDNYLAHQRLAIVDPASGDQPLFNEDKSIIVTVNGEIYNHEEL

SEQ ID NO: 19805 - protein, 532 aa, Lactococcus lactis subsp. lactis Il1403
MTEIFKMPDIGEGMHEGDIANWLVKVGDVVKEDDPIAEVQNDKLMQEILSPYSGTVTKLFVEAGTTVEVDSPLVEFDGDGSGSSAAAPTPQETAGSDTATTDAPSGEAQIFTMPDIGEGMHEGDIANWLVKVGDEIKEDDPVAEVQNDKLMQEILSPYSGKVTKLFVEAGTTVEVGAPLIEYNGNGAAPAAASPAPVAEAPKAASPASPANAPLTKTTSTGHILAMPSVRHYARKAGIDLSQVPATGRHGHTTLADVKAFESGSVAPIAQTTPEAAPAPKADKPAAPVAEKAPSVKAGAGDRREAMNPTRKVVSKVMTAQHTHIPPVTNFDQVEVSKLVKHRAVFKEIAAKQDIKLTYLAYVAKALATTAHKFPDINASVDYEKQEIVYHEHVNLGIAVNAPTGLYVPVIHEAETKSILEIAKEIAELATATREGTLKPQQMQGSTITISNIGSARGSWFTPIINGSDVVILGLGSIVKEPIVNGEGEIVVGQNMKLSMTYDHRLIDGMLGQTSLNYLKSLLADPEFMLMEI

SEQ ID NO: 19806 - protein, 303 aa, Xanthomonas campestris pv. vesicatoria str. 85-10
MTASAPAASASARLLDGRRIAEELLDGLKLRVDARLAAGKARPGLAVVLVGGDPASSVYVRNKRRAAEKVGIEAFDYDLPQGTSEAQLASLIDELNADPKIHGILIQLPLPGIPDANRLIQRIDPRKDVDGFHPQNVGHLALREFGLRPCTPRGIVTLLGHTDQPVRGRNATIVGVSNHVGRPMGLELLIAGCTVTSCHKFTPPDVLEASVRNADILVVAVGRPGLIPGEWVKPGAVVIDVGINRLDDGRLVGDVGFDAAAQRAAWITPVPGGVGPMTVATLMQNTIEAADAAESGDSGLGIG

SEQ ID NO: 19807 - protein, 84 aa, Pisum sativum
MCGILAVLGCSDPSRAKRVRVLELSRRLKHRGPDWSGLHQHGDCFLAHQRLAIVDPASGDQPLFNEDNPSIVTVNGELYNHEDL

SEQ ID NO: 19808 - protein, 326 aa, Lactococcus lactis subsp. lactis Il1403
MAVKTYIAAITEALDLALEKDKDALIFGEDVGQNGGVFRATDGLQAKYGEERVFNTPLAESGIGGMAIGLATQGFHPIMEIQFGTFIFEVFDSIAGQMSRTRYRFNNTRSNNIVVRTPYGIGTKTPEMHADSIEGLFSQIPGIRVVMPSNPADAKGLLLASIENNDPVIFLENLHLYRSLKGEVPEGYYTTPLDTAAVAKEGSDVSIIAYGGTVPLALKAAEQLEKDGIKAEVLDLRTVAPLDIESIGKTVEKTGRVVVVQEAQRTAGIAANVMAEISERFVLNLKAPIGRVSGPDSIFPFAQAENDWAVKAEDIVNKVKEVVDYD

SEQ ID NO: 19809 - protein, 602 aa, Glycine max
  misc_feature (403)..(403): Xaa can be any naturally occurring amino acid
MPTWWGKKSSKTKDQQHQQQQDHPHGAAATTTLLHFNFIKPKPSKSFDDVVRNSPRASRDFGSSAAVDQGLPLPRPSVFSTQSFAIDQGLVFGSASVSGSSVSSSGSYDDHPQINASRGQGDMKFLVRSKSPGPGSRGPTSPTSPLHPKLLGLSLDSPTGRQEGECHPLPLPPGSPTSPSSSLPSMRANGMTEHTTSNLSKWKKGKLLGRGTFGHVYLGFNSDSGQLSAIKEVRVVCDDQSSKECLKQLNQEIHLLSQLSHPNIVQYYGSDLGEETLSVYLEYVSGGSIHKLLQEYGAFKEPPVIQNYTRQIVSGLAYLHGRNTVHRDIKGANILVDPNGEIKLADFGMAKHINSSASMLSFKGSPYWMAPEVVMNTNGYSLPVDIWSLGCTIIEMATSKPPXNQYVRVAAIFKIGNSRDMPEIPDHLSSEAKNFIQLCLQRDPSARPTAQKLIEHPFIRDQSATKATNVRITRDAFPYMFDGSRTPPPVLDHSNRTSLTSFDGDYATKPIPVTSRTVRSPRDNTRMITSLPVSPCSSPLRQYGPAHKSCFLSPPHPTYTLMGQNTLPSYPVRSNATFTLDPFHETAFYKAHTPGGSPRRLI

SEQ ID NO: 19810 - protein, 354 aa, Thinopyrum ponticum
MDGNKGPVVVTGASGFVGTWLVMKLLQAGYTVRATVRDPANVEKNKPLLELPGAKERLSIWKADLSEEGSFDDAIAGCTGVFHVATPMDFDSQDPENEVIKPTVEGMLSIMRACKEAGTVKRIVFTSSAGSVNIEERQRPAYDQDNWSDIDFCRRVKMTGWMYFVSKSLAEKAAMEYASENGLDFISIIPTLVVGPFLSAGMPPSLVTALALITGNEAHYSILKQVQLVHLDDLCDAMTFLFEHPEANGRYICSSHDATIHGLAKMLGDRFPEYSIPQKFAGVDDDLQPIHFSSKKLLDHGFSFRYTAEDMFDAAIRTCREKGLIPPGDVPAPAAGSKLGALAAGGGQAIGAET

SEQ ID NO: 19811 - protein, 349 aa, Rosa hybrid cultivar
MASESESVCVTGASGFIGSWLVMRLLDRGYTVRATVRDPANKKKVNHLLDLPKAATHLTLWKADLAEEGSFDEAIKGCTGVFHVATPMDFESKDPENEVIKPTINGVLDIMQACLKAKTVRRLVFTSSAGSVNVEETQKPVYNESNWSDVEFCRRVKMTGWMYFASKTLAEQEAWKFAKENNIDFITIIPTLVIGPFLMPSMPPSLITGLSPLTGNESHYSIIKQGQFIHLDDLCQSHIYLYEHPKAEGRYICSSHDATIHEIAKLLKGKYPEYNVPTTFKGIEENLPKVHFSSKKLLETGFEFKYSLEDMFVGAVDACKEKGLLPPPTERVEKQEVDESSVVRVKVTG

SEQ ID NO: 19812 - protein, 73 aa, Arachis hypogaea
PDKISEKVEKSIKEAEEACTDNPASNECAAAWDEVEELSAAASHARDKKKESDPLENYCKDNPETDECRTYDN

SEQ ID NO: 19813 - protein, 314 aa, Corynebacterium diphtheriae
MTDTTAGTIHDVAIIGSGPAGYTAALYAARAELKPIVFEGIEYGGSLMTTTEVENFPGFPEGIMGPELMQNMREQAEKFGAELRMELVTKVELEGDIKKIWVDDQEFQARTVILATGSAPRYLGVEGEQTLLGRGVSACATCDGFFFRDHHIAVIGGGDSAMEEADFLTKFGSKVSIVHRRDEFRASAIMLERAKNNPKIEFVTNKTVSKVLGDTTVSGLELTDTVTGETSVLDATAMFVAIGHDPRSAMFRDVVTTDAAGYVVVEHPSTKTNVPGVFAVGDLVDNHYQQAITAAGSGCRGAIDAEHYLAALNS

SEQ ID NO: 19814 - protein, 956 aa, Rhodobacter sphaeroides 2.4.1
MSFTPTDYNAYDFANRRHIGPSPSEMEEMLRVVGVSSLDQLIEETVPASIRQETPLDWAPLAEHELLARMREVAAKNRVMTSLIGQGYYGTVTPPAIQRNILENPAWYTAYTPYQPEIAQGRLEALLNYQTMVADLTGLPVANASLLDEATAAAEAMTMAERASKSKARAFFVDADCHPQTISVIRTRAEPLGIEVIVGHPAQLVPEDVFGALFQYPGTYGLVRDFTRDIAALHEAKALAVVATDLLALCLLKEPGAMGADIAIGSSQRFGVPMGYGGPHAAFMSCKDDLKRSMPGRLVGVSVDARGNKAYRLALQTREQHIRREKATSNVCTAQALLAVMASFYAVFHGPRGLRAIAERVHLNTVRLATALKEAGARVSPEAFFDTITVEVGVGQAGILAAARHRGINLRKVGRDRVGISLDETTDAGVIARVLDAFGIHEPAPAKVGLGFPEPLLRETGYLSHPVFQMNRAESEMMRYMRRLSDRDLALDRAMIPLGSCTMKLNAAAEMMPITWPEFGTLHPFAPADQAAGYHEAIGDLAQRLCRITGYDAMSMQPNSGAQGEYAGLLTILAYHRARGDAERTICLIPVSAHGTNPASAQMAGMKVVVVKSAPNGDVDLEDFRDKAAAAGDRLAACMITYPSTHGVFEETVREVCRITHEHGGQVYIDGANMNAMVGLVQPGAIGGDVSHLNLHKTFAIPHGGGGPGMGPIGVKAHLAPYLPGHPEVTGPLTGGHDEAADEGPVSAAPYGSASILLISWAYCLMMGGEGLTQATRVAILNANYIAARLRGAYKVLFMGNRGRVAHECILDTRPFAEAGVTVDDIAKRLIDNGFHAPTMSWPVPGTLMVEPTESETKAEIDRFVAALLAIREEIRAVEEGEIAAADSPLRHAPHTVEDLVADWDRKYPREQGCFPPGSFRVDKYWPPVGRVDNAWGDRNLVCTCPPVESYSIAAQ

SEQ ID NO: 19815 - protein, 354 aa, Triticum aestivum
MDGNKGPVVVTGASGFVGSWLVMKLLQAGYTVRATVRDPANVEKNKPLLELPGAKERLSIWKADLSDEGSFDDAIAGCTGVFHVATPMDFDSKDPENEVIKPTVEGMLSIMRACKEAGTVKRIVFTSSAGSVNIEERQRPAYDQDNWSDIDFCRRVKMTGWMYFVSKSLAEKAAMEYASENGLDFISIIPTLVVGPFLSAGMPPSLVTALALITGNEAHYSILKQVQLVHLDDLCDAMTFLFEHPEANGRYICSSHDATIHGLARMLRDRFPEYSIPHKFAGVDDDLQPIHFSSKKLLDHGFSFRYTAEDMFDAAIRTCREKGLIPLGDAPAPAAAGKLGALAAGKGQAIGAET

SEQ ID NO: 19816 - protein, 107 aa, Corynebacterium diphtheriae
MSNAIALTQDTFKSIVIDSDKPVLVDFWAQWCGPCKKLGPIIDEIAEELGDEVLVAKVDVDAERNLGAMFQIMSIPTVLIFKDGQKVSEFVGVRPKSEIVAKLRSFL

SEQ ID NO: 19817 - protein, 354 aa, Thinopyrum ponticum x Triticum aestivum
MDGNKGPVVVTGASGFVGSWLVMKLLQAGYTVRATVRDPANVEKNKPLLELPGAKERLSIWKADLSDQGSFDDAIAGCTGVFHVATPMDFDSQDPENEVIKPTVEGMLSIMRACKEAGTVKRIVFTSSAGSVNIEERQRPAYDQDNWSDIDFCRRVKMTGWMYFVSKALAEKAAMEYASENGLDFISIIPTLVVGTFLSAGMPPSLVTALALITGNEAHYSILKQVQLVHLDDLCDAMTFLFEHPEANGRYICSSHDATIHGLATMLRDRFPEYRIPHKFPGVDDDLQPIHFSSRKLLDHGFSFRYTAEDMFDAAIRTCREKGLIPLGDAPPPAAAGKLGALAAGEGQAIGAET

SEQ ID NO: 19818 - protein, 284 aa, Geobacter metallireducens GS-15
MDEGSGRKSAGLMDMFGRFLTGKKRITEEEIQDIIDASEEEGLINPEENEMIRSIFELRDTVVREIMVPRTDMACVSADTSVGEVLRTIITCGHSRIPVYDGTVDNIIGLIYAKDLLKYWGMGDSSINIRRIMRTPYFIPESKNLEELLQEFKRKRVHIAIVIDEYGGTSGLVTIEDLLEQIVGDIQDEYDLEEDWIVEEPDGSVLVDARLPIEDLEERFGIEIEREKFDTVAGLIFHLTGRIPKVGEEIENDALRMTVLEGGERNIRKVRVARRAGASEETEG

SEQ ID NO: 19819 - protein, 471 aa, Arabidopsis thaliana
MEEPVDREDIDLRVSSTDIGWNEFAAASKRLVPFSSQIYSRCGASVTSSYSISHSIGGDDLSSSTFGTSSFWRSMATFTRNKPHVNVGTIGHVDHGKTTLTAAITKVLAEEGKAKAIAFDEIDKAPEEKKRGITIATAHVEYETAKRHYAHVDCPGHADYVKNMITGAAQMDGGILVVSGPDGPMPQTKEHILLARQVGVPSLVCFLNKVDVVDDPELLELVEMELRELLSFYKFPGDDIPIIRGSALSALQGTNDEIGRQAILKLMDAVDEYIPDPVRVLDKPFLMPIEDVFSIQGRGTVATGRIEQGVIKVGEEVEILGLREGGCSTKSTVTGVEMFKKILDNGQAGDNVGLLLRGLKREDIQRGMVIAKPGSCKTYKKFEAEIYVLTKDEGGRHTAFFSNYRPQFYLRTADITGKVELPENVKMVMPGDNVTAVFELIMPVPLETGQRFALREGGRTVGAGVVSKVMT

SEQ ID NO: 19820 - protein, 432 aa, Zymomonas mobilis subsp. mobilis ZM4
MLKAFCQGEKSNMRRVVATGLGMVTSLGGDVETTWSNILASKSGAGRITRFDPEGFACTVACEVKPADHEYGFDPSKRVDSKTIRQVEPFIIYGIDAAGQALEDAGLMDMSEEEKLRTGLSIGAGIGGLPRIEKESIICHEKGPRRVSPHFVHASLINLTAGQVSIRYGLKGPNHAVVTACSSGCHSIGDASWMIRMGYADVMVAGGSESAICPLGIAGFSQAHALSTGHNDTPEKASRPYDKGRDGFVMGDGAGIIILEEYEHAKARGAKIYGEIIGYGMTGDAYHVTAPQPDGDGAYRSMKMALEQANLTTADIDYINAHGTSTPMGDEIEANAVRRLFGDDIKNMSMSSTKSAIGHLLGGAGAVETIFCLLAMRDQIAPPTINLENPSDGLAGFDLVPNVPKKRSIKAVLNNSFGFGGTNASLIFKAVD

SEQ ID NO: 19821 - protein, 374 aa, Thermoplasma volcanium GSS1
MKDVIVIGAGPSGSYAAYRLSKMGLDVLLLEEHKEVGKPVECTGLVSKRVLDFVKTRSIAGKVYGANIYFPNGKSIHVEKNDETIVLYRDSFDKDVAAMAIGAGADIRINARAISVKENNDSVTVKYRDSGQLKEDNAKVVIGADGINSVVRRDLYRIRQEKVVSTLQYDMAGKIEDERSVNVYLGSKYTHGFFGWAVPGGEIIRVGTGSYRASAYPYMKALSKRFGTNRVLGITGAGIPIKIAKSLFTKRSVLIGDAGGIVKPLSGGGIYTGIFSANLASERVANAIENEDYSQLRHYDKDIRGSIGVELKKDGFIQSIYSKIGDRSFDRIYGLISSEKIIDTINRSGDIDYPSKVIFKVLIRNPALLYSMWK

SEQ ID NO: 19822 - protein, 484 aa, Silicibacter pomeroyi DSS-3
MKFQPEASHFINGAYVEDTAGAVIDVIYPATGEVIARLHSATPAIIDQALEAARQAQAQWAAMTGTERGRILRRAADIMRARNHDLSVIETHDTGKPIQETTVADATSGADALEYFGGLAGSLTGEHIPLGGGDFAYTVREALGVCVGIGAWNYPTQIACWKGAPALACGNTMVFKPSETTPLSALKVAEILIEAGAPKGIYNVVQGYGDVGASLVTDPRVAKVSLTGSVPTGRRVYAAAAESIKHVTMELGGKSPLVVFDDADIENAVSGAILGNFYSSGQVCSNGTRVFVQKGIKEAFLSRLAERLATAVIGDPMDPATNFGPMVSEAQMNIVLGYVDKGKAEGARLVYGGTRLDRDGFYLLPTVFADVTDDMTIAREEIFGPVMSVLDFDTEEEVLERANATEFGLAAGVFTRDITRAHRMVAGFEAGTCYINSYNLAPVEAPFGGSKQSGVGRENSKLAINHFSEMKTVFVSMNDIQAPY

SEQ ID NO: 19823 - protein, 592 aa, Thermoplasma volcanium GSS1
MVFMHVAVLDKDRCHPKKCHHECQYYCPPVRNHVMAIDFPDPDGQPLISETLCIGCGICIRRCPFGAIRIVTLPDELNKNVFHRYGVNGFRIYSLPTVVPGKVSAILGQNGLGKTTTLNILSGITVPNLGNYDKPPSKDAVIDRFARTTMGAYFKGLYEENKRAVLKNQYVDYIPKVVSGTIGEILRKNNENGNFDEVVSLLNLENALSKDVKECSGGELQKLAIGTTLEKEADIYLFDEMTSYLDIGERLNVSNIVQDLSKKKTVIVVEHDLAILDWLADSVNIVYGDPGVYGIFSEPLSTNRAINAYLSGFLREENVRIRSYPIEFEEKSSKRDKFEHILITWTDIKKKLGDFSLDVHAGQIHTGEISGVLGRNALGKSTFVMMLAGVMNPDEGSISQNVKVSYKPQYISTDFKGTVSDLIASALKDRAEDTYVKNEIFHPLNIPDIMENPVDGLSGGEMQRLSIAITLSREADVYLIDEPSAHLDSSYRMVVAKVIRRVMENTKKTALVVDHDIYLIDLISDSLIVFSGEPGSHGASDGPMDMKEGMNRFLKMVGVTFRRDQSSNRPRINKKGSSLDRLQKEENRYYYA

SEQ ID NO: 19824 - protein, 364 aa, Shigella flexneri 2a str. 301
MMSKNYHIAVLPGDGIGPEVMTQALKVLNAVRNRFAMRITTSHYDVGGAAIDNHGQPLPPATVEGCEQADAVLFGSVGGPKWEHLPPDQQPERGALLPLRKHFKLFSNLRPAKLYQGLEAFCPLRADIAANGFDIQCVRELTGGIYFGQPKGREGSGQYEKAFDTEVYHRFEIERIARIAFESARKRRHKVTSIDKANVLQSSILWREIVNEIATEYPDVELAHMYIDNATMQLIKDPSQFDVLLCSNLFGDILSDECAMITGSMGMLPSASLNEQGFGLYEPAGGSAPDIAGKNIANPIAQILSLALLLRYSLDADDAASAIERAINRALEEGIRTGDLARGAAAVSTDEMGDIIARYVAEGV

SEQ ID NO: 19825 - protein, 369 aa, Brassica juncea
MSVSAIGFEGYEKRLEVSFFEPSLFVDTHGKGLRALPKSQIDEILAPAECTIVSSLSNDELDSYVLSESSLFIFPYKIIIKTCGTTKLLPSIEPLLRLAGELSLEVKSVRYTRGSFLCPGGQPFPHRNFSEEVSVLDGHFAKMGLSSVAYLMGDDDETKKWHVYSASAPARNGNGNNNNNVYTLEMCMTGLDKEKASVFYKNESSSAGSMTDNSGIRKILPQSQICDFEFEPCGYSMNSVEGDAISTIHVTPEDGFSYASFEAVGYDFTTMDLSHLVSKVLTCFEPKQFSVAVHSSVAQKSYDSGLSVDLEDYGCRETTIELLGEERGTVMYQSFEKLGRYCGSPRSTLKCEWSSSSSCTSEDEKEEGI

SEQ ID NO: 19826 - protein, 523 aa, Shigella flexneri 2a str. 301
MSQQVIIFDTTLRDGEQALQASLSVKEKLQIALALERMGVDVMEVGFPVSSPGDFESVQTIARQVKNSRVCALARCVEKDIDVAAESLKVAEAFRIHTFIATSPMHIATKLRSTLDEVIERAIYMVKRARNYTDDVEFSCEDAGRTPIADLARVVEAAINAGATTINIPDTVGYTMPFEFAGIISGLYERVPNIDKAIISVHTHDDLGLAVGNSLAAVHAGARQVEGAMNGIGERAGNCSLEEVIMAIKVRKDILNVHTAINHQEIWRTSQLVSQICNMPIPANKAIVGSGAFAHSSGIHQDGVLKNRENYEIMTPESIGLNQIQLNLTSRSGRAAVKHRMDEMGYKESEYNLDNLYDAFLKLADKKGQVFDYDLEALAFIGKQQEEPEHFRLDYFSVQSGSNDIATAAVKLACGEEVKAEAANGNGPVDAVYQAINRITDYNVELVKYSLTAKGHGKDALGQVDIVTNYNGRRFHGVGLATDIVESSAKAMVHVLNNIWRAAEVEKELQRKTQHNENNKETV

SEQ ID NO: 19827 - protein, 525 aa, Graphium sp. ATCC 58400
MMDPFYLLGGCCVFGIVYKSVATLYVNYVHGKTARELGCKPLPKERTRFFGLDILRREMKADREMYLPSDIMTRFEEVGATTYEYQMLNEKHIATCDPLVIQTVLATQFKEFTFGNRPWGTVLGNGIFSIDNIGDNKEWLHTRAMLKPQFLRNQVSDLELEEGHVRNFMSVLKVGDDGWTPKVNLQHMFFNFTLDSATEFLFGKSADCQLLFAPGGDPKGVSKPLRAFLKALDVAKETVNTKWFLGNNGWIADSPTFRKNCAYVNDFMDALIAKTKAELEAKPKGSKPSGGREKYHFLHAMLDETDDKVELRGQALNILLAGRETTASLLGWLWYYLARHPIEFQKLRAAVLKDFGTAENPKPMSFESLKACDQLQYCNNEILRLFPLVSYNSRMALTDTTLPRGGGPDGNSPIFVKKGQQIVYHPHAMHRRKDIWGQDADEFRPDRWKTLRPGWEYIPFNGGGRICMGQQFALTEASYLTVRLLQRFDRIENLDPNPVLKQKFRIVNTPGEGVLVRLHEAAAGA

SEQ ID NO: 19828 - protein, 256 aa, Thauera aromatica
MSVVLVEQPTPDVAVVRLNRPDARNALNQEVRSALAEHFDRLGQAAEVRCIVLTGGERCFAAAPDIRAMADAGAIEIMLRQTQRLWQAIAACPKPVIAAVNGYAWGGGCELAMHADIIIAGEGASFCQPEVKVGIMPGAGGTQRLTRAVGKFQAMKMVLTGLPVSARERLAMGLASEVVADDAVQARALELARHIATLPPLAIAQIKEVLLAGQDASLDTALMLERKAFQLLFASADQKEGMRAFLEKRPPVFRGG

SEQ ID NO: 19829 - protein, 420 aa, Saccharum officinarum
MDKLSGSVRLMIVSDLDHTMVDHHDEENLSLLRFGALWESVYCEDSLLVFSTGRSPTLYKELRKEKPMLTPDITIMSVGTEITYGEAMVPDDGWEQYLNNKWDRNIVVEETASFSELKLQPETEQRPHKVSFLVDKKSAQEVIKSVAERLDKRGLDAKIIYSGGQDLDILPQGAGKGQALAYLLKKLSSCGKPPNNTLVCGDSGNDAELFSIPGVMVSNAQEELLQWYAENAKDNPKIIHANERCAAGIIQAIGHFKLGPNISPRDVDFPYAKEASFKPSDAVVKFYVLYEKWRRAEVPKSDSVIKYFKNITHANGVIIHPAGLELSLHASIDALGSCYGDKQGKKYRAWVDRLAITQTGSDSWVVRFDLWESEGDVRVCSLSSLALVLKAESPEGFVLTHIQKTWLNGYSSGVEQAFKV

SEQ ID NO: 19830 - protein, 281 aa, Megacorax gracielanus
ERVRNGSWVGATGKELKDVIAVGIGGSFLGPLFVHTALQTDQEASKNARDRELRFLANVDPIDVARNISGLNPETTLVVVVSKTFTTAETMLNARTLREWISSVLGTSAVAKHMVAVSTNLPLVEKFGIDPNNAFAFWDWVGGRYSVCSAVGVLPLSLQYGFAVVEKFLQGAHSIDQHFSSAPFEKNIPALLGLLSVWNVSFLGYPARAILPYSQALEKLAPHIQQVSMESNGKGVSIDGLPLPFETGEIDFGEPGTNGQHSFYQLIHQGRVIPCDFIGVV

SEQ ID NO: 19831 - protein, 357 aa, Cryptococcus neoformans var. neoformans JEC21
MPTVLLTGITGFLSAHVAHTFLKHDWIVHGTLRSSSKVALIEVIPEYSPYISSGKLKLFVVGPLENADYTEAMKGVDAVVHTASPVEFGGDNFRESHLKPALEGTRGVLRAVAKEKNVKSVVYTSTFGAVGDHRYHPTEIKGKVITEDNWNPYTLEELDKMVESGESGNPTFPPGYLFYKGAKKYAELAAWECQKEAREQGAEWSLATMNCVMIWGPPIQPLTSLSHGGMSTEFLWMLAGGKDAHIMDSLYPYYVDVRDAAEAHYQATVRRAQGRFIISAGPYDFQEFADMLRELYPEQKERFALGAPGKYMYRDPGVYVLTNEKSQRELGITYRPKQETLKDAFDRFFALEKQGLK

SEQ ID NO: 19832 - protein, 371 aa, Hauya elegans
ERVRNGSWVGATGKELKDVIAVGIGGSFLGPLFVHTALQTDPEASKNARGRELRFLANVDPIDVARNISGLNPETTLVVVVSKTFTTAETMLNARTLREWISSALGPSAVAKHMVAVSTNLPLVEKFGIDPNNAFAFWDWVGGRYSVCSAVGVLPLSLHYGFAVVEKFLQGAHNIDQHFSSAPFEKNIPVLLGLLSVWNVSFLGYPARAILPYSQALEKFAPHIQQVSMESNGKGVSIDGLPLPFETGEIDFGEPGTNGQHSFYQLIHQGRVIPCDFIGVVRSQQPVYLKGEVVNNHDELMSNFFAQPDALAYGKTPEQLQKENVPQHLIPHKTFTGNRPSLSILLPSLDAYRIGQLLAIYEHRVAVQGFI

SEQ ID NO: 19833 - protein, 196 aa, Petunia x hybrida
EANKLVSLSEQELVDCDNGENQGCNGGLMDLAFDFIKKKGGITTEENYPYMAADGKCDLKKRNTPVVSIDGHEDVPPNDEESLLKAVANQPVSVAIEASGSDFQFYSEGVFTGDCGTELDHGVAIVGYGTTLDGTKYWTVRNSWGPEWGEKGYIRMQRDIDAEEGLCGIAMQPSYPIKTSSDNPTGTPAATPKDEL

SEQ ID NO: 19834 - protein, 416 aa, Ralstonia metallidurans CH34
MALIVHKYGGTSMGSTERIKNVAKRVAKWHRAGHRVVVVPSAMSGETNRLLGLAKEISAQPDPRELDMLASTGEQASVALLAIALHGEGIDAVSYTGWQVPVKTDSSYTKARIESIDDERILGDLDAGKVVVVTGFQGIDGDGNITTLGRGGSDTSAVAIAAAIEADECLIYTDVDGVYTTDPRVVEDARRLDQITFEEMLEMASLGSKVLQIRSVEFAGKYRVKTRVLSSLTDPLMPLEQEMHSGTLITFEEESEMEAAVISGIAFARDEAKITVLGVPDKPGIAYQILGPIADANIDVDMIIQNQSVDGKTDFTFTVPRGDYQRALTILNDNVKGHIGAESVSGDPKVSKVSVVGVGMRSHVGIASKMFRTLSEEGINIQMISTSEIKISVLIDEKYMELAVRALHKVFELDQA

SEQ ID NO: 19835 - protein, 269 aa, Lopezia grandiflora
ERVRNCSWVGATGKELKDVIAVGIGGSFLGPLFVHTALQTDQEASKNARGRELRFLANVDPIDVARNISGLNPETTLVVVVSKTFTTAETMLNARTLREWISSALGTSAVAKHMVAVSTNLPLVEKFGIDPNNAFAFWDWVGGRYSVCSAVGVVPLSLQYGFGVVEKFLQGAHSIDQHFSSAPFEKNIPVLLGLLSVWNVSFLGYPARAILPYSQALEKLAPHIQQVSMESNGKGVSIDGLPLPFETGEIDFGEPGTNGQHSFYQLIHQ

SEQ ID NO: 19836 - protein, 506 aa, Moorella thermoacetica ATCC 39073
MGIWRTKKIADLMQEAGDNQKLKRSIGTPELVALGVGAIIGSGIFVLTGVAAANYAGPALVFSFILSGLAAGLAALVYAEMAAMIPVTGSAYTYAYASLGEIIAWLVGWNLVLEYLVASGAVAVGWSGYITDMLASVGVFLPRALVNSPLSGGLVNLPAILITVVMTGVAIVGTTTSARTNKIIVGVKILVILAFLALGAPRVNPAYWHPFLPFGVTGVVHGAAIIFFAYIGFDAVATAAEEVRDPARELPLGIIGSLALATILYVAVTIVLTGLTPYTNLNTPSPVTTGLLAAGVRGASLIVGTGALAGLTSVLLVNIFAQSRVFMAMGRDGLLPPLFTRVHPRFHTPWLTTLIVGAFITLIGGFLPVDIIAELANVGTLSAFFVVSVGVMVLRRTQPDLKRPFKVPLMPWTPLLAIAFAVYLFFNLPGLTWIRFGVWVTLGLVVYFAYGRRHSVLAREEESKAVPRPTYRPSPLEMPAPARKPFPFKLPAPDLLRMFLPRWRRD

SEQ ID NO: 19837 - protein, 150 aa, Triticum aestivum
MDMPGKDEYVYGYEYEFDLENPASAVRRDAARFISKVRYDGELAVHPRVAYLALNYVDRFLSKGQLPFERKPWAPRLLAISCLSIAAKMQRVDAISMDYIQRDEEFMFDAVTIQRMERVVLGALEWRARSVTPLAFLGFFLSACFPPPRH

SEQ ID NO: 19838 - protein, 287 aa, Ashbya gossypii ATCC 10895
MSSVAVVLNNATTIDAGPELRGVFERCVPFLDAQRSVLDIILLEPFDSPTSLDLTLLKIYGTSRNILLKQKLYTTPINVLFNVSMEAYSRMKWDVVFLSDRLLQDAFPHRQIELFDSPAMAAAGPVESGGRDKYAVSALGGTFDHLHDGHKILLSVAALVTASRLIVGITDEELLRNKKYREQLQSFDERCDNVCSFLHRLKPGLEIKIFALHDVCGPTGSEPGIEALVVSEETVAGAQTINDTRESKGMRKLAVHVVNVLGGEEADKWKNKLSSTELRRRLMNEDS

SEQ ID NO: 19839 - protein, 230 aa, Lopezia grandiflora
AILPYSQALEKLAPHIQQVSMESNGKGVSIDGLPLPFETGEIDFGEPGTNGQHSFYQLIHQGRVIPCDFIGVMKSQQPVYLRGEVVNNHDELMSNFFAQPDALAYGKTPEQLKKENVSEHLIPHKIFTGNRPSLSILLPTLDAYRIGQLLAIYEHRVAVQGFIWGINSFDQWGVELGKSLATQVRKQLHASRVNGEAVEGFNFSTKTLLTRYLKETSDVPADPSTLLPKI

SEQ ID NO: 19840 - protein, 951 aa, Erythrobacter sp. NAP1
MIRTILLGGAAACALTASVPAFAEAHIETVAEAPTLSAPAIEYTMWTLDNGLRVIAIEDDTTSTVTTSLWYDIGSKLDPDGRSGFSHLFEHILSRKTENMPYNMIYGLTADIGGTRNASNWIDRTNYFEQVPAAYLETMLWTHRERMANVVVDEEVFETERGVVKEELRQRVLAPPYGRLQRFILPENAYDVMPHRRPGIGSIEDLDNATLDDARAFYEAYYGPDTATLIVAGNFEMENLRTLVDQYFADIPPRANPVDLTIETREPEATGPRTVNATAPNVPLPVVGGVWKAPPTTHEDAAALQVLGAILGRGDNSRLDKALVRTGQAVQTASSIQMFREAGQIGIYAIVRGAPQMEAAGATLDGELERVRTELVTDAELAEAKNEIVSSTLSRRETARGRAFELGEALVSSGDPDFADKRLAEIVEVTAEDVMRVAATYLDPMKRVTITYTAGEDDPDAYANPTPMPAFRSLPPAVGEIREVKPEGERMAPPGPGETPEVASPEIFEGTLSNGIPVVAVQTGDVPIATISMIVPGGSKTDPRELAGVANMAASLADKGVNGMDAGAIAARFESLGANFGGGSSNDGTSFFLTAPTANLAEAGELAASIVRGAIYPDEEFERERTRAIDGLKVALQDPGSLSGFVRRVAMYGDAPYGSQPGGTAESLAAITRDDLLDYRQRFIHPDRMKIVISGGISPENAMATAEAMFGDWQTDLLPRPIPEEAAGSALPVRTIVIDMPDAGQAAVSASVRAPSRTGEDYWALELANSVLGGGSSGRLFEEVRTKRSLSYGAYSGFGDRMDDAILSASAQTKNETADEVVQIFLDEFARLGNEPLSDDLLERRRLYMTGGYARALETSGGFNNIVAGLLQQGLTAEEAALYSQRLADVTPNAASAAARSYVDPAMATVVVVGDASQFLDDLKAIRPDVEVIPASELDLTTADLRLNAGG

SEQ ID NO: 19841 - protein, 85 aa, Candidatus Phytoplasma solani
VTAKKLFDTLKENYRIHLDLQDKTPGWKFSQYELKGVPLRIEIGKRDLAQDEVTVFQRYNFSKQNFKITTLKQQIPVLLKTIHNN

SEQ ID NO: 19842 - protein, 184 aa, Triticum aestivum
  misc_feature (166)..(166): Xaa can be any naturally occurring amino acid
  misc_feature (173)..(173): Xaa can be any naturally occurring amino acid
NKFVQKSRLLPVRNSRDIVDPRVRLDGMLSFVLLDTRDKSFIAARDALGICPLYMGWGLDGSVWFSSEMKALSDDCERFISFPPGHLYSSKTGGLRRWYNPPWFSESIPSAPYDPLLIRESFEKAVIKRLMTDVPFGVLLSGGLDSSLVASVVSRHLAETKSCQAXGNKLHTXFCIGLEGSPDL

SEQ ID NO: 19843 - protein, 140 aa, Glycine max
MAKKRKRSSDAPAPAAVEKPDDSAPERPERTLFGFKDSADDPASKDAGQFFRNKEKVLITCSRRIIYRYRHLMQNVVSLLPHAKKDSKVESKQSKGSALNELVELRSCSSCLFFECRKQKDLYLWMVKSPAGPSVKFLVN

SEQ ID NO: 19844 - protein, 388 aa, Thermotoga maritima
MEELREAFEEGKPVILIDRNRENEADFVFPAQLITEDVVSFFVTYGKGLFCVTADEEDLLKRGFVKLSSNYGANYFVPVDWGTGTGISALERAETCRKLAEGRYFHEFRYPGHVTVIGGIGFQRRKGHTEASLEISELAGFSRHAVIVEILDEKGNSHNLDYVLKLSEKFSLPVLEMDDVWREFVKRKLLMKKKAEATLPTDFGVFKVVSFENHLDGKEHFAIVKEPLEDPVAVRIHSECVTGDVLSSLRCDCGSQLANFLRYMSAHGGILIYLRQEGRGIGLSNKIAAYSLQDKGLDTVEANRVLGFSEDERDYAPAAQILKALGIERVLLFTNNQRKTVGLEKYGIEVVETKRLYGRVTPHNRFYLSTKMKKLGHELEEIFREVNS

SEQ ID NO: 19845 - protein, 729 aa, Pisum sativum
MAVSTISLYASPPSSVCSAPHQISPHASYDFDFGSRSSSPASTATATASTSAKPMIGGLSCLFSSSVAMKHVPLASSFSGGDEDELKELGSSFSYSPSKFGGSWKRDYQNQIQSPVSVFQCPVSCGSSMGTVRSSRSSAGGFFEGFVRRALGSSCLEYDSTGVRLRRGGGGGGEFDGGSSSALVDELTFNLEDTFIEGCFGFEFEPYAKKLLMSAQLRHKIFCEEFVIKAFCEAEKAHRGQMRASGDPYLQHCLETAVLLALIGANSTVVAAGLLHDTLDDAFLTYDYIFGMFGAGVADLVGGVSKLSHLSKLARDNNTASKSVEADRLHTMFLAMADARAVLIKLADRLHNMMTLDALPVAKQQRFAKETLEIFAPLANRLGIANWKEQLENLCFKHLNPVQHMELSSKLVESYDDAMIASAINRLEQALKDEGISYHVISGRHKSLYSIYCKMLKKKLTIDDIHDIYGLRLIVEKEEDCYKALKVVHQLWLEVPGKLKDYIRGPKFNGYQSLHTVVMGEGKIPLEVQVRTKDMHSQAEFGFAAHWRYKEDHCQLSSYVLQMVEWARWVVTWQCEAMSKDSTSVGCVDSIKPYCKFPSHADNCPYSYKPDCAQDGPVFVIMIENDKMSVQEFCANSTVLDLLERAGRASCRLTTYRFPLKEELRPRLNHKPVSDPNCKLKMGDVVELTPAIPDKYLTEYREEIQRMYDRGLTVSKMGTTTASSMVGTS

SEQ ID NO: 19846 - protein, 367 aa, Bordetella parapertussis
MFSRLQEFFMTHQIAVLPGDGIGPEIVEQAERVLKALDLPLELRQAPVGGAAFDQFEHPLPPATLELAQGSHAVLFGAVGDWKYDTLPREFRPEQAILGLRKALGLFANLRPAILYPELASASSLKPEIVSGLDILIIRELTGDIYFGTPRGVRTAADGAFAGEREGYDTMRYAESEVRRIARIGFESARKRNKKLCSVDKANVLETSQFWRDLVIEVSRDYPDVELSHMYVDNAAMQLVRNPRQFDVIVTGNLFGDILSDEAAMLTGSIGMLPSASLNAAGQGLYEPSHGSAPDIAGQGIANPLATILSAAMLLRYSLNLAPQADRVEAAVRKVLADGLRTADIHEAGTTKVSTSQMGDAVLKALG

SEQ ID NO: 19847 - protein, 337 aa, Mesorhizobium sp. BNC1
MTVKVAVNGFGRIGRNIVRAIYESGRKDIDVVAVNDLGPVESNAHLLRYDSVHGRFPGEVKVEGDSISIGADSFKVLAERDPSKLPWKDLGVDIVLECTGLFTSKDKASAHLAAGAKRVLVSAPADGADITVVYGVNHDKITKDHVVLSNASCTTNCLAPVAKVLNDAFGIEKGFMTTVHSYTGDQPTLDTMHKDLYRARAAALSMIPTSTGAAKAVGLVLPELNGKLDGVSIRVPTPNVSVIDFKFVPKRKVTVQEVNEALVAAATEGPLKGVLAYTKEPLVSSDFNHDPASSTFALDQTKVIDGDLVRVMSWYDNEWGFSNRMADVTAVIANTLR

SEQ ID NO: 19848 - protein, 269 aa, Absidia blakesleeana
HTFYNELRVAPEEHPVLLTEAPLNPKSNREKMTQIMFETFNAPAFYVAIQAVLSLYASGRTTGIVLDSGDGVTHTVPIYVGYALPHAILRLDMAGRDLTDYLMRILAERGHSFTTTAEREIVRDIKEKLCYVALDFEQEMQTAAQSSALEKSCELPDGQVITVGNERFRAPEALFQPNLLGLESAGIHETTYNSIMKCDVDIRKDLYSNIAMSGGTTMYPGIADRMQKEITALAPSSMKIKIVAPPERKYSVWIGGSILASLSTFQQMW

SEQ ID NO: 19849 - protein, 321 aa, Xylella fastidiosa Ann-1
MSDYPASAKHSRLLILGSGPAGWTAAVYAARANLQPVLITGLQQGGQLMTTTEVDNWPGDAHGLMGPDLMERMQAHAERFETEVIFDQIYKADLSTRPFTLFGDSGLYTCDGLIIATGANAKYLGIPSEEAFKGRGVSACATCDGFFYRDQDVAVIGGGNTAVEEALYLSNIARKVYLIHRRDKLRAEKIMQNKLFSKAATGKIELIWNNAVEEVLGNDAGVTGVRIRSTQDSSRRDIDVQGLFVAIGHHPNTDLFAGQLAMNNGYLQIHSGTAGNVTQTSVEGVFAAGDVADQHYRQAITSAGFGCMAALDAERFLDKGN

SEQ ID NO: 19850 - protein, 341 aa, Mesorhizobium sp. BNC1
MSERLEDIAARMVADGKGILAADESSGTIKKRFDSIGLESTADNRRDYREMLFRADEAMRNSISGVILYDETLRQQAKDGTPLVEIISRSGAVPGIKVDAGAKPLAGFPGETITEGLDGLRERLKEYYELGARFAKWRGVIAVSDDLPTWGSVKQNAQALARYAALCQEAGIVPIVEPEVLMDGTPATHSIDRCYEVTEWVLKTVFTELFDARVALEGMVLKPNMVIDGKNARKASREEVAEKTVRCLKATVPAAVPGIAFLSGGQSDEEATAHLSLMNASHSMPWKLTFSYGRALQAAALKAWGGKSENVAAGQRAFAHRARMNALAARGDWKQELEVAA

SEQ ID NO: 19851 - protein, 270 aa, Neurospora crassa
VIEYVKSKGLEVRFSSEDSFRSDLVDLLSLYRAVDKVGVHRVGIADTVGCASPRQVYDLVRTLRGVVSCDIETHFHDDTGCAIANAYCALEAGATHIDTSVLGIGERNGITPLGGLMARMIVTSPDYVKSKYKLHKLKELEDLVAEAVEINTPFNNPITGFCAFTHKAGIHAKAILNNPSTYEILNPADFGLTRYVHFASRLTGWNAVKTRVGQLGLEMTDDQVKECTAKIKALADVRPIAIDDADSIIRTFHLGLHEQNKVQPPAVVEN

SEQ ID NO: 19852 - protein, 184 aa, Yarrowia lipolytica CLIB122
MTRYSVQSVDPTKTASARGAYLRTSFKNTYEVAGAIRGWNLQKALAYLDQVTDHKRAIPFRKHAGSIGRTGQGKEFGVTKARWPVKSIKFVQDLLQNAQANAETKGLDKETLVISHIQVNQAPKQRRRTYRAHGRINAYQSSPSHIELILSEPAEEIAKAKETSLAHISSRQRGRIAAQKRISA

SEQ ID NO: 19853 - protein, 743 aa, Silicibacter pomeroyi DSS-3
MHVAGSPDVDHLSEYERRYSRRGLLIRYARGRVRNFAGRQIMTFAGSFILAMTEGLHTAMLAAFAALLGEVIDCLYLHRLPERLRQGQGYRRLLIGSTLTALVQALTISFCVWLAWTGARSGLSPLFIGSFLAGAAINAGLVLPFHRPAAVARLAVYAGIGQYLFLIEAMEPGRLGDALLLNAAGAVMLAFMVGLFLNFVNWGFRQHRRTTLDLIEQGRDLLRHQKEAQLLSLVARNANDSVILADSEGRIVWTNESFTRTTGYSLDEAKGRYPGELLNGDKTDLEVSNAIADAVEAGRPFRTEILNVTKDGREIWMETNLVPVLDRNGKVEVTVAIERDVTAAKAQAEELAAARVAAEEGARAKAEFLATMSHEIRTPMNGVVGMAELLSETKLSIEQRQYVDTIRSSSTALLAIINDILELSRLDARKMELHPVNFDPVSCVRDTMRLLKPQAQAKGLRLSLETGADVPPLVYGDDGRLRQVLINLLGNAIKFTERGGVTLRLRSEAQDPGYLLTLEVEDTGIGIAAEKIERVFERFSQADADTTRLYGGTGLGLTISRELVALMGGRITVDSTLGQGSCFTLCLPLGSPDDDAGQSDGQVLSPAELDRLRGLRVLVADDNRVNRLLMGKFLADLPIRLDFAHDGQQAVAMTQRQKPDIVFMDMSMPVMSGIEATRQIRAAEGRQPLIVALTANTFDSDREACLAAGMDDFLSKPVGRADLFRCLLHHLPPTDAAPRTASG

SEQ ID NO: 19854 - protein, 543 aa, Arabidopsis thaliana
MGGGGNLVDGVRRWLFQRPSSSSSSSSSNNNNNNHEQPIFNSSSFSSSSNPNHSANSGELIIEEDLDFSGLTLINVPKRNHLPMDPHKKGETEFFTEYGEANRYQIQEVVGKGSYGVVASAVDSHTGERVAIKKINDVFEHVSDATRILREIKLLRLLRHPDVVEIKHIMLPPSRREFPHIYVVFELMESDLHQVIKANDDLTPEHYQFFLYQLLRGLKYVHAANVFHRDLKPKNILANADCKLKICDFGLARVSFNDAPTAIFWTDYVATRWYRAPELCGSFFSKYTPAIDIWSVGCIFAEMLLGKPLFPGKNVVHQLDLMTDFLGTPPPESISRIRNEKARRYLSSMRKKQPVPFSHKFPKAEPLALRLLERLLAFDPKDRASAEDALADPYFSGLSNSEREPTTQPISKLEFDFERKKLVKDDVRELLYREILEYHPQMLEEYLRGGDQLSFMYPSGVDRFKRQFAHLEENQGKPVAAGGGRSTALHRHHASLPRERVPAPNGETAEESSDVERRAAAAVASTLESEEQTMEEVTVLVTS

SEQ ID NO: 19855 - protein, 232 aa, Zea mays
  misc_feature (27)..(27): Xaa can be any naturally occurring amino acid
  misc_feature (124)..(124): Xaa can be any naturally occurring amino acid
  misc_feature (176)..(176): Xaa can be any naturally occurring amino acid
MAPATLAPSMLSSDCANLASEAERMVXRLGADWLHMDIMDGHFVPNLTIGAPVIQSLRKHTKAYLDCHLMVTKPSDYVEPFGKAGASGFTFHIEVARDNWQDLIQSIKSKGMRPGVSLRPGTQXWEEVFPLVEAENRVEIGSCDAVEPGFGGQKFMPEMMDKVRTLRKKYLSFDIXGVDGGGGLGLQKTIDVARASAGANCIVAGSSIFGAADPGAIISVLRKSVEGSQNKN

SEQ ID NO: 19856 - protein, 412 aa, Lactococcus lactis subsp. lactis Il1403
MKIEMKNGKLVVPDYPAIGYIRGDGVGEDIFPQAQKVFDAAVLKIYGQKKKIEWQKLLAGGEAFETCGEYLPKETLAHINENLIAIKGPLMTPVGESFRSINVTLRQKMDLYACVRPVEYFKGIKSPVKAPEKVDMTIFRENTEDIYAGIEFASETNESHNLLKFLEKELNVHSIRFPKTSALGIKPVSPEGSKRLVNAAFEYALKMNKKRVTFVHKGNIMKFTEGGFRNWAYEVAREYPTFTKLEYDEIKNERGSLQAENEKKAALKSGKIYVDDVIADNFLQQIILNPENFEVIATLNLNGDYISDALAAQVGGIGIAPGANINYKSGHAIFEATHGTAPDIAGKNIANPSSLILSGVMMFEYLGWQEVAELIKIALSFSFRNGNLTADLGGKLSTSKFSDVLIDFIKTY

SEQ ID NO: 19857 - protein, 181 aa, Arabidopsis thaliana
GSSLRELVLKKKKLQTKLIFQIAVDIAEGMKFINDHGVAYRDLNTQRILLDKQCNACLGDLGIVTACKSVNEAMEYETDGYRWLAPEIIAGDPEKTRESWMSNAYSFGMVLWEMVTGEEAYGSCSPVQAAVGIAACGLRPDIPKECPQVLKYLMIKCWNTCPSTRLNFSQIHCILLRAISR

SEQ ID NO: 19858 - protein, 227 aa, Brassica napus
CLLNKLIRFIFSLFINFFFKKACNEAMFPCRSPPNWWTEELCILNIDFFSDVLASMKQRGLKPSSLASAIITYTERSLRDLVRDHSGRGVKFSDPENNDSEERSQQRDLVESIVSLLPSDKGLFPINFLCSLLRCAVFLEASLASKNELEKRISVVLEHVTVDDLLIPSFTYDGERLLDLDSVRRIISTFVEKEKNVGVFNGGDFNKGLFSASLQRVARTVDSYLAE

SEQ ID NO: 19859 - protein, 510 aa, Arabidopsis thaliana
MDPHKKVALETEFFTEYGEASRYQIQEVIGKGSYGVVASAIDTHSCEKVAIKKSNDVFEHVSDATRILREIKLLRLLRHPDIVEIKHVMLPPSRRDFRDIYVVFELMESDLHQVIKANDDLTPEHYQFFLYQLLRGLKFIHTANVFHRDLKPKNILANSDCKLKICDFGLARVSFNDAPSAIFWTDYVANRWYRAPELCGSFFSKYTPAIDIWSIGCIFAEMLTGKPLFPGKNVVHQLDIMTDLLGTPPPEAIARIRNEKARRYLGNMRRKPPVPFTHKFPHVDPLALRLLHRLLAFDPKDRPSAEEALADPYFYGLANVDREPSTQPIPKLEFEFERRKLTKEDVRELIYREILEYHPQMLQEYLRGGEQTSFMYPSGVDRFKRQFAHLEENYGKGEKGSPLQRQHASLPRERVPAPKKENGSHNHDIENRSIASLVTTLESPPTSQHEGSDYRNGTSQQGYSARSLLKSASISASKCIGMKPRNKSEYGESNNDTVDALSQKVAALHT

SEQ ID NO: 19860 - protein, 356 aa, Schizosaccharomyces pombe
MDESLAKDAVFVASSKPSDLTTEVVGPDFNKYDERKKAGGPGITVEELVESYGKIGFQATNLHDAVTIINEMRNWRDPNPPEEKSDRATIFLGYTSNLISSGVREVLRYLVQHKCVDVIVTTAGGVEEDIIKCLGPTYVGDFHLDGKNLRAKGLNRIGNLIVPNDNYCRFEEWIFPILNKMVEEQETLGTHWTPSSFIRRLGKEINDESSVLYWAYKNNIPIYSPALTDGSIGDMLYFHTYKATPRPLVLDIVADIRNMNTHAVRANKSGIIILGGGVVKHHICNANLMRNGAEWSVYINSANEFDGSDAGARPDEAVSWGKIRGDAKKVKVCDAILVYGEVSLLFPLIVAATFAK

SEQ ID NO: 19861 - protein, 375 aa, Aspergillus oryzae
MDDETAAIVIDNGSGMCKAGFAGDDAPRAVFPSLIGRPRHHGIIVGMGQKDSYVGDEAQSKRGVLSLHYPIEHGIVNNWDDMEKIWHHTYFNELRVASEEHPVLLTEAPINPKSNREKMTQIMFETFNVPAFYVSIQAVLSLYASGRTTGIVLDSGDGVTHVVPIYEGFSMPHAIARMDLAGRDLTEYLVRILAERGHSFTTSAEHEIVRDIKERLCYVALDFEQELETAAKSSSIEKSYELPDGQVIAIGNERFRAPEALFQPSLLGIEQGGIHETTFNSIQKCDVDVRKDLYGNIVMSGGTTLYPGIADRLHKELVNLSPSSMKIKTIAPPERKYSVWIGGSILASLSTFQQMWISKQEYDESGPSIVHRKCF

SEQ ID NO: 19862 - protein, 334 aa, Streptomyces avermitilis MA-4680
MTVRVGINGFGRIGRNVFRAAATRGADLEIVAVNDLGDVATMAHLLAYDSILGRFPEEVTAEPGAIRAGDTTVKVLAERDPAALPWGDLGVDVVIESTGIFTDAAKARAHVDGGAKKVIIAAPASNEDVTVVLGVNQDAYDPERHTIISNASCTTNCLGVLAKVLHDAVGIESGMMTTVHAYTQDQNLQDAPHKDLRRARAAGLNIVPTSSGAAKAIGLVLPELQGRLDAFALRVPVPTGSVTDLTVTASRSTTVEEVKEAYAKAAAGAYKGLLSYTEAPIVSTDIAGDPASCVFDAELTRVLGSQVKVVGWYDNEWGYSNRLIDLALLVGDTL

SEQ ID NO: 19863 - protein, 154 aa, Petunia x hybrida
GTRLLDTAFTFIMKNKGLTTEANYPYKGEDGVCNKEKSALSAAKIKGYEDVPADSEKALLKAVANQPVSVAIDGSSFDFQFYSSGVFSGSCSTWLNHAVTAVGYGATTDGIKYWIIKNSWGSNWGDNGYIRMKRDIHDKEGLCGLATEASYPVA

SEQ ID NO: 19864 - protein, 1818 aa, Zea mays
MATITTPLRSALFSPAASSAGRHRGGRRRAPSSVRCDASPPSHAAAASLDPDFDKKAFRHNLTRSDNYNRKGFGHKKETLELMSQEYTSNVIKTLKENGNQYTWGPVTVKLAEAYGFCWGVERAVQIAYEARKQFPEERIWLTNEIIHNPTVNKRLDEMGVEIIPVDAGIKDFNVVEQGDVVVLPAFGAAVEEMYTLNEKKVQIVDTTCPWVSKVWNMVEKHKKSEYTSIIHGKYSHEETVATASFAGKYIIVKNMAEATYVCDYILGGQLDGSSSTKEEFLEKFKKAVSPGFDPDVHLDMVGIANQTTMLKGETEEIGKLIEKTMMQKYGVENVNDHFMAFNTICDATQERQDAMYQLVKEKVDLILVVGGWNSSNTSHLQEIGELSGIPSYWIDSEQRIGPGNRISYKLNHGELVEKNNWLPEGPITIGVTSGASTPDKVVEDALQKAQRWCDDSAAGAASVGAAPADAVPAGAGAIPAAAGAGAVPAGAVPAGAVPAAVGVASSQSRRSYRDALVSSQRPVSRLAVERAGGGWKTVQSRRDRRLARRPPLPEPRPVPVDLRGRCFNCFSADHRAARCSNRVRCFFCRRPGHRVSECPRRQTNLAAPVRRLVWRPISMEAPAAVTGADHAMAGGSTLGGSDAAISGKRRTRRGQRRRRSGPSGGLGGDPLLLSSGNLSPAAQDGPRPVRFIGRSRMIDRAELELRHALIVSVVGQEGTGCATEVREALASRFGLDADALRLRRAAPGSFIVLFPSEELAGQVFSGGPSLFVPPLRLHIKRWSRQAFASGGSVLSSLIDVELRGIPAHLWGLETAEVLLGPYCLVQGLHPDSISGEDLSVIRLSAWCRSPVELPKVLDLHAVEPAVPDEDGVWIPRSLVFPVLVKIIGPVGVLVEEQLQPPPSDPSDDEPEPSRRARRVQRLGDQASLPRASVHSRLGPRLHSSSTRVGPSDDVGLLDASMDNSDAVAASVSSDSLAEPIDAPTLPCAAVEMLAAPGVLALCDVVVPDYSPVGASADLAAELREDSVLAVSCVVSASSARWNLKPPVFRVYSRRLRPSILDDQDGPLVQSGLDNSMVIPSPLCEFQCLVTKPVDALLPTPQIPKRRKKPLPSNFIPRRSRRVAKFPPELGSEAAAQVCRHLGFCDDNEVISVQDAGNYAKLFVSGLSSDKAPGPDGFTGKFYKTCWDIIKVDIMTALNSLYHGNAYKLDLLNSAYLILLPKREDASSAGDFRPISLIHSFAKLVTKILANRLGPYLQDLVAANQSAFIRGRSIHDNFMLVQQSIKFLHKRKISSLLLKLDISKAFDSVSWAFLMEILTHLGFGPVWRNLISNLLFTSSTQVLLNGSPGNHIFHRRGLRQGDPISPMLFVMVMDVLSSLFRVAENRGLLQGLGGADVRSRVSIYADDVVIFIKPIEADLNCAKIILNCFGLASGLCAALQSHCVSLQVIKSIDKIRRGFLWRGRKEVNGGSCLVPWEVVTRPLRLGGLGIPNLKLKSWALQAKWLWLEKTDQSRPWRGLSLPVQRQVRQFFDLSVFTILGNGATTLFWSDRWIHGNTIQDIAPEVVGMVGRKAYSSRTMAQALDNWHWVNDIRGALSLSGLQQYLLLWDTLGDVRLSHDADRHVWMHSSSGMFSSKSCYKAFFMGLISFEPWKRLWKSWAPPKCKFFLWLAIRNKCWTADRLRRRGLQHPAVCVLCDQEQETVQHLLCTCSFARQFWHAILVLLCLGDLIPAVDEISFADWWRKALKKVPKFRKKGFNSLIILGSWCIWLTRNKAVFDGVNPSMCFVKSLFLNELSCWERAGAKQLANFGLPAIMSRV

SEQ ID NO: 19865 - protein, 632 aa, Hordeum vulgare subsp. vulgare
MARRSSGPAWPEVARVRRRACRLGRAGARRRRRGLRAGVAGRDAVAGSVPSIPATEFPRSRGKEHGVSEKTSGAYSANGGFPWSNAMLQWQRTGFHFQPDKYYQNDPNGPVYYGGWYHFFYQYNPSGSVWEPQIVWGHAVSKDLIHWRHLPPALVPDQWYDIKGVLTGSITVLPDGKVIPLYTGNTETFAQVTCLAEPADPSDPLLREWVKHPANPVVFPPPGIGMKDFRDPTTAWFDASDGTWRTIIGSKNDSDHSGIVFSYKTKDFVSYELMPGYMYRGPKGTGEYECIDLYAVGGGSRASDMYNSTAEDVLYVLKESSDDDRHDWYSLGRFDAAANKWTPIDDELELGVGLRYDRGKYYASKSFYDPVKKRRVVWACVGETDSERADITKGWANLQSIPRTVELDEKTRTNLIQWPVEELDTLRINTTDLSGITVGAGSVVPLHLHQTAQLDTEATFHIDASAIEAVNEADVSYNCTTSSGAATRGALGPFGLLVLANRALTEQTGVYFYLSKGLDGALRTHFCHDELRSSHASDVVKRVVGSTVPVLDGEDFSVRVLVDHSSVQSFAMGGRLTTTSRAYPTEAIYAAAGVYLFNNATGTSVTAEKLIVHDMDSSYNHIYTDDDLVVVG

SEQ ID NO: 19866 - protein, 130 aa, Streptococcus agalactiae A909
MPFLHTCIRVKDLDASIAFYQEALGFKEVRRNDFPENQFTLVYMALEDDPSYELELTYNYDHEAYDLGNGYGHIAVGVDDLETTYDAHQKAGYSVTKISGLPGKPNMFYFIQDPDGYKIEVIRLSQFKAD

SEQ ID NO: 19867 - protein, 336 aa, Zea mays
DQIWASDSVLPSTSIPSGFAAEFSFSSSASEASPIPAMSLPAISLYTSPPGAVYSSEFDPTSRGSSPCTTAALLPPAASHRLPSGGGGGGLSCLFSSPAAAAAPPRNPAHDDLGALWHDRSDDLSAAAGGGGYPYSHSHSSSPLKWRDPHHHHSPVSVFQGLSSSSPSRSPPASWLAARDRERLFAGFVRNALGSCVDYAPPTSPRPEVGAGELAFELDENLLEAGPACEPYARELLTSAQDCHRIFHEELVVRAFLEAEKAHRGQMRASGDPYLQHCVETAVLLAKIGANATVVSAGLLHDSIDDSFIDYDHIFHIFGAGVADLVEGSHNISSLT

SEQ ID NO: 19868 - protein, 250 aa, Pseudomonas aeruginosa PAO1
MPAETPPLRPDADPPQCALPEARPDRDASTKLRAAVLGANDGLVSNLCLVMGVAGASMAHSSIVLTGMAGLVSGACSMALGEWLSVTNAREMASKRIAEEERLLRLCPNTETQELIDIFTAKGLSEVSARRVALQLMNDGRGALDTLSREALGIDPTELGGNPWNAAGTSFLLFSLGALVPVAPFLFLDGAAALVASLLSSLLALLFSGAVTARFTGRPLAFSALRQVLVGTLAAAFTYGLGTALGVGLG

SEQ ID NO: 19869 - protein, 116 aa, Triticum aestivum
  misc_feature (85)..(85): Xaa can be any naturally occurring amino acid
  misc_feature (110)..(110): Xaa can be any naturally occurring amino acid
MARGAATQLVLVAMVAAMLLVACDAAISCGQVTSALSPCISYARGNGANPPAACCSGVRSLAGAAQSTADKQAACKCIKSAAGGXNAGKAAGIPSKCGVSVPYAINSSVXDCSKIR

SEQ ID NO: 19870 - protein, 269 aa, Absidia corymbifera
HTFYNELRVAPEEHPVLLTEAPLNPKSNREKMTQIMFETFNAPAFYVAIQAVLSLYASGRTTGIVLDSGDGVTHTVPIYEGYALPHAILRLDMAGRDLTDYLMRILAERGHSFTTTAEREIVRDIKEKLCYVALDFEQEMQTAAQSSALEKSYELPDGSSITVGNERFRAPEALFQPILLGLESAGIHETTYNSIMKCDVDIRKDLYSNIAMSGGTTMYPGIADRMQKEITALAPSSMKIKIVAPPERKYSVWIGGSILASLSTFQQMW

SEQ ID NO: 19871 - protein, 250 aa, Triticum aestivum
GIPRSANGGALPAGEDPGAVVETRGALGNQARWTGLGESARGANPDLGRRNKEDVAAEEEVVGEYVEPPEEAKVYVGNLPYDVDSERLAQLFEQAGVVEVSEVIYNRETDQSRGFGFVTMSTIEEAEKAVEMFHRYDVNGRLLTVNKAAPRGARVERPPRDSGSSFRIYVGNLPWQVDDSRLVELFSEHGKVVDARVVYDRDTGRSRGFGFVTMASQPELDDAIAALDGQSLEGRALRVNVAEERPPRRF

SEQ ID NO: 19872 - protein, 409 aa, Moorella thermoacetica ATCC 39073
MNYVLIGNSVAAVNAVAGIREYDREGDITIVSAENYYAYGRPLISYWLEQRVNEKNLPYRPETFFARNKVRVLLGRRAVRLDPEARQVFLDNGESLPYDRLLLATGGRPFLPSINGLTPENHYTFMTYDDARRLEKAASPGREAVILGAGPTGLKAMESLVRRGVKVTLVELADRIWAPALDPEAASMVAGFLQDRGVNIYLNDTLDGVRRGDNGRLDLELKSGRRLAADILVVAIGVRPNVELLQDLPGATINRGVVVGADLSTGLPGVYAAGDVVAGNPPLLPHAAIQGKIAGRNMAGGRETYKPIPPYNALGILGLHIISIGLSAAGEGYEILQEADPAARVYRKLVLQDNRLVGGLLINKIDRAGIYRYLIEEGIEVTSFKDRLLQPDFGLLSLPDTIWQQQLAK

SEQ ID NO: 19873 - protein, 269 aa, Actinomucor elegans
HTFYNELRVAPEEHPVLLTEAPLNPKSNREKMTQIMFETFNAPAFYVAIQAVLSLYASGRTTGIVLDFGDGVTHTVPIYEGYALPHAILRLDMAGRDLTDYLMRILAERGHSFTTTAEREIVRDIKEKLCYVALDFEQEMQTAAQSSALEKSYELPDGQVITVGNERFRAPEALFQPALLGLESAGIHETTYNSIMKCDVDIRNDLYSNIVMSGGTTMYPGIADRMQKEITALAPSSMKIKIVAPPERKYSVWIGGSILASLSTFQQMW

SEQ ID NO: 19874 - protein, 480 aa, Halobacterium sp. NRC-1
MEQNAIQRRERPFVAGEWVSDGEPLPVSDLADGGTFASVAAADTSDAERALSAATGVHADLRETTVPERVEWLESIADGIRRREDELAEVIVREAGKPISSARGEVQSAAERFDRAVGELRHLTGEYRTGTTAGHEDWQAIVKHEPMGTVLCITPYNYPLSTMALQVAPAIAAGNAVIVKPASKTPISGAILADIAADAGLPDGAYNFVPGESSVIGDPLASDARVDAIAMTGSSGAGEHVARQSGITRLHMELGGNAPAIVFEDADLDAAADAATAGSLKYAGQRCSAVSRVLAHESVHDELVSRIDDAMAEWSIGDLFDTDTTLGPLVSADQADWVAELVDDAVDRGATVVRGGERHVEDGVHYYEPTLLADVPRDARIVDEEQFGPVCAVTTVTDEDDAVRTANGSELALDAAVFTADHDRAMRVAERVNAGAVRINGAPSHGLGDVPFGGNDASGIGREGLDSTIHEFVREKSIIL

SEQ ID NO: 19875 - protein, 269 aa, Apophysomyces elegans
HTFYNELRVAPEEHPVLLTEAPLNPKSNREEMTQIMFETFNAPAFYVAIQAVLSLYASGRTTGIVLDSGDGVTHTVPIYEGYALPHAILRLDMAGRDLTDYLMRILAERGHSFTTTAEREIVRDIKEKLCYVALDFEQEMQTVAQSSALEKSYELPYGQVITVGNERFRAPEALFQPSLLGLESAGIHETTYNSIMKCDVDIGKDLYANIVMSGGTTMYPGIADRMQKEITALAPSSMKIKIVAPPERKYSVWIGGSILASLSTFQQMW

SEQ ID NO: 19876 - protein, 113 aa, Xanthomonas axonopodis pv. citri str. 306
MSDKVQHVGDADFDTAVLQAGEPVLVDFWAEWCGPCKMIAPVLDDLADTYQGRLKVAKVNVDQNRALAIKYHVRSIPMLLLFKDGQVQATQIGAVGKGQLTQMIDKTLGGAAA

SEQ ID NO: 19877 - protein, 273 aa, Aspergillus nidulans FGSC A4
MSSPLILLPGDEVPSEYLPNNSAPLRLGQGLRLLSQPPGTTPSSHVLTATQAGVLSTDNKRNAVSILSSSNRRYVPTTNDLVIAQVHHSSADYFHCMITPQSPHALLGQLSFEGATKKTRPMLKGGDLVYARVLSTGLGPGAEVELTCVNPATGKAEPGGLGPLTGGMVFDISTGMAARLIKASSSSSDQQEGVAGLVVLDELGKKLEKVGGFEIAVGRNGKVWVDCSNSEEDAIKATVAIGRCITMIDEHNLVPTDQRKLVTRILREMKIDS

SEQ ID NO: 19878 - protein, 167 aa, Glycine max
MKSVSLRPELHIPICSSNPPSCVKPIKLVVVSSYGKKLKHPASKLAMTHREHTTTLPLLKHDSSIVMMGAVCVGILVVVLSEEKALALGPEGPLVEEFWDNVRRYGLYALTVSTGALYTIFRPIVELLKNPISAIFILLLFGASFFIVSQVLSAMVGVSEFSYDFGY

SEQ ID NO: 19879 - protein, 315 aa, Anaplasma marginale
LSEKKIQLGINLTKGLGAGSLPEVGRGAAEESIDEIMGEIADSNMLFITAGMGGGTGTGAAPVIAKAAKENKILTVGVVTKPFHFEGAHRMKTADLGLEELQRYVDTLIIIPNQNLFRIANENTTFADAFKLADTVLHTGVRGITDLMVMPGLINLDFADIKVVMSEMGKAMMGTGEAEGEHRAVIAAEAAISNPLLDNISMKGARGILINITGGLDLTLFEVDAAANRIREEVDDNANIIFGSTFNEESSGKIRVSVLATGIDSVRPAQRPHSVEQQQPQRISDFDFDSELSSLNPENGSTMAYYKPSLPEEDA

SEQ ID NO: 19880 - protein, 503 aa, Salinibacter ruber DSM 13855
MPPPASDHARHAKGQLMSTSETEYLKGKASEDYKHGFYTDIEAETAPEGFTEDVVRYISERKDEPQWLRDWRLKAFRHARNRLDSGETIDWAHLDYEAPKFDEISYFSAPKETASYESLDEVPDEILETFERLGIPLEEQKALTGVAVDAVMDSVSVATTFKDKLEEKGVIFKSFGEAAKEHPEIVREYMGTVIPYTDNLYAAINSAVFSDGSFVYVPEGVTCPMELSTYFRINEAGTGQFERTLIVAEPGAYVSYLEGCTAPMRKENQLHAAVVELVAHEDAEIKYSTIQNWYPGDPDTGEGGVYNLVTKRGLCKGDNSKISWTQLETGSAVTQKYPSVILAGDDSVGEFYSVAFTKGHQQADTGTKMQHIGKDTKSTIISKGISADVADNSYRGQVKVSKNADNARNFSQCDSMLLGPDCGAHTYPYIESNNPSAQIEHEATTSKVGEDQMFYCHQRGLGEEEALKLIVNGFCQEVLQELPMEFAVEAKELLDIELEGSVG

SEQ ID NO: 19881 - protein, 208 aa, Oryza sativa (indica cultivar-group)
MASYHQQQGGSTFMAIPTINFQMYSEIAGDDEWWEYIPCPFCYIEVEVPFLCDHLQEEHCFDMKNAVCPICADNLDKDTDEHFRVQHSHLLKRRKSSSFSCKPSSAAADKGSYEEDSYFEAPSHCMGRPAPDSSPDPLLSQFICCSLAPPVDSPRRSEADAEGHGSSSSDDQKRREQGVMDDASKEELEERLQRIEFVKQMLMTTIAY

SEQ ID NO: 19882 - protein, 119 aa, Haloarcula marismortui ATCC 43049
MATDTASDAGTTTTNEPLHIDGADQLDDVVNKYDLVLTDFYADWCGPCQMLEPVVETLAAETDAAVAKVDVDANQQLAQSYGVRGVPTLILFAGGEQVEEVVGVKGEDDLRALIESYAE

SEQ ID NO: 19883 - protein, 331 aa, Hordeum vulgare subsp. vulgare
EQAELHLVLLLNVIDPKIGGVMIMGDRGTGKSTTVRSLVDLLPDISVVVGDPFNSDPYDPEVMGPEVRDRLLKGESLPVTTTKITMVDLPLGATEDRVCGTIDIDKALTEGVKAFEPGLLAKANRGILYVDEVNLLDDHLVDVLLDSAASGWNTVEREGISISHPARFILIGSGNPEEGELRPQLLDRFGMHAQVGTVRDAELRVKIVEERARFDRDPKTFRQSYLEEQDKLQEQITSARSNLGSVQLDHDLRVKISQVCSELNVDGLRGDIVTNRAYAKALAALKGKDVVTVEDISTVIPTVLRHRLRKDPLESIDSGLLVVEKFYEVFG

SEQ ID NO: 19884 - protein, 467 aa, Manihot esculenta
MMGLFGSSAAMFVLLFLSFTLSSASDMSIISYDQTHATKSSWRTDDEVMAIYEEWLVKQGKVYNALGEREKRFQVFKDNLRFIDEHNSENRTYKLGLNGFADLTNEEYRSTYLGARGGMKRNRLRKTSDRYAPRVGESLPDSVDWRKEGAVAEVKDQGSCGSCWAFSTIAAVEGINKIVTGDLISLSEQELVDCDTSYNEGCNGGLMDYAFEFIINNGGIDTEEDYPYLARDGRCDTYRKNAKVVTIDDYEDVPVNSETALQKAVANQPVSVAIEAGGRDFQFYASGIFSGRCGTQLDHGVAAVGYGTENGKDYWIVRNSWGKSWGENGYLRMARSINSPTGICGIAMEASYPIKKGQNPPNPAPLPPSPVTPPTVCDNYYSCPDNNTCCCLFEYGNFCFEWGCCPLEGATCCEDHYSCCPHDYPICNINQGTCLMSKDNPLAVKAMIRIPAKPHWALGAAAKKSSA

SEQ ID NO: 19885 - protein, 331 aa, Cryptococcus neoformans var. neoformans JEC21
MNFFNRQKTRTPADTVKSLKDNITRLDNAPAGEASRKINEDISRQLSIVKILLSGEGDTEPNPDAVAQVANEVYAQDLLSLMVVHLGKFDFEARKDVCNIYGVLLRRQLGSRSPTVDTIATRPDIIFNTLKGYANQDIALNTGMILKEMLRYEPLARILLYSDQFYTFPSYIENTSFGISCDALANMKETLTRHKPMVAQYIEANYDRFFNMYNTLILSSNYVTKRQSLKLLGEILLDRANYNIMTRYIASEANLKMMMNFLRDKSRNIQFEAFHVFKVFVANPNKPPQIASILRRNKEKLLVFLREFHNDKDDEQFNDEKQFLIHQIQQL

SEQ ID NO: 19886 - protein, 210 aa, Manihot esculenta
AYDPSPLQDFCVATNATKSAVFLNGKFCKDPTRVTADDFFFSGLNVAGDTSNQLGVHINIIDADVIPGLNTNGITLVRIDYAANGGLNPPHNHPRAAEILTVLKGTVYAGFVTSNPDHRLFAKVLKPGDVFLFPFGLIHFQLNIGKTPAVALAALTSQNPGVNTIANAVFGSDPPINPNVLTKAFHLNKDLVSKLQKEQWVDPSESDSYN

SEQ ID NO: 19887 - protein, 292 aa, Leifsonia xyli subsp. xyli str. CTCB07
MILTVTPNPAIDLTYRVPALEAGETHRVAPPTARAGGKGLNVARVIAQTGVAAFALTTAGGASGLRLAGDLEASGIPSELVPVAAPTRATVAILAETGGALSAAEWNALRESANRLAGPATALVGSGSLPPDAPDDIYAELVAIALAHRIPSVIDADGRSLLAAAEAGASVLKPNRRELAGAAGTDDPVAGARLLLDAGAGLVLVSLGGDGMLAVRPGAEPAGVRLPEPLSGNATGAGDAAVAAVATALAAGEDDPLVLLRRAAAWSAAVLAPLAGELDPAYAEFEARLVPA

SEQ ID NO: 19888 - protein, 497 aa, Ralstonia solanacearum
MTRTDLPPAPITLNDPALWRTQAFLAGAWTDADDGSTRDVTDPATGRVIGTVPAMGAAETRRAIEAAQAAQRAWRKVTARERARILRKLADLMLEHQQDLARILTAEQGKPLPEATGEIAYAASFIEWFAEEARRVYGDTIPAPQGDRRIVVNKEPIGVTAAITPWNFPIAMMTRKVGPALAAGCAMVVKPALETPYSALAFAELAARAGVPAGLLSIVTGDAQGIGGELTANPVVRKLSFTGSTAVGRLLMRQCADDVKKLSLELGGNAPFIVFDDADLDAAVEGAMVAKYRNAGQTCVCANRFYVQRGIYDAFAARLSEAVRALRVGNGAEPGVQQGPLIHQRAMDKVRAHVDNAVAQGARVLVGGKPHALSAQGGAFFEPTVIVDARPGMLVAHEETFGPLAALIPFDTEDEAVAAANDTEFGLAAYFYTRDLGRAWRVSEALESGMVGVNTGLISTAEAPFGGVKQSGLGREGSKYGIDEYLEIKYVCMAGLG

SEQ ID NO: 19889 - protein, 552 aa, Zea mays
MNGKQSPRNGRTAYHFQPAKNWMNDPNGPLYHKGMYHMFFQYNPHGPTFGTGKLSWGHSVSGDLVNWAFLGTALDPTSPFDAEGCWSGSATTLADGRPAILYTGRDASGVQVQNVAFPKNPSDPLLREWRKPPGCNPVVPQPGDVTGNNFRDPTTAWLGRDGLWRFAVAAEVGGVGSTLVYRSKDFVRWERGSAPLHASPDVPVWECPDLFPVAERGAEGLDTSARGGAGVRHVLKLSKAADEDYYVVGRYDDEADTFAPVEGVFDWRRIDHGHLFGAKTFFDARRRRRVLWAWVDETDDGVDKGWRGIQTFPRALWLDADGRQLVQWPVEEIETLRKGRAALAGAVVGAGGLREIAGVDALQADVEVVFEVPESLDDAEELDPEWLQHDPHKLRACAEKKASSPGPRGGVGPFGLVVMASGDMREQTTVFFQVLRHGGTYKVLMCADLTRSSTKEGVHKPFYAGFVDVDVEKDRGISLRTLIDHSVVESFGGGGRTCITARVYPEHVAAGGSSHLYLFNNGAHPVTVSKIEAWELGTASVNVEQDDRADPL

SEQ ID NO: 19890 - protein, 159 aa, Listeria monocytogenes str. 1/2a F6854
MNVHDFSEKAMNGKEIALSDYKGKVLLIVNTASKCGLTPQLEGLEAMYKKLGGDNFEILGFPCNQFLRQDPGSDEEILEFCQMNYGVTFQMFSKIKVKGKDASPLYKYLTEQTGGKKVEWNFAKFLIDENGEVVERFPSKMKPEDFEDKVEALVAKVNN

SEQ ID NO: 19891 - protein, 334 aa, Xanthomonas axonopodis pv. citri str. 306
MSIEQLAETAQAMVAPGKGIIAIDESTSTIAKRFASVGIENIEENRRAYRELLLTTPKLSDYISGAILFDETIRQKTKDGVPFAEYMTAHGIIPGIKVDKGAQPLAGMPGELVTEGLDGLRARLEEYYTLGARFAKWRAVINIGEDIPSGTCIEANSHALARYAALCQEQGLVPMVEPEVIMDGSHDIETCYEVTEATLRSLFGALYEQNVVLEGTILKASMVISGKSCEEQASIEEVAESTVMCLKSTVPAILPGIVFLSGGQTDEQSTAHLNEMHQLGNLPWPLSFSYGRAMQQAALKLWAKDMTGNFAKAQQVIYERAKENGLAALGKWKG

SEQ ID NO: 19892 - protein, 462 aa, Streptococcus agalactiae A909
MAVEIIMPKLGVDMQEGEILEWKKQVGDVVNEGDVLLEIMSDKTNMEIEAEDSGVLLKITHGNGDVVPVTETIGYIGAEGEEVTEASSSENTSVEENATQVTSEPEKVEETSEPSVPAATSGEKVRATPAARKLAREMSIDLALVSGTGANGRVHREDVENFKGAQPRITPLARRIAEDQGVDIAEITGSGIRGKIVKNDVLAAMSPQAAEAPVETKATPTTEEKQLPEGVEVIKMSAMRKAISKGMTNSYLTAPSFTLNYDIDMTEMMALRKKLIDPIMAKTGLKVSFTDLIGMAVVKTLMKPEHRYLNASLINDAQEIELHNFVNIGIAVGLDDGLIVPVVHNADQMSLSDFVIASKDVIKKTQEGKLKSAEMSGSTFSITNLGMFGTKTFNPIINQPNSAILGVGATIPTPTVVDGEIVARPIMAMCLTIDHRIVDGMNGAKFMVDLKNLMENPFGLLI

SEQ ID NO: 19893 - protein, 332 aa, Polaromonas sp. JS666
MTIKVGINGFGRIGRNVFRSAVQSFSDIEIVGINDLLEPEYLAYMLQYDSVHGRFKGEVSVDGNTLIVNGKKIRLTQERDPANLKWNDVGAQVVIESTGLFLDKTSAEKHLAAGAKKVIISAPSKDDTPMFVFGVNDKTYKGEAVISNASCTTNCLAPVAKVLNDKWGIKRGLMTTVHAATATQKTVDGPSNKDWRGGRGILENIIPSSTGAAKAVGVVIPELNKKLTGMSFRVPTSDVSVVDLTCELSKEATLKEICAEMKAQSEGALKGVLGYTEDKVVATDFRGDARTSIFDADASIALDSTFIKVVAWYDNEWGYSNKCLEMVRVVAG

SEQ ID NO: 19894 - protein, 346 aa, Trichodesmium erythraeum IMS101
MSPYLEELKVTAQAMVAKGKGILAMDESNGTCNKRFEKLGIPTTEEYRQAYRQLILTTPDLSNYISGPILYDETIRQSTTEGVPFLKVITDAGMIPGIKVDTGAKNLANHPNEKVTEGLDGLGERIAEYYQMGARFAKWRAVITIGDGIPSRACIEANAHGLARYAALCQEGGLVPIVEPEVLIDGNHTLERCFEVTDETLHTVFNHLYTQGVAFDQMILKPSMVIPGKDCPTQVSVEAVAEATINCLLKNVPVTVAGIAFLSGGQSIEQSSAHLNAMNALFGSRCPWPVTFSYARAIQQPALDYWSGDSARVAEAQQKLLARAKCNSAASVGEYSASMDETPVLV

SEQ ID NO: 19895 - protein, 786 aa, Bradyrhizobium sp. BTAi1
MTPPMPNPTGASSEALLEAMQAPPPAAGALSFRMFLASVLAAAATVVAVELLTDLQKDRIVSLLMLAFGAVVVMIVLTSMLIRKSRHAIALANALARQNDQLAQTTRLLGDAQRIGRLGHWVTDPSGEFAVWSDELFEIAGLEPVDQVAFAKMLDIIHPEDVGAYVRARDRSRATGCAFIQELRFVTPNGQVRWVRIEANASDEADGVFRERFGIVQDITERKLAEINADQARLLLMDAIESLTNGFVLFDKDDRFVMSNTMFREMFPAWTVLMKPGISFTELMRRAYEHGLIRSKGDRFEEWLARKTAWHLGGSRMIEHRELNGRWIQSVDHRISDGGTVCLVTDITAFKTVQAELEQKLAYVEAIRSDLEQQTQELEARGAELRAARDAAEAANRAKSDFLAIMSHEIRTPLSGMVGMVDLLRGTSLSEEQKRYTALAKESADLLLEVINDILDFSKLEAGRLQSECIDFDVPNLVESAVSFMGEKARRRGLDLKVSLAPGLPQYLEGDPTRIRQVMLNLVGNAIKFTEQGSIEVRASHRQLDGGVVDLRIEVIDTGIGMSPEILAQIFDPFVQADTSISRKYGGSGLGLAICRQLCTIMGGSIGVDSELGRGSRFWFETKCRCGEALALPAETVVASVDRPLDILVAEDSPIIATLIQSLLVKQGFRPTMVVNGAEAIAAISDKVYDLVLMDVQMPEMDGISATKAIRQLPGPERCVPIIALTANALVGQRETYLAAGMNDYVTKPIQPPLLFAAIRRWALPQYADAPPLQAGGNGQLEMFVS

SEQ ID NO: 19896 - protein, 181 aa, Candida glabrata CBS 138
MRQLTEEETKVVFEKLAGYIGRNIAYLVDNKEVPHVFRLQKDRVYYVPEYIAKLATSVARQNLMSVGICLGKFTKTGKFRLHITALSVLAKHAKYKIWIKPNGEMPFLYGNHVLKAHVGKMTDDIPEHAGLIVFSMNDMPLGFGVSAKSTLESKNLQPTAIVAFRQADIGEYLRDEDTLFT

SEQ ID NO: 19897 - protein, 177 aa, Brassica napus
MAAFTCTSSPPISLRSEMMIASSKTVSLSTRQMFSVGGLRTRVSLSSVSKNSRASRLRRGGIICEAQDTATGIPMVNDSTWESLVLKADEPVVVDFWAPWCGPCKMIDPIVNELAQQYTGKIKFFKLNTDDSPATPGKYGVRSIPTIMIFVKGEKKDTIIGAVPKTTLATSIDKFLQ

SEQ ID NO: 19898 - protein, 94 aa, Triticum aestivum
AVANCGQVVSYLAPCISYAMGRVSVPGGGCCSGVRGLNAAAATPADRKTTCTCLKQQASGMGGIKPNLVAGIPGKCGVNIPYAISPRTDCSKVR

SEQ ID NO: 19899 - protein, 280 aa, Zea mays
MAYSAPISPSLSFFKNPQLTRLSFPFSPLYSRPRVQNPSLLTKNKTWSSSVVVAATAAEKQKKRYPGESKGFVEEMRFVAMRLHTKEQAKEGEKETKSPEERPVAKWEPTVEGYLRFLVDSKLVYDTLEGIIHQSTFPTYAEFKNTGLERAEKLDTDLKWFKEQGYEIPEPTDTGKKYSQYLKDLADKDPPSFICHFYNIYFAHSAGGRMIGRKVAERILDNRELEFYKWDGDLSGLLQNVREKLNKVAEEWTREEKNHCLEETEKSFKYSGEILRLILS

SEQ ID NO: 19900 - protein, 501 aa, Pavlova lutheri
MAAPTSPYGAESPRAAYAYPERANVKMSEALRVLDEGVHPLVIHSSQILAAALLVTAAVNHFPKITVADLAEIWRSLQIDVAYAFALTAVAVLLLGYYALRHPRPVYLVDFATWQLRDDKDDGSLSATSDFFRSTITDCGNFCDESVDFQMKLFERNQISERCYFPPGIRAYRKGERDFDFSMAAARKEFETVVFTTVDELLAKTGVKPRDIDILVVNCSLFNPTPSLAAIVINHYQMKDSVQSYSLGGMGCSAGLISIHLAKDLLQVYPRKRALVISTENITQNFYQGNEKSMLISNTLFRMGGAAVLLSGRHADRRVAKYQLLHTVRTHKGADPDAYRCVFQEEDKAGHVGVRLSKDVMECAGAAMKTNISVLAPLILPVSEQVRFLANYVARKWLRMKGVKGYVPDFTTAVQHFCIHTGGRAVLDALQANLSLSDYYLEPSRYSLWRWGNVSSASVWYELDWLEKSGRIRRGDKVWQIGFGSGFKCNSAVWRACRAMP

SEQ ID NO: 19901 - protein, 291 aa, Ustilago maydis 521
MGESRTELIHWINELLGFSYTKVEQCGSGAAYAQIIDSIYYNVPLAKIKFDAKHDYEYINNFKVLQEAFKRNRIDKPIPVDRLIRCKMQDNLEFLQWLKRYWDQNFSGEMYDAEARRGGVGAAPPPLVGAVSVGAARSTGAARAAPSAQAATSRSSARAPPAAASTTRRPLGGAPARAPAASAASVPNETIQALTAQMDEMKVSVDSLEAERDFYFAKLRDIEILVQERLGVLAEQFPAPSEDDDPEGLHVGSEEQESLKQIQAILYSTEEGFELPEGGDELVQPDEDEMF

SEQ ID NO: 19902 - protein, 515 aa, Zea mays
MAARFLLVVAVALLLRPGDASVHEYRGLSFANKGNAFILHAGSEGLYAASHANTTAEDAAAVAEAFIRFDKITFRRSEDTNNSVKETSSAKVQVLVFEIEDREMIGGSAYGGQKAICCSSDLAKLGACTEGSVIYRPSQVNPGWPKLFVASFEGSDLIATLPSRTIQITKTGMYNMYFIHCDPSLASLEIEGKTIWKNPTGYLPGRMAPLKNFFGLMSFAFVVLGIYWFYQYMKSWKEVLPLQNCITLVITLGMLEMALWYFEYAEFNETGVRPKGITFWAVTFGTVKRTAAEVIVLIVSMGYGVVAPTLGGLTSKVVMLGGTFFLATEILELVENLGAVNDLSGKARLFLVYPVAILDAAFVVWIFISLAKTIGKLQARRLMAKLDIYRKFATALIVSVLVSVGWIGYEIYSKSTDVFNERWQHAWIIPAFWHVLSFLLLCVICYLWAPSQNSMRFSYDASEFFDRKDNLSLIRPATSASKNGWSLSSAPEAKATKDVNTVADFEGDDEENKRE

SEQ ID NO: 19903 - protein, 773 aa, Oryza sativa
MAPADIPPPLEGKKRRIGVMTSGGDAPGMNGSVRAVVRMALHSNCEAYAIYEGYDGLVKGGDMIKEMKWEDVRGFLSEGGALIGTARCMEFMQRDGRRTAAKNMILKGIDALVICGGDGSLTGADRFRDEWPSLLEELVERKELTKDQVAPFKHLNIVGLVGSIDNDLSMTDATIGCYSSLARICEAIDSVDTTATSHQRAFVVVTMGRHCGWLTLMAGVATGSDFIFIPKQPAKEGWEGNMLHIIQKHRAMGKRKTIVIVAEGAIDENLNKITPHQIKEILSEAGLDTRVTTLGHVQRGGQPAAYDRMLSTLQGAEAVKAVLEATPETPSPVICMIENKIVRRPLLEAVAQTKKVAEAIEKKDFKTAMDLRDAEFSEYFKAYQITTAAEQPNLMLPKEKRMRVGIIHVGAPAGGMNAATRAAVAYCLARGHTPVALHNGFPGLIRHHSDKPLGAVRDIDWLDAETWANKGGSEIGTNRGLPSEDLETVAYVFKEYKIEALFVVGGFEAFTAVSELRKGREHYKSFKIPMVILPATISNNVPGTEYSIGSDTCLNALIQYSDACRQSASASRRRVFVVETQGGESGYIATIAGLSIGAFAVYTPEDGISLKMLDHDIDALRDAFTKDKGQNRAGKVILVNEKASKTYSVQIIADMIAEAGKGKFESRHGVPGHFQQGTIPSPMDRVRAVRFAFRSMEHIEQYAGMDPDDIDDDAMSTAVIGIKGAKVLFSPMEAIEKKETDWHRRRPKKEFWMELKQYVDILSGRPPNNKAQH

SEQ ID NO: 19904 - protein, 613 aa, Moorella thermoacetica ATCC 39073
MCGITGWVDWELDLTGQKNILEAMTATLACRGPDAAGTWVAPRVALGHRRLVVVDPAGGGQPMVRRRGNQTFVLTYNGELYNTGEIREELLSRGYTFRGHSDTEVLLTAYMEWGVECVRRFNGIFAFAIWDEARERLFLARDRLGVKPLFYATLPHSFLFGSELKALLAHPAIKPEVDAEGLAEVFVLGPARTPGHGVFHNLAELKPGYYMTYDRQGLRLHQYWALQSHPHTDNLETTIAKVRQLLQDTVERQLVADVPVCTLLSGGLDSSAVTVFAARAFQGRGQGHIHTWSVDYIDNDRYFQPSHFQPNPDAPWVKLVSEHLETIHHYVYIDTPELVDSLKAAMRARDLPGMADVDSSLLLFCREVKREATVALSGEAADEVFGGYPWFRSEKALAANTFPWNRAGQERIRLLSPELKAMVRPEEYVARRYREALAEVPALPGEEARAARLREISYLSLTRFMPVLLDRKDRMSMAVGLEVRVPYCDHRLVEYVWNIPWEMKFVGQMEKGILRRALAGILPAEVINRRKSPYPKTYNPAYLEAVRNWMLDILADPASPLLPFIDVAAVKALTQSREVFNLPWFGQLMSGPQLFAYLAQIDTWMREYGVSVR

SEQ ID NO: 19905 - protein, 112 aa, Moorella thermoacetica ATCC 39073
MKKIEAIIRSSRLEAVKEALGKYNIHGLTVTHVLGCGLQRGQTEYYRGNLYTVNLLPKVKLEIIALDNRVPEIVEIISREARTGEIGDGKIFIYPVETAIRIRTGEQGEDAI

SEQ ID NO: 19906 - protein, 428 aa, Psychrobacter arcticus 273-4
MALIVQKYGGTSMGSIDRIKNVAKRVKRWHDNGHQVVVVVSAMSGETNRLIDLARQISSQPDPREYDQMVSTGEQVSISLLAMAIKELGIGARSFTGRQVAIKTDNAHNKARIESIDDKNIRQQLDAGNIVIVAGFQGIDEEGNATTLGRGGSDTTGVAIAAALGADECQIYTDVDGVYTTDPRVTSKAKKLEKITFEEMLEMASLGSKILQIRSVEFAGKYGVPLRVLSSFDENNDGSFDQDFQDNVGTLITIDEGDNMEQAIISGIAFNRDEAKIVVRGVPDHPGIASAILSPIGRANIEIDMIVQNLSTNGMTDFTFTVNRTDMEKTMKVLENEVKDEIGAKEILANDEVVKVSLVGVGMRSHAGVASLMFQTLAENNINIQMISTSEIKVSVLIQEQYLEKAVRSLHTAFGLDREDGESKVAGL

SEQ ID NO: 19907 - protein, 306 aa, Crocosphaera watsonii WH 8501
MKWEADSKVLIQGITHPLAISYAPRMKAQGTNIVAGITLDEETSDINDIPVFTLVEEAVTEVGKIDTSLIFSPPYEVLDAGLEAIAANIEQLVIVTAWVPPLDLITLLEQAKATNTFVLGSGSEGLLVPDNFWLGVMEPEFYSKGSVGIISRCDRLMDEVAKRLTKAGLGQSLAISLGADWIMGSNFEQWLQIMEEDDSTKAIVLLGQPYSSPELLAAQYIDSGIEKPVIAYLPGIQAPINRSFGDATSIIASQLSYQSTSITEENQTVTALKKAGVKIANNVEEIPKLVKRLFPSQRRKSRTSNR

SEQ ID NO: 19908 - protein, 317 aa, Rhodobacter sphaeroides 2.4.1
MRGKAMAETRHTRVLIIGSGPAGYTAAVYSARAMLNPLLIQGLQPGGQLTITTEVENWPGDREVQGPELMVRMEDHARAMGAEIVSDYISSLDLSQRPFTAQADSGMTYTADAVILATGAQARWLGLPSEERFKGFGVSACATCDGFFYRGKEVVVAGGGNTAVEEALFLTNFASKVTLVHRRDSLRAEKILQDRLFKHPKIEVLWNHTIEEVAGTEAPLGVTGIVARNVLTGETTEVPCEGFFVAIGHAPASELVKDQLELHHGGYVKVEPGTTRTSIPGVFAAGDLTDHVYRQAVTSAGMGCMAALDAERFLAGA

SEQ ID NO: 19909 - protein, 954 aa, Vibrio sp. Ex25
MTELLQSLSTQNEFVGRHNGPSKSDQQKMLDAINAVSLDALIEETVPAQIRLEQPMTLAEAKSEADMLVTMKQFAKQNQIKRTFIGQGYYNTFTPNVILRNVLENPGWYTAYTPYQPEISQGRLEALLNFQQMIIDLTGMEIANASLLDEATAAAEAMTLCKRAGKSKSNVFFVADDVHPQTLEVVKTRAKFIGFEVLVGSLESLPEQDVFGALVQYPSTTGEVRDLTDIIAKAQANKTLVTVATDLLASTLLKPAGEMGADVAIGSAQRFGVPMGYGGPHAAFMATRDKHKRTMPGRVIGVSIDTNGNQALRMAMQTREQHIRREKATSNICTAQALLANMASFYAVYHGAEGLRTIARRTHHMTAIIAAGLTKGGFELAHNSFFDTITINTGSKTEELYAKALSADINLRLLPGKLGISCDETTTVADVEALFAVFGVKEDVAALSTEIGGNEFAAIPEALRRTTEYLTHPVFNTHHSETQMMRYLKQLENKDFSLTHGMIPLGSCTMKLNAAAEMIPITWPEFGSIHPFAPAEQAAGYAALAKDLKEKLCEITGYDAFSLQPNSGASGEYAGLIAIQRYHESRGEGHRNVCLIPSSAHGTNPATASMVSMKVVVVKCDEEGNIDIDDLAAKIEKHKDNLSSIMITYPSTHGVYEEKVKEVCEMVHAAGGQVYLDGANMNAQVGLTSPGFIGSDVSHLNLHKTFCIPHGGGGPGMGPIGVKSHLAPFLPGHIEDGVEGEDFAVSAADMGSASILPISWAYIAMMGEAGLTDATKVAILNANYVMETLRQHYPVLYRGKNGRVAHECIIDIRPLKEETGISEEDIAKRLMDYGFHAPTMSFPVAGTLMVEPTESEDLEELDRFCDAMIAIREEMEKVKNGEWPLENNPLVNAPHTQVDLSAEEWDRPYSRELGCFPSKATKSWKYWPTVNRVDNVYGDRNLICSCPSIDNYED

SEQ ID NO: 19910 - protein, 435 aa, Solibacter usitatus Ellin6076
MLAFIRFSLYRRPEKRQSKSMRRVVITGIGAVSPNGIGRERFWEATRNGVSGVRRITRFDPSAYQVQVAGEVPDEFDENRYVEVKDRPHVSRAVPLAAASVAEAVADAGLDVKAMGRDELRGIGVIVGSGGGSQDFTEEQYRLYYAGLIKQCSVYTIPTGTIGTLASEVSMRFGFRGLSHIVSTGCTSSTDAIGYAFRNIQAGVLSTVVAGGVDSPIAPLILRGFQLMRIMSTRWNHDPTRASRPFSKDRDGFVIAEGSWFFVLEEMEQAKSRGAHIYGEIAGYGSTCEAFHRVRLEECGEEPARAIGMAVEEAGIQPSDIQYIHYHGTSTELNDRIETRAVKLAFNGHAGKLAGSSLKSMIGHPQGACGAAGIAATLLAMRDGILPPTINVDEPDENCDLDYITDIGRKMHVEHAVANCIAFGSKNSAMVLRRA

SEQ ID NO: 19911 - protein, 331 aa, Corynebacterium diphtheriae
MYRELAHRKDGEEREILLAIADAEARHEQHWRNLLGDYVGMPKSPDLSTRMLAFLARNFWSVFALALMQTAEQRSPYADDDDATEQMKADEAIHAEIVRGLAARGREQMSGNFRAAIFGANDGLVSNFALVLGVVASGVSPNIVLLTGISGLLSGALSMGAGEYISVKSQNELLEASTPHPGTRNHIPQLDVDANELALVYRARGMSEADAEQKAAEAFVNLRNAEDQAIIDEPRNDEPINGAWSAAVSSFFCFGFGALIPVIPYFFNVSGVAAAVIATVLVGAALMITGSITGILSGKPPLKRALRQLAIGMAAAGVTYLLGKAFGVALG

SEQ ID NO: 19912 - protein, 269 aa, Absidia repens
HTFYNELRVAPEEHPVLLTEAPLNPKSNREKMTQIMFETFNAPAFYVAIQAVLSLYASGRTTGIVLDSGDGVTHTVPIYEGYALPHAILRLDMAGRDLTDYLMRILAERGHSFTTTAEREIVRDIKEKLCYTALDFEQEMQTAAQSSALEKSYELPDGQVITVGNERFRAPEALFQPSFLGLESSGIHETTYNSIMKCDVDIRKDLYSNIVMSGGTTMYPGIADRMQKEITALAPSSMKIKIVAPPERKYSVWIGGSILASLSTFQQMW

SEQ ID NO: 19913 - protein, 555 aa, Xylella fastidiosa Ann-1
MQPRPQPMQYHPPVRHPLKLATDQHPDCPSTTQHHPGTNAGSPPRFFYSQPAAHHRRQHHNHLTQANDRTMATDIATPQNAEILERLDRRYEAGFVTQIESDSLPPGLNETIIRALSAKKHEPEWMTEWRLAAYRHWLNMPMPEWAKLHIAPIDFQALSYYSAPKGPKYASLDEVPKELLDTYDKLGVPLHERARLAGVAVDAVFDSVSLGTTFRKELAEKGIIFCSISEAIQEHPDLIRQYLGSVVPVRDNYFAALNSAVFSDGSFVFIPKGVRCPMELSTYFRINAGHTGQFERTLIVCEEQAYVSYLEGCTAPIRDENQLHAAVVELVAQEDAEIKYSTVQNWYPGDEAGRGGIYNFVTKRAECRGARSKVIWTQVETGSAITWKYPSCVLLGDDSTGEFHSVALTRHHQQADTGTKMIHIGKRTKSKIVSKGISAGHGQNTYRGLVKIDRNAEGARNHTQCDSLLIGKQCGAHTFPYIEVKHPNATVEHEATTSKISDDQLFYCRARGIAEEDAVSIIVDGFCKQVFRELPMEFAVEAKKLIDISLEGSVG

SEQ ID NO: 19914 - protein, 1091 aa, Arabidopsis thaliana
MMMSNLPKDLVEEILSRVPFKYLRAIRSTCKNWYDLSKNRSFANKNIDKAAVSGEKEFLMITQFNVFWVGVNLHRSQNNSFDLSIQLKAKIVSRDKKDDLFQKSQVIHCNGVFLCVREKMLVVLNPYWGQTKRIMPRPPFGCFDRYALGYDKSSGSHKILRLFGVNQNNLNIYDLSSSSWMIPDGTLERDMEYMKQGVSLNGDTYWYAKDKESIDWYLLCFDFTRERFGTPLPLPFSNEGYTLHKGYKSLSALKEEKLAVLLWDTMVIWVTNKIEPDAVSWSIFLKLDMEPSIYCRYGNFFIDEEKKVAVVFEKDSSSWSWMYNPNYNKAYIAGENENSFTLHFTKKRVDKGRASYTSILDSVQSSTCLSRRFLKLDLTYRCDVVSSLKLETTIIMMMMSNLPNDLVEEILSRVTVTFMRTVRSICKKWNALTKDRSFTNKYIRNIAALGEREFLMIKEFSIYLVGVNLHGIQNNNFDLSIELKGKLISMDNTIRRFCISQIFHCNGLFLCVSQKDMDNRLVVWNPYCSKPRWIKPSYNYRTVDRERFGPRLPLPFMNLDDVSLSVVKEEKLAMLLKRWDTCEVEIWVTDKIEPDVSWSKFLKVGIKPRFDFANFVVIDVVKKVALVFDKNKAEKFQYSYNIAYIIGEKASPEELSSHRERKKRVESCLKHEKASPQGFVIGFLPKRPHTSCRDCIQSQPYGQASKAHACGNLRSCQDRLYPTISPSNQRPRTWASFLRHILISNLPDELVEEILCRAPVTSLKAMRSTCKKWYVLTKDQRFAKKRGKEFLMIMNRRVYLIGVNLHNNIDLSIKCRGRLISRDETAQGFYVSQVFHCNGLLLSVSGKTIDDTRLVVCNPYGVKPKWINPKDNYGRLDIFSLGFDKLCGSYKILRIYDFDNKLQIYDLSSNSWMIPRDTLGRDIEYMQNGVSSKENTYWCARDKQSQYCFLFCFDFTRERFGPRLPLPFNGAYVSLSAVKEEQLAVLFQPSDKSEIEIWVTNKIEPEEVSWSVFLKVEMKLRVLSWNFLIDKEKKFAVVFDKDKAKGFKTNYDIAYVIGENGYYRRVDLRESPNKPLCRIVSCYVPSCVQIE

SEQ ID NO: 19915 - protein, 236 aa, Brassica napus
  misc_feature (215)..(215): Xaa can be any naturally occurring amino acid
  misc_feature (224)..(224): Xaa can be any naturally occurring amino acid
MDFNAGVPMSSLSPLMTQEAMWQMNLSHDETMEAGSYPERPGEPNCSYYIRTGLCRFGSTCRFNHPPDRELVIATARMRGEYPERIGQPECEYYLKTGTCKFGVTCKFHHPRNKAGIAGRVSLNMLGYPLRSNEVDCAYFLRTGHCKFGATCKFNHPQPQPTTSLMVPTSGQQQSYPWSSASFIPSPRWQDPSGYTPLLMPQGSVPVQGWNPYTXQLGSVSPSXTGNDHTTTETCS

SEQ ID NO: 19916 - protein, 882 aa, Frankia sp. CcI3
MSSRSLVVVGHGMVGHRLLAALRDRDVEGRWDVTVLAEEPRPAYDRVGLSAYFTGATAEDLSLVEDGFLEHPRLRVRLGEPVVAVDRAARTVTTGAGRTYRYDALVLATGSYPFVPPVPGREATGCHVYRTIEDLDAISASARGSRTGTGVVVGGGLLGLEAANALRSLGLATHVVEFAPRLMPAQVDEAGGQTLRAHITGLGIGVHTDTATERIEADADGRVARMVFARHPEGLAGLDTDVVVFSAGIRPRDALARECGLDVGDRGGIVVDEGCRTSDEHIYAVGECALAAGRVYGLVAPGYAMAEVVADRLLGGDATFTGADMSTKLKLLGVDVASFGDAFGTTPGALPITFADPVAKVYKKLVLSDDARSVLGGILVGDAGEYGTLRAMVGSAGVVPDDPARLILPAGDVAGAGGSGAGVALSAGAQICSCNNVTHGQICAAISANGLTDVAGIKGCTNAGTSCGSCVPMLRTILGQQLAAAGLEVSKALCEHFDVSRAELFEIVRVRGITTFSQLIAEHGRGRGCEVCRPVVASILASLYNGYVLVGEQAALQDTNDHLLANMQKDGTYSVVPRLPGGEVTPETLILIGEVARDFNLYTKITGGQRIDLFGARAEQLPKIWKRLTDAGLESGHAYGKALRTVKSCVGETWCRYGVQDSTTLAVDLELRYRGLRSPHKIKMAVSGCARECAEARSKDVGVIATEQGWNLYLGGNGGHRPRHAELFASDLDTETLVRYIDRFLMFYVRTADRLQRTAPWVESLDGGLGHVREVIVDDSLGICAELDTAMAYHVATYQDEWKTTLADPVALRRFASFVNAPEGADPDVIHVLERGQPRPARPAERAALIAGATLPVVADRFLAYPGSLPIQRDETDTKASG

SEQ ID NO: 19917 - protein, 511 aa, Synechococcus sp. RS9917
MERRYGGQLLDPWSETPCHQQPMASAPLPLAAAPIKFGTDGWRGILGVDISVERLLPVAAASAQELAARAPEGLRSRTVVIGYDRRFLAPELAAAIAAAVRGCGLEPLLTDTPVPTPACSWAVVQRQALGALVITASHNPPEWLGLKIKGPFGGSVEGDFTAAVEQRLAVGGITPPVAGETSRFDGRGEHLDGLRRKLDLPSLCRGLEAMHLRVIVDPMHGSAAGCVAELLGDGINDRRLVQEIRSQRDPLFGGHPPEPLAPYLGDLIAAVKQATAAGQHAVGLVFDGDGDRIAAVDEEGRFCSTQQLMPLLIDHLARARQLPGSVVKTVSGSDLMRLVAEDLGREVLELPVGFKYIAAEMLAGEVLIGGEESGGVGFGMHLPERDALFAALLVLEALVEGGQPLGARIHALQQRCGGASHYDRLDLRLADMDCRRRLETLLAEEPPQEVAGAPVQEVIRTDGVKLRLGPSHWLMLRFSGTEPLLRLYCEGPDAARVAAVLDWARALATAV

SEQ ID NO: 19918 - protein, 121 aa, Arabidopsis thaliana
MAGAGTSMLGSLLVFTVILSLQEIYRGKLASSELFTILGGFTSSLLFLFSLTFIGNFQESSGIKSGWGAVILAEIIALIAAGTVHRVCITTCFLFSAGLLYEVNKISGYMLSKTESKSKRH

SEQ ID NO: 19919 - protein, 532 aa, Solibacter usitatus Ellin6076
MLTDREAYKKLAAHFEQVKNVHLRELFAADSRRGERLTAEAAGLYLDYSKNRVTDETLGLLLALAEECGLRGRIDAMFRGDKINTTEGRAVLHTALRAPRGKSPAAAQVPEAGEPVQAVLEQMSVFATSVREGRWAGFTGKPIRNVVNIGIGGSDLGPVMAFEALRYYSQRNLTFRFVSNVDGTDFREATRDLDPAETLFIVASKTFTTLETMANAQSARAWTLAALGDPAAVARHFVAVSTAAEKVAKFGIDTANMFGFWDWVGGRYSMESAIGLSTMIAIGPENFLEMLGGSYAMDEHFRTAPFAKNLPVLMGLLTVWYNNLFKAQTVAVLPYDQYLKRFPAYLQQLTMESCGKHVTLGGEPITTYETGPIFWGEPGTNGQHSFYQLIHQGTKLIPCDFIGFRQTLNPLPSPMGNHHDLLMANVFAQSKALAFGKAAPAGQPYREFDGNRPSNTILAERLTPAVLGALVTLYEHSVLTQATIWDINPFDQFGVELGKVLAAEILPSLAKDAPLPDDDSSTVALIKRYKKQ

SEQ ID NO: 19920 - protein, 358 aa, Arabidopsis thaliana
MTMDSKVCSVRFHLRRSKEEEEDTMDLSIKQVDLLNQVEISRVYHCDGLLLCVAKDNSRVVVWNPYLGQTRWIRPRTESNIGDSYALRYDINRNHKILRMVQTRNVSVYRYEIYDLRSNSWRVLEVTPNGEMDPNHPLYGVSVKGNTYFFAHEDSSSGEIDEDGDIIDLEDFLLCFDFTTETFGLRLPLPFHSTIDATVTLSCVRDQQLAVLYHNEGLHSDDRFTTVEFWVTTSIEPNSVSWSKFLTVDMRPLALTGVRFDNDMGATFFIDEDEKVAVVFDLDGYLSTESARYHTAFISGKDGFFKPVTLGVAPNVGEPCPRTGHIPTTYRPPLVCSSTYLPSLVQVNQQRKRKERHV

SEQ ID NO: 19921 - protein, 1009 aa, Cochliobolus heterostrophus
MPSAGQQRVAFFPKADAAVLTSRHAAPVLADRPTTTAPILDPEHVDIPLDAWTPAEMQAVYPDKTDTCALSPIPAKEQCPRRCHGERYLFPVLAPNERLRLTMLFYYTRGLLEDQELMSRLQEKVLLAHETVGWEFVITGLLNHNTYTRLVTVNLPLAILPRRESTCSHTINQTPDSIFALHNMVYDWRFEKSPHVEVGGLRAYAGVPLKFETEFGQHVAFGSLCVASNSPQELLSPVVQQSLIRLADGIVSDIVHSARARRQKERRRMLELICDAQRHCDEHADMEQEIPKIVQEIYPGMEVVIKKTTDGYISLESGTTFSTCELEHGLWEDTDYFDYAVKHLNHLDMTAPRAVRAIAAQCASQTVPTFLVVACNDLKRIFDDVDSWFVQTCAMVLCRFWQNCTLQEALAVKESFLRGITHQLRTPIHGILGSAELLTEVLKTRNAAHLSPSCPSATKPETEQLDLSTYVQTIRTSAKELISTVNSLIKLNQWAEIAQAERVMALHRVSDIEAALLHEVLMGLPDDLSIRPSIMISHRFPKSCDMLVIDIRVFLDCIQPLVALAAQQSAGGVVAVVLTVEEDYRSLAVNIYYTRLDAVRSPSESMNDIYTKDDFTTAESALGLTIACKAAALLNGEVEVLSSKHDSTSFYRTTFNNPICASSLSPPFPVKNGMARLPQKFYRLASESPMSSLGHHFSHWLSNTGWLESKEKSESLVIVDYHSDLVQFYQQLASVGTEQVIICLVPENATFLDFQNKRVRRQENAVYVQGPFLTEQLLQAMELVTAILVESRRPTFKPKDFPFCTAVAEPKLISAPQVNAVETENLVKQGSIFPKKTQTQLAESLQTLRLRSKPSLPAGKLVVNSNKPRALLVDDNTVNLRLLQMYCDRRGISYQTAKDGLQAVKIFSEAVITRYDPLLQRDVSATAFDLILMDLQMPECDGIDATRQIRRLEEENKWEKSVLFIVTGQDSPTDRKNAEEAGADEFLTKPLGPKVLDQWVKKWYPEAGI

SEQ ID NO: 19922 - protein, 436 aa, Aspergillus oryzae
MPSASETSTDLTSRNPYGHGNGVSDFLSNVSRFKIIESTLREGEQFANAFFDTQKKIEIARALDEFGVDYIELTNPCASEQSRLDCEAICKLGLKAKILTHIRCHMDDARIAVATGVDGVDVMIGTSSLMRQHSHGKDIEYIKKTAIEVINFVKSQGIEVRFSTEDSFRSDLVDLLSIYSAVDQVGVNRVGVADTIGCASPRQVYELIRVLRGVVSCDIETHFHDDAGCAIANAYCALEAGATHIDTSVLGIGERNGITPLGGLMARMVATHPEYVKSKYRLDKIKDIEDLVAEAVEINIPFNNYITGFCAFTHKAGIHAKAILNDPSTYEIINPADFGMTRYVHFASRLTGWNAIRSRAQQLNISMTDKQYKECTAKIKALADIRPIAIDDADSIIRAYYRNIQSGEDNPLMELTADEAAQLAAKEKELGEVVTA

SEQ ID NO: 19923 - protein, 94 aa, Triticum aestivum
AVANCGQVVSYLAPCISYAMGRVSAPGGGCCSGVRGLNAAAATPADRKTTCTCLKQQASGIGGIKPNLVAGIPGKCGVNIPYAISQGTDCSKVR

SEQ ID NO: 19924 - protein, 106 aa, Sorghum bicolor
AGMGGGQFQPAREEHKTGGILHRSGSSSSSSSEDDGMGGRRKKGIKEKIKEKLPGGHKDNQHATATGGGAAYGQQEHTGAGTYGTEGTGEKKGIMDKIKEKLPGQH

SEQ ID NO: 19925 - protein, 346 aa, Rickettsia sibirica 246
MLGYMKKRIAIVLFNLGGPKNLKSVKPFLFNLFYDKAIINLPNPLRYIIAKIISITREKKSQKIYSLIGGKSSLLQETEEQKLALTEKLKQLIKEDFAIFINMRYSAPFAKEVIGQIKKYNPSEIILLPLYSQFSSTTTGSSVKNFLQNLDIDIPIKTICCYPLEKDFIKAHVSLIKEKLYDKNFRILFSAHGLPEKIIKAGDPYSFQIKETVQAIVKELNIKDLDYKITYQSRVGPIEWLKPNTEDEIELAGKLKKDIIIVPISFVSEHVETLVELDIEYKLIADKYEIQYTRIPTLGTNKIFINSLTNILLRFINKVDTNLVMSSSSTRICPNEFTKCLCKLTS

SEQ ID NO: 19926 - protein, 70 aa, Glycine max
VFYTPFLRHLWTWLGLTPATKKNFISLLASGHSCILIPGGVQEAFHMQHGTEVYCFSFLLLNAYVIYLFF

SEQ ID NO: 19927 - protein, 419 aa, Desulfitobacterium hafniense Y51
MHYVIIGNSAAGVFAAEAIRGLDSSGKITIISEENNRPYSRCLTSYYIGEEIDQDRIYIRDANFYAATGIDFIPQKVEQVNDTEKSVTLQSGEIVGYDKLLIATGASPYSLPVEGLDLEGVCELRTLEDARRIMDFAPHVKEAVVMGAGLVGLKGAHALHELGIKVSIIVNSRIMSRSVDPHTGQIITELLEQDGYEVIYNTKLSKILGQDKVEGVCLSSGKEIPCQLVLMAAGVSPNVDLVKNTGIEVNKGIIVDKHMQTTVPHIYAAGDVAEAYHAVWDEKRVISIWPVATAQGTVAGSNMAGVERIYEGSVGSNSAVFCGVGVVSAGIPYLPTGEGQELSTYDKVTKRYRKFIVKDDILVGMIMVGDIDGAGILTAMIKQKTKVSLDTLNYWLNHPVRFQGYCTAEAKGGIVCGIC

SEQ ID NO: 19928 - protein, 90 aa, Oryza sativa
  misc_feature (12)..(12): Xaa can be any naturally occurring amino acid
  misc_feature (18)..(18): Xaa can be any naturally occurring amino acid
  misc_feature (20)..(20): Xaa can be any naturally occurring amino acid
  misc_feature (22)..(22): Xaa can be any naturally occurring amino acid
  misc_feature (24)..(24): Xaa can be any naturally occurring amino acid
  misc_feature (39)..(39): Xaa can be any naturally occurring amino acid
  misc_feature (42)..(42): Xaa can be any naturally occurring amino acid
  misc_feature (46)..(46): Xaa can be any naturally occurring amino acid
  misc_feature (52)..(52): Xaa can be any naturally occurring amino acid
  misc_feature (61)..(61): Xaa can be any naturally occurring amino acid
  misc_feature (69)..(69): Xaa can be any naturally occurring amino acid
  misc_feature (71)..(71): Xaa can be any naturally occurring amino acid
  misc_feature (74)..(74): Xaa can be any naturally occurring amino acid
  misc_feature (77)..(77): Xaa can be any naturally occurring amino acid
  misc_feature (81)..(81): Xaa can be any naturally occurring amino acid
MARAQLVLVAVXAALLLXAXHXAXAITCGQVNSAVGPCXPTXAGAXPVGACXSGVRSLKAXSSSTADRXTXCNXLKXAARXSRGLNAGNA

SEQ ID NO: 19929 - protein, 405 aa, Moorella thermoacetica ATCC 39073
MALIVQKYGGTSVNGPERVKNVARRVVNTRRAGNDVVVIVSAPGDMTDDLIAMAHEISPNPPAREMDMLLATGEQTSIALLAMAIHELGEPVISLTGPQVGILTDNVHSKARIMEVSCERLRRELEQGKIVIVAGFQGKTCEGEITTLGRGGSDTTAVAVAAALKADVCQIYTDVDGVYTADPRVVPEARKLPVISYDEMLELASLGAQVLQPRSVEFGKLNHVVLEVRSSFNDHEGTLVKEVTEMERKMVVSGVAGDRNVARIALHDVPDRPGIARTLFVALARESINVDMIVQSAMRDGINDIAFTVGRDDLQKAVEVTERVRQEIGASKVTSNDRVAKVSIVGAGMITNPGVAADMFACLAEEGINIHMISTSEIKVSCIIDEEHLTRAMQALHRHFKLDRE

SEQ ID NO: 19930 - protein, 525 aa, Zea mays
MESFGVPPAPVAAPEKRKKPLDLKDPVPAAAANGGGATKASPAAKWAEKKKLVGGDAGYVLEDVPHLTDYLPQLPTYPNPLQDNPAYSVVKQYVVNPDDTVTQKIVVHKTSARGTHFRRAGPRQRVYFQPDEVNAAIVTCGGLCPGLNTVIRELVCGLYDMYGVTSVVGIEGGYKGFYSKNTVALTSRSVNGIHKRGGTVLGTSRGGHDTAKIVDCLQDRGINQVYIIGGDGTQKGASVIYEEVRRRGLKCAVVGVPKTIDNDIAVIDKSFGFDTAVEEAQRAINAAHVEAESAENGIGVVKLMGRNSGFIAMYATLASRDVDCCLIPESPFYLEGKGGLLEFVERRLKDNGHMVIVVAEGAGQDLIAKSMNSVDTQDASGNKLLLDVGLWLSQKIKDHFKKKPRFPITLKYIDPTYMIRAVSSNASDNVYCTLLAHSALHGAMAGYTGFIVAPVNGRHAYIPFYRITEKQNKVVITDRMWARVLCSTNQPCFLSHEDVENMKHDDDEHHLHNTLLLDSPENSSK

SEQ ID NO: 19931 - protein, 421 aa, Neisseria meningitidis Z2491
MSEALAKETLNPFEIARKQVKTACDRLKTDPAVYEILESPTRVLEVNFPVKLDDDTVKTFTGYRSQHNNAVGPYKGGVRFHPGVNLDEVKALSIWMTIKCCVAGIPYGGGKGGITLDPRDYSEAELERIARAYSEAISPLIGEKIDIPAPDVNTNGKIMSWMVDAYENVVKHSAPGVFTGKPVEFGGSLARTEATGYGVNLAAVQALEKLGKDVKGATYAIQGFGNVGYHTGYYAHQSGAKVVAVSTVDVAIYNENGLDMEALFKEFQEKGFITNEAGYGKEITNAELLALDVDVLAPCALENQLTSENAGKVRAKIVVEGANGPTTPEADVILRQNGVLVVPDILANCGGVVVSYFEWVQNLQGYYWEFDEVQEKETVVLRRAFRDIWNLAQEYDVDLRTASYMMSIRRVEKAMKLRGWY

SEQ ID NO: 19932 - protein, 269 aa, Amylomyces rouxii
HTFYNELRVAPEEHPVLLTEAPLNPKSNREKMTQIMFETFNAPAFYVAIQAVLSLYASGRTTGIVLDSGDGVTHTVPIYEGYALPHAILRLDMAGRDLTDYLMRILAERGHSFTTTAEREIVRDIKEKLCYVALDFEQEMQTAAQSSALEKSYELPDGQVITVGNERFRAPEALFQPSLLGLESAGIHETTYNSIMKCDVDIRKDLYSNIVMSGGTTMYPGIADRMQKEITALAPSSMKIKIVAPPERKYSVWIGGSILASLSTFQQMW

SEQ ID NO: 19933 - protein, 269 aa, Backusella ctenidia
HTFYNELRVAPEEHPVLLTEAPLNPKSNREKMTQIMFETFNAPAFYVSIQAVLSLYASGRTTGIVLDSGDDVTHTVPIYEGYSLPHAILRLDMAGRDLTDYLMRILAERGHSFTTTAEREIVRDIKEKLCYVALDFEQEMQTAAQSSALEKSYELPDGQVITGGNERFRAPEALFQPTLLGLESAGIHETTYNSIMKCDVDIRKDLYSNIVMSGGTTMYPGIADRMQKEITALAPSSMKIKIVAPPERKYSVWIGGSILASLSTFQQMW

SEQ ID NO: 19934 - protein, 516 aa, Vibrio cholerae O1 biovar eltor str. N16961
MNNQVIIFDTTLRDGEQALSASLTVKEKLQIAYALERLGVDIIEAGFPVSSPGDFESVQTIAKNIKNSRVCALSRAVAKDIDAAAEALKVAEAFRIHTFISTSTIHVQDKLRRSYDDVVAMAVKAVKHARQYTDDVEFSCEDAGRTPIDNLCRMVEAAINAGARTINIPDTVGYTVPSEFGGIIQTLFNRVPNIDKAIISVHCHDDLGMSVANSIAAIQAGARQVEGTINGIGERAGNCALEEIAMIIKTRQELLGVTTGIKHDEISRTSKLVSQLCNMPIQSNKAIVGANAFSHSSGIHQDGMLKNKNTYEIMTPESIGLKNQALNLTSRSGRAAVKSHMDSMGYNENEYNLDALYEDFLKLADRKGQVFDYDLEALMHFSNLREEDDFYKLNYLSVQSGSVMATTSIKLLCGGEEKCEAAVGNGPVDALYQCIYRITGYEIVLDKFDLTAKGEGEDGLGQADIIANYKGRKYHGTGVSTDIVEASGQALLHVINSIHRADQIAQIKQKKSVATV

SEQ ID NO: 19935 - protein, 269 aa, Benjaminiella poitrasii
HTFYNELRVAPEEHPVLLTEAPLNPKSNREKMTQIMFETFNAPAFYVAIQAVLSLYASGRTTGIVLDSGDGVTHTVPIYEGYSLPHAILRLDMAGRDLTDYLMRILAERGHSFSTSAEREIVRDIKEKLCYVALDFEQEMQTAAQSSALEKAYELPDGQGITVGNERFRAPEALFQPGFLGLESAGIHETTYNSIMKCDVDIRKDLYSNIVVSGGTTTYPGIADRMQKEITALAPSSMKIKIVAPPERKYSVWIGGSILASLSTFQQMW

SEQ ID NO: 19936 - protein, 363 aa, Vibrio cholerae O1 biovar eltor str. N16961
MTDRDYKIAVLPGDGIGPEVMAQAHKVLDAIEQKHGIRFSREEHDVGGIAIDNHGCPLPESTLRACEEADAVLFGSVGGPKWEHLPPNEQPERGALLPLRKHFQLFCNLRPAQIHQGLEAFSPLRADISARGFDIVVVRELTGGIYFGQPKGREGEGAHEKAFDTEVYHRFEIERIARIAFESARLRRKKVCSIDKANVLQSSILWREVVSEIAKEYPDVSLSHMYIDNATMQLIKDPAQFDVMLCSNIFGDILSDECAMITGSMGMLPSASMNESKFGLYEPAGGSAPDIAGKNIANPVAQILSAALMLRYSLGEEAAARDIENAVSQALAAGELTADLAGSKPALSTSAMGDKIASYILNS

SEQ ID NO: 19937 - protein, 659 aa, Dechloromonas aromatica RCB
MSGTRQTIRKKIALAIAVSLGIGLLLSFLTFAVREIDQRRQAKTNELFAMADVVAFNASAVIEFKDTKGAKQLLSSFAEHPDVLTVRLLGLDSDFRYIFDAVNRQLPAQVNLGDRPHRERAVYADWSNVTVAVPIRSEDGVVGTVSITASLNQVWQAIAWNLALSLLALTISFVIAFAIASKMLAAILAALGSLTDTAQYVANSKDYSRHAKIYSDDEIGRLGDTFNSMLAEIAERDRQLADQRDHLEDTVQERTQALSVAKEAAEAASRAKSTFLSNMSHELRTPMNAIIGMTYMLKRQNADPLQVDKLGKIDNAANHLLQLLNDVLDLSKIDAERMTLEQTAFSIPELAADVASLLTPRAESARLRFILDVDSRLKGLRLLGDPLRLQQVLLNLAGNAIKFTERGEVRIVARVVEDDEKAVHIELSVRDTGIGIAPEAIGRIFNPFEQADGSTTRKYGGTGLGLPICQRLVRLMGGEIQVVSTPGAGSEFTFTVRLQRAEPLHAPTVEAHNDGVEAEKRLKTEFGKSRILVAEDDWVNQEVALELLRETLGFAVDIAPDGAQALEMALQHRYDLILMDMQMPELDGLGATQAIREIPDYADVPIIAMTANAFAEDRARCMDAGMNDFIAKPVDPDNLFMIMLRWLKEARKTPLSSNS

SEQ ID NO: 19938 - protein, 269 aa, Blakeslea trispora
HTFYNELRVAPEEHPVLLTEAPLNPKSNREKMTQIMFETFNAPAFYVAIQAVLSLYASGRTTGIVLDSGDGVTHTVPIYEGYALPHAILRLDMAGRDLTDYLMRILAERGHSFTTTAEREIVRDIKEKLCYVALDFEQEMQTAAQSSALEKSYELPDGQVITVGNERFRAPEALFQPALLGLESVGIHETTYNSIMKRDVDIRKDLYSNIVMSGGTTMYPGIADRMQKEITALAPSSMKIKIVAPPERKYSVWIGGSILASLSTFQQMW

SEQ ID NO: 19939 - protein, 150 aa, Brassica napus
  misc_feature (23)..(23): Xaa can be any naturally occurring amino acid
  misc_feature (113)..(113): Xaa can be any naturally occurring amino acid
  misc_feature (116)..(116): Xaa can be any naturally occurring amino acid
  misc_feature (130)..(130): Xaa can be any naturally occurring amino acid
LAARSRAGEGGESEKMVVLVVAXASDPASIGPAAAFLAMPGWSPGPPIPEGMESFTNGNVRLLKHERSIVAEDDLDRRWQEATGEAVSEVIFLSKHTAVSNRPALTVHPIGVXHLXEDETPPQGGRPGWXGVPNPRIGPWFRLMQKVAAD

SEQ ID NO: 19940 - protein, 431 aa, Haloarcula marismortui ATCC 43049
MGPELSSASSSDNSSTPSEPESALETARLQLHRAADHLDIDPNIVERLNHPQNVHEVTVPIERDDGTVEVFTGYRAQHDSVRGPYKGGLRYHPDVTRDECVGLGIWMTWKCAVMDLPFGGAKGGIAVNPKTLSRDEKERLTRRFAQELRAVIGPNRDIPAPDMGTDPQTMAWLMDAYSMQEGETIPGVVTGKPPIVGGSEGREDAPGRSVAIITQQVCEYYDQPLSETTVAVQGYGSVGANAARLLDEQGATVVAISDVNGAMYDPAGIDTATVPSHDEEPEAVTEYADTVISNDELLTLDVDVLIPAALGNVITEANADDIAAEYVVEGANGPTTSTADSILADRDVVVIPDILANAGGVTVSYFEWLQDINRRSWSLERVNDELDEEMRAAWDAVRTEFENRDITWRDAAYIVALSRIAEAHEARGLWP

SEQ ID NO: 19941 - protein, 204 aa, Glycine max
MASAGDLFRHGLPEVGGAGKLHVLAVDDSHVDRKVIERLLKISSCKVTVVESGSRALQYLGLDGEKSSIGFDSVDVNLIMTDYSMPGMTGYELLKKIKESSVFREVPVVVMSSENILTRIDSCLEEGAEEFLLKPVKLSDVKRVTDFIMRGEGMKGVKRSKKRSRSDDCIPSLSTAFASVSHPCDLSSPPSPCVSQSKKSRLSI

SEQ ID NO: 19942 - protein, 807 aa, Cryptococcus neoformans var. neoformans B-3501A
MTSPSAQPMIPRSQPPRPSHTQSSPAINSTGIKPNGSPSVIRRAPSVPVNPSTAAASGSLSSLLKSENTAQAVSRSSPPTEPNDLPRPIEPTPMLPITGLPNSSSSSSNARHGSSSSISRGPSVTGTLTPATTALGAPIEPTPPQTGASKMAAAAKRGLDGSAGNNVKVYEEGHPLNEETLKQRGYQTLNILNHPFHLPDRWKLLRPLGQGAYGLVIQVQDAETEIPIAVKCVTRVFDKVILARRALREITLLRHFGEHDNLTGLVDMDNVWDGYNEIYLYMEPMEADLHQIIRSGQPLGNAHIQFFIYQLLRGMKYIHSANVIHRDLKPGNLLVNSGCELKICDFGLARGFNPVRGEEPQGEEGKLTEYVATRWYRAPEIMLSNRRYTTAIDVWSIGCILAELLGLKPVFKGKDYIEQMTLILETLGTPDEETMARVASEKALTFLKTLPTYEKKDLGSIFPDADPLAVDLTDKLLEFDPTRRIDVPSALTHAYVERYHDPEDEPSCDKIFDKWEEVESLSTIEELKEAITREIQGFREEVRMAAEEDDEDEEWAEGEYLDDENVFHDSPGPALASTLEKFTYPDHIAPSSSILPSAARLAPIIHQSPKGSKSPHVKSAHLPSVPSSANSSKPSSTAGSAPRTREHSPTTTFITPAEDYFTAQHGFGGPNGRASRRSSSHSTSGRRPASFLFSPFGAGMTQIVPTPNAYPRSHAQASPELTTAEKTPRDRRSSGLWRTRSRAQSQSGNLVLERLSSLEINDHKDGEKNRIDALHAVVGLGGDGEVPPMTVSPSDAPPSEVPKSFGY

SEQ ID NO: 19943 - protein, 331 aa, Vibrio angustum S14
MTIKVGINGFGRIGRFVFRAAQERNDIEVVGINDLIDVEYMAYMLKYDSTHGRFNGTVEVEGGNLIVNGKTVRVTAERNPEDLKWDAINVDVVAEATGLFLTDETARKHITAGAKKVVLTGPSKDATPMFVMGVNQDTYAGQDIVSNASCTTNCLAPIAKVLNDKFGIESGLMTTVHATTATQKTVDGPSAKDWRGGRGASQNIIPSSTGAAKAVGVVLPELNGKLTGMAFRVPTANVSVVDLTVNLKNGASYETICAAMKEASEGALKGVLGYTEDQVVSQDFIGETQTSVFDAKAGIALTDNFVKVVSWYDNEIGYSNKVLDLIAHISK

SEQ ID NO: 19944 - protein, 1395 aa, Erwinia carotovora subsp. atroseptica SCRI1043
MKPHLIVIGNGMASARFVDTLRQLAATCYRITVIGDEPRASYNRILLSPVLSGEKAFADTLLTPAAIDDDTALPVNTLLGERVTHIDRQAREVTTTQRQLHYDHLVLAMGSTPFMPPMPGIDLAGVCGFRTLDDVELMLATISQPVPAVVIGGGLLGIEAAAALRLRGADVTLLHRVPILMERQLDATASDLLCNSLRARGIACETDVQVAALHGDAHGVTAVELADGRTIPAGLVVVTAGVIPASQLARECGLPCNRGVLVDGQLQTADPHISAIGECCELNGETFGLVAPCFAHATLVAQRLAGHAPQDYQREQATTRLKVTGIGVVSGGEINVAPNDEVYTTFDPQTQHYRRLLLRDGRLSGVLLYGDTDDSPRLLAAMDNTTEGEMIPPATLLFGLSSPDSDSQPAAVRIPVMSKPILVVVGHGMVGHYFLEQLVERDLHQHYHIVVFGEERHEAYDRVHLSEYFSGRSAASLSLVKEGFFAESGIELRSASEIVAIDRERQCVCDAQGRETAYDKLVLATGSYAFVPPIPGNTRPGCLVYRTLDDLDAIAAQAKKATSGVVIGGGLLGLEAANALRQLGLDTHVVEFAPRLMAVQLDDGGASMLRRKIEALGVQIHVSKETREITDGEQALHRLCFADGSVLETDLVLFSAGIRPRDKLADSCDLEKGPRGGIVIDDCCQTSDDAIFAIGECALWKGQIFGLVAPGYQMARSVADTLAQRDTPFTGADMSTKLKLLGVDVASIGDAHGRTAGSQSYQWTDGPNEVYKKIVVSADGKHLLGAVLIGDSSDYSTLLQMMLNDMSLPTQPEGLILPARSGDAPKGLGVAALPASAQICSCHNVSKGDISAAVAGGCGELGALKTCTKAGTGCGGCVPLLKQVMEYELTQQGVEVKKDICEHFAYSRQELYHLIRVHEIRSFDGLLERYGHGLGCEVCKPLVGSMLASCWNDYLLQPQHLPLQDTNDRFFANIQKDGTYSVVPRVPAGEITPAGLIAIGQVAQRYNLYTKITGGQRVDLFGARLEQLPEIWRELIDAGFETGHAYGKSLRTVKSCVGSTWCRYGVQDSTGLAIQLEHRYKGLRSPHKVKMAVSGCTRECAEAQSKDIGVIATDKGWNLYVCGNGGMKPRHADLFASDLDTETLLRTIDRVLMFYIRTGDRLQRTSTWMDNLEGGIEYLRQVILEDSLNIGEELDKEMQRVVEAYQCEWQTTLESPERLALFRGFLNSDSPDEAVVMVPERGQIRPAQEHEKAISPEPVVLKPATHEAEWIQVATLGDIPRHAGMAARLGQQQIALFHLPGSEQQVYALENHEPGSGANVLSRGLIGDVAGEPVVISPLYKKRFKLRDGVSPDDRALYVRAWPVRVEDDEIWVCRQPLAVPESVGLADNDMAKAS

SEQ ID NO: 19945 - protein, 289 aa, Kluyveromyces lactis NRRL Y-1140
MGTRVGIVLHKLHGIDFNNEFTSVVEQTLPFLRDSTEYSLDIILEEKFDNAYHLDSYLGHIYSISRDVLITKELFFTNINVLFNLSENNLLYDVIFAQESATSPNYKCKKLKIFQLSPISESYNGTFQPLERNQYRVSAVGGTFDHIHDGHKILLSVASFITNEKLIIGLTNQELLANKQHKALLEPFSVRSANVEEFLKLLKPSLKIEIIAIRDVCGPTGTVPDIQALIVSRETLGGGKIVNKTRLDRGLSELDIIVVNVLGGQEDDGWKEKMSSTELRERHSKKLSK

SEQ ID NO: 19946 - protein, 400 aa, Dehalococcoides sp. CBDB1
MAKQKFDRSKPHCNVGTIGHVDHGKTTLTAAITKTLSTKGWADFRAYDQIDNAPEEKARGLTIAISHIEYQTETRHYAHIDCPGHADYIKNMITGAAQMDGAILVVSAPDGPMPQTREHVLLIHQVEVPAVVVALNKCDMMDDEELLELVELEVRELLTKNSFPGDEIPVVRVSAIKALECGCGKRECEWCGRIWKLMDAVDTYIPIPPRPVDKPFLMKVEDVFSIKGRGTVATGRVERGVIKGGDEVDLVGLHHEPRKIVVTSLEMFHKILDTAEPGDAVGLLLRGVEREDIERGMVLAKPGSIKPHVNAEAEVYVLSKDEGGRHTPFFNGYKPQFFFGTTDVTGEIHLPEGVEMVVPGDHVKMKISTIYPVAMEKGMRFAIREGGKTVGAGAISQVLA

SEQ ID NO: 19947 - protein, 321 aa, Burkholderia sp. 383
MTSRQHPLHSGFGAASTANDVLVDLDLDGKTAIVTGGHSGLGLETTRALAQAGATVIVGARNADAAREATRGIAGVEIAALDLADLASVAAFAARFVEARRDVDIVINSAGVMACPETRVGDGLEAQMAVNHLGHYALVNGLWPVLAQGDGARVVAVSSLGHRLSPIRWDDAQFAHGYDKWLAYGQSKTANALFAVQLDALGAPYGVRAYSLHPGKIATPLQRHLTREEMMAQGWVDEHGLPIDPTFKTPAQGAATQVWAATSPRLAGIGGVYCEDCDIAVVTQGNEESGVRPHAIDPEEAARLWAWSAALTGIDAFAVRR

SEQ ID NO: 19948 - protein, 411 aa, Nicotiana plumbaginifolia
MNALAATNRNFKLASRLLGLDSKLEQCLLIPFREIKVECTIPKDDGSLATFIGFRVQHDNARGPMKGGIRYHPEVDPDEVNALAQLMTWKTAVANIPYGGAKGGIGCSPSDLSISELERLTRVFTQKIHDLIGVHTDVPAPDMGTNPQTMAWILDEYSKFHGYSPAVVTGKPIDLGGSLGRDAATGRGVLFAAEALLRDHGKSIAGQRFVVQGFGNVGSWAAQLITEQGGKIVAVSDITGAIKNKNGIDIASLLKHVKENRGVKGFHGADSIDPNSILVEDCDVLIPAALGGVINRDNAKDIKAKFIVEAANHPTDPEADEILAKKGVVILPDIYANSGGVTVSYFEWVQNIQGFMWDEERVNTELKAYMNRGFKDVKDMCKTHNCDLRMGAFTLGVNRVARATTLRGWEA

SEQ ID NO: 19949 - protein, 262 aa, Candida albicans SC5314
MLVLFFFFFFFTMGCLSLLWLVGTENLSPITATTHKKKKISTHRHQIKNLTSHTQILSLNVIPPLLPSPLYFHTNSIYPFIMRPLTEEETKVVFEKLANYIGRNISFLIDNPENPHVFRLQKDRVYYVQESIAKFATSVSRQQLMSLGTCFGKFTKTGKFRLHITSLPYLAQYAKFKIWIKQNGEMPFLYGNHVLKAHIGRMSDDIPEHAGVIIYSMNDIPLGFGASAKSTAEARNLPPTGIVAFRQGDIGEYLREEDTLFT

SEQ ID NO: 19950 - protein, 477 aa, Neisseria meningitidis Z2491
MNEYSQLIKHPDISLSPISDGIGVGNPATGEILAYVRNTGSDKLKNLIQKAAAAQKLWAAKTALERADILWRWYFLVKENKEALARLMTMEQGKSLTESRGEIDYAASFVRWFAEEARRIDGDVLTSVKASQKLIVLKQPVGVTAAITPWNFPSAMIARKAAPALAVGCAMIVKPASLTPLSAYALVVLAYEAGVPQDLLPVVSGRASEIGREFATNPIIRKISFTGSTEVGAKIFADSAADIKKLSLELGGNAPFIVFDDADLDKAVEGALASKFRNSGQTCVCTNRVYAQSGIYDAFCRKLSEKAAALKLGNGLEDGVNQGPLIEEKAVEKVEQHIADALSKGAVCLTGGKRSALGGTFFEPTVLSGVTAQMAVAREETFGPLCPVFRFETEAEVIEAANNTEYGLAAYLFTADTARQWRVGEALEYGMVGINTGLISNEAAPFGGVKRSGLGREGSKYGADEYLELKYLCMDVG

SEQ ID NO: 19951 - protein, 221 aa, Medicago truncatula
MKILYLLVSILALASSIAFAYDPSPLQDFCVAIKDPKDGVFVNGKFCKDPALVKAKDFFKHVEAGNASNALGSQVTPVTVDQLFGLNTLGISLARVDFAPKGLNPPHIHPRGTEILIVLEGTLYVGFVTSNQDNNRLFTKVLNKGDVFVFPIGLIHFQLNVGYGNAVAIAGLSSQNPGVITVANALFKSNPLISDEVLTKAFQVDKSIIDYLQKQSWYDNN

SEQ ID NO: 19952 - protein, 221 aa, Medicago truncatula
MKIIYFLVSILALASSLAFAYDPSPLQDFCVAIKDPKDGVFVNGKFCKDPALVKAEDFFEHVEAGNASNALGSQVTPVTVDQLFGLNTLGISLARVDFAPKGLNPPHIHPRGTEILIVLEGTLYVGFVTSNQDNNRLFTKVLNKGDVFVFPIGLIHFQLNVGYGNAVAIAGLSSQNPGVITVANALFKSDPLISDEVLTKAFQVDKSIIDYLQKQSWYDNN

SEQ ID NO: 19953 - protein, 455 aa, Rubrivivax gelatinosus PM1
MSTSTGPGLNKSLSTLQLWGIAVGLVISGEYFGWSYGWAGAGTLGFLVTAGFIALMYTTFIFSFTELTTSIPHAGGPFEYGRRAFGPTGGYIAGYATLIEFVFAPPAISLAIGSYLAVQFPGLDPKTAAVGAYLIFMTLNILGVQIAATFELAVTLIAIFELLVFMGVVAPGFSMANFVKGGWSGEDSFSLGSLGGIFAAIPFAIWFFLAIEGVAMAAEEAKDPKRSIPIAYIGGIVTLLLLATGVMIFAGGVGDWTKLANINDPLPQAMKAIVGESSGWLHMLVWLGLFGLIASFHGIILGYSRQIFALSRAGYLPELLGKVHPRFHTPHIAVLAGGVVGILAIFSDELISFGGQTLTANIVTMSVFGAIVMYIVSMASLFKLRRSEPNLARPFRAPMFPIFPAFALAAAVVCLATMVYFNPLVAMLFVGLGVVGYGYFLLTHKRRERAALAAA

SEQ ID NO: 19954 - protein, 269 aa, Chaetocladium brefeldii
HTFYNELRVAPEEHPVLLTEAPLNPKSNREKMTQIMFETFNAPAFYVAIQAVLSLYASGRTTGIVLDSGDGVTHTVPIYEGYSLPHAILRLDMAGRDLTDYLMRILAERGHSFTTTAEREIVRDIKEKLCYVALDFEQEMQTAAQSSALEKSYELPDGQVITVGNERFRAPEALFQPSLLGLESAGIHETTYNSIQKCDVDIRKDLYSNIVMSGGTTMYPGIADRMQKEITALAPSSMKIKIVAPPERKYSVWIGGSILASLSTFQQMW

SEQ ID NO: 19955 - protein, 463 aa, Lactobacillus sakei subsp. sakei 23K
MGLGTRLFRKESLERYLQQDQRLAKTLTAKDLIALGVGAVIGTGIFILPGTIAALHSGPAITLSFMIAAVVCAVAAMCYAEFSSALPVAGSAYSYGNIIFGELIGWLLGWALFLEYMLSVAAVSTGWSAYFVSFIEGFGVHIPKAITGSFDPAHGTYINLFAVLIVTLISVLLMSGTRSSTRINNLMVMIKIGVVLLFLVVGIFYVKSSNWQPFMPFGVSGVFKGASLVFFAYLGFDCVSASAAEVKNPQKNLPIGIIGTLVICTLLYILVAFVLTGMVSYRELNVANPVAFALQVVHQNWFAGLLSLGALAGMFTMMLTMTYSSSRLVYSIGRDGLLPKMLGKIETRHQTPINSVRVVTVIIATLGGLVSLDQLTNLVNIGTLIAFFFMSIGVIPLRKRKDIPNKDGFKVPLYPWLPLLSGLLCLFMLFELPAVTWMAAGIWFILGLIIYFSYGLKHSRLND

SEQ ID NO: 19956 - protein, 269 aa, Chaetocladium jonesii
HTFYNELRVAPEEHPVLVTEAPLNPKSNREKMTQIMFETFNVPAFYVAIQAVLSLYASGRTTGIVLDSGDGVSHTVPIYEGYSLPHAILRLDMAGRDLTDYLMRILAERGHSFTTTAEREIVRDIKEKPCYVALDFEQEMQTAAQSSALEKSYELPDGQVITVGNERFRAPEALFQPPLLGLETAGVHETTYNSIMKCDVDVRKDLYANIVLSGGTTMYPGIADRMQKEITALAPSSMKIKIVAPPERKYSVWIGGSILASLSTFQQMW

SEQ ID NO: 19957 - protein, 119 aa, Bacteroides thetaiotaomicron VPI-5482
MKIIDLTKESFVEKVADYQSYPDNWEYKGNKPCLVDFHAPWCGYCKALSPILDQLAEEYKGRLDIYKVDVDQEEELESAFKIRTIPNLLLCPVNGKPIMKLGTMNKVQLKEFIETTLFS

SEQ ID NO: 19958 - protein, 269 aa, Choanephora infundibulifera f. cucurbitarum
HTFYNELRVAPEEHPVLLTEAPLNPKSNREKMTQIMSETFNAPAFYVAIQAVLSLYASGRTTGIVLDSGDGVTHTVPIYEGYALPHAILRLDMAGRDLTDYLMRILAERGHSFTTTAEREIVRDIKEKLCYVALDFEQEMQPAAQSSALEKSYELPDGQVITVGNERFRAPEALFQPALLGLESVGIHETTYNSIMKCDVDIRKDLYSNIVMSGGTTMYPGIADRMQKEITALAPSSMKIKIVAPPERKYSVWIGGSILASLSTFQQMW

SEQ ID NO: 19959 - protein, 159 aa, Prochlorococcus marinus str. MIT 9312
MQVDVQNTTVFSADGSSIKLGQYSGEVILVVNVASYCGNTAQYEDLQKLHDLYSSKGLRILAFPCNDFGKQEPGSLSEIKDFCTTKYGVKFEIYEKVHAKGDTTEPYTTLNKVEPEGDVEWNFEKFLIGKDCKVIARFKPSVKPFDENLIAAIEVALDS

SEQ ID NO: 19960 - protein, 910 aa, Streptomyces avermitilis MA-4680
MSSADDQTTTTSSELRADIRRLGDLLGETLVRQEGPELLDLVEKVRRLTREDGEAAAELLRGTELETAAKLVRAFSTYFHLANVTEQVHRGRELRTKRAAEGGLLARTADRLKDADPEHLRATVKNLNVRPVFTAHPTEAARRSVLNKLRRIAALLETPVIEADRRRYDTRLAENIDLVWQTDELRVVRPEPADEARNAIYYLDELHAGAVGDVLEDLTAELERVGVQLPDDTRPLTFGTWIGGDRDGNPNVTPEVTWDVLILQHEHGINDALELIDELRGFLSNSIRYTGATEELLTSLGTDLERLPEISPRYKRLNAEEPYRLKATCIRQKLENTKQRLAKGTAHQPGRDYLGTGELLHDLKLIQTSLREHRGGLFADGRMDRTIRTLAAFGLQLATMDVREHADAHHYALGQLFDRLGEESWRYADMPRDYRGKLLAKELRSRRPLAPSPAPLDAAGAKTLGVFHTVKRALAVFGPEVIESYIISMCQGADDVFAAAVLAREAGLLDLHAGWAKIGIVPLLETTDELKAADTILEDMLSDPSYRRLVALRGDVQEVMLGYSDSSKFGGITTSQWEIHRAQRRLRDVAHRYGVRLRLFHGRGGTVGRGGGPSHDAILAQPWGTLEGEIKVTEQGEVISDKYLVPSLARENLELTVAATLQASALHTAPRQSDEALARWDAAMDVVSDAAHSAYRRLVEDPDLPTYFLASTPVDQLADLHLGSRPSRRPGSGVSLDGLRAIPWVFGWTQSRQIVPGWFGVGSGLKALREAGLDTVLDEMHEQWHFFRNFLSNVEMTLAKTDLRIARHYVDTLVPDHLKHVFATIEAEHELTVREVLRITGGEKLLDTHPVLQQTFAIRDAYLDPISYLQVALLKRQRDAAAADTPPDPLLARALLLTVNGVAAGLRNTG

SEQ ID NO: 19961 - protein, 177 aa, Psychrobacter arcticus 273-4
MPESATMTKENFVTCDLLDANPESQVCLPNIEGKSFYSFGGKDKFCGEVVTVKCFEDNSRVKSLLNSDGKDKDGNGKVLVVDGGGSMRCALLGDMIAQSAIDNHWAGVIIYGCVRDVDDMAQMELGVMALGCIPRKSNRRDEGQTDLEISFGDLTLNSGMFVYADNNGIIASDKPLI

SEQ ID NO: 19962 - protein, 189 aa, Zea mays
FLDKEFINVAMGMDPEWKMYDKNLGRIEKWVMRKAFDDYEHPYLPKHILYRQKEQFSDGVGYNWIDGLKSFTEQQVTDEMMNNVAQMFPYNTPSTKEAYYYRMIFERLFPQDSARETVPWGPSIACSTPAAIEWVEQWKASNDPSGRFISSHDSAATDHTAVSRRWPTAAARPANGTVNGKDVPVPIAV

SEQ ID NO: 19963 - protein, 352 aa, Carica papaya
MATMSSISKIIFLATCLIIHMGLSSADFYTVGYSQDDLTSIERLIQLFDSWMLKHNKIYESIDEKIYRFEIFRDNLMYIDETNKKNNSYWLGLNGFADLSNDEFKKKYVGFVAEDFTGLEHFDNEDFTYKHVTNYPQSIDWRAKGAVTPVKNQGACGSCWAFSTIATVEGINKIVTGNLLELSEQELVDCDKHSYGCKGGYQTTSLQYVANNGVHTSKVYPYQAKQYKCRATDKPGPKVKITGYKRVPSNCETSFLGALANQPLSVLVEAGGKPFQLYKSGVFDGPCGTKLDHAVTAVGYGTSDGKNYIIIKNSWGPNWGEKGYMRLKRQSGNSQGTCGVYKSSYYPFKGFA

SEQ ID NO: 19964 - protein, 739 aa, Silicibacter pomeroyi DSS-3
MSLVNKLAEERRARLAAERLLELKQAELSAANRKLGRHALALTKQIGEKQAEVATVRDENEKVKSDLTVANAKIEVAERRLWHSIQTIQDGFAFFDSDSKLIGANTAYLNVFDGLDEVAPGISYMRILQLMTEEGIIDTGELAAEEWRQMMHERWISPTPEPVVIRMWNDQYVKMIDQRGHGGDVVSLALNITSTVRYEAELRAAREKAEAANRAKSAFLANMSHEIRTPMNGVVGMAELLCDTALDEEQQLYASTIKNSGEALLVIINDVLDYSKIEAEKMMLHPEPFDLERCIHEVAMLMQPIVRDKGLTLLVDYDLFLPTLFVGDPGRVRQVLTNLLGNAVKFTTKGHILIRVTGVPDPATGRCAIHVAIEDTGIGIPREKLAHIFGEFNQVENERNRQFDGTGLGLAISQRLIQMMGGTVWVESEEGRGSCFGFRVTLPMSEEAQPVLPNLPGRLQHVLIVDDLAVNRAILEKQLAQLGVRVTCCASGAQALEKMSDCVDLVLSDHNMPEMDGLELAEALRGAGWSDLPIFLLSSNPGMAHADPAKRHVQGILQKPIPRAELFARLSDMRTEITSVQDPAAVSAPVTKPAQDAPGEPTERRQMRVLAAEDNRTNQLVFRKMVKTLDIDLRFANNGLEAVEIWQDFQPDLIFMDISMPKMDGKQATGEIRRLEAGTGRHVPIVALTAHAMAGDAEGILAAGLDQYLTKPLRKALIHQHIAEACPAGALPVEPESGE

SEQ ID NO: 19965 - protein, 269 aa, Cunninghamella bertholletiae
HTFYNELRVAPEEHPVLLTEAPLNPKSNREKMTQIMFETFNAPAFYVAIQAVLSLYASGRTTGIVLDSGDGVTHTVPIYEGYSLPHAILRLDMAGRDLTDYLMRILAERGHSFTTTAEREIVRDIKEKLCYVALDFEQEMQTAARSSALEKSYELPDGQVITVGNERFRAPEALFQPSFLGLESTGIHETTYNSIMKCDVDIRKDLYANIVMSGGTTMYPGIADRMQKEITALAPSSMKIKIVAPPEQKYSVWIGGSILASLSTFQNMW

SEQ ID NO: 19966 - protein, 493 aa, Synechococcus sp. RS9917
MNALRTLFWHRRDLRLADNTGLQAAVGLGPAVTGVVVLDPAILSPPPHLPPMAPARLWFLVESLIELQQRWREAGSRLLVVAGDPATVLPRLASLLDAPAVVWSRDVEPYARERDRAVARALQADGRKVLVDWDQLLVNPELLKTGGGDPYRVYGPFLRNWRGQVERSEPSTVASPSGLIDLEPETLALISSGEGELGRLCLEGQRQLEHLRAAHGFAGIELCPCRPGEAAAAEQLATFVAGPLMAYEPDRNVPSVVGTSSLSAALSVGTLSPRQAWCAAQEVKQCVRSDEQLQAITVWEQELGWREFYQQALFHFPELADGPYRPQWRRFPWENNDDWFDFWKDGQTGMPIIDAAMRQLNQTGWMHNRCRMIVASYLVKDLICDWRWGERAFMELEVDGDLAANNGGWQWSASSGMDPKPLRIFNPATQASKFDAEGEYIRRWLPELRHVNTNDLLSGEIPALERRGYPEPLVNHKSQQARFKALYATIRST

SEQ ID NO: 19967 - protein, 469 aa, Lactococcus lactis subsp. lactis Il1403
MGFMRKADFELYRDADKHYNQVLTTRDFLALGVGTIISTSIFTLPGQVAAQFAGPGVVFSYLLAALVAGFVALAYAEMSTVMPFAGSAYSWISVLFGEGFGWIAGWALLAEYFIAVAFVGSGFSANLQQLLAPLGFHLPKVLANPFGTDGGVVDIISLLVILLSAIIVFRGASDAGRISQILVVLKVAAVIAFIIVGITVIKPANYHPFIPPHNPKTGFGGFSGIWSGVSMIFLAYIGFDSIAANSAEAKKPQKTMPRGIIGSLLIAVVLFAAVTLVLVGMHPYSAYAGNAAPVGWALQQSGYSVLSEVVTAIALAGMFIALLGMVLAGSRLLYAFGRDGLLPKGLGKMNARNLPANGVWTLAIVAIVIGAFFPFAFLAQLISAGTLIAFMFVTLGIYSLRRRQGKDLPEATYKMPFYPVLPALGFIGSLFVFWGLDVQAKLYSGIWFLIGILIYFAYGNRRSRKSEEK

SEQ ID NO: 19968 - protein, 117 aa, Fragaria x ananassa
MASSTAMKLSLVALLCIVVALPIAQAITCGQVASNISPCLTYVKSGGAVPAACCSGIRNLNGMAKTTADRQAACNCLKQAAGGIKGLNPNLAAGLPGKCGVSVPYKISTTTNCAAVK

SEQ ID NO: 19969 - protein, 131 aa, Photobacterium profundum SS9
MAKIIHSMIRVIDLDKSLTFYKEALDLDIAKRLDFDGFSLVYLRNEENDMEIELTWNADTEEAYTHGTGYGHIAVAVDDLELEHKKLTDYGYQPAEIKEFIRDGQLLAKFFFVQDPDGYKIEFLLRHGHYQ

SEQ ID NO: 19970 - protein, 228 aa, Photobacterium profundum SS9
MNQSLLTPYGTAFERVEAGLTAIREGRGVLVVDDEDRENEGDIIFAAETLTSEQMALMIRECSGIVCLCLTDERVKQLELPMMVENNTSANETGFTVTIEAAKGVTTGVSAADRVTTIKTAIADGAVPADLNHPGHVFPLKANADGVLGRRGHTEATIDLMRLSGLKPYGVLCELTNIDGTMARLPEVIVFGKKFNMPVLTIEDLAAYRLAKESNTVTNTTEEVAVIA

SEQ ID NO: 19971 - protein, 731 aa, Synechococcus sp. RS9917
MVASGVASTAAQDQANRAFPLAAITGHGTLKLALMLAAVDPGLGGVIIAGGRGTGKSVLARGLHALLPPIEVLDVEGGDGPQSHGRNLDPTRPDDWDDNARRRITALGGDPDNRSSDALMPTRVIPAPFVQVPLGVTEDRLVGSVDVTASLASGNAVFQPGLLAEAHRGVLYVDELNLLDDGIVNLLLAAVGSGVNQVEREGLSLSHPCRPLLIATYNPEEGTVRDHLLDRFAIALSANQLVSTEQRVEITEAVLTHGQCSRSFAERWREETDALATQLLLARQWLPDVQIGGEQIEYLVTEAIRGGVEGHRSELYAVRVAKAHAALSGRDRVEADDLQVAVALVIAPRASQLPPPDQQMEPPPPPEQPQDQSPPPPEAGDQDPENQPPPPEGSGEDESDPPDDDSSDDSSDDNDPDQDDSPEDDSPDDQAPPSVPEEFMLDPEAVAIDPDLLLFNAAKSQSGSSGSRSLVFSDSRGRYVKPMLPRGPVRRIAVDATLRAAAPYQKARRARQPERTVIVEEADLRAKLLQRKAGALVIFLVDASGSMALNRMQSAKGAVIRLLTEAYENRDEVALIPFRGDQAEVLLPPTRSITAARRRLESMPCGGGSPLAHGLTQAARVGANALATGDLGQVVVVAITDGRGNVPLSTSLGQPQLEGDEKPDLKQEVLDVASRYRLLGIKLLVIDTERKFIGSGMGKDLAEAAGGKYVQLPKASDQAIAAIAMEAISSV

SEQ ID NO: 19972 - protein, 449 aa, Streptococcus agalactiae A909
MTSGKTYVASVLEKVKKQNEHEEEFLQAVEEVFESLVPVFDKYPQYIEENLLERLVEPERVISFRVPWVDDKGQVQVNRGYRVQFSSAIGPYKGGLRFHPTVTQSIVKFLGFEQIFKNSLTGLPIGGGKGGSNFDPKGKSDNEVMRFTQSFMTELQKYIGPDLDVPAGDIGVGGREIGYLYGQYKRLNGYQNGVLTGKGLTYGGSLARTEATGYGAVYFAKEMLAACGQDLTGKVALVSGSGNVAIYATEKLQELGATVVAVSDSSGYVYDPDGIDLETLKQIKEVERARIVKYTEKHPKANFTPADQGSIWSIKADLAFPCATQNELDEEDAKLLVENGVLAVTEGANMPSTLGAIKVFQKAGVAFGPAKAANAGGVAVSALEMAQNSSRRAWTFEEVDQELQRIMKTIFVNASKAADEFGDSGNLVLGANIAGFLKVAQAMSAQGIV

SEQ ID NO: 19973 - protein, 331 aa, Vibrio harveyi
MTIKVGINGFGRIGRFVFRAAQERNDIEVVGINDLIDVDYMAYMLKYDSTHGRFNGTVEVEGGNLIVNGKTVRVTAERNPEDLKWDAIGVDVVAEATGLFLTDETARKHITAGAKKVVLTGPSKDATPMFVMGVNHATYAGQDIVSNASCTTNCLAPIAKVLNDKFGIESGLMTTVHATTATQKTVDGPSAKDWRGGRGASQNIIPSSTGAAKAVGVVLPELNGKLTGMAFRVPTANVSVVDLTVNLKEGASYEAICAAMKEASEGELAGVLGYTEDQVVSQDFIGEVQTSVFDAKAGIALTDNFVKVVSWYDNEIGYSNKVLDLIAHISK

SEQ ID NO: 19974 - protein, 108 aa, Burkholderia xenovorans LB400
MSEQIKHISDASFEQDVVKSDKPVLLDFWAEWCGPCKMIAPILDEVAKDYADRLQIAKINVDEHQSTPVKFGVRGIPTLILFKNGAVAAQKVGALSKSQLTAFLDGNL

SEQ ID NO: 19975 - protein, 112 aa, Methylobacillus flagellatus KT
MKKIEAVIKPFKLDEVREALSEIGANGLTVTEVKGFGRQKGHTELYRGAEYVVDFLPKIKVELVVTDDVVDAAVESIIKAARTGKIGDGKIFVTPVEQIIRIRTGETDEAAI

SEQ ID NO: 19976 - protein, 367 aa, Shewanella sp. ANA-3
MALHSIEEIIEDIRQGKMVILMDDEDRENEGDLIMAAELVTPEAINFMAKYGRGLICQTMTKARCQQLNLPLMVTNNNAQFSTNFTVSIEAAEGVTTGISAHDRAVTVKAAVAKDAKASDLVQPGHIFPLMAQDGGVLTRAGHTEAGCDLARLAGLEPSGVIVEILNEDGTMARRPDLEIFSELHGIKIGTIAALIEYRNTKETTVVREAKCKLPTRFGEFDMVTFRDTIDNQLHFALVKGEVKPDCLVRVHLQNTFNDLLHSERDQQRSWPLEKAMERISAEGGVLVLLGNQEHTCEILSKVKAFEAEDQGQAPASAKWQGTSRRVGVGSQILASLGVTKMRLLSSPKRYHSLSGFGLEVTEYVAE

SEQ ID NO: 19977 - protein, 321 aa, Triticum aestivum
MAKKRKRSSDAPAPAVVEKPDDSAPERPERTLFGFKDQPDSAAEPASKDAGPFFRNKEKVLITCSRRIIYRYRHLMQNVVSLLPHAKKDSKVESKQSKGSALNELVELRSCSSCLFFECRKQKDLYLWMVKSPAGPSVKFLVNAVHTMEELKLTGNHLKGSRPLLTFSSNFDQQPHWKLLKEMITQIFATPKDHRKAKPFHDHVFVFSIVDDHIWFRNYQISVPHNEIDKVDKGGLDKMTLVEVGPRFCLNPIKMFGGSFGGPTLFENPFYMSPNQIRALEKRKKAGKYAKKVKAKVRRKMHEMENTLEPDEFADLWKGED

SEQ ID NO: 19978 - protein, 173 aa, Flaveria bidentis
MASIPATFATVAQANMVAPFTGLKANAAFPVTKKVNGFSTLPSNGGRVQCMKVWPPVGKKKYETLSYLPELTEAQLAKEIDYLIRNKWVPCLEFELEHGFVYRENARSPGYYDGRYWTMWKLPMFGCTDSAQVMKELQECKKEYPQAWIRIIGFDNVRQVQCVSFIASKPTGF

SEQ ID NO: 19979 - protein, 173 aa, Flaveria bidentis
MASIPATVAAVPQTNMVAPFTGLKANAAFPVTKKVNGFSTLPSNGGRVQCMKVWPPVGKKKYETLSYLPELTEAQLAKEVDYLIRNKWVPCLEFELEHGFVYRENASSPGYYDGRYWTMWKLPMFGCTDSAQVMKELQECKKEYPQAWIRIIGFDNVRQVQCVSFIASKPTGF

SEQ ID NO: 19980 - protein, 325 aa, Bradyrhizobium sp. BTAi1
MTRFRIGTRKSTMALAQTEEIARRLQAAIPSLDIEIVKFETTGDSDQTSKLLTHGGKGGAFVAEIRRAMLDGRLHAAMHSLKDMPGNEETPGLVIAALLSRDPPGDVLVLRRGLSLDEFRKDGGRGFKIGTNAVRRAAYARRLFPQAELIHFRGAADTRIRKLDNGELQRLPDGGAVGPADALIMARSGLERVGLSDRASFDFAAADMLPAVGQGIVAVECPSLDWETRRILATIDDGAARSCADAEREVLWVLNGHCNSPIAGFATIDGDQMTLTASVLDEDGGRFIEAQRAGPADRPRELGRTVGLELLANGAAELIERSRPR

SEQ ID NO: 19981 - protein, 478 aa, Solanum tuberosum
MSSYSELSNLPIREIPGDYGFPIISAIKDRYDYFYNQGEDAWFHNKAEKYKSTVVKINMAPGPFTSNDYKLVAFLDANSFVCMFDNSLIDKTDTLGGTFKPGKEYYSGYRPVAFIDTKDPNHAALKGYILSAFAKRHNLFIPLFRNSLSDHLFNNLEKQVTEQGKSDFNALLPTMTFNFIFRLLCDQTNPSDTVLGAQGPEHLRKWLFPQLIPSLSAKKLPNIIEDTLFHNFLIPFGFIKSDYNKLVDAFSKSAVSILDEAEKLGIKREEAVQNILFLVGINMFAGLNAFSPHLFRFVGEAGASLHTQLAKEIRTVIKEEGGAITLSAINKMSLVKSVVYETLRLRPPVPLQYGKAKKDFMVQSHDASYKINKGQFVVGYQPMASRDPKIFANPDEFVPDRFMNDGEKMLKHVLWSNGRETENPAPDNKQCPGKDLVHLLGRLILVEFFMRYDTFTVEITPLFRAPNVAFKTLTKASK

SEQ ID NO: 19982 - protein, 155 aa, Zea mays
  misc_feature (30)..(30): Xaa can be any naturally occurring amino acid
MAMETCFRAWALHAPAGSKDRLLVGNLVCXSKRALAPLSVGRVATRRPRHVCQSKNAVDEVVVADEKNWDGLVMACETPVLVEFWAPWCGPCRMIAPVIDELAKDYAGKITCCKVNTDDSPTVLIFKGGEKKESVIGAVPKSTLTTLIDKYIGSS

SEQ ID NO: 19983 - protein, 405 aa, Neisseria meningitidis Z2491
MALIVHKYGGTSVGSPERIKNVAKRVAKARAEGHDIVVVVSAMSGETNRLVALAHEMQEHPDPRELDVVLSTGEQVTIGLLAMALKDIGVDAKSYTGWQVALKTDTAHTKARIESIDDEKMRADLTAGKVVIVAGFQGISSEGDISTLGRGGSDTSAVALAAALKADECQIYTDVDGVYTTDPRVVPEARRMDTVTFEEMIELASLGSKVLQIRSVEFAGKYKVRLRVLSSLQDGGNGTLITFEEDDNMERAAVTGIAFDKNQARINVRGVPDKPGVAYQILGAVADANIEVDMIIQNVGSEGTTDFSFTVPRGDYKQTLEILSERQDSIGAASIDGDDTVCKVSAVGLGMRSHVGVAAKIFRTLAEEGINIQMISTSEIKVSVLIDEKYMELATRVLHKAFNLG

SEQ ID NO: 19984 - protein, 949 aa, Bacteroides fragilis NCTC 9343
MKTDLLACRHIGVNKADAEVMLRKIGVASLDELIDKTIPANIRLKAPLALPAPMTEYEFARHIAELAGKNKLFTTYIGMGWYNTITPAVIQRNVFENPVWYTSYTPYQTEVSQGRLEALMNFQTAVCDLTAMPLANCSLLDEATAAAEAVTMMYGLRSRNQQKAGANVVFIDENIFPQTLAVITTRAIPQGIEIRTGKFRDLEFTDDLFACVLQYPNANGNAEDYREFTEKAHTANCKVAVAADILSLALLTPPGEWGADIVFGTTQRLGTPMFYGGPSAGYFATRDEYKRNMPGRIIGWSKDKYGKLCYRMALQTREQHIKREKATSNICTAQALLATMAGFYTVYHGQEGIRNIASRIHSITVFLEKSIGKLGFKQVNKQYFDTLRFILPDSVSAQQIRTIALSKEVNLRYFDNGDVGLSIDETTDVAAANILLSIFAIAAGKDFQKVDDIPEATIISEELKRQTPYLTHEVFSKYHTETEMMRYIKRLDRKDISLAQSMISLGSCTMKLNAAAEMLPLSCAEFMCMHPLVPEDQAAGYRELIHNLSEELKVITGFAGVSLQPNSGAAGEYAGLRTIRAYLESIGQGHRNKVLIPASAHGTNPASAIQAGFTTVTCACDEHGNVDMDDLRAKAEENKDDLAALMITYPSTHGIFETEIVEICQIIHACGAQVYMDGANMNAQVGLTNPGFIGADVCHLNLHKTFASPHGGGGPGVGPICVAEHLVPFLPGHGLFGNSQNEVSAAPFGSAGILPITYGYIRMMGAEGLTMATKTAILNANYLAACLKDTYGIVYRGANGFVGHEMILECRKVYEETGISENDIAKRLMDYGYHAPTLSFPVHGTLMIEPTESESLSELDNFVLTMLTIWNEIQEVKNGEADKEDNVLINAPHPEYEVVSDQWEHCYTREKAAYPIESVRENKFWVNVARVDNTLGDRKLLPTCYGCFD

SEQ ID NO: 19985 - protein, 488 aa, Arabidopsis thaliana
MSSPRSNKPKIVNGPGGYILQDVPHLIDYLPDLPTYPNPLQDNPAYSVVKQYFVHADDSVPEKVVVHKDGPRGVHFRRAGPRQKVYFESDEVHACIVTCGGLCPGLNTVIREVVSSLSYMYGVKRILGIDVSLGGYRGFYAKNTIPLNSKVVNDIHKRGGTIIGTSRGGHDTNKIVDSIQDRGINQVYIIGGDGTQRGASVIFEEIRRRRLKVAVVGIPKTIDNDIPVIDKSFGFDTAVEEAQRAINAAHVEAESNENGIGFVKLMGRYSGYIAMYATLASRDVDCCLIPESPFYLEGEGGLFEFIERRLKDHGHMVIVLAEGAGQDLMCKSMESTPMDASGNKLLKDVGLWLSQSIKDHFKKNKMVMNLKYIDPTYMIRAVPSNASDNVYCTLLAQSAVHGAMAGYTGYTSGLVNGRQTYIPFYRITETQNNVVITDRMWARLLSSTNQPSFLGPKDTSEEKKELPETPLLDDGAVDIPPVTKEVTK

SEQ ID NO: 19986 - protein, 677 aa, Burkholderia sp. 383
MLATIVGSSAEEHVLAISDRNDSTSPEVTATAKAGRRASKGKAQAQALTPTDIASLARQNEERQRQMRALIALGRERGYLTHADINDHLPDNFAQTAAMDTIVSTFSDMGVAVYEQAPDAEALLLTEAAPAVASDDQADEEAEAALSTVDSEFGRTTDPVRMYMREMGASELLTRAGEIEVAKRIEDGLQDMIQAIAACPSIVSTILADVDRIVAGELRIDELVDGISVDTDESEMTPESQEEEAEVLAADDDSDEDDVETDAGDSEKVNAARLEELTNDSLVIFARVRALFEQLPDVPVTGEARSAAAAQVRAAIQRELAPIRFTAKTIDRLCEIVHGQVTEVRAIERSVLAIAVDRCGMPRDAFVESFPGHETDLDWTSRTAATSQQFGAALERHQPAIQAAQQKLVDIESRVSLPLQQLKQINRQMSAAELKMRQAKREMIEANLRLVISIAKKYVNRGMQFLDLIQEGNIGLMKAVDKFEYRRGWKFSTYATWWVRQAVTRALADQARTIRVPVHMIETINKLNRISREILQQTGQEAHPAVLAKRMEMSEEKVRSILKIAKQPVSLETPVGDDADATLGDMIEDVSASSPAEAAIHANMRAAIDEALNGLSPREAKVLRMRFGLDTNSDHTLEEVGKQFDVTRERIRQIESKAMRKLMHPSRADKLRPFLER

SEQ ID NO: 19987 - protein, 128 aa, Vibrio sp. Ex25
MKFLHTMIRVVDLDKSIEFYTKVLGMSVLDRFENQEYRYSLVFVGSPDQPDGATIELTYNWDTDSYDLGNAFGHIALGCEDIYAACEKIKALGGNVTREPGQMKGGETHIAFIKDPDGYPIELIQTKQ

SEQ ID NO: 19988 - protein, 230 aa, Triticum aestivum
MASSTAAAALTCLHPAAQASRLPRAATACFARLPAAHPGSGSWGRAAVSVAAPRRRRRAPGVVYAAATTEKSIYDFTVKDIDGKNVSLSKFKGKALLIVNVASQCGLTTANYTELSHLYEKYKTQGFEILAFPCNQFGFQEPGSNTQIKQFACTRFKAEFPIFDKVDVNGPFTAPIYKFLKSSAGGFLGDIVKWNFEKFLVDKNGKVVERYPPTTSPFQIEKDIQKLTAA

SEQ ID NO: 19989 - protein, 476 aa, Xanthomonas campestris pv. vesicatoria str. 85-10
MFKQLWATKHPHASHEAADGLGLQRALGPWGLTALGIGAVIGGGIFVITGQAAADHAGPAIMLSFVLAAVCCAFCAMAYAEFAAMVPVSGSAYTYTYATFGELAAWLIGWMLVLEYGVSASAVAVSWTGYFLSLLEHFDIHLPAAFVSAPLDGKLQPTGAIANLPAAGIVLLLTWLCYVGIRKSSAMNMAMVILKTGLILLVIAVGWKYVDTSNWHPFIPANEGPGKYGMEGVLRGAAMVFFAYIGFEAVSVAAQESHRPQRDLPIGMILSLVICTVLYIAMAAVMTGLVPYTLLGTDEPVVTAVAAHSQLAWLRVVVEVGALIGLSSVVLVMIIGQPRIFMIIARDGLLPSIFTRIHPKYRTPHVNTVITGVGIALLAAVFPLDVLGELTSMGTLIAFAAVCAGVLILRRTHPELPRPFRMPAAWLICSAGVLSCLALLSAMTLHNWMLMGLWTLVGLVIYFGYGYRHSRLRDGR

SEQ ID NO: 19990 - protein, 775 aa, Photorhabdus luminescens subsp. laumondii TTO1
MTKYSLRIRMMSLILVPILLVGMFFSISFLCYHYRELENQIVRSGISIIEPLSIASEIGINLHNRESVNSLITRLHRRNSEIVRAIAIFNDDNQLFDISNYKYNSAQLQISPDMPLPTTLTKTEVKNSIILRMPIISEHHLSQNQPHSDTPSLRPIGYIAIDLDLRSAHLQQYKEIVIFILLLLICLGWASLFAYHLVRKITKPISDIVSTVDRIRQGQLNSRVSGKYFGELDMLKNGINAMAKSLSSYKEEMQNDIDQATSDLRETMEQFEIQNVELAIAKKRAQDAARIKTEFLANMSHELRTPLNGVIGFTRQTLKTPLTIQQTEYLYIIERSANHLLNIINDILDFSRLEADKLVLENVPFLLQDTIDEVMVLLTLSAKSKNIQLTHHVDPQIPNLVVGDPTRLQQIFTNIIGNAIKFTDQGSVEIKINLLQQKHHKINLEITVSDTGIGISPEQQPHLFQAFHQANASISRHYGGTGLGLVITRKLIQEMGGNISFTSEPKKGSVFRFDLWLGKDDFILTGSVVPQKTLIHPPRLPMTVMAVDDNPANLKLIGSLLDEIVEKTVLCNSGEEALQSAASHHFDLILMDIHMPGMDGICTSNHIHQLPQHYSTPIIAVTAYTCRPKSDTHSPFEDFLTKPLDEHRLRVVLDRYVKTPKSQHINWPLALQQATGKEPLAIDMLQMLVDLLPTIKTITEKVLSGETVENYQQQIHKLHGSCCYSGVPQLKALCQLIEQQLQQGVQLTDIEPELLELTDEIDHVLTAAQKILSRG

SEQ ID NO: 19991 - protein, 490 aa, Xanthomonas campestris pv. vesicatoria str. 85-10
MLKSLLRVKSIEPAGHVDAGEPVEGSLQGEATLQRTLTAKHLIMLGIGAVIGAGIFVLTGQAAANHAGPAVMLSFVFAGIACAFAGLCYAEFAAMMPVSGSAYSYSYATLGEGIAWFIGWCLVLEYLFAGSSVAVGWSAYLISFITGTLGLPFPAELAGAPLAWDGHGFVSSGNLVNLPAVLIVAAVSILCYVGVTQSAFANAIVVAIKVVVICLFVGFGISYIDPANWHPFIPENTGPGQFGWDGVFRAASIVFFSYIGFDAVSTSAGETKDPQKNMPIGILVSLAICTVIYIIVCAVLTGLLPYTQLGTAKPVATALEAHPQLTWLKTAVEIGAIAGLSSVVLVMLMAQPRIFYTMAKDGLMPKLFGKVHPKFRTPYVGTLFVGVVAALLAGVIPLNVLGELVSMGTLLAFATVCAGVLVLRFTKPDLPRPFRVPLAMVICPLGALACLFLFFQAFQEHWKVFVGWTVIGLAIYFGYGIHHSRLAKRA

SEQ ID NO: 19992 - protein, 514 aa, Lycopersicon esculentum
MDGTAVQGTSSVDSFLRNYKLGKTLGIGSFGKVKIAEHTLTGHKVAVKILNRRKIRNMDMEEKVRREIKILRLFMHPHIIRLYEVIETPSDIYVVMEYVKSGELFDYIVEKGRLQEDEARNFFQQIISGVEYCHRNMVVHRDLKPENLLLDSKWNVKIADFGLSNIMRDGHFLKTSCGSPNYAAPEVISGKLYAGPEVDVWSCGVILYALLCGTLPFDDENIPNLFKKIKGGIYTLPSHLSAGARDLIPRMLIVDPMKRMTIPEIRLHPWFQAHLPRYLAVPPPDTTQQAKKIDEEILQEVVKMGFDRNNLTESLRNRVQNEGTVAYYLLLDNRHRVSTGYLGAEFQESMEYGYNRINSNETAASPVGQRFPGIMDYQQAGARQFPIERKWALGLQSRAHPREIMTEVLKALQELNVCWKKIGQYNMKCRWVPSLPGHHEGMGVNSMHGNQFFGDDSSIIENDGATKLTNVVKFEVQLYKTREEKYLLDLQRLQGPQFLFLDLCAAFLAQLRVL

SEQ ID NO: 19993 - protein, 162 aa, Pseudomonas syringae pv. tomato str. DC3000
MHYITPDLCDAYPELVQVVEPMLSNFGGRDSFGGQIVTLKCFEDNSLVKEQVELDGKGKVLVVDGGGSLRCALLGDMLAEKAAKHGWEGLVIYGCVRDVDMLAQTDLGVQALASYPKRSEKRGVGQLDLPVTFGGVTFRPGEYLYADNNGVIISPSPLTMPE

SEQ ID NO: 19994 - protein, 438 aa, Xanthomonas axonopodis pv. citri str. 306
MSTPQPAPDATGLVRVVSRWQIVGLSINDVIGSGIYLLPAATAALLGPMSLWAVMLAGLAVALLVLCYAQAGSYFDTPGGSYLYTREAFGPFVGFQIGWMIWLTRISSAAALSNGLADAVARFWPTAATDTWARLLVVVGSLGLPTAINVIGVKSAARTGIALVIGKLVPLLLFVAIGLFYVDWSWAFAGTAPDLRDLGNLGEAALLLLFAYAGFENIPAAAGEYRNPRRDVPFALITMIVTVTLIYAAVQVVAQGTLPNLAASPTPLADAASRFGGEALALILTVGATISILGTTSNTVMLGPRFLFALARDGYGPAFLARVHPRFHTPAAAVLTQGALSLALALSGSFTQLALLSMVTRLFAYIGTAAAVIVLARRYRQRTDTLRLPGGPAIPIAALVLSLGLLASASWQNLAAAGVALLVGWVFYLFPRKRVEGG

SEQ ID NO: 19995 - protein, 329 aa, Glycine max
  misc_feature (176)..(176): Xaa can be any naturally occurring amino acid
  misc_feature (208)..(208): Xaa can be any naturally occurring amino acid
MEFDLENPFENLHSDAVSYLFLIESDHTPSQNHSQTLKARDLDISVRRELISLISQLSCALDPVLSYLAINYLDRFLANQGILQPKPWVLRLIAVSCISLAVKMMRTEYPFTDVQALLNQSDGGIIFETQTIQRMEALILGALQWRMRSITPFSFVAFFIALMGLKDLPMGQVMKXRASEIIFKSQREIRLWGFKPSINAASALLCAXSHELFPFQYPSFLKAISDSSYVNKESVEQCYKVIQDIAIEEEYSSALNGVSSSDTPINVLDHHFLSSESQKTNGITVANTIAVSSPLRDLKRRKITGCGCGGNNPTIHNSRIQNHAKESEK

SEQ ID NO: 19996 - protein, 486 aa, Oceanobacillus iheyensis HTE831
MTQTTVKNVKNYIGGEWIESRTEKTEDVFNPATGEVIAQVPISTTEDVHHAIEVANEAFKTWKEVPVPKRARILFKYQQLLVEHWEELAKLITLENGKNYAEAYGEVQRGIENVEFATGAPSLMMGEQLASIATELESGVYRYPIGVIGGITPFNFPMMVPCWMFPMAIATGNTFVMKPSERTPLLANRLAELLEEAGLPNGVFNIVHGAHDVVNGLLDHKKVAAISFVGSQPVAEYVYKRGTQNLKRVQALAGAKNHSIVLSDANLENATTQILNAAFGSAGERCMAASVVAVEEDVADEFVTLLTQKANEIKIGNGLDEGVFLGPVIRDQHKERTLQYIESGEEEGANLVRDGRTDEAAKQEGYFVGPTIFDHVTSEMKIWQDEIFAPVLSIARVNNLEEGVDLANESRFANGACIFTRDGGSVRRFRETIDAGMLGVNIGVPAPMAFLPFSGWKDSFYGDLHANGKDGLQFYTRKKVLTTKWV

SEQ ID NO: 19997 - protein, 134 aa, Methanosarcina barkeri
MKEITAIIRMNKAQRTKDVLLECGFPSFTIRRVMGRGKQRGLCHEFNPPLPDPEKEAETCIRFIPKRMFTIVVDDENVSEVVQKIIEVNQTGNAGDGKIFVSDVTEAIRIRTGESGEATVNKSWYNGSRNRFKN

SEQ ID NO: 19998 - protein, 354 aa, Oryza sativa
FGECMSTRIFAAYLNKIGVKARQYDAFDIGFITTDDFGNADILEAAYPAVAKRLHGDWIRDPAIPIVTGFLGKGWKSGAVTTLGRGGSDLTATTIGKALGLREIQVWKDVDGVLTCDPNIYPNATTVPYLTFEEAAELAYFGAQVLHPQSMRPAREGDIPVRVKNSYNPKAPGTLITKQREMDKVVLTSIVLKSNVTMLDIVSTRMLGQFGFLAKVFSIFEDLGISVDCVATSEVSISVSLDPSKIWSRELIQQELDHVVEGLEKIAVVHLLQQRAIISLIGNVRRSSLILEKAFQVLRKSGVNVQMISQGASKVNMSLIVHDSEAKQCIKALHQAFFEDDVLTEVEEEALHMS

SEQ ID NO: 19999 - protein, 827 aa, Geobacter metallireducens GS-15
MVLQKQASSIKARLLRINLLLLGVTSLVIVLVVNVAQKRLALNDAGRDAERILVRYLAIHAYINKELKPRLLDFTASLRDKDYFDPVWMSSTYAVREIDKIFQSRHGKGYYYKECAINARSPRNEADPFEREFLERASHNPAVTTFNGVREIDGKLFFVAMARGEAMEKSCLLCHSNPETAPGGLVRTYGPNRSFSRHENELVSAISIRIPLSEAYAEANSFSLRLSALLLAVIASFFAIKNWFFGRVVLSPLASVTESARRIAHDRRYLGEQIPLGRDREMNELAASFNVMSTELHAFINNLEEKVEEKTAELVQAREEAEEANRVKGEFLATMSHEIRTPMNAIIGINQLLQETHLSQQQRRLVDDSSNAAESLLTIINDILDFSRVEARRLELSDEALELRSFVESLRRLFAVKAERENISLSILVGDEAPQFICGDPARLRQVLTNLLSNAIKFTPTGGRVTLAADADPAGGNLLFTVSDTGIGIEKDKHERIFEMFRQADSSTTRNYGGTGLGLAITRGLVELMGGTIEVESEAGKGAVFRVLLPLRPATGPPADKTAGEELSDSVLPSLSVLVVEDNELNRTVAIGLLTALKQRVAAVANGREAVDALRDGTYDLVLMDISMPEMDGIEATRAIRRGDAGEKARAIPIVALTAHALKDDRDRFLAAGMSDYLSKPLIRGELQRMLLRIAGERGELPPEERCPMRDAPDEGSPFDLEFQQSQFHDAGIGDCLAEVLSIFAQSTATECERMEEYLATGKYAELAAAAHSVKGAAATIGAPHVSRYAADVETAARKSDGVAVARTIPLLRREVRRVEAAVGEMS

SEQ ID NO: 20000 - protein, 307 aa, Coccidioides immitis RS
MAPERTGKSVFLGNIPYTLTEEQVKDILSSAGTVTKFRLMINPETGKPKGYGFADFADADAAASAVRNLNDYEIMGRKIRVDWPHNNEKDSVPLDYSQQGQASAAGQDGQPGYQGQAPLLPSLPPGTDLPPNLTCPNAISQTLSTLPAPQLLDVLSQMKSLVMADPARATELLRQAPQLAYAIFQALLLMNLVDYGTLGAVVEQATQPQPPAPQAQPASHIPPQFQPYPPIPGQVSTPPIHSTPFAPPPPPQPQPQTQPPLQAQIPGQEELLQQVLSMPQATIDALPPAERSQIMLLRQQLLQGGMR

SEQ ID NO: 20001 - protein, 292 aa, Methylobacillus flagellatus KT
MAILVNKQTKVLCQGFTGKQGTFHSEQALAYGTQMVGGVTPGKGGQRHLDLPVFNTMRSAVRETGANASVIYVPPAFAADSILEACDAGIELIVCITEGIPVLDMLNVKAALQANGARLVGPNCPGVITPDECKIGIMPGSIHLRGKVGIVSRSGTLTYEAVHQTTALGLGQSTCVGIGGDPIRGMNFIDCLELFEADPETEAIIMVGEIGGSDEEAAAEYIKQYVTKPVAGYIAGQTAPAGKRMGHAGAIISGGSGKAEDKIRALEQAGVVVASSPAGLGEAVQVAIQAKQ

SEQ ID NO: 20002 - protein, 353 aa, Oryza sativa
MLTSLRYLAGTAGASGFGSRATAEDATAACSDLRHITAIITGATSGIGAETARVLAKRGARLVLPARSLKAAAEARARLLAECPAAAGDVVVMPLDLSSLASVRRFAARFLALGLPLNLLINNAGKFADRFALSDDGVEMTFATNYLGHFLLTKLLMEKMAETAAATGVEGRIVNVSSTIHSWFAGDDAVGYIDAVTRRKIPYDPTRAYALSKLANVLHTRALADRLKEMKANVTANCVHPGIVRTRLIRERDGLVTNTVFFLASKLLKTIPQAAATTCYVAVHPAVAGVSGKYFADCNEASPSRLGSNADEAAKLWRFSDEVAAEEKEESVHAGSFRLQVQSSNADRGLAFA

SEQ ID NO: 20003 - protein, 684 aa, Oryza sativa
  misc_feature (676)..(676): Xaa can be any naturally occurring amino acid
MVIPGPFFRRSTALQVFSVLCVLRFVVPDPDIEWPLIHGIPACPPFTCGHLSKVASPFHRRGYECGVASYELTCTDDKATIQIDNGTYFVTGIDYSDSTFWVVDANISDSRNNCPLPRWKRIPYYYDDVSSDDEESSPYNIQVELDPASRWWSFFVNCSKEINNNVMYSPVACMGTSSSFVYVLTGRLSCYIENLEPSCGYLAMTPLDGMGRVAPAVDSLSYEDVVKFMRKGFRVQFPFRHHRNRSFKDCLMESIPKSTGIGKLSDWFSLSVTENFMDCATAKIPSPYNILLGIILYALMFWTMLAPPCRYLLAPLVVLIFLAQKYLKRMITIDAVEKFLRMQQMLGPTRYAYTDIIAITGHFREKLGQGGYGSVYKGVLLPGDLHVAIKILNGYSNCNGEEFISEVATIGRIHHVNVVRLVGFCSEEMRRALVYEYMPRGSLDKHIFSSERRFSWDKLNEIALGIARGINYLHQGCDMQILHFDIKPHNILLDDNFVPKVADFGLAKLYPRDKSFVSDRALRGTVGYMAPEMVSRSFGIISGKSDVYSFGMLLLEMVGGRRNADPNADSSASKAYYPSWVYDKLIADQQVDEISNFANMHELERKLCLVGLWCIQMKSHDRPTMSEAIEMLEGGVDALQVPLRPFFCDGDGMPPPQVMDSYFHSSDLSAISEEDXGIAELASS

SEQ ID NO: 20004 - protein, 343 aa, Ehrlichia chaffeensis str. Arkansas
MNKQYVSKKVAVVLFNLGGPQSLCEVRPFLFNLFYDKNIINISNPLRFILATLLSFFRKRKAIEIYKHLNGQSPILSETKIQASSLEHILNNHNENQYKVFIFMRHSKPSAKSTIKSVCQYRPDKIILIPLYPHYSTTTTLSAIQHWNYHMKKSRFHCPTSTICCYYNNENYIKAHCQLIIEKYREAQNYGSPRILFSAHSLPLSIVQRGDPYQHQIEQTVLLITKSLNISSLDYKICYQSKVGNIKWLEPSTISAINQAKQDDVPIVLVPISFVSENSETLVELDIECKKIISKENMFFRVPTLSNNEYYIKCLQEMCTQAHHKNTCPVQCKMCFETLHYSS

SEQ ID NO: 20005 - protein, 252 aa, Triticum aestivum
  misc_feature (107)..(107): Xaa can be any naturally occurring amino acid
MNVPAVCAVDQALLALYAARRTSGIVVNIGFNVTSVVPIFQGRVMREIGIETVGQGALKLTGFLKELLQRRNISFESLYTVRTIKEKICYVAADYEAELCKNTQASXCEVDGEGWFTLSEERFKMAEILFQPQIGGVRAMALHKAVSLCMDHCYNTEVLRDHSWFKTVVLAGGSSCLPGLPERLEKELHKLLPPYISEGIRVLPPPFGTDTAWFGAKMIGTVSTFSDAWCINKKQFRQKSRHSGSSLASAWR

SEQ ID NO: 20006 - protein, 407 aa, Methylobacillus flagellatus KT
MRRVVVTGMGIISSLGNNKSEVLDSLKAGRSGIRFQQEYVDQGLRSHVAGSIENLDLEALIDRKLMRFMGKGHAYAWLAMQEAIADAGLPPQLVSNIRTGLIVGQGGASHESILSGVDTLRAKGVRRVGPYMVTKAMASGVSACLATGAEIKGINYGISSACATSAHCIGAAVEQIQLGKQDIVFAGGGEEEHWTLSFMFDAMGALSSKYNATPEKASRTYDVDRDGFVISGGGGILVVEEYEHAKARGAKIYAEIVGYGATSDGYDMVAPSGEGAERCMRLALQGVEGPVDYINTHGTSTPVGDVKELEAIRAVFGDSGVAIASTKSLSGHALGAAGVNEAIYTLLMMEHQFIAASANIDNLDPAAEGLNIVRERIDNANIQTAVSNSFGFGGTNATLTFSRRQLA

SEQ ID NO: 20007 - protein, 370 aa, Aspergillus oryzae
MVAETKLYDSLGIKPEASQDEIKKAYRKCALKYHPDKNKDNPTASEKFKEVSQAYEVLSDPEKRKIYDQFGLDYLMRGGPAPPPPGSGAGGAGGSPFDGGMPGGFSFGGMPGGGGARTFRFSTGPGGGSGFQFSSADDIFRNFAKGGGGGMDHDDLFDILGGMGGGGGGAGRSFRSSRGPSAFQQSQRAPTPEPTVVEKELPLTLEELMRGTTKQVTVKSKTFDTSGKRTVQDVTLEANIKPGLRTGSKIKYRGVGDQEEGGRQDVHLIVTEKEHPNFKRQGDNLITTVEISLKEALTGWDRIVRTIDGKSIRVAKPGPTQPGYEERFPGQGMTISKKPSERGDLIVHVNVRFPASLTASQKDILKDVLP

SEQ ID NO: 20008 - protein, 293 aa, Desulfitobacterium hafniense Y51
MSEGFQLKSRYQLAIVGCGPAGMSAALNAKIRNKDFILLGSDFCSPKLAKAPQIDNYLGFHEIKGEDLRQNFLNHVKAMGIEVVPWKVLNIYPGPPFTLVGNNESFEADAVILATGVSPTKLLPGETELLGRGVGYCATCDGPLYKGKKVAIVSYSHEGEAEANFMAEICAEVYYLPFYKEVGQLDSRIIQKKARVKEISGTQKVEKLVLDNEEISVDGVFVLRESLPAEQIVPGLEMDKGAIKVNRELETGIPGLFAAGDCSGQPYQLNKAVGEGGTAALSAIKYLDEMKKG

SEQ ID NO: 20009 - protein, 386 aa, Corynebacterium glutamicum ATCC 13032
MIVSTQPITDRSALSAEHAEVIKATLPLVGGKINEITPVFYNKMFAAHPELIANTFNRGNQKQGDQQKALAASIATFATMLVTPDAPDPVQLLSRIGHKHVSLGITADQYDIVHEHLFAAIVEVLGAETVTAPVAEAWDAVYWIMANVLIGFENNLYASNDLEPGDVFREVTVTAKKQLSATVWEYTLAGELVAPEPGQYTSIGVVLDDGARQLRQYSLLGGSDTEYRIAVEDNGEVSGFLRDRVSVGDKIEATIAAGDLVLNKDTNPVVLISQGIGSTPMVGMLAGMNPERDVVVLHADQAESTYAQVEEVQGLVEKLPKAAFEIFYRDNDQWLEVAGRIPSGASVYLCGGVEFLKNVREQIEALDEQPRDVNFELFAPNDWLIS

SEQ ID NO: 20010 - protein, 326 aa, Erwinia carotovora subsp. atroseptica SCRI1043
MKIGLVISGGDVSGINNFIFQVNRMTASDIVIFDGGINGLIDNCCKVLTRRDLVDYSLSSMPLVTSGRKTGKCRKTDYEKIVKNIQKQKLDALIMAGGDGSFQFLKKLSCYGIHCYGIGMTIDNDISGNSYTIGFSTACEQVMSEVEKLRNTGRGLQGRVFMIELLGGYCGELTLQAALKSNADIALIPESPWDIDALSQCILDKIAEQNSVIILCSEGYTHEYTPGFQGAIDTIIKKLEHKIGIRIRKTILGYGLRNGAPTGEEIIQGTLLAEEVVRCINAGLTNKIIIINNNNKAIPIDLEDSERRLVDIESHFYKLAKSHHLI

SEQ ID NO: 20011 - protein, 508 aa, Zea mays
  misc_feature (156)..(156): Xaa can be any naturally occurring amino acid
  misc_feature (166)..(166): Xaa can be any naturally occurring amino acid
MSTNKGSAAKGGGGKKKEVKKETKLGMAYKKDDNFGEWYSEVVVNSEMIEYYDISGCYILRPWAMEIWELLKEFFDAEIKKLKLKPYYFPLFVTENVLQKEKDHIEGFAPEVAWVTKSGKSDLEAPIAIRPTSETVMYPYFSKWIRSHRDLPLRCXQWCNVVRWEXSNPTPFIRSREFLWQEGHTAFATKEEADEEVLQIWELYRRIYEEFLAVPVSKGRKSEMEKFAGGLYTTSVEAFIPNTGRGIQGATSHCLGQNFAKMFDITFENEKGVREMVWQNSWAYTTRSIGVMGMTHGDDKGLVLPPKVAPIQVIGIPVPYKDADTTAIKGACESTVYTLDQSGIRADQDTRENYSPGWKYSHWEMKGVPLRIEIGPKDLANKQVRVVRRDNGAKVDIPVTNLVEEVKVLLDEIQKNLFKTAQEKRDACVHVVNTWDEFTTALNNKKLILAPWCDEEEIEKDVKTRTKGELGAAKTLCTPFEQPELPEGTLCFASGKPAKKWSFWGRSY

SEQ ID NO: 20012 - protein, 588 aa, Sinorhizobium meliloti 1021
MLEDARTRWHPIAATDDLPLRHVFHGQLLGREFAVWRADDGYVNVWENRCLHRGVRLSIGINDGRELKCQYHGWRYSNRTAGCTYIPAHPADAPARTITNRSFQAVERYGLVWSSEDPRGDLPVVEGIGEDDLLVLRAIPVNASADLVVERLQSYRFQPNSEIAGAGANVELVAATQAAVALRSYQGRAETLGVFFVQPVDSGRSVIRGVVSGRPNDAQLTVVLRCHNEALSTLRADLEREAAALPAPTPIEPIFERVSEELASLPELDSRGRKAAIRVQVARKWQTADGIMAFQLRPVRGLLPTFQPGAHIDVHLPNGLVRQYSLTNGPGETDCFTIGVKLDPASRGGSQCLHDSVREGDVLAISEPRNNFPLRRDALKTIFVAGGIGVTPLLAMAQTLNNQSLDYELHYFAQNEQQLAFSECRQALGDAVKPHLGLSPGDTVKELRRLLSAYLPDTQLYVCGPGPMLESTRSLAAEAGWPEAAVHFEYFKNTNVIDDSSSFEVALARSCLTIKVAAGQSILEAMREAGVDLPSSCEQGACGTCLATVIEGEPDHQDVYLSPSERASGTKIMTCVSRSKSARLVLDA

SEQ ID NO: 20013 - protein, 421 aa, Mycobacterium avium subsp. paratuberculosis K-10
MALVVQKYGGSSVANADRIRRVAERIVATKKQGNDVVVVVSAMGDTTDDLMDLAQQVCPAPPPRELDMLLTAGERISNALVAMAIESLGAQARSFTGSQAGVITTGTHGNAKIIDVTPGRLQAALDEGRIVLVAGFQGVSQDTRDVTTLGRGGSDTTAVALAAALGADVCEIYTDVDGIFSADPRIVHNARKLDTVTFEEMLEMAACGAKVLMLRCVEYARRYNIPVHVRSSYSDKEGTVVVGSIKDKPMEDPILTGVAHDRSEAKVTVVGIPDIPGYAARVFRAVADADVNIDMVLQNVSKVEDGKTDITFTCSREAGPTAVAKLDALKDEIGFTQLLYDDHIGKVSLIGAGMRSHPGVTATFCEALAQVGVNIELISTSEIRISVLCRDTELDKAVVALHEAFGLGGAETATVYAGTGR

SEQ ID NO: 20014 - protein, 427 aa, Haloarcula marismortui ATCC 43049
MSTQKEPPEQATDEDESPIATARRQLERAAEHLDLSEGMLEQLRHPSKTVEVSVPIHRTDGSVEVFNGYRVQHFEVRGPYKGGMRYHPSVSAEECTALAMLMTWKCAVMDLPFGGAKGGIVVDPSTLDAQETEQLTRRFAEELREVVGPTKDIPAPDMGTDEQTVAWFMDAYSMQEGETVPGIVTGKPTAVGGTHGREEAPGRSVAIVAREALDYYDGSVEGATVAVQGFGAVGANAARLLDSWGASVVAVSDVDGGIYDESGLDIESISADGDEHGQLGAVDAPRQLSNAELLELDVDVLIPAAVGNVLTEENAADVQASIIVEGANGPTTTAADTVFEERNIPVIPDILANAGGVTVSYFEWLQHINRRSWSREEVNDELEAEMLDAWEALQAEVEDRDVTWRTAAYIVALSRIGDAMNARGLWP

SEQ ID NO: 20015 - protein, 445 aa, Streptococcus agalactiae A909
MTEKYVNKVIVILGASFAGMTCAQKLRQLNPNWDIVLIDKEIHPDYVPNGLNWYYRHEISGLNQAMWQTEEEQRLQNIRCLFGLKVEKINKEDRELMLSDGSSVYYDQLICAMGSQAESTYIDGADAQGVLTTKTYATSQNAKQVLDKSHKVAVVGAGIIGLDIAYSLHESGKAVTLLEAQERPDFRHTDPDMSLPLLDAMAESKLHFFQNQKVEKITVTREEKLCLRTLTGDTFTVDAVILAVNFRPDSRLLTGLVDLSVDNSVVVNDYFQTSDPNIYAIGDLIWSYFKGLNSAYYMPLINQAIRSAQMLAYHLSGHAVPKLKITRATGSKHFGYYRANIGLTELEAGFYEDTVSVTYFPKEQYDLRIKLIANQKTGHLLGAQLISKENCLATANQLVQAISCDMTDFDLAFQDFIYTARESEMAYMLHQAAINLYEKRIGLCE

SEQ ID NO: 20016 - protein, 524 aa, Candida glabrata CBS 138
MFRSTTSNVLTRALRTRNAGVSSVMVLRAYSHLPLHVPIKLPNGLEYEQPTGLFINNQFVPSKQHKTFEVINPSTEEEICHIYEGREDDVESAVQAADTAFKNGSWTDIDPFERGQALYKLAELIEKDKEIVASIESLDNGKAINSARGDVQLVINYLKSSAGVADKIDGRLVNTGSNYFNYVKKEPLGVCGQIIPWNFPLLMWAWKIAPALVTGNTVVLKTAESTPLSALYVSKYIPKAGIPPGVINIVSGFGKIVGEALTTHPKIKKIAFTGSTATGKHIYSSAAQTLKKVTLELGGKSPNIVFADADLKKAVQNIILGIYYNSGEVCCAGSRVYVEESIYDEFAQEFKTASEALKVGNPFDESTFQGAQTSQMQLDKILSYVEIGKKEGATLITGGERIGEKGYFIKPTIFGDVTEDMRIVKEEIFGPVVTVTKFKDLDHVVQMANDSEYGLAAGIHTTNINSAVKVADRLKAGTVWVNTYNDFHQNIPFGGFNASGLGREMSKEALDGYLQAKAVRVKLD

SEQ ID NO: 20017 - protein, 92 aa, Brassica napus
ALSCGTVSGNLAACIGYLTQNGPLPRGCCTGVTNLNNMARTTPDRQQACRCLVGAANSFPTLNAARAAGLPKACGVNIPYKISKSTNCNSVR

SEQ ID NO: 20018 - protein, 151 aa, Zea mays
MKQPTFPSAAAEETKSEQNQTGAKQKSKKFPTATELISHYQKQGGLEAAEASVKVIEDLQNALVRVASSSKNASSKSKLLADARKIDAISGRLAVVDAKLETKPGYVETFALGLASGAALNGISAVWPHVTRGISQVWSAVKSGTDPSAAS

SEQ ID NO: 20019 - protein, 93 aa, Brassica napus
ALSCGTVSGYVAPCIGYLAQGAPALPRACCSGVTSLNNLARTTPDRQQACRCLVGAANAFPTLNAARAAGLPKACGVNIPYKISKTTNCNSVK

SEQ ID NO: 20020 - protein, 601 aa, Zea mays
MARLPLAACAVAAAFYLCLHLASSSSSAPRLAPAPSDPGRRAGRTAYHFQPAKNWQNDPNGPMYYNGMYHLFYQYNPHGALWGVGNLSWGHSVSGDLVNWAALDTALDPTSPFDANGCWSGSATILPGGTPAILYTGIDANGEQVQNVAFPRDPADPLLRRWDKPGYNPVIPLPADVPGDKFRDPSTAWLGRDGLWRVAVSAEVRGVASTLVYRSADFLRWERAPAAAPLHASRAAGMVECPDLFPVREEGDDGDGQGLDASASGAGVRHVLKLSVMDTLQDYYMVGRYDDAADAFVPAEPERGDDVRGWRRLDYGHVYASKTFFDARGSRRVLWAWANESDSQADDVAKGWSGVQTFPRKLWLDEDGKQLRQWPVEEIETLRRKRVVLRRGTALATGGMNEIVGVAGSQADVEVAFKVSSLAGAEALDPNWLLDPQKLCGEKGASVPGGVGPFGLIVMASSDLREHTAVFFRAFRYHGRYKLLMCTDLTRSSTRAGVYKPPYGGFVDVDVEEHETINLRTLIDHSVVESFGADGRMCITARVYPEHAETSNSHMFVFNNGSGTVEVSKLEAWELAAATVNSVGGNDSLVMSESNNQSESY

SEQ ID NO: 20021 - protein, 93 aa, Brassica napus
ALSCGTVSGYVAPCIGYLAQNAPAVPTACCSGVTSLNNMARTTPDRQQACRCLVGAANALPTINVARAAGLPKACGVNIPYKISKTTNCNSVK

SEQ ID NO: 20022 - protein, 193 aa, Trichodesmium erythraeum IMS101
MNANQSNSTNISSLVTRLRNFMIVSVAIALSVSIFMALRTDKLSVSLNEMAQAATPLDVALSNNKPTLVEFYANWCTTCQAMAPELEEIRQKYTQNTNFVMLNVDNSRWLPELVEYRVDGIPHFVFLDREGTEVGQTIGEVPKSIMAANIEALVAGSYLPYNSTVGQGSHFNAPVEPTKASQADPRVHGSQVK

SEQ ID NO: 20023 - protein, 326 aa, marine gamma proteobacterium HTCC2207
MVDNVHLVNHSDGISVPQTIRIATRKSPLALWQAEFVKAKLLENHPDLDVQLVAMTTRGDVLLDTPLAKVGGKGLFVKELEVAMLENRADIAVHSMKDVPMEFPPGLGLTVICEREDPLDAFVSNRYANLAELPPGSVVGTSSLRRQCQIRAAFPDLQIKDLRGNVNTRLAKLDYGDYDAIILASAGLIRLGMEARIASRLESELCLPAGGQGAVGIECRLDDQATIELLKPLEHSQTRIRVTAERALNRRLEGGCQVPIACYAELDEAGESLQLRGLVGSVDGSLILQDQLSAPVAQAEQLGIELAERLLAAGAGEILAEVYGAD

SEQ ID NO: 20024 - protein, 634 aa, Zea mays
MDGCDCIEPLWPTDDLLVKYQYISDFFIALAYFSIPLELIYFVKKSSFFPYRWVLIQFGAFIVLCGATHLINLWTFTTHTKTVAMVMTIAKVSTAVVSCATALMLVHIIPDLLSVKTRELFLKNKAEELDREMGLIRTQEETGRHVRMLTHEIRSTLDRHTILKTTLVELGRTLGLEECALWMPSRSGSSLQLSHTLHHQITVGSSVPINLPVINQVFSSNRAIIIPHTSPLARIRPLTGRYVPPEVAAVRVPLLHLSNFQINDWPELSAKSFAIMVLMLPSDSARKWHVHELELVEVVADQVAVALSHAAILEESMRARDLLMEQNVALDLARREAEMAIRARNDFLAVMNHEMRTPMNAIIALSSLLLETELTPEQRLMVETVLKSSNLLATLINDVLDLSKLEDGSLELEIKAFNLHAVFKEVMGFIKPIASIKRLSVSVMLAPDLPLCAIGDEKRLMQTILNISGNAVKFTKEGHITLVASIVKADSLREFRTPEFHPTASDDHFYLKVQVKDTGCGIGPQDLPHVFTKFAHPQSGGNRGFNGSGLGLAICKRFVSLMGGHIWIDSEGTGRGCTATFVVKLGVCDNTNTYQQQLIPLVWPSSADSDLRAPKPLPDGRGSTPLKSRYQRSV

SEQ ID NO: 20025 - protein, 372 aa, Arabidopsis thaliana
MSRVSPKTVDDAVKALVKEGNEKSRTEKPQLLEEDGFFYLVVALKKIPQRNFTNAYRIPLPHPLINTTEDSPELCLIIDDRPESGLTEEDAKKNIKSENIPITKVVKLSKLKSDYGSFESKRKLCDSYDMFFSDRRVIPMLPKLIGKKFFQSKKTPVAIDLKHMNWKEQIEKACGAAMFFMRTGSCSAIKVAKLSMESDDIVENVTATLNGVVDVLPSRWKYIRSLHLKLSESLSLPLYQTVPYLQLKIDPLGVEEVKNGEGLAKSDVDDSSSKSVKTKKKNGKIHEVRYMDSNVSETLGDDEFDRSVGEDEVADDLNASGDKKKRKKMSSSKSAVSGKPDIVKSKNGQKSKKLKKDIDESGGGFKAKTKRR

SEQ ID NO: 20026 - protein, 119 aa, Glycine max
TLKSIGKWRCHRESGQSSSSTVRVILLNQIQAQPLPHHCFVSFFSGLSFYTTQEQLKKLFSPFGLVTQADLALDPITKRPKGFGFVSFKSEIEAEKACKAMNGRIVNGRLILVEPANEK

SEQ ID NO: 20027 - protein, 495 aa, Mesorhizobium loti MAFF303099
MNLPPNALWIDQDDYDVRGFSHGLYIDGRWRPSSDGRVIDVVDPSSGSVIAAVPDATLEDALAAVDAAAKAATAWRETAPRKRSEILRRCFELMVERSETLAMLISLENGKALRDARGEVAYAAEFFRWNAEEAVRITGEFGTAPSGANRIVVDYEPIGICVLITPWNFPAAMATRKIAPALAAGCTVILKPASETPLTAYALAALYSEAGVPAGVVNVLTTTSPGPLTSAMLADPRVRKLSFTGSTGVGRTLLGEAAKHVVSCSMELGGNAPFVVFDDADLDAALDGAMIAKMRNAGEACTAANRIYVQSGIHDAFADGLRKRMAALKVGPGMSADTECGPMITRKAVDKIDRLVKDAVGRGAKVLCGGSIPEEEGFFYPPTVLSQVPPDADMAHEEIFGPVAPVTRFETEAEVIMHANNTEYGLAAYIYTRDVGRGLRVASRIEAGMIGLNRGLMSDPAAPFGGVKQSGLGREGGQHHGIAEFMEAKYIAVTF

SEQ ID NO: 20028 - protein, 676 aa, Pseudomonas fluorescens PfO-1
MERSPWHAGEQQLQAHVGVAERMEEFGRKVIRTWMPDQHRQFYQQLPFMLYGAVDAEGRPWASVLEGEPGFAHSPEPTQLQFASLPAADDPAQLQAGAAIGLLGIELHTRRRNRLNGHIDNLDANGFGLTVDQSFGNCPQYIQLRQFQRVPLTDPQTRKAEHRDSLDAAAIALIESADTFFVASYVDVDGERSVDVSHRGGQPGFVRIEGNRLTIPDFAGNLHFNTLGNLLLNPLAGLLFIDFSTGDVLQLSGRTEIILDAPQIEAFQGAERLWTFEVEKLVRRPAALALRWRFDGMSPTSLLTGNWAQADARLQAKALGDSWRPLRVAKVEMESRHIRSIYLEPNDGAGLPVFLAGQHLPLRFTLDGEVHIRTYSLSGAPSDDFFRISVKREGRVSTHLHEQIRVGDVLEARLPQGHFTVAALERKPLVLLAAGVGITPLLSMLREVVYQGLRTRRIRPTLFVQSSRSLADQPFRAEVDRLLEDAGDAVKVLRVLSQPEDDLVEGKDFDLRGRIDGDLLRNLLTDEDFDQVDFVLCGPGGFTQGIYDILRELNVRDGQIHAETFGPSTLKRQADPDAIVMEQPPAATTSVPVLFERSAKEARWQPDGGSLLELAESRGLRPEFSCRGGSCGTCKTRLISGAVNYPQPPAEVPEEGQVLICCAVPAQSAQPLVLDL

SEQ ID NO: 20029 - protein, 323 aa, Trichodesmium erythraeum IMS101
MKENHKSTVVITGASSGVGLHAAKALAKTGEWYVVMACRDISKAEKVAQEVGMTQDSYTVMHLDLASLEVVKRFVKTFRESGRSLEALVCNAAVYLPLLKEPMRSIDGYEISVATNHLGHFLLCNLMLEDLKKSPAKDKRLVILGTVTANPKELGGKIPIPAPPDLGNLQGFEQGFKTPISMINAKKFKSGKAYKDSKLCNVLTMRELHRRYYKSTGIVFSSLYPGCVADTPLFRNHYPLFQKLFPLFQKNITGGYVSQDLAGERVAAVVKDPEYKESGIYWSWGNRQKKDRKSFVQEVSDEASDDDKAIKLWELSSKLVGLS

SEQ ID NO: 20030 - protein, 409 aa, Methylophilus methylotrophus
MALIVQKYGGTSVANPERIRNVARRVARYKALGHQVVVVVSAMSGETNRLISLAKEIMQDPDPRELDVMVSTGEQVTIGMTALALMELGIKAKSYTGTQVKILTDDAFTKARILDIDEHNLKKDLDDGYVCVVAGFQGVDANGNITTLGRGGSDTTGVALAAALKADECQIYTDVDGVYTTDPRVVPEARRLDKITFEEMLELASQGSKVLQIRSVEFAGKYKVKLRVLSSFEEEGDGTLITFEENEENMEEPIISGIAFNRDEAKITVTGVPDKPGIAYQILGPVADANIDVDMIIQNVGADGTTDFTFTVHKNEMNKALSILRDKVQGHIQAREISGDDKIAKVSVVGVGMRSHVGIASQMFRTLAEEGINIQMISTSEIKIAVVIEEKYMELAVRVLHKAFGLENA

SEQ ID NO: 20031 - protein, 299 aa, Bartonella quintana str. Toulouse
MNNIIDGKKLAEEIIVKVKAETIKLRNNYKIQPGIAVIIVGDDPASHVYVTSKSKKAEECGFFSIKHMLSKETSEKELLQLIATLNSDPKIHGILVQLPLPAHINTNCVTQAIAFQKDVDGFHYINIGKLSCNTLEDAIIPCTPAGAMIMIEQQCGRDLSGLDAVVVGRSNIVGKPMAALLTAANATVTIAHSRTRDLDDVCRSADILVAAVGRPQIIKKDWVKNGAIVIDVGINRIAAPEKGIGKTRLVGDVDFEAIKGKTAAITPVPGGVGPMTIAMLMVNTLNAAARLYNLPVLKL

SEQ ID NO: 20032 - protein, 414 aa, Staphylococcus aureus subsp. aureus MRSA252
MTENNNLVTSTQGIIKEALHKLGFDEGMYDLIKEPLRMLQVRIPVRMDDGTVKTFTGYRAQHNDAVGPTKGGVRFHPDVDEEEVKALSMWMTLKCGIVNLPYGGGKGGIVCDPRQMSIHEVERLSRGYVRAISQFVGPNKDIPAPDVFTNSQIMAWMMDEYSALDKFNSPGFITGKPIVLGGSHGRDRSTALGVVIAIEQAAKRRNMQIEGAKVVIQGFGNAGSFLAKFLYDLGAKIVGISDAYGALHDPNGLDIDYLLDRRDSFGTVTNLFEETISNKELFELDCDILVPAAISNQITEDNAHDIKASIVVEAANGPTTPEATRILTERGILLVPDVLASAGGVTVSYFEWVQNNQGYYWSEEEVNEKLREKLEAAFDTIYELSQNRKIDMRLAAYIIGIKRTAEAARYRGWA

SEQ ID NO: 20033 - protein, 598 aa, Vibrio sp. Ex25
MNNTNSVNQRLTLLREAMSFHNVSAYIVTNNDPHNSEYSADHWLARSWISGFTGSAGDVVITQQGGGLWTDGRYYIQAEEQLHGTGLELFKAKQPETPTIAKWLATTLPESSIVAVDGRAISYAFYQGLKQAFEAKNIKIILDLDLLAPIWLERPPRPSAPVFEHPTAFAGVDTENKLARIRSWLTENQVDSLLVSTLDDVMWTMNIRGGDTNYCPVSEAYLIVEQSLATLFIDKAKLPQDVERALTEQSVHIRHYNYVSQYLNQQCEGLSLAFSPTHTDSLLVSSIERNVNLKPMACPVTAMKAIKNATELTSLEQALTDDGVAIVRFMNWLEEQVPSGFVTELSAEAQLNHYRRQTRHYVSDSFRTIAGFAAHGAKMHYAADEESNAAVNESNFFLVDSGGQYLGGTTDITRTFHFGSPTIKQRKDYTLVLKAVIRLTQTRFMKGSTGANLDIMARGVLWQHGIDYKCGTGHGVGICLNVHEGPQNFSQSHREVELKPGMVITNEPGVYREGEYGVRIENILKVVEVEQNEFGTFYGFETITLAPIATNALDLSMLDQAELDWLNHYHSRVYQALSPFLDAQDKNWLQSTTQLIEK

SEQ ID NO: 20034 - protein, 280 aa, Chlamydomonas reinhardtii
MPPQTSFGLQDPHYFLGRAEILGWINDTLGLRLTKVEDTCNGAVACQLLDVLHPGAVPMAKVDYNANSEYQMINNYKVLQDCFNKLKIDKYVEVARLVKGRPLDNMEFMQWFKAYWDQIIPPGSAPAPYDGPSRRALCKTGDMKHSGGGPAPPKAGGIKAGPPAVSAAPRAAPAAAPRVAAGPKGSPGDRDQMDKLNHQLEDLRLKADGYEKEKDFYYSKLRDVELLCQTPTVCELPIMKRVQEILYAATAEDGGRIMRETQVEFAGREYTEEELSAADG

SEQ ID NO: 20035 - protein, 409 aa, Pseudomonas syringae pv. tomato str. DC3000
MKKLKLVMIGNGMAGVRTLEELLKLSEDLYDITVFGAEPHPNYNRILLSPVLAGEQNFEDIVLNDLAWYQSNGIQLLLNRRVVKIDRIKRLVIADDGTQAHYDRLLIATGSRPFILPIPGNTLDGVIGYRDIGHTRQMIDTAVTHKHAVVIGGGLLGLEAANGLSLRGMQVTVIHNGQTLLERQLDKTSGLMLQAALELRGLSFRLNEQTQALLGDDQGRVRAVQLKNGDVIDADLVVMAAGIRPNTELAEQAGLPCNRGILVNDTLQTFDPRIYAIGECVSHRGIAYGLVAPLFEQARVCANHLAQLGSARYPGSVTSTKLKVTGIDLFSAGDFLGGEGTESITLSDPIGGVYKKLVIKNDILVGACLYGDTADGSWYLQQIRDGQGIDAIRNHLMFGKPAATPAACA

SEQ ID NO: 20036 - protein, 360 aa, Atriplex nummularia
MAKVKIGINGFGRIGRLVARVILQSDDCELVAINDPFITTDYMTYMFKYDSVHGQWKHHELKVKDEKTLLFGERPVTVFGNRNPEEIPWGQTGADYVVESTGVFTDKDKAAAHLKGGAKKVIISAPSKDAPMFVVGVNEHEYKSELNIVSNASCTTNCLAPLAKVINDKFGIVEGLMTTVHSITATQKTVDGPSAKDWRGGRAASFNIIPSSTGAAKAVGKVLPALNGKLTGMSFRVPTVDVSVVDLTVRLEKEATYEQIKAAIKEESEGKMKGILGYTEDDVVSTDFVGDNRSSIFDAKAGICLNGNFVKLVSWYDNEWGYSSRVVDLIRHMSKTTSKLDSVALACVDAVSTLILSSEC

SEQ ID NO: 20037 - protein, 700 aa, Vibrio angustum S14
MISSESEKLQETVIDLLRSQERESQLQDENEAILEGISAMAGANDKRQVFNSLLEVLRKFIGFDQALVLTREDEQEMLDVLVSTDNRFGTNSWLMESTFRRAINGECIALYSPKDIIEFSTQSIEALNDYSSALLTGVKVSSSDAVMILMSHDKSQFTPRCRRVLNRFRPLLARAIIDIDYRERLQSLVAARTQQLTFSQQRFKDFAKTAGDWFWEIDVDYNFTYISEPQVANTQISCDNFIEFFNNYPLFQNKLTSKLSQQVVFEDLEWNLSVDNTEQWYSFSGTPYFDKYGKLQGFRGTAKNITSRKKRLFDLQEAQKQAETANKAKSQFIAMMSHEIRTPLNAVLGLMESLSLSGLNNKQNLWLSQMDQSAHLLLAIINDILDLSRIESGSFRLFNSDINVVESIRLVADQLAPQAAKNNVQFQCEIDDAIPKQIYGDKNRIAQVLFNLIGNAVKFTSIGSVRVVVRKVDDNIEIAVIDTGIGIAKDAQANIFNPFHQADGSITRRYGGTGLGLAISQHLIEKMNGTISLESELGTGSCFKVSIPIVYPSLKSCEADIKFKNKSDCSLNILLAEDSNTNQLVAKLMLERRGHKVAITNNGKEAINVLLQGHNKFDLVLMDISMPILDGLEATKQLRQRKISIPIVALTANAMQSDQKIYHDIGMDGFLAKPICSNELDALLEKYQELKENQQSESTI

SEQ ID NO: 20038 - protein, 537 aa, Corynebacterium diphtheriae
MTTTIIVGGVAGGMSTAARLRRRDEDMTILVFEASNHVSFANCGLPYHVSGVIPERSSLLLQTPESLAARFNIDVRVDHLVTAINREAGSVSVKNLATGEVSEHHYDHLVLSPGARPILPPLPGIEKALTLRTVEDVDTIIERVAGASSSAIIGGGFIGIELAENLAHRGIATTIIERGPQILGPLDIEMAAFVEQRLRDNGISVRTNANAAAISDTGVELADGSVTADVVVAAVGVAPASDLARAAGLAVGERGGIVVDDQLRTNDPQIFALGDAAEKRDAISGADTLVPLAQTANRHGRLVADIITGRDVKRTSTLGTAIVGVFGLAAASVGWSEKRAVAAGKNIRVIHTHPASHAGYYPGAAQLHLKLVVDADTDAILGAQAVGEDGADKRIDVIATAMRAGLSATDLADLELAYSPQYGSAKDPVNLIGMVNDNIRSGERSVQWHELDAQIADGWTLVDVRTAGEFAAGNIPGAINIPVDELREHLDELQGKNVLVHCQVGLRGHVAATLLTNSGINAANLDGGYLTWKTATS

SEQ ID NO: 20039 - protein, 319 aa, Kineococcus radiotolerans SRS30216
MNVLTVTPNPSIDHTVELATLTRGEVHRALSGTVEAGGKGVNVARALARHDHRATAVLPSGGVDGDRLEVLLAPQRVDAVTVAITGTIRTNTTVVEADGTTTKLNEPGPRLSGPELDALLRVVTARLTVRPDWLVASGSLPPGAPSDLHARFVRAARAAGVRSAVDTSGPALAAAVDAGPDLVKPNQEELGELLGRELLTVGDVVAAARELRTRGVGEVLVSLGGGGALLVTGDGVWWGGGEPLVPLSTVGAGDCTLAGYLHTGAPAAQRLSTAMAWGRAAVLLPGSSVPGPTETLAAAPGVRVLPDPDPETLVKDLQR

SEQ ID NO: 20040 - protein, 254 aa, Oryza sativa
  misc_feature (65)..(65): Xaa can be any naturally occurring amino acid
MAVATMALSSSFAAAAAGSAPWRGVVAAGRAAVGFPPRRRVALVVRAQSEPEVEPTKEETATSSXSPSPATTPTPSPAAAAPKAKPAASTKLWDVLAFSGPAPEPINGRLAMVGFVSALAVEASRSGELLEEASSGGGLAWFAATAAVRPSRPPRRRFRVPRRRCLCPTPRAGGGCSSWPPPPPPSLRPAPPPATASICPRAEGCLLVVAAADTAASSPAAAAAASVSPAAASAAASPVCAASDKAKGRVRERE

SEQ ID NO: 20041 - protein, 523 aa, Bordetella parapertussis
MPENAQPHAVIPAADLQLSAQSPQWRVFAAAAAGASLVARPLRVIEAAGIYVDLSMQRHSSALAQAGLALLQARDVLGARAALFAPGAPDAAHGRYPVLRAGYGAHPEEQCDIEVEIEYARMLEFVRELDRGGACPAVLYLGGGAGQWALRLALQAFGGPAQRRQLRFVSGGDAAALHEALAGLGPRRTLVVAASRGFEPSETLDNARAAIDWLRRAGIDDVSAHLVTVTGNESAARALGVAAARVFRLPSWLQPRHELWSVGALPVALALSVDMLKALRSGAAAMDQHFLQAAPAVNAPMQMALAAVANTSAMHWPTHALAVYSARLAALPACVQQLEMTLAGRAPASLPAYSVVWSPAGAPGPGAFFEWLHRAPAGAPVDFIAGLDEYPASPPAHRALLANCLAQREALLRGLPAGPGQPAAGGGRPSTLVVLRQVDPRAVGALLALYEHKAFVQAALWGAALGGADQAQACQRLAQDIARQLAVPPAAGPVDWGHDSSTAFWIDRYREQGGAGAAAGRTA

SEQ ID NO: 20042 - protein, 245 aa, Bacillus cereus ATCC 10987
MIKLVLIRHGQSLWNLENRFTGWTDVDLSENGLSEAREAGAILKKNGYTFDVAYTSVLKRAIRTLWIVLHEMDLAWIPVHKCWKLNERHYGALQGLNKDETAKKYGEEQVHIWRRSIDVRPPALTEDDPRYEMNDPRYKALKKGELPLTECLVDTEKRVLAYWHSEIAPSLKSGEKVIISSHGNTIRSLVKYLDNLSSDGVVSLNIPTSIPLVYELDDNLRPIRHYYLSMDGEVPEGEIPKHISF

SEQ ID NO: 20043 - protein, 614 aa, Mycobacterium avium subsp. paratuberculosis K-10
MRRSEVPSDIPGAITVTSHPDAFSSSRSIVKPAGPPGPGQPAWNPQRGSSMPVNRYRPFAEEVEPIRLPDRTWPDKVIDRAPLWCAVDLRDGNQALIDPMSPARKRRMFDLLVRMGYKEIEVGFPSASQTDFDFVREIITEGAIPDDVTIQVLTQCRPELIERTFAACQGAPQAIVHFYNSTSILQRRVVFRADRAAVQEIAVAGARKCVEEAAKYPETQWRFEYSPESYTGTELEYAKQVCDAVGEIIRPTTENPIIFNLPATVEMATPNVYADSIEWMSRNLARRDSVILSLHPHNDRGTAVAAAELGYAAGADRIEGCLFGNGERTGNVCLVTLGLNLFSRGVDPQIDFSNIDEIRRTVEYCNQLPVHERHPYGGDLVYTAFSGSHQDAINKGLDQMKIDADAADTDVEDMLWQVPYLPIDPKDVGRTYEAVIRVNSQSGKGGVAYIMKADHGLALPRRLQIEFSQVIQKISEGEGGEVSPKEMWDAFFEEYLAPVWPLERVKQRVDASDEDSGVTSISATVKINGEQTEINGTGNGPLAAFVHALAGVGFDVAVLDYSEHAMSSGDDAQAAAYVEASVNGRTVWGVGIAPSITTASLRAVVSAVNRAARA

SEQ ID NO: 20044 - protein, 601 aa, Solanum tuberosum
MWRVARSAASTFRRTRRLSTAISAPCIVHKRGADILHDPWFNKDTGFPMTERDRLGLRGLLPPRVISFEQQYDRFMESFRSLEKNTEGQPDSVVSLAKWRILNRLHDRNETLYYRVLIDNIKDFAPIIYTPTVGLVCQNYSGLFRRPRGMYFSAKDKGEMMSMIFNWPSTQVDMIVLTDGSRILGLGDLGVQGIGIPIGKLDMYVAAAGINPQRVLPVMLDVGTNNQKLLEDPLYLGLRQPRLEGEEYLSIVDEFVEAVHARWPKAVVQFEDFQAKWAFETLDRYRKKFCMFNDDIQGTAGVALAGLLGTVRAQGRPLTDFANQKIVVVGAGSAGLGVLKMALQAVSRMTGPSADPHFFLLDKNGLITKDRKDIDPAALPFAKAHHEIEGLGLQEGAGLAEVVKKVKPHVLLGLSGVGGIFHEEVLRAMKESDSVRPAIFAMSNPTNNAECCPVDAFKLAGEDIVFASGSPFANVDLGNGKIGHVNQANNMYLFPGIGLGALLSGARNISDTMLEAAAECLASYMSDDEINRGILYPSIDDIRDITAEVGAAVLRAAVAEDLAEGHGDVGVKELQHMSKEETIEHVRQNMWYPVYGPLVHE

SEQ ID NO: 20045 - protein, 573 aa, Oceanobacillus iheyensis HTE831
MFEDRAGKVLVDLLSEWGVDHIYGMPGDSINQLMEELRKEKDKMKFIQVRHEEAGALAAASYAKLTGKLGVCLSIAGPGAIHLLNGLYDAKKDSAPVLVLAGQVPTDQIGTDAFQEINMQRMFEDVAVFNEQVVSEEQLPALVNQAVRTAYAEKGPAVLTIPDDIPAAKIKKHVQKNAAIYEEPEQVPSSTEMEKALELIGNAKKPIILAGTGTKGAKQELEQFSDKIAAPVIVSLPAKGVIDDDHPNCLGNLGMIGTKPAYEAMEDSDLVILIGTSFPYVEFLPEGVSYIQIDNDPLKIGKRYPVNVGIAGDSQKSLTRLNERITRTENRDFLENSQEKMAKWWKEMEEDEQQTSTPIKPQQIIAEVQKIAEDDAVLSVDVGNVTVWAARHFRMKTTQKFLTSSWLATMGCGLPGAIASKMAYSDRQAIALCGDGGFSMNMQDFLTAVKYNLPMVVVVFNNERIGMIKYEQEAKGNLDYKTNLESFNFAQFAENCGGKGYRVENFEDLGPSIRAAASFNKPVIVDVCIEDEPPIPGKLSYEQVTSYSKQTIKKLFEKGKLEVPPIRKGLKRM

SEQ ID NO: 20046 - protein, 584 aa, Arabidopsis thaliana
MTKEVCSNIGLWLLLTLLIGNYVVNLEASHHVYKRLTQSTNTKSPSVNQPYRTGFHFQPPKNWMNDPNGPMIYKGIYHLFYQWNPKGAVWGNIVWAHSTSTDLINWDPHPPAIFPSAPFDINGCWSGSATILPNGKPVILYTGIDPKNQQVQNIAEPKNLSDPYLREWKKSPLNPLMAPDAVNGINASSFRDPTTAWLGQDKKWRVIIGSKIHRRGLAITYTSKDFLKWEKSPEPLHYDDGSGMWECPDFFPVTRFGSNGVETSSFGEPNEILKHVLKISLDDTKHDYYTIGTYDRVKDKFVPDNGFKMDGTAPRYDYGKYYASKTFFDSAKNRRILWGWTNESSSVEDDVEKGWSGIQTIPRKIWLDRSGKQLIQWPVREVERLRTKQVKNLRNKVLKSGSRLEVYGVTAAQADVEVLFKVRDLEKADVIEPSWTDPQLICSKMNVSVKSGLGPFGLMVLASKNLEEYTSVYFRIFKARQNSNKYVVLMCSDQSRSSLKEDNDKTTYGAFVDINPHQPLSLRALIDHSVVESFGGKGRACITSRVYPKLAIGKSSHLFAFNYGYQSVDVLNLNAWSMNSAQIS

SEQ ID NO: 20047 - protein, 352 aa, Desulfitobacterium hafniense Y51
MPKIAVLPGDGIGQEIIPQAVRVLKAVLAETDAEFEFQDYPIGGAAIELVGKALPDETLQGCREADAVLLGAVGGHQWDHLPASERPETAALLGLRKGLNFYANIRPVRMIPSLLATSTLKENVLDGVDMVVIRELTGGVYFGEKGRSDNPRSAYDKMTYSEEEIRRILIQGFETAMLRSKKLCSVDKANVLETSRLWREIANELAKEYPEVELTHMYVDNAAMQLVRNPKQFDVIVTENMFGDILTDLASMLGGSIGMLSSASLSGTQGMYEPAHGSAPDIAGKNLANPLATILSAALMLRYSFGMEAEALRIESAVEKVLEQGYRTGDLAQAGDKVVGTIEMGDAVLAAL

SEQ ID NO: 20048 - protein, 233 aa, Oryza sativa
MDMDSWERLAADARLQDALIGMEEAEGSEGEEEAAEVACPFCDEEFDGFGLCCHIEDEHQAENRAGVYKLIHEVFLSCFHYRVLKVCPICYDAVGMDLVSHITSEHPSFFKGKWRNRRVSHGSHSSTRATLKKDAAYLQYRYGGSTRAASHNTDPDPLLSSFVGNFTDTDLPKDVQQEFRDETDEKSDSLVQKEQKPVESADEPLLPEVKEERTRRSQFVQGLVLSLMFDDIL

SEQ ID NO: 20049 - protein, 634 aa, Rickettsia sibirica 246
MSNSNIDNDLDKIDSLLKKAKSKKIPVTYDDINNALPLNKNPSIRQLEEAILKFSDAGVDILESNEDDEIKLDIGMDEEFKLSTNVDNEPEDEVEEENIGTTDDPVRLYLKDMGGVDLLTREHEVEIAKRIEEGHKTMTASLCRSPIAMRCFIVWYEDLVNEKMLLRDLIDLEANMLHDETPENDEENSSETEGEEHEDNHLSMSRVETQILPNVIERMKKIAFICEELLIEAKKCYEKSFEPKVLQNSKKYNNLELLINEVSEIHFNSKRTEEILGKMYGINRDLINKETAFLKLAEKYGVTRQNFLDEYIGSVINAAWKEKMLKNKKVAWKELMTKESDYIDQMIAELSVIESKTGLLVNDFKKLVNTIQKSERQTLQAKKDMIEANLRLVISIAKKYANRGLQFLDLIQEGNIGLMKAVDKFEYRRGYKFSTYATWWIRQAITRAIADQARTIRIPVHMIETINKILRTSRQMLNELGYEPTATEIANRLSMPLDKVRKVMKIAKEPISLENPVGDDSDGGQLGDFIEDKNAVAPIDAAIQSNLREVTTRVLATLTPREERVLRMRFGIGMNTDHTLEEVGQQFKVTRERIRQIESKALRKLQHPIRSKKLNSFRSGGKRGDGNPSDLLEA

SEQ ID NO: 20050 - protein, 289 aa, Mycobacterium avium subsp. paratuberculosis K-10
MTGWTAADLPSFAQRTVVITGANSGLGAVTARELARRGATVIMAVRDTRKGEAAARTMAGQVEVRELDLQDLSSVRRFADGVSGADVLINNAGIMAVPYALTVDGFESQIGTNHLGHFALTNLLLPRLTDRVVTVSSMAHWPGRINLEDLNWRSRRYSPWLAYSQSKLANLLFTSELQRRLTAAGSPLRALAAHPGYSHTNLQGASGRKLGDALMSAATRVVATDADFGARQTLYAASQDLPGDSFVGPRFGYLGRTQPVGRSRRAKDAGMAAALWALSEQLTKTEFPL

SEQ ID NO: 20051 - protein, 317 aa, x Doritaenopsis sp.
MELLQGSQRPAAMALLRDACENWGLYELLNHGISHELMNRVETVNKEHYRRFREQRFKEFASKTLDTVENVEPENLDWESTFFLRHLPTSNISQIPDLDDDCRSTMKEFALELENLAERLLDLLCEDLGLEKGYLKKVFCGGSDGLPTFGTKVSNYPPCPKPELIKGLRAHTDAGGIILLFQDDKVSGLQLLKDGEWIDVPPVRHSIVVNIGDQLEVITNGKYKSVLHRVVAQTDGNRMSIASFYNPGSDAVIFPAPALVEKEAEEKEEKKKEIYPKFVFQDYMNLYIRKKFEAKEPRFEAMKSMEIVMSSQPIPTA

SEQ ID NO: 20052 - protein, 521 aa, Moorella thermoacetica ATCC 39073
MATATEKLELRREVTVWGSYMWGYADVGADIYAALGLVMLWAKGATSLAFALAGLVYIMIGLAYTELAAAYPVAGGGQFFTLRGLGDFWGFVAGAALLLDYTIDIALFATASAGYINFFLPYLFGVNIDSLAVSIGPLHHVNLVWMAEALALVFFLIALNIRGMRESSLLNEVLGAIDILTESTIIVFGFLFAWRPELLAHQWVTQFPTFKEFAYGSSLAIISFVGLESISQAAQETKRPATVVPRTSVGLIFTVFIFATAFSTMSLGVLPWQDIAKAVGDPVATLAHAIPFIGIIAGPFAALLGATILLISANSGVMSASRLTFAMSQFNFISDWFNAVHPRYRTPYRTILVFSGIGILQLVLSFLTPNAMDTLGNMYAFGATTGYILVFIALIKLRFTDPYAPRPYKVPLNIKINYRGRVVEFPILGVIGTLGISTILFEVILTHAIGRIAGPAWIILCFLYYAYYRRSKGYPIFGNIPRDWEAQQIKVLEAAEEYDLLEEYKQALAERERLEAKAHVK

SEQ ID NO: 20053 - protein, 367 aa, Kluyveromyces lactis NRRL Y-1140
MVEETNAFEGPEKLLEIWFYPKKTEVPHAERSLRSIDHSKWKELLELVKCEILSTFSTDDMDCFLLSESSMFVFDHKLMLKTCGTTTTLLCLPKLFELINMELEWNFQFRDDLTGEIKNHPYKVFYSRRAFMFPENQRSIHRSWNDEVNYLNQFFITGKSYVVGRIDQNDHWNLYVTKTNDALCSGPDNAQEDDFTLEILMTDLSRSHAQRFVTDEPDHMDGHIIGTKMTNKTAINKIYDFDANKISFKQDSYGFQPCGYSCNMVLNQSYYYTIHVTPEQDWSYASFESNVLLNKIDTTSTQLDVINNVLNIFQPLDFCLTMFIKTESAECVDAKFPYNKVANYEKQDRIVHDLDDYQLIYIRYSKI

SEQ ID NO: 20054 - protein, 418 aa, Bartonella quintana str. Toulouse
MARIVMKFGGTSVANIERIHNVARHIKREVDAGNEVAVVVSAMAGKTNELVQWTRDASPMHKDADEYDVVVASGEQITAGLLALKLQAMGVNARSWLGWQIPIHTDNVHGSARITDINGSFLIQRFQEGQVAVIAGFQGLAPDNRISTLGRGGSDTSAVAIAAAVQADRCDIYTDVDGVYTTDPRIEPKARLLPKVAFEEMLEMASLGAKVLQVRSVELAMVHKVRTFVRSSFEDPDALGMDDPINSSGTLICDEDEILEQQNVTGIAFAKDEAQISLRRLADRPGISAAIFGPLAEERINVDMIVQNISEDGSKTDMTFTVPSVDVEKAVTLLEKNRKEIGFDVLQFERNLAKVSVIGIGMRSHAGVAATAFKALSEKGINIQAITTSEIKISILIDHAYTELAVRTLHALYGLDKG

SEQ ID NO: 20055 - protein, 254 aa, Burkholderia sp. 383
MSDELLVEYRNGIQILTINRLEARNACTKAIAEAIAAELDTLERRDDLRAAIITGAGGAFCSGMDLKGFLKGERPSIPGRGFAGITEAPPGKPLIAAVEGYALAGGFEVVLASDLVVASETARFGLPETKRGLVAAAGGLLRIQHQLPERIALELVLTGDMLDAKRAFEYGLVNRLTPPGDALAVAIELAGKIAANGPLAVAASKRVMRASRDWSTAEMFVRQREITDPVFASRDAREGAAAFAEKRVPQWEGR

SEQ ID NO: 20056 - protein, 590 aa, Arabidopsis thaliana
MSAPKFGYVLLLIVLINISNNGVDAFHKVFKKLQSKSTSLESVSPLHRTAYHFQPPRHWINDPNAPMLYKGVYHLFYQYNPKGAVWGNIVWAHSVSKDLINWEALEPAIYPSKWFDINGTWSGSATHVPGKGPVILYTGITENQTQIQNYAIPQDLSDPYLKTWIKPDDNPIVKPDNGENGSAFRDPTTAWFNKKDGYWRMLVGSKRKNRGIAYMYKSRDFKKWVKSKRPIHSRKKTGMWECPDFFPVSVTDKKNGLDFSYDGPNAKHVLKVSLDLTRYEYYTLGTYDTKKDRYRPDSYTPDGWDGLRFDYGNYYASKTFFDDKTNRRILWGWANESDTVQDDTVKGWAGIQLIPRTILLDSSGKQLVFWPIEEIESLRGKNVQMTNQKMEMGQRFEVQGITPAQVDVDVTFNVGNLEKAEKFDESFATKPLELCNLKGSNVNGGVGPFGLITLATSDLEEYTPVFFRVFKDAASNKPKVLMCSDAKPSSLKKDTGTDAKERMYKPSFAGFVDVGLLDGKISLRSLIDHSVVESFGAKGKTVITSRVYPTKAVGEKAHLFVFNNGSQPVTVESLNAWNMQKPLKMNQGAK

SEQ ID NO: 20057 - protein, 177 aa, Gibberella zeae PH-1
MADTGLPPGWEVRHSNSKNLPYYFNSAEKLSRWEPPSGTDTEKLKHYMATNHSAGSRPGAVPGVPEGKIRAAHLLVKHRDSRRPSSWREAEITRTKEEAFEIIKEHEQKIKSGSVSLGELALTESDCSSARKRGDLGYFGRGDMQKEFEDASFGLSPGQMSEIVETASGLHLIERLE

SEQ ID NO: 20058 - protein, 196 aa, Medicago truncatula
MAGVQIRDEHGNPIQLTDELGNPVKLTDEHGNPIHLTGVATTTTTHNNPPTAAGSGSAGFGTYGSVAYGGGATTHPTTTVADLLSTEPPPGQQLHHTDQVSRGLRRSSSSSSSSSSSEDDGQGGRRKKKKGVKDKIKEKIPGVGGGNKEHNSATSIPGAGHHPTATATHHPAEPTLEKKGILDKIKEKLPGHHHSH

SEQ ID NO: 20059 - protein, 364 aa, Glycine max
NSRVDPASVSRSNRKPLPSSSSSSSVATEAEQKEILETLVSNLPLEKSSKAATATRFLFGLLRTTNILNAAEACRDALEKKIGLQLEEATLDDLLVPSYSYLNETLYDVDCVERILSHFLEGMEARTATETTEDAAATRSPALMLVGKLIDGYLSEIASDANLKPEKFYNFAISLPDEARLFDDGLYRAVDVYLKAHPWVSKSDREKICAVLDCQKLTLEACSHAAQNERLPLRAVVRVLFFEQLQLRRAIAGKLGAAEEPSRHSAAMAEEEEVEDDNNTWQVTVRENQVLRLDMDSMRTRVHELERECSSMKRAIEKMDKMGPRGGGPWRASLALGRKFGCKFKTQVCDSHEPATREGRPHRR

SEQ ID NO: 20060 - protein, 117 aa, Brassica napus
MARVALLAVFAVLAALAVAEMASGAVTCGDVTSAIAPCMSYATGKASAPSAGCCSGVRTLNGKASTSADRQAACRCLKNLAGSFKGISMGNAANIPGKCGVSVSFPINTNVNCNNLH

SEQ ID NO: 20061 - protein, 351 aa, Glycine max
  misc_feature (284)..(284): Xaa can be any naturally occurring amino acid
GTELHSVGCYFSGLVSGSGLLVKHRALKDYFGDRKPDIGVGSSSVHDHLFLSLCKEAYVVNNEEGKGNPSSVLPRDKYPKPLIFHDGRLAFLPTPSATLYMFMWFPLGILLAIYRILLGILLPYGWAMALGVWSGINLQVKGNVLEEKSEQNKGVLFVCSHRTLLDPVFLSTCLAKPLTAVTYSLSKVSELIAPIRTVRLTRDRRKDGETMQRLLKEGDLVVCPEGTTCREPYLLRFSSLFAELADEIVPVAVNSHVSMLYGTTASGLKCLDPIFFLMNPRPSXYIEVLGKVPKEVTCAGGRSSCEVANYIQQKLACALGFECTTLTRRDKYMMLAGNEGIVHEDKWRKCY

SEQ ID NO: 20062 - protein, 271 aa, Bdellovibrio bacteriovorus HD100
MSFYSQAFTHLSVQKKNHTLWVTLANPEQSNAISLEMVESLTRVLRFADFDSLVRVIVITGEGTSFCAGGDVKAMQNKTGMFAGESNELRMRYMHGIQQIPKCIEELSKPVIAMVNGPAIGAGCDLAMMCDLRIGTEKSKFGETFVKLGLVPGDGGSFFLQRVIGFSKAMQMSLTGDLVSGAEALNWGLLNYLVPVESLMAETEKLADKVAGNAPVAVQMTKKTMKMAYMNDLATILDLAAAYQGITQRTEDHFTALEAMKEKKAPEFQGR

SEQ ID NO: 20063 - protein, 808 aa, Aspergillus nidulans FGSC A4
MATPPPEAPSVLKEGKPQLPPSPNGDSSSDFDRAGVQPPVTDSIPIPPTDGAKTTEKDAKNISMNGHASGQENGIVNTASPPKSPAPPATTTSIAQDGPVAGNSAVDDKPATPGNVPKQPTNGAGADDNSSKATPLSQSIPQDSSATPAGVQSPQSTAAVKTELPHHPHAAVQPEKPSTVDVSSAANAQPSPAIDQEMRDAPASPTKLSREREVEPNDEPSAKRTKIDTQGSAELKAPELPTPVTDTPMTTGNGDGPLTRVQHRFLVKAIQSLKRLHDARFYKEPVDPVKMAIPTYFDVIKEPMDLGTIEQKLKNNVYTSPQSVFNDFELMVRNAHVFNGPDHIVSVEGKRLQATFEKQMLNLPKADEVEEKKPKKAASSKTSNARRDPRPSAGSNAVRPTGGSPQATTFALGPEGLPLIRRDSTNADGRPKRSIHPPKRDLPYSTKPKKKKFQWELKFCREVLDELHKTKHYSYAFPFYYPVDPVALNIPTYHSIIKKPMDLSTVSSKLNTGQYENAKEFEMDIRQIMKNCFKFNLKGDPIYMAGEKLEEVFNAKWAQKESYLAAHEPPPEQHSAASSSEESDEDEEGSDDEEDEAINRLKQQIADMSQQLEAMTQKKKKTPPKKAKSKKKDSKKVGATGAGRKDKKGGGKSSKPEKPRYVSYHDKQIISNGISSLPDKKMQEALKIIQSNVPALKGTQETEIELDIDELPNDVLWMLLKFVKKNAPHVVEEDEASSPVAPNAAPPKPKKNKPMSKYEQEAQINMLESNLSRFQGGGHGRSPEPVPSLEANDSSGDSEDDSEESEEE

SEQ ID NO: 20064 - protein, 544 aa, Chlamydophila pneumoniae TW-183
MELLSLNKSYFEIQRLRYRPEILTLLETIRSKHIQETSSPPSPPPELQKHIPNLCRIPEVSIYTEQETSSKPLKIGVLLSGGQAPGGHNVVIGLFDALRVFNPKTRLFGFIKGPLGLTRGLYKDLDISVIYDYYNMGGFDMLSSSREKIKTEEQKKNILNTVKQLKLDGLLIIGGNNSNTDTAMLAEYFLAHNCKTSVIGVPKTIDGDLKNCWIETSLGFHTSCRTYSEMIGNLAKDALSAKKYHHFIRLMGQQASYTTLECGLQTLPNIALISELIATRKISLKQLSEQLALGLVRRYKSGKNYSTVLIPEGLIEHIFDTRKLIDELNVLLANGDSSIEKILSKLSPETLKTFHLFPKDIANQLLLARDSHGNVRVSKIATEELLAVMVKKEIEKIKPHMEFHSVSHFFGYEARAGFPSNFDCNYGIALGIISALFLVRQKTGYMITINNLAQSYTEWQGGATPLYKMMHLENRCGTETPVIKTDSVDPKSPAVQHLLQQSDSCLVEDLYRFPGPLQYFGKEELIDQRPLTLLWENQTHSPLL

SEQ ID NO: 20065 - protein, 183 aa, Fusobacterium nucleatum subsp. vincentii ATCC 49256
MKIYDFSVKNRKDEDISLKSYKGKVLLIVNTATRCGFTPQYDELENLYEKYNKEGFEVLDFPCNQFGNQAPESDEEIHTFCQLNYKVKFDQFAKVEVNGENALPLFQYLKEQKGFSGFDPKHKLTSVLTEMLSKNDPDFAKKSDIKWNFTKFLVDKSGNVVARFEPTTSVKVIEQEIKKLLEK

SEQ ID NO: 20066 - protein, 581 aa, Zea mays
MADEAKAKGNAAFSAGRFEEAARHFTDAIALAPDNHVLYSNRSAALASLHRYSDALADAQKTVDLKPDWAKGYSRLGAAHLGLGDAASAVAAYEKGLELDPSNEGLKAGLQDAKKAAAAPPRRGSSGPDAIGQMFQGPELWSKIASDPSTRAYLNEPDFMHMMREVQRNPSSISMYLSDPRMMQVLSLMLNVKIQRPEASEPSQSTPPPPKQQQQQQTPPSETKARDVEPEPEAEPMDLTDEEKDRKQTKAAAQKEKELGNAAYKKKDFEVAIQHYTKALELDDEDISYLTNRAAVYIEMGKYDECIKDCDKAVERGRELRADFKMISRALTRKGTALVKLAKTSKDFDIAIETFQKALTEHRNPDTLKKLNEAEKAKKELEQQEYYDPKLADEEREKGNEFFKEQKYPEAIKHYTEALKRNPKDPRVYSNRAACYTKLGAMPEGLKDAEKCLELDPTFTKGYTRKGAIQFFMKEYDKAVETYQAGLKHDPNNQELLDGVKRCVEQINKANRGEISQDELQERQNKAMQDPEIQNILTDPIMRQVLIDFQENPSAAQEHLKNPGVMQKIQKLVSAGIVQMR

SEQ ID NO: 20067 - protein, 222 aa, Pseudomonas wisconsinensis
MSIRRLACSLLLSSLALPVLAAECPAMLQGELPKLRAKGENIELCQYAGKPLVVVNTASFCGFTPQFKGLEALYQRYKDQELEVLGVPSDDFRQESADSKETATVCYVNYGVTFAMTEPQPVSGANAIPLFKGLAEQSRQPRWNFFKYVVDRQGKVVASFSSLTKPDDPELIAARREGDRLATLIPSRFTALHPSGRWALSVCLPRLARRRTQFTRRALQEQ

SEQ ID NO: 20068 - protein, 211 aa, Aspergillus nidulans FGSC A4
MLTSRAARALLSSFPSTFGLRRLAIAASAASTFRFPNSTKLVAKYQHRNGFHSTPQIQKGITPGSPDPPAPQPESSVRVSEPSPLSNHQYHEYSDHYLHVVQAKIEEMEEDRSDLETDLSAGILHINVANVGTYVLNKQPPIKQLWLSSPVSGPRQYDWVVEGDQMHEKQETRPFTNGQWVCLRDNSNLTELLNKELGLNLPRDVYSEVDE

SEQ ID NO: 20069 - protein, 508 aa, Candida glabrata
LCHRKTSIILSMNSVAYSSIRYLPLLLRYGRALPLLNNPHALEQEHHESESDLVYYGVVSMFLVVLGGVFAGLTLGLMGQDEIYLTVINTSGTQKEKQLSGKVLRLISRGKHWVLVTLLLSNVITNETLPIVLDRCLNGGWQAVISSTILIVVFGEIIPQSICVKYGLEVGAFFAPFVLVLMYLMYPVAYPIALLLDYILGEDHGTVYKKSGLKTLVTLHQTMGVERLTTDEVTIISAVLDLKDKKVKEIMTPIENVFTLSADKILDEKTIEEIFNSGFSRIPIHLPNEPMNFIGMLIVRILISYDPEDALPISSFPLATLPETSPNTSCLNILNYFQEGKSHMCIVSERPGSSNGSIGVVTLEDVIEELIGEEIVDESDVFVDIHQHIMREQPGPLSKRHVTSYLHHLYTTSSKDSCVPLLNSKLNNYSSINEHKPVNHSHPPNLPNGSQLQLAPSNLASNPLDIKKSFVTIKKLPPGELISPSNKDYSNEHLRLNEQQGEISRQNH

SEQ ID NO: 20070 - protein, 571 aa, Ashbya gossypii ATCC 10895
MCGIFACYRKDDIESFKPTALRLSKRVRHRGPDWSGNVIKNDTILVHERLAIVGLDSGAQPINSPDGNYVLCVNGEIYNHIHLREECSDYEFTSLSDCEPIIPLYLKYDVETPQHLDGMFAWCLYDVQRDRIVAARDPIGVTTLYMGKSSSSPRTRYFASELKCLVDECDEITAFPPGHVYDSDTDKLTRYFKPDWIDETRIPSQPVDYKAVRTTLEKAVRKRLMAEVPYGVLLSGGLDSSLIASIAARETERANREAGDVYADGKHLAGMDDRGLLHTGGWSRLHSFAIGLPNAPDLQAARKVAKFIGSIHHEHTFTLQEGLDALDDVIHHLETYDVTTIRASTPMFLLSRKIKAQGVKMVLSGEGSDEIFGGYLYFAQAPSPAEFHTETVKRVNNLHLADCLRANKSTMAWGLEARVPFLDREFLQLCMNIDPAEKMIAPQKGRIEKYILRKAFDTSDEPGVDPYLPEEILWRQKEQFSDGVGYSWIDGLKDAAERAISDEQFANPNPAWGDDIPTTKEAFWYRLKFDALFPQPTAAATVMRWVPKADWGCAEDPSGRYAKIHDQHISS

SEQ ID NO: 20071 - protein, 485 aa, Bacillus licheniformis ATCC 14580
MNNQDQSLIFEVSKEGRVGYSLPELDVPETDVTDVIDEAYIRDEPADLPEVSELDIMRHYTALSRRNHGVDSGFYPLGSCTMKYNPKINEKIARIPGFSAIHPLQDEATVQGALELLYDLSEHLEEITGMDEVTLQPAAGAHGEWTGLMMIRAFHEANGDHKRTKVIVPDSAHGTNPASATVAGFETVTVKSNDDGLVDLEDLKRVVDEETAALMLTNPNTLGLFEENILEMAEIVHSAGGKLYYDGANLNAVLSKARPGDMGFDVVHLNLHKTFTGPHGGGGPGSGPVGVKKELIPYLPKPVLVKKDGRYTFDHDRPHSIGRVKPYYGNFGINVRAYTYIRSMGPDGLKEVTENAVLNANYMMRKLAPYYDLPFDRHSKHEFVLSGRRQKKLGVRTLDIAKRLLDFGFHPPTIYFPLNVEECIMIEPTETESKETLDAFIDTMIQIAKEAEETPEVVQEAPHTTVVKRMDETKAARKPVLRYEK

SEQ ID NO: 20072 - protein, 553 aa, Azospirillum brasilense
MAWLGHRRLSINDLSPAGNQPLLHAGGGTGDVLALVCNGEIYNAPTLRTELEALGHAFASRSDNEVILHGYRAWGDAVVDRLTGMFAFVLWDDRRRRLLAARDRVGIKPLYWAEPGDGGIAFASEARPLATLPGIGPAVELRALGHALTLGYVPAPLSAWRGIHKLEPGRLLVWEPGQGAALRRYWEAPRSLAAAGDGDAGWAGLFDRAVADHLLSDVPAGLFLSGGLDSAAVATAAVGAGLRPAAYTLCYPGRPDAEAEVAAAVARHLGLEHRLVPAPTDGLADRLAGVAALFDEPQGYSALVTMAGIARAAAAEHKVVLSGDGGDEVLGGYAWYAGLDPDGPPPGAEAGDAHAAFAARSVLHRHAMRLFPRFLPDEVEALFAPAGLRFGEEEMLAPLEAAFEPGLPLRRALQRVDLATFCADSILAKVDRASMAYGLEVRVPFLDHRLVEWGLSRPPAAEEAVHGKPVLRRYLAGRVPERVFGHPKTGFSLKDTGPFDWNAALDRVAAGPLVRHGLLDPGFRRIVEARSPYRQARIWALLALSLWAGSWME

SEQ ID NO: 20073 - protein, 448 aa, Bacillus licheniformis ATCC 14580
MKHRYLPATDQDKKEMLEAIGVERIDELFSDIPESVRFKGEYQIKKAKSETELTKELTKLAAKNKDTVTYASFLGAGVYDHYQPVIVDHVISRSEFYTAYTPYQPEISQGELQAIFEFQTMICELTGMDISNSSMYDGGTALAEAAMLASGHTKKKKIVVSETVHPESREVLKTYAKGQYIDVVEVPSKNGTADLEALDEAVCEDTAAVIVQYPNFFGRIEPLKDIKPIAHKGKSMFIVSANPLALGLLTPPGALGADIVVGDAQPFGIPAAFGGPHCGFFAVTKKLMRKVPGRLVGQTEDENGKRGFVLTLQAREQHIRRDKATSNICSNQALNALAASVAMTALGKKGVKEIAWQNLQKAAYAKEAAKRAGLEVAFEGPMFNEFVIRLNEPVEKANERLLEKNIIGGYDLGASYPDLKRHMLIAVTELRTKEEIDTLMNELGDCHE

SEQ ID NO: 20074 - protein, 355 aa, Verticillium dahliae
MSRSNAPNPSGSRKISFNVSEQYDIQDVVGEGAYGVVCSAIHKPSGQKVAIKKITPFDHSMFCLRTLREMKLLRYFNHENIISILDIQKPRGYDTFNEVYLIQELMETDMHRVIRTQDLSDDHCQYFIYQTLRALKAMHSANVLHRDLKPSNLLLNANCDLKVCDFGLARSAASQEDNSGFMTEYVATRWYRAPEIMLTFKEYTKAIDVWSVGCILAEMLSGKPLFPGKDYHHQLTLILDVLGTPTMEDYYGIKCRRAREYIRSLPFKKKVPFRTLFPKTSDLALDLLEKLLAFNPVKRITVEEALKHPYLEPYHDPDDEPTAPPIPEEFFDFDKHKDTLSKEQLKQLIYQEIMR

SEQ ID NO: 20075 - protein, 116 aa, Oryza sativa
  misc_feature (46)..(46): Xaa can be any naturally occurring amino acid
  misc_feature (71)..(71): Xaa can be any naturally occurring amino acid
MARAQLVLVALVAALLLAAPHAAVAITCGQVNSAVGPCLTYARGGXGPSAACCSGVRSLKAAASTTADRRXACNCLKNAARGIKGLNAGNAASIPSKCGVSVPYTISASIDCSRVS

SEQ ID NO: 20076 - protein, 224 aa, Erwinia carotovora subsp. atroseptica SCRI1043
MKKGLSVECKGFLFDLDGTLVDSLPAVERAWINWAKDHDIEPQEVLDFIHGKQAITSLRHFLQGQSEETIQQEFDALEKTEASDTQGIVAMPGAKALLERLDALDIPWAIVTSGTVPIASARHQRGELPAPRAFITAEQVAKGKPNPDAYLLGAQQLGLKPEECVVVEDAPAGVLSGLAAGCKVIAVKAPADTPKLDQVDLILDSLEQIEIEQLPNGAKVLLRQ

SEQ ID NO: 20077 - protein, 567 aa, Kluyveromyces lactis NRRL Y-1140
MLHKEKDIEESKRFFHHSTSGMEGNPDGFGLLPDGSKLESVKDTRIDKFAVPKKGLHSEHVYNLVKNELKLDGNPVLNLASFVNTFTDQFAQKLIDENLNKNLADNDEYPQLIHMNERCISMLAKLWQSDTDRDTPLGCATTGSSEAIMLGGLAMKRQWEKKMRAANKSTEKPNIIMSSACQVALEKFARYFDVECRLVPVDTEHGYHLNPNKLWDYVNENTIGIFVILGTTYTGHLENIEQVAEVLEHIEAQHPDWSNKDIPIHVDGASGGFIVPFAFTEAQMESYGLGRWGFNHPRVVSINTSGHKFGLTTPGLGWIVWKNDEYLLPELRFKLKYLGGIEETFNLNFSRPGFQVIHQYYNLLTLGQQGYYEKFNQSIFVARAFAWKLLQDPDMRDVFEVVSCLHENLDNSSIAESLDDYWKNPHDYKPGIPLCAFKLSEKFKSEHPEIPQSIISTLLRQKGWIIPNYPLPESTDGSDKKEVLRVVFRIEMKLDMALLLVQDVFEVVQKLLKSYEYLNIRTENDNHAVFKVLSTLSNADVSELEHELTDSQKEKEQHIKKNYRGTC

SEQ ID NO: 20078 - protein, 420 aa, marine gamma proteobacterium HTCC2207
MAKRNAFYAQSGGVTSVINASAAGVIEACRANKDNIGTLYAGQNGILGALHENLIDTSKETPTAVASLKHTPGGAFGSCRYKMRDHNEDSSEYERLVEVFKAHNIGYFFYNGGGDSADTCLKVSQIAERMNYPIQAIHIPKTIDNDLPHTDCSPGFGSVAKYVAVSTKEASLDIASMCASSTKIFILEVMGRHAGWIAASGGLAAEQAGDPPHIIIFPEIPFSRDQFIAKVDATVKDKGYCVVVASEGAKYADGALVSGSLHKDAFGHQQLGGVAQTLASMVKNSLGHKYHYALADYLQRSARHIASKTDVDQAYAVGRGAVEKALEGKRGIMVTIERGTGKKFSWSLGEAPLSKIANVEKKMPRAFITKDGFGITAKAREYFQPLIMGEDYPPYKNGVPQYANLKNILVEKKLKEGFEG

SEQ ID NO: 20079 - protein, 405 aa, Triticum aestivum
  misc_feature (35)..(35): Xaa can be any naturally occurring amino acid
  misc_feature (157)..(157): Xaa can be any naturally occurring amino acid
EFPGFPDGITGPDLMDKMRKQAERWGAELHQEELXFIDVKSRPFVIRSSDREVKSHSVIIATGATAKRLRLPREEEFWSRGISACAICDGASPLYKGQVLAVVGGGDTATEEAIYLTKYACHVHLLVRRDQLRASKAMQDRLIMANVSEYSTTPTLXVHFNTEAVDVVGNTKGQMSGIQLRRIDTGEEKVLEVKGLFYGIGHTPNSQLLQGQIELDSSGYILVDEGTAKTSVDGVFAAGDVQDHEWRQAVTAAGSGCIAALSVERYLVSNDLLVEFHQPVREEKKKEIEGKDVEMGFDITHTKHKGQYALRKLYHGSPRLILVLYTSPTCGPCRTLKPILNKVIDEYDEYVHFVEIDIEEDPEIAEAAGIMGTPCVQFFKNKEMIRTFSGVKMKKEYREFIESNK

SEQ ID NO: 20080 - protein, 304 aa, Campylobacter upsaliensis RM3195
MKLVLFLNMGGACNLKDCELFLKNMFNDPYILGIKNAFLRSFVAFCITKARVGAMRENYKQIGGSSPLNFITTSLCDKLNSRQKDFQFDFVNLYVPPFAKEVLQKYDLKNDDELILFPLYPHHSSTTITTSLEVLHKEIKKQEIKTKLKEVKFFYKDKLYNEMLISHILKANESFMPGYKKSLIFSAHSLPLSVIKRGDLYEKHINAHFELLKESLRDYFDEILLAYQSKLGPVKWLGPSTSEILSTLKNEALIYPLSFCIDCVETIFELEIEYRKIASKDYKVIACPNESEEFMEFILKRLYS

SEQ ID NO: 20081 - protein, 375 aa, Streptomyces avermitilis MA-4680
MPEALDASPYDALLLLSFGGPEGPDDVVPFLENVTRGRGIPRERLKEVGQHYFLFGGISPINDQNRALLDALRKDFAEHGLNLPVYWGNRNWAPYLTDTLREMAADGRRRILVLATSAYASYSGCRQYRENLAGALATLEAEGLEVPRVDKLRHYFNHPGFVEPMTEGVLRSLAELPEDVRPGAHIAFTTHSIPTAAADTSGPVEEHGDGGAYVKQHLDVARLIADAVREETGIDHPWQLVYQSRSGAPHIPWLEPDICDHLQELHGAGVPAVVMAPIGFVSDHMEVLYDLDTEAKAKAEELGLPVRRSATVGADARFAAAVRELVVERAAVESGQKVTPCALGALGPSHQLCPVGCCPARAPKPAAAGADSPYA

SEQ ID NO: 20082 - protein, 524 aa, Streptococcus pneumoniae R6
MKFNELNLSADLLAEIEKAGFVEASPIQEQTIPLALEGKDVIGQAQTGTGKTAAFGLPTLEKIRTEEATIQALVIAPTRELAVQSQEELFRFGRSKGVKVRSVYGGSSIEKQIKALKSGAHIVVGTPGRLLDLIKRKALKLQDIETLILDEADEMLNMGFLEDIEAIISRVPENRQTLLFSATMPDAIKRIGVQFMKAPEHVKIAAKELTTELVDQYYIRVKEQEKFDTMTRLMDVAQPELAIVFGRTKRRVDELTRGLKIRGFRAEGIHGDLDQNKRLRVLRDFKNGNLDVLVATDVAARGLDISGVTHVYNYDIPQDPESYVHRIGRTGRAGKSGQSITFVAPNEMGYLQIIENLTKKRMKGLKPASVEESFQSKKQVALKKIERDFADETIRANFEKFGKDARKLAAEFTPEELAMYILSLTVQDPDSLPEVEIAREKPLPFKPSGNGFGGKAKGGRGGRRGDDRRERDRRGNGRRDEFKKGSRGNDRFDKEKRYRKDNKKPRNTLSEKQTGFVIRNKGDK

SEQ ID NO: 20083 - protein, 568 aa, Crocosphaera watsonii WH 8501
MSSLIKIPKSSSGANEMSSNPMTNPALWQALEAELVYIQDRSGKYLSFYGDLGEELAIEPEDIIGFFPEQSLKPASPDAYDERIKRVLERKIPEQCYCQFEYKGQTFALELVISPILPKQKQATTVLVMGHPLQDNDLSLINNSALPTHPDPYQKLLTKIARKIRRTLNLETIWQQTVDSLGEALQVSRCLMIAIGPEQGYLDVKAEYCLPYCPSELGSRLIPQEEPLWQQALNQREPLIFEQLLENSSQVQSNLIVSTFYQNQRNGLICLQQCDRSRYWSPAEIELIQELADQVGTAIAHATLYQELEQATLAAEEASRLKSDFLASTTHELRTPLNGIIGFLKLILDGMADDAEEQQEFLEEAHKSALHLLNLINDILDIAKIEAGKMDLELGAVELAELFQAVDNFTLPQAQRKHLEFRSKLPSTLTPIVVYGNYQRLLQVMLNLVSNAIKFTHEGSIVVNAEIVKKKIHHQNQEFPGHVKVSVTDTGIGVSLDKQAKLFEKFVQVDGSHTKAYGGTGLGLAISQKLVEAMGGQVEFYSMGEGLGSTVTFTVPLEQMPVIKTAKA

SEQ ID NO: 20084 - protein, 80 aa, Glycine max
LREGVDASGRKGKGKGVYQFVDKYGANVYGYSPIYDTNDWSPSGDVYAGGTTGLAVLAVTLLVLFAGGARLVYNTSALAQ

SEQ ID NO: 20085 - protein, 381 aa, Staphylococcus aureus subsp. aureus MRSA252
MIRIQDNTIRDGMQQSNVRKSLIIKKEVLKQINKLNINSVEVGMCTTIEDEFNIHQFRDILSPEKELVVLTRLNEKEIKKIVKLKIHNLVVKILLPISDLHIKEKLNFSNKYYIQKIKDCLDILKKDKKGVDICFEDATRTSREKLKEYMEIISKYQVRTVTFADTVGCSTPLEYGDIFNYFVKKYSNIIFSAHCHNDLGLATANTLAAILNGAKQIETTFLGIGERAGNAPIEEIITILTKKQIESTEFTLPDVYKTSINISKILDFQISENKPIIGENIFKHESGIHQDGTKKNINMYQYLVPSDLGLKNSQVVQFPISNISSKKILHNKFKSIVNTEEIDENISFYKLVNKFSPEVAPEDTVDLLQIIKRRSKDGNFK

SEQ ID NO: 20086 - protein, 299 aa, Mesorhizobium loti MAFF303099
MAEVIDGKSVAEDVVRTVKALTAELVAKGKAKPGLAVVIVGEDPASQVYVASKSRTAKECGFHSLQHTLPAETSEEALLKIIADLNADPAVNGILVQLPLPAHIDAGKIIQAIAPQKDVDGFHFINVGKLGTGELDTAFVPCTPAGSMLLIQRVRGKDLSGLNAVVVGRSNIVGKPMANLLLAANCTVTIAHSRTKDLPALARTADILVAAVGRPEMIKGDWVKPGATVIDVGINRIPAPEKGEGKSRLVGDVAYAEAARQAGAITPVPGGVGPMTIAMLMANTLASAYLAAGLKRPTF

SEQ ID NO: 20087 - protein, 454 aa, Streptomyces avermitilis MA-4680
MTKRDVAALFGNRFLTEPAPSQTFPEEGMTATDTMRLLDEDLVMEGDPQRNLATFVTTWMEPEAQRIIAENLHRNFIDHAEYPISAEIEQRCVRMLADLFHAPGKTTGCRTQGSSEAIMLGALSLKWKWRERRQAANLPADRPNLVFGGDVHVVWEKFCRYFDVEPRIVPLAEDKYTIGPEDVEPHIDENTIGVVAVVGTTFTGHKDDVVGIDKLLRDVRKERDLDIPIHVDGASGGFVWPFLYPDSKWDFRLEQVRSINVSGHKYGLVYPGIGWLVFREESDLAKDLVFYENYLGKTDATFTLNFSTGASMVLAQYYNFVRLGRQGYTYVMETMQKNAHALADNLRSSGRFEVIGSDLEQLPLVAFRLAGEHAYDESDIAWQLSAERGWMVPAYTLPPNAERVKILRALVKETLSREQIERLTQDIADACATLDHKGGTTEVERAQIKRGTGY

SEQ ID NO: 20088 - protein, 868 aa, Xylella fastidiosa Ann-1
MSASPTAERWIVLKFGGTSVSRRHRWDTIAMVVRKRLEEHGTRVLIVVSALSGVTNELTAIAQGVVDSAKRVTALEQRHRDFLVELGLDVQAVLGTRFAMLSDLLQDARAVTRSLDWQAELLGQGELLSSTLGAAYLGASGIDIGWMDARDWLTALPPQPNQSEWSQRLSVSCQWKSDVEWRTRFDAQRAQVLITQGFISRHQDGGTAILGRGGSDTSAAYFGALLGAACVEIWTDVPGMFSANPKEVPDARLLTRLDYYEAQEIATTGAKVLHPRSIKPCRDTGVPMLILDTERPDVLGTRIDAEVEPVLGVKAISRRDGIVLVSMEGIGMWQQVGFLADVFTLFKKHGLSVDLIGSAETNVTVSLDPSENLVNTDVLTALSTDLSQICKVKIIVPCAAITLVGRGMRSLLHKLSEVWATFGKERVHMISQSSNDLNLTFVIDETDADGLLAVLHFKLIESGAMPVQDRAVFGSPWREIIGHVRTRVMPWWHSARMRLLAMRDEEGIGPCYVYHLPTVRERARQLNAVAAVDQCYYAIKANPHPAILRTLIEEGFGLECVSLGELRHAFEVVPHLVPSRVLFTPSFASRVEYEQAFLLGVNVTLDNVEALRLWPEVFRERTLWLRIDLGYGDGHHEKVTTGGKTSKFGLSVKRIDEFIDVAKTLNITVTGLHAHLGSGVERGNHWSRMYDELAGFASRIGSVSTLDIGGGLPIPYRPDDEPFDVGAWGASLAEVKALHPKFQLVIEPGRFLVAEAGVLLTRVTQVIEKDDILRVGLEAGMHTLIRPALYDAWHGVENLSRLDETPHVLCDVVGPICESSDVFGRRRHLPAATASGDLMLIADAGAYGFSMASTYNLRGLPAEVVLDA

SEQ ID NO: 20089 - protein, 642 aa, Neisseria meningitidis Z2491
MSKNQNHEEYQDDARPLTIEEQRARLRQLIIMGKERGYITYSEINDALPDDMSDADQIDNIVSMISGLGIQVTEHAPDAEDILLSDNAAVTDDDAVEEAEAALSSADSEFGRTTDPVRMYMREMGQVDLLTREDEIIIAKKIENALKNMVQAISACPGSIAEILELIEKIRKDEIRVDEVVEAIIDPNEVLLNELGLGHLETTAPEKPSNDNSDENEDDEESEEDADEISAANLAELKQKVIGHFAQIEKDYKKMIGRLEKHHSRHKDYLAYRDAIANKLLEVRFATRQIDSLSSSLRGKVENIRKLEREIRDICLDRVHMERDYFIQNFLPEITNLEWIEEEIAKGRVWSDALDRFRHAILEKQTELADMEKETRISIEELKEINKNMVSSEKETAAAKQEMIQANLRLVISIAKKYTNRGLQFLDLIQEGNIGLMKAVDKFEYRRGYKFSTYATWWIRQAITRSIADQARTIRIPVHMIETINKMNRISRQHLQETGEEPDSAKLAELMQMPEDKIRKIMKIAKEPISMETPIGDDDDSHLGDFIEDANNVAPADAAMYTSLHEVTKEILESLTPREAKVLRMRFGIDMNTDHTLEEVGRQFDVTRERIRQIEAKALRKLRHPTRSDRLRSFLDSEDSKL

SEQ ID NO: 20090 - protein, 962 aa, Shewanella sp. MR-4
MTKQTLTQLEQHDLFLRRHIGPDSSQQQEMLNYVGAESLDDLTAQIVPESIRLSQELSIGDSCGEAEGIAYIRGLAKQNQVFKSYIGMGYYGTQVPNVILRNVFENPGWYTAYTPYQPEIAQGRLEAILNFQQVSMDLTGLDLASASLLDEATAAAEAMALAKRVSKAKKANIFFVADDVFPQTLDVVKTRAECFGFEVVVGPAHEAVNHELFGALFQYSNRFGQITDFTDLFAELRAKNVIVTVAADIMALVLLKSPGAMGADVVFGSAQRFGVPMGFGGPHAAFFVARDEHKRSMPGRIIGVSKDTRGNRALRMAMQTREQHIRREKANSNICTAQILLANMASFYAVFHGPQGLKTIASRINRFTDILAAGLQAKGVSLVNNTWFDTISIKGLDVAAVNARALAAEMNLRFDADGIVGVSLDETTLRTDIDALFDVILGAGHGLDVAALDAQIVAQGSQSIPEALVRQDAILTHPTFNRYQSETEMMRYIKRLESKDLALNYSMISLGSCTMKLNAAVEMLPVSWPEFANMHPFCPLDQAKGYTQLIEELSSWLVNVTGYDAVCIQPNSGAQGEYAGLLAIRKYHESRGQAHRNICLIPQSAHGTNPASAQLAGMQVVVTACDKQGNVDLEDLKAKAAEVAENLSCIMITYPSTHGVYEESIREICNIVHQHGGQVYLDGANMNAQVGLTSPGFIGADVSHLNLHKTFAIPHGGGGPGMGPIGVKAHLAPFVAGHVVVKPGRESDNNGAVSAAPYGSAGILPISWMYIKLLGSNGLKKSTQTALLNANYVMKKLSEHYPVLFRGRNDRVAHECIIDLRPIKEASGVTEMDIAKRLNDYGFHAPTMSFPVAGTLMIEPTESESKVELDRFIDAMVSIRAEIAKVEAGEWPADNNPLHNAPHTMADIMDSAFDSRPYSREVAVFPSAAVRTNKFWPTVNRIDDVYGDRNLFCACVPLSDYE

SEQ ID NO: 20091 - protein, 980 aa, Salinibacter ruber DSM 13855
MPSHPTSCLQMAIDLSSANTFDERHLGPTDADVDAMLDALGAESLDALVDAAIPDSIRTDAPLDLPSALTEQQVLDAAQDAGAKNDTWRSFIGMGYRHTHTPPVIQRNILENPAWYTQYTPYQAEIAQGRLEALLNFQDMTIDLTGLEIANASLLDEATAAAEAMMMLNRVDRRSDAATFYVSEDCHPQTIEVVKGRAEPIGIDVIVESPENFVFGEDTFGCLLQYPTTDGAVHDYRDVADRAHEADAYVAVAADLLSLTLLEAPGEWGADAVVGSTQRFGVPMGYGGPHAAYFATRERFQRQVPGRMIGVTKDADGEMALRMALQTREQHIRRGRATSNICTSQVLLAVMASMYAVYHGPEGLREIATRVHDLTKTLAEGLNRTGHTVRHDAYFDTLRVDLTDATQAQVRERAEAHEINLRYYDDGSVGVALDQTVDAEDLDALFTVFGATNGQKLYADDLAADLDSGYDGPMPRQTSYLEHPVFNSYHSEGELTRYMKSLADKDLSLVHSMIPLGSCTMKLNPTAALQPISNPQFAGLHPFAPQEQAAGYEQVIDELSGYLTEITGFDDISFQPNSGASGEYTGLLIIQAYHEARGEEQRDVCLVPESAHGTNPASANMAGMEVITIDCDENGDVDLEDLREQAEVNSERLAAAMITYPSTHGVFEEHVEEICDVIHEHGGQVYLDGANVNAQVGLCRPREYGVDVCHLNLHKTFSIPHGGGGPGVGPVCTAEHLSPFLPGHPVVETGGDQHIPAIAAAPHGSALILLISWAYIKLLGPEGLTKSSKTALLNANYLADQLSNHYDIVFRGPNDRVAHEFILDLRPFRSELDINEQDVAKRLMDYGFHAPTMSWPVVGTLMVEPTESESKAELDRLVDAFAAIRSEIEAVETGTLEAEASTLKQAPHTAEMVTADEWDRAYSRETAAYPVEAVRERKFWPTVRRVNDAYGDRNLYCACPPTDAYEADEEEELTSALKTA

SEQ ID NO: 20092 - protein, 466 aa, Frankia sp. CcI3
MALHRQASGDRAEETVDVRPHLAPLGEEVVVPRFRMPQESTAPETAYQIVHDELMLDGKARLNMATFVTTWMDSYADRLMAECAPKNMIDKDEYPQTAALEERCVNILADLWHAPDAEHAVGCSTTGSSEACMLAGLAMIRRWRARRRSAGAPADRPNIVMGVNVQVCWEKFARYWDVEARLVPMAPGRTHLTADEAVAHCDENTIGVVAILGSTFDGSYEPVAGIVAALDHLAASGGPDVPVHVDAASGGFIAPFCDPDLVWDFQLDRVVSINTSGHKYGLVYPGVGWVLWRDRAHLPAELVFQVDYLGGTMPTFALNFSRPGAQVVAQYYTLLQLGYKGYRRVAQACRDNARWLAAEVAAMGPFELVSDGSGIPAFAFKLRDDITDYTVFDVSELLRTRGWLVPAYRFPPGLTDLAVLRVVVRHEFSRDLAGLLIADLRRVVNRLAHPGRRTAGDRPGESSFHH

SEQ ID NO: 20093 - protein, 120 aa, Oryza sativa
MAPRCATLAVVVVLVAAVVAPPTAVRAAISCSAVYNTLMPCLPYVQAGGTVPRACCGGIQSLLAAANNTPDRRTICGCLKNVANGASGGPYITRAAALPSKCNVSLPYKISTSVNCNAIN

SEQ ID NO: 20094 - protein, 631 aa, Dechloromonas aromatica RCB
MKFTSPLRSVRGRLLIVAIAIEAVMLTLLVANSLRLLTTHMGRQAEQHVEEIAPVLIAAIVAPLAQRDYATVQAVFDESTKVGGIDYLALANNDGKLVASSGWPEGAALPPADPHLNIFDADKQKPRYDVLVPVVTYGQKMGSLHIGIDLSQIRTAHNQLFSQGIFIALIEMLLSAGLMILLGYFLTRHLAGLTQASEAVAAGNLTPPPVPEGNDEVGRLGAAFNAMSRAVAERILELTASRDEQARLARSAETAARAKTSFLATMSHEIRTPMNGILGMTELTLATDLTEEQREYLTWVKSSGDNLMRVLNDILDFSKINAGELNLEHIPLDLSSLLDSVVALYSSVAANKGLRLYWAADTELPEHLLGDPVRIQQVLNNLLSNALKFTEHGEVAIRVHCEKTLENSKVWRVHFTVADTGIGIPASKLGNIFDPFAQAEEWTTRKYGGTGLGLSIVERLVRLMHGEIRVESAVGEGTRFHLLIHLDQAEKSTPKIAELDKEAAQCKLTNKQILLVEDTPVNQKIAEKLLSRYGCRVTIAVNGLEALAAVERDTFDLILMDMQMPEMDGVEATRHLRIREAELKLPRQPIVAMTANAMEEDREQCITAGMDDFIAKPFRADEVISMLLRYL

SEQ ID NO: 20095 - protein, 285 aa, Vibrio angustum S14
MTAQIIDGKLISQTVRQEVAARVKARKDAGLRAPGLAVVLVGQDPASQIYVGSKRKACEEVGFVSKSFDLPPTASEEELLLLIDELNLDPTIDGILVQLPLPAGMDSTRILERIDPEKDVDGFHPYNVGRLSQRIPKLRSCTPKGIITLLERYNIPVRGKEAVVVGASNIVGRPMTLELLLAGATTTTCHRFTRDLESHVRRADILVVAVGKPNFIPGAWIKEGATVIDVGINRLDNGKLCGDVEFDIASQKAKHITPVPGGVGPMTVATLIENTMLACEQFHGE

SEQ ID NO: 20096 - protein, 238 aa, Oryza sativa (japonica cultivar-group)
MPRPKRRRSPLPPPAPPGFPTERKHHLPELQPPAVAAASPGVAGVPADLGDALLRCGKLLDKLLEHEDGWVFAEPVDARALRLVDYYLRISDPMDLGTVRRRLERRRYADPWAFAADVRLTFNNAMSYNSAGDPVYESAAELSEIFEAGWPSVLAAPPRPPDAERKRRLSGLLPRLPVGAQVTVAEIMKKRDGCLREVNGMMEVDLDRADSATLDELDRMVAEHGAALAGVVKVKQEP

SEQ ID NO: 20097 - protein, 577 aa, Bacillus cereus ATCC 10987
MNRGRDVMSKFTVASNGSLETTLRGVEVLSTPLLNKGVAFTQEEREELGLKGLLPPAVLTLEEQARRAYEQFCSQPDDLLKNVYLTALHDRNEVLFYRILTDHLREMLPIVYTPTVGVAIQRYSHEYRKPRGVYLSINDPSGIEEAFANIGATAENIDLVVVTDGEGILGIGDWGVGGINIAIGKLAVYTAAVGIDPSRVLPVILDVGTNREELLNNPFYIGNRHPRITGEAYDEFIDTFVRAVNKQFPKALLHWEDFSSRNARKILDKYRHDICTFNDDIQGTGAVSLAAVLSAVKASGVPLSEHRVVVFGAGTAGIGIADQVRDAMVRVGVSEEESYKRFWCIDRNGLVTDNMKDLLDFQMPYARKEAEVSEWKQNGVIGLAEVVKHVKPTILIGTSTVAGAFKEEIVKEMASHVERPIILPMSNPTPLAEAKPADLIKWTEGRALVATGSPFEPVTYNGVTYVIGQSNNALIFPGLGLGTIVVRASVMTDGMFAAAAEAVASMVDTSQPGAPILPEVEELRNISEMVAIEVAKVAVAEGVARENLSDNDIKIAVKEAIWEPEYRQIKAVEKVRI

SEQ ID NO: 20098 - protein, 661 aa, Acinetobacter sp. ADP1
MQVKTPDIGVDKATVAEILVKVGDTISENDSLILLESDKASVEVPSTASGVVKSILVSLGDEVSEGTTLIELESGDNTDKTESESAPAQTEVKAETPVEQVAPQETKPATSTSAASSVVEVQVPDIGVEKATVAELLVSVGDEIAENDSLVLLESDKASVEVPSTVSGTIESIEVKAGDTIQEGVLLLKVKTAGASNAAPAKQEAVVPTAAPVATKAETQAETPAVQSAPAGAVDVLVPDLGVDKAAVAEILVNVGDKITKDESIVVVESDKATVEVPSTVSGIVKAIHVKAGQDVKEGILLVTVEAEGAVASAPKAPVAKAEAAPAPAAQKAEAPAAKVETAPQAGADKLTKEQEAENSKVYAGPAVRKLARELGVVLAQVKASGEHGRLMKEDIYAYVKQRLTAPVAAPKAAAAAVASGLPTLPDFSAFGGVEEKTLTRLQQVSIPQLSLNNFIPQVTQFDLADITELEAWRNDLKGNFKKEGISLTIMAFIIKAVAHLLKEEREFAGHLSDDGKSVLLRKEIHMGIAVATPDGLTVPVLRNPDQKTIKQIAVELGVIGQKARDKKLSPKDLQGANFTISSLGAIGGTAFTPLVNWPQVAILGISPATMQPVWNGKDFDPRLMLPLSLSYDHRVINGADAARFTNKLTKLLQDIRSLLI

SEQ ID NO: 20099 - protein, 445 aa, Aspergillus nidulans FGSC A4
MCPGDHPGFTAVQTRQNPHPSRNPYGHNVGVTDFLSNVSRFKIIESTLREGEQFANAFFDTQKKIEIAKALDEFGVDYIELTSPCASEQSRLDCEAICKLGLKAKILTHIRCHMDDARVAVETGVDGVDVVIGTSSYLREHSHGKDMTYIKNTAIEVIEFVKSKGIEIRFSSEDSFRSDLVDLLSIYSAVDQVGVNRVGIADTVGCASPRQVYELIRVLRGVVSCDIETHFHNDTGCAIANAYCALEAGATHIDTSVLGIGERNGITPLGGLMARMMVADPQYVKSKYKLEKLKDIEDLVAEAVEVNIPFNNYITGFCAFTHKAGIHAKAILNNPSTYEIINPADFGMSRYVHFASRLTGWNAIKSRAQQLNVHMTDDQYKECTAKIKALADIRPIAIDDADSIIRAYYRNLSSGENKPLMDLTADEHAQFLAKEKELTESGTAL

SEQ ID NO: 20100 - protein, 347 aa, Aspergillus oryzae
MSSDDLVIPKGSLVVVTGANGFIGSHVVDQLLQHGYNVRGTVRNVAKNSWLNDYFSAKYGPGRFSLAEVPDMSHEGAFDEVVKGAAGIAHVATPVRQFHDPNIAVPMVVNGTLNVLASAAAEPSMRRVVITSSSTAAASPQPNKVFTMDEKTWNETAVKAAWAPPPYEGLQRRLDVYSATKTQAEQAAWKFMEDKKPDFVLNTVLPNVNMGTILSPENQGYPSSGGWVKAVWDGFPGEEGEKLKYNPPQYYVNVQDDALVHVAALIYPDVQNERLFAFAHPYSWNDILDALRRLYPQQKFIDDIPNIGEDKSKVANQRAEELLKRVSGLPAWTSLEQSVHDATKAWV

SEQ ID NO: 20101 - protein, 124 aa, Brassica napus
HQWISPYPPPPYSSSSITAALLLLLRRTRYRRMGLPPGSLGLPLIGETLQLIAAYKTENPEPFVDARVARYGSVFMTHIFGEPTVFSADPETNRFVLQNEGKLFECSYPASICNLLGKHSLLLM

SEQ ID NO: 20102 - protein, 180 aa, Nicotiana plumbaginifolia
MASSVLSSAAVATRSNVAQANMVAPFTGLKSAASFPVSRKQNLDITSIASNGGRVQCMQVWPPINKKKYETLSYLPDLSQEQLLSEIEYLLKSGWVPCLEFETERGFVYREHHHSPGYYDGRYWTMWKLPMFGCTDATQVLAEVEEAKKAYPQAWVRIIGFDNVRQVQCISFIAYKPEGY

SEQ ID NO: 20103 - protein, 421 aa, Ehrlichia chaffeensis str. Arkansas
MSPKITQLSNNFTIITDTMPYVESVSINIWVNVGSRYENINITGISHFLEHMAFKGTKTRTALDIAQIFDDIGGNFNAHTDREHTVYHVKTLKRDIKIAIEVLADIILNSQFPEEEIYKEKGVVLQEIYQTNDSPTSIIFDKYIEAAYPNQIFGKSILGTPESVNSLSKADLHIYMSEYYHAGNMLLSVAGNISHEEVIDLVSQYFSHMKKSQRKIADPSIYRSGEYREIRNLEQVHLVIGFPSVSYKDDLFYTIQILDSILGNGMSSRLFQKIREQLGLVYTISSFNSSYSDNGIFSIYAATDKSNLSQLLSTIASEVKNIITNLQENEITRAKGKLTSEILMSRESTTARAESLGYYYSHYNRYISKEELIKKISTITVTDIQNCINNLLGSNNKITLAAIGQIENLPSYDDIAQMFYI

SEQ ID NO: 20104 - protein, 427 aa, Arabidopsis thaliana
MDLWPRIVANLAPIIFSHKEGVNFLSWINNKRIITPDCNQYSSTSLVPQILSSFVCPHNNNNNAEMAMSAIGFEGYEKRLEVTFFEPGLFLDTQGKGLRALAKSQIDEILQPAECTIVSSLSNDQLDSYVLSESSLFIFPYKIVIKTCGTTKLLLSIEPLLRLAGELSLDVKAVRYTRGSFLCPGGQPFPHRNFSEEVSVLDGHFAKLGLSSVAYLMGNDDETKKWHVYSASSANSNNKNNVYTLEMCMTGLDKDKASVFYKNESSSAGSMTDNSGIRKILPQSQICDFEFEPCGYSMNSIEGDAISTIHVTPEDGFSYASFEAVGYDFTTMDLSHLVSKVLTCFKPKQFSVAVHSTVAQKSYDSGLSVDLDDYGCKESTMESLGEERGTVMYQRFEKLGRYCGSPRSTLKCEWSSNSSCNSEDEKE

SEQ ID NO: 20105 - protein, 389 aa, Acinetobacter sp. ADP1
MASFEFIEDELSDSNGQARFTVFGVGGGGGNAVQHMVQSDIKGVKFVCANTDKQALDSMNAPFKIQLGEQSTRGLGAGANPEVGQIAGEESREMIRQHLEGTDMVFVTAGMGGGTGTGAAPVVAEIAQEMGILTVGVVTTPFNFEGRRRQRAAEKGIEALEAHVDSLIIIPNQRLLSVYGDISMRDAYKKADDVLLNAVRSIFDLVVNRGHINLDFADLKTAMSTRGYAMMGVGLGRGEDRARQAAEQAIRSPLLDNVNIINAKGVLINITGGDDITLRETEIITDVVNQIVDLDEGEIFYGTVFDPEARDELRVTVIATGLTRNASEAEPRKRHVPHHVHVPTAHAVDEDDVPAISKRQGTEASAAPSSSPRSSPMSIQDYLKNQQRK

SEQ ID NO: 20106 - protein, 279 aa, Nicotiana plumbaginifolia
MASSASSLHFLSLTPQTLLLPKPTSQTTSLSFFSLPPSSLNLSLSSPSSCFSSRFVRKVTLPDFDQIEDVEDGDEGVEEERNFSPDLKIFVGNLLFSADSAALAELFERAGNVEMVEVIYDKLTGRSRGFGFVTMSSKEEVEAACQQFNGYELDGRALRVNSGPPPEKRENSSFRENSSFRGGSRGGGSFDSSNRVYVGNLAWGVDQDALETLFSEQGKVVDAKVVYDRDSGRSRGFGFVTYSSAEEVNNAIESLDGVDLNGRAIRVSPAEARPPRRQF

SEQ ID NO: 20107 - protein, 543 aa, Methylobacillus flagellatus KT
MAIHIISTQPFDDQRPGTSGLRKRVSVFQQPHYLENFVQSIFDAVQVPAGATLVVGGDGRFYNLEAIQTILKMAAANGIGRVLVGKNGILSTPAASCVIRKYKTFGGIILSASHNPGGPTGDFGIKFNSANGGPAPEKVTEEIFARSQEMTQYKIVDAPDVALDIVGEIELAGMTVEIIDAVSDYVDLMAKLFDFEAIRQLLASGFRLRFDAMHAVTGPYARAILVDCLGADPDAVMNADPLPDFGGGHPDPNLTYAHDLVEIMYGDDAPDFGAASDGDGDRNMILGKRFFVTPSDSLALIAANARLVPGYAQGIAGVARSMPTSAAVDRVAQELDIPCFETPTGWKFFGNLMDAGKVTLCGEESFGTGSDHVREKDGLWAVLFWLNILAIKRQPVETIVKRHWARFGRNVYSRHDYEELPSDAANGLIEHVRAQFASLPGRDFGRYTVKTCDDFSYTDPVDGSVSQKQGIRILFEDGSRIVFRLSGTGTAGATLRIYLESFEPDISKHDQDAQDALADLIAIAHQISELKQRTGRDQPTVIT

SEQ ID NO: 20108 - protein, 389 aa, Triticum aestivum
  misc_feature (258)..(258): Xaa can be any naturally occurring amino acid
  misc_feature (268)..(268): Xaa can be any naturally occurring amino acid
  misc_feature (287)..(287): Xaa can be any naturally occurring amino acid
SKLELQRRADDTSTASAMAAEYDRTADLRALDATCSGVRGLVASGVTHLPRIFRVSDGVHQPQPPPPQVPSQELPSSSAPSVPVIDLSGSDHAAVVAAVRRAAAEWGFFQVTGHGVPEAAMAAATDAVRGFHEADGGEGSDKARLYSREPARAVKYHCNFDLYQSPVANWRDTLYLRMAPDQPDAGDLPDSCRDALFEYAEQVKNLGSTLFELLSEALGLKPSYLTDIECNQGQIILCHYYPPCPQPELAIGTSRHSXTPGFLTILLXQDEIRGLQDFSQRRTNWVXTLTPTPGAFIVNIGDLLQLISNDGFRSVEHRVVAKNATPRVSIACFFSTHFHPASTRMYGPIKELLSDENPPLYRETLVRDYIKHYYSIGLDAKTAISDFRL

SEQ ID NO: 20109 - protein, 537 aa, Oryza sativa
ADGPHRLRSPPRLTQPPVAMGNRTSRHHRAAPEQPPPQPKPKPQPQQQQQQWPRPQQPTPPPAAAPDAAMGRVLGRPMEDVRATYTFGRELGRGQFGVTYLVTHKATGKRFACKSIATRKLAHRDDIEDVRREVQIMHHLTGHRNIVELRGAYEDRHSVNLIMELCEGGELFDRIIARGHYSERAAAALCREIVAVVHSCHSMGVFHRDLKPENFLFLSKSEDSPLKATDFGLSVFFKPGEHFKDLVGSAYYVAPEVLKRNYGAEADIWSAGVILYILLSGVPPFWAESEDGIFDAVLRGHIDFSSEPWPSISNGAKDLVKRMLRQDPKERLTAAEDVNHPWIREDGEAPDKPLDITVISRMKQFRAMNKLKKVALKVVAENLSDEEITGLKEMFRSLDTDNSGTITLEELRSGLPKLGTKISESEIRQLMEAADVDGNGTIDYAEFISATMHMNRLEKEDHILKAFEYFDKDHSGYITVDELEEALKKYDMGDDKTIKEIIAEVDTDHDGRINYQEFVAMMRNNNPEIAPNRRRMF

SEQ ID NO: 20110 - protein, 265 aa, Burkholderia sp. 383
MNPFLLYEQEGHVVTLTMNDPERRNPLTGNTAVAEFLAAIERIQGDRSVRAVIITGAGKAFSTGGNIRDMERQASGEVPGLQIREEYRQGIQRLPLALFNLEVPVIAAVNGPAMGAGLDLTCMCDLRIASEQARFAESFVKLGIIPGDGGAWLLPRVIGLARAAELTFTGDPIDAATALEWNLVSRVVPHEQLLPAANEIAARIAANPPHAVRLAKRLLREALHSRLDTLLELSSTYQALSHQTADHRESVAAFLEKRPPVFSGN

SEQ ID NO: 20111 - protein, 159 aa, Bacillus cereus G9241
MWKTTDLCDEFENELQICRQSFRSFGKKEQFYGKIATVKVKDDNVLVKEGLQTLPEGTVLVVDGGASTNCALLGDNLAAIAEERKLAGIIVYGYVRDSSELKNINIGILALGTMPNRSVKEGKGERNISLQFGQVEWKPNEYVYVDEDGVIISEKSLHR

SEQ ID NO: 20112 - protein, 468 aa, Glycine max
  misc_feature (61)..(61): Xaa can be any naturally occurring amino acid
CLILCIGVLLQTYPNPLQDNPAYSVVKQYFVHVDDSVPQKVVVHKDGARGVHFRRAGPRQXDEVQAAIVTCGGLCPGLNTVIRELVCGLHHMYGVKKVLGINGGYRGFYARNTITLTPKSVNDIHKRGGTVLGTSRGGHDTKKIVDSIQDRGINQVYIIGGDGTQKGASAIFEEVRKRGLKVSVVGIPKTIDNDIPVIDKSFGFDTAVEEAQRAINAAHVEAESVENGIGVVKLMGRNSGFIAMYATLASRDVDCCLIPESPFYLEGPGGLYEYIEKRLKENGHMVIVIAEGAGQELVSESVQSMSKQDASGNKLFQDVGLWISQKIRDHFAAQKTLPITLKYIDPTYMIRAIPSNASDNVYCTLLAQSAVHGAMAGYTGYTSGLVNGRQTYIPFYRITERQNHVVITDRMWARLLSSTNQPSFLDAKGDNEEKEEEEALNQLPDGHCAKDTSLASKEINSSIYPTAC

SEQ ID NO: 20113 - protein, 186 aa, Arabidopsis thaliana
  misc_feature (14)..(14): Xaa can be any naturally occurring amino acid
  misc_feature (89)..(89): Xaa can be any naturally occurring amino acid
  misc_feature (99)..(99): Xaa can be any naturally occurring amino acid
  misc_feature (114)..(114): Xaa can be any naturally occurring amino acid
  misc_feature (126)..(126): Xaa can be any naturally occurring amino acid
  misc_feature (131)..(131): Xaa can be any naturally occurring amino acid
  misc_feature (135)..(135): Xaa can be any naturally occurring amino acid
  misc_feature (138)..(138): Xaa can be any naturally occurring amino acid
  misc_feature (152)..(152): Xaa can be any naturally occurring amino acid
DSASSDNKSNLTLXSDVVASSSPVSQLCREASTSGHNPVCTTHSSWTVILKTASMASGAIRRFQDRVLGPSRTGISSSTSEIWLLGVCXKISEGESSEXADAGRVLAAFRQDFXSLILMTYRRGFXEPIWXTTFXSDXNWGCMLRRGQILFXQGLLFQSLEGLGEKPPGGILGLWPLGTGSLGSDF

SEQ ID NO: 20114 - protein, 469 aa, Bacillus anthracis str. 'Ames Ancestor'
MFQKDFRLYDNPALFEAAQSGEVVPVYVHDETFSMGSASKWWLHHAIIDVKKQLEALGSTLIIRKGSTQEEILSLVEQLGITAVYWNICYDPDRLQSNQKMKMMLEHKGMICKEFNSHLLLEPWVIKKKDNTEYKVFTPFYNAFQKQVIHKPISKVQSIKGGNSLPVSLSVSELHLLPTIPWTSHMESIWEPTEEGAYKTWKEFFSSKLASYSEGRDFPNQNAHSMLAPYLSFGQISVKLIYHYLINKSTESQCSLFEKQVNSFIRQLIWREFSYYLLYHYPFTAYKPLNKSFEHFPWNNEEELLRVWQKGDTGYPFIDAGMRELWQTGFMHNRTRMAVASFLVKHLLIPWQEGAKWFMDTLLDADIANNTMGWQWVAGSGADASPYFRIFNPITQGEKFDKNGEYIRKWVPELKDMPNKYIHKPWEAPEHILQKANIQLGHTYPLPVVDHKAARERALCAYKSMKEFV

SEQ ID NO: 20115 - protein, 472 aa, Shigella flexneri 2a str. 301
MVTINTESALTPRSLRDTRRMNMFVSVAAAVAGLLFGLDIGVIAGALPFITDHFVLTSRLQEWVVSSMMLGAAIGALFNGWLSFRLGRKYSLMAGAILFVLGSIGSAFATSVEMLIAARVVLGIAVGIASYTAPLYLSEMASENVRGKMISMYQLMVTLGIVLAFLSDTAFSYSGNWRAMLGVLALPAVLLIILVVFLPNSPRWLAEKGRHIEAEEVLRMLRDTSEKAREELNEIRESLKLKQGGWALFKINRNVRRAVFLGMLLQAMQQFTGMNIIMYYAPRIFKMAGFTTTEQQMIATLVVGLTFMFATFIAVFTVDKAGRKPALKIGFSVMALGTLVLGYCLMQFDNGTASSGLSWLSVGMTMMCIAGYAMSAAPVVWILCSEIQPLKCRDFGITCSTTTNWVSNMIIGAAFLTLLDSIGAAGTFWLYTALNIAFVGITFWLIPETKNVTLEHIERKLMAGEKLRNIGV

SEQ ID NO: 20116 - protein, 71 aa, Arabidopsis thaliana
  misc_feature (3)..(3): Xaa can be any naturally occurring amino acid
  misc_feature (18)..(18): Xaa can be any naturally occurring amino acid
  misc_feature (42)..(42): Xaa can be any naturally occurring amino acid
  misc_feature (49)..(49): Xaa can be any naturally occurring amino acid
  misc_feature (52)..(54): Xaa can be any naturally occurring amino acid
  misc_feature (60)..(60): Xaa can be any naturally occurring amino acid
SMXSSATMVASPAQATMXAPFNGLKSSVAFPATRKANNDITXITSNGGXVNXXXVWAPIXKKKFETLSYLP

SEQ ID NO: 20117 - protein, 158 aa, Arabidopsis thaliana
MGEIGFTEKQEALVKESWEILKQDIPKYSLHFFSQILEIAPAAKGLFSFLRDSDEVPHNNPKLKAHAVKVFKMTCETAIQLREEGKVVVADTTLQYLGSIHLKSGVIDPHFEVVKEALLRTLKEGLGEKYNEEVEGAWSQAYDHLALAIKTEMKQEES

SEQ ID NO: 20118 - protein, 267 aa, Triticum aestivum
CRVVALQLVFMFIPLNDEDKLGRKIGRFICKYAMGYFPISLHVEDYNAFDSSRAYVFGYEPHSVLPIGVAALANHVGFMPLPKLKVLASSAVFHTPFLRQIWTWIGLIAATRKNFYSYLAAGYSCVVVPGGIQEILHMDHDSEVAFLNSRKGFVKIAMQAGCPLVPVFCFGQSKAYRWWRPGGKLFVNIARALKFTPIIFWGRYGTPIAFSAPMHVVVGRPIELKKNPLPTIDEINEVHGQFVGALQELFEKYKTKAGYPGLHLRVL

SEQ ID NO: 20119 - protein, 102 aa, Pseudomonas putida KT2440
MQVNISGQHVEVTQPLRDYVLEKLARVESHFDKITNVQVIMKVEKLQQKVEATLQIPGGEVVANAEHEDMYAAIDALADKLDRQLKKHKEKQQSLLQGAAAR

SEQ ID NO: 20120 - protein, 104 aa, Oceanobacillus iheyensis HTE831
MAIKHVTDQNFTEETSKGLVLADFWAPWCGPCKMIAPVLEEIDGEMEEKVQIVKLDVDENQETAGKFGVMSIPTLLLFKDGDVVDQVIGFQPKEALEDLINKHA

SEQ ID NO: 20121 - protein, 257 aa, Oceanobacillus iheyensis HTE831
MTLIAFELKDQVACLTIQSPPANALSGAILKQLNERLNQIEEEGKAKAVVISGEGRFFSAGADIKEFTGYQHASEYESLANNGQNVFDRVEHFSIPVIAAIHGAALGGGLELAMSCHIRLVTENTKLGLPEMNLGIIPGFAGTQRLPRLIGNARAYEMILTGEPISGQQAADWGLANHVVPEEELLQKAMNIANKITMKSKPGISEIMHLVPYANKDQLSKGVKEEAKSFGRVFGSEDAKEGVTAFIEKREPNFQDK

SEQ ID NO: 20122 - protein, 941 aa, Nostoc sp. PCC 7120
MGKIMPVSNTKPSLQRQIKTMIRSSVQTAQKLPLRLILVVPFVLQIFTAVSLVGYLSFKNGQKAVNELADQLIVKVNGLVDQHLDSYLAAPLQINQINVDATNLGMLNLENFQTTGRYFWQQMQVFNVGYISFANLQGEFIGVERLDKGGLLINEVSQKNGIGKLYVYTTNNQGDRQQLIAVKDYDPHVEAWYADAVKAGKPVWSQIYSWEDKPEVLSISASYPINDNNNKFFGVISVDLILSQINSFLANLKVGQTGQIFILERSGMIVASSTSEAPYKVISGKAQRLSAHQSQNYLLRETTDYLQQKFGQLKNVKSYQQTVLQLQHERHFVQVRPWNDKLGLDWLVIVVVPESDFMGQINTNNRTTILLCLWALIIATAMGVYTSRWIARPIVQLTQASSAIASGNLDQEVRVSGLKELSTLATSFNQMAGQLRDSFAELEKTNQELENRVAERTAEITAAKEVADAANRAKSEFLANMSHELRTPLNGILGYAQILQLDSNTNDEQMQGLNTIYECGSHLLTLINDILDIAKIEAKKLELYPQEFDLGRLLLGVCEMCHIKVEQKGISFKYQFNDYIPSKTFADEKRIRQVLINILSNAIKFTDNGTVTFDVEVVACTGTKLITNTNQILPVHQLRFQIEDTGIGMTDEQLKKIFLPFEQVGDNLHKSEGTGLGLAISSQILELMGSDIKVESVYGKGTKFWFDLDLPIIDTGKISLSVESQKNIIGYEGKTKSILIIDSSWEKRDIFANLLSSLGFKLTEVSNLQESLDKIKAEHPDLIIADIAMPEINNLQATTMMRSQVEFAKLVIIASSASVSEYTRQQSQEAGYDDFLAKPVKVEDLFNMLQTYLSLKWIYSPNDDSSAKISSIEEIIFPPPTELVNLYQAAKAGYVVGIQEEITRIQQLDKKYTRFTVKVSELIAEFEDEAIVSMIQPHLSY

SEQ ID NO: 20123 - protein, 115 aa, Solanum chacoense
MEIVSKIACFVLLCMVVVAPHAEAALTCGQVTSSLFSCLPYLRNTGPLGDCCSGVKKLKGQAQTTADRQTACNCLKSTAGSIKGLNFGKAASLPSTCSVNIPYEISPSTDCSKVQ

SEQ ID NO: 20124 - protein, 565 aa, Salmonella typhimurium LT2
METTTKKARSLYIPYAGPVLLEFPLLNKGSAFSVEERRNFNLSGLLPEVVESIEEQAERAWLQYQGFKTEIDKHIYLRNIQDTNETLFYRLVQNHLEEMMPVIYTPTVGAACERFSEIYRRARGVFISYPNRHNMDDILQNVPNHNIKVIVVTDGERILGLGDQGIGGMGIPIGKLSLYTACGGISPAYTLPVVLDVGTNNQQLLNDPLYMGWRHPRITDDEYYAFVDEFIQAVKQRWPDILLQFEDFAQKNAMPLLTRYRDEICSFNDDIQGTAAVTVGTLIAASRAAGSQLSEQKIVFLGAGSAGCGIAEQIIAQTQREGLSEDAARQNVFMVDRFGLLTDRMPNLLPFQAKLVQKCDNLQHWDTENDVLSLLDVVRNVKPDILIGVSGQTGLFTEEIIREMHKHCPRPIVMPLSNPTSRVEATPQDIIAWTEGNALVATGSPFSPVIWKDKVYPIAQCNNAYIFPGIGLGVIASGASRITDEMLMSASETLAKHSPLVNNGEGLVLPALKDIQVVSRAIAFAVGKMAQQQGVAVKTSAEALQQAIDDNFWKPEYRDYRRTSI

SEQ ID NO: 20125 - protein, 409 aa, Bacillus cereus ATCC 10987
METIVQKFGGTSVGSVERIQHVANLIIEEYERGHSIVSVVSAMGKSTDELVALANAITENPSKREMDMLLSTGEQVTISLLTMALQAKGYNAISLTGWQAGITTESVHSSARITEINTDRIQSYLTKGTIVIVAGFQGVSEDFEITTLGRGGSDTTAVALAAALNAKKCDIYTDVTGVYTTDPRVVKDAYKLDEISYDEMLELANLGAGVLHPRAVEFAKNHNVILEVRSSMEQENGTIVKGECNMEQQSIVKGIAFEDNITRITVKGLEQGSLSTVFSTLAAAHINVDIIIQSITNEGTVHLSFSIHSNDLRETLEVLEQNQEALHYEAVEYENHLAKVSIVGSGMVSNPGVAANMFTTLKEENIHIKMVSTSEIKVSVVIDRLHLVTGVEALHQSFMAKIVPLVQMS

SEQ ID NO: 20126 - protein, 292 aa, Nicotiana plumbaginifolia
MASSSVSSLQFLFVTSQTPSSLKPNSTLSFFSLPSSSLNLSLSSSSIGHSASIKPFESSFSTRVALSDFDQLEDDVEVAEQPRFSEDLKLFVGNLPFSVDSAALAGLFERAGNVEIVEVIYDKLSGRSRGFGFVTMSTKEEVEAAEQQFNGYEIDGRAIRVNAGPAPAKRENSSFGGGRGGNSSYGGGRDGNSSFGGARGGRSVDSSNRVYVGNLSWGVDDLALKELFSEQGNVVDAKVVYDRDSGRSRGFGFVTYSSAKEVNDAIDSLNGIDLDGRSIRVSAAEERPRRQF

SEQ ID NO: 20127 - protein, 338 aa, Fusobacterium nucleatum subsp. vincentii ATCC 49256
MERIYDMIVIGGGPAGLSAGIYGGRAKLDVLIIEKENKGGQISLTSEVVNYPGILEISGSEFMTQTKKQAQNFGVNFVQEEVVDMDFSQKIKTIKTNKAEYKTLSVVIATGAAPRKLGFPGEQEFTGRGVAYCATCDGEFFTGMDIFVIGAGFAAAEEAMFLTKYGKSVTIIAREPDFTCAKSIGDKVKAHPKITVKFNTELIELTGDVKPTAAKFKNNVTGEITEYKAKVGETFGLFVFVGYAPSSEIFKGHIEIDRAGFIPTNEDLMTNIDGVFAVGDIRPKRLRQVVTAVADGAIAATSIEKYVHDLREELGIKKEEKEEEKTTSVTTEKETFLR

SEQ ID NO: 20128 - protein, 556 aa, Frankia sp. CcI3
MAGSRMISELRSRDPNLIITVFGEEPHPAYNRILLSNVLAGKADLADITLVDHAASGDSGDGTPPRALVDVRAGVVAHHIDRTRRTVTADDGSVVAYDVLILATGSRAWLPPIEGLTRPDGTLLPGVAAFRTLDDCRHILTQSERATRAVVLGGGLLGLEAARGLVRRGLDTTVLHAAGHLMNRQLDRRAGQVLVRTLAGLGVRSRLEARVVRIHGDERLAGVELAGDEVLDADLLVVSTGVVAVTDLAAAAGLPVEAGIVVDDQMRSPADPAVFAVGDCAQHDGTVQGLVAPAWDQVRVVADVVTAADPAARYSGARPVTRLKASGVDLATMGEVDVDEFDEDAEVLQFVDVTRGTFKKLVIRGDRLVGAIMLGDNPTVGTVTQLFDRQAPVPADRRSLLFPTRTEVTVTDSPATLPDRVTICRCNNVTKGGITRCWLDGARDLPAIVTGTRATTGCGTCRDAVAGIVEWLAAADPDPSAAAGDNCAAGLEESPQTDRRSSGGCSATAEPRRYSSAGRPPPRGEVRWPSGTTNPGVDSTLRRKFGGSNATPHAAS

SEQ ID NO: 20129 - protein, 761 aa, Frankia sp. CcI3
MPVPAAPLAEAATHCPYCALQCGMMLRATPESAAKEGTGKDDGPEPAGGRSPGPVTVLAREFPTNRGRMCQKGWTSAELLTAADRLTTPLMRPRRDAPLEPVSWERALDRITEGIIRLQREHGPDAVGVFGGGGLTNEKAYALGKFARVALRSSAIDYNGRFCMSSAAAAGIRSFGLDRGLPFPLEDIAHAGAVIMVGSNAAETMPPFMQYLTRQRENGGALVVVDPRLTATARAAALHLQITPGTDLALANGLAYIALTEGYANRDFLAARTTGLAELRAVLASYWPERVERITGVPVADQYAAVDLLAQAERAMVLSARGAEQHSKGTDTVTALINLALVLGLPGTPGSGYGCLTGQGNGQGGREHGQKADQLPGYRKIIDPVAREHIGRIWGVDPTTIPGPGRSAYEMLDALGTPQGPRALLILGSNIAVSAPRAGRITSRLAALDLLVVADFVLSETAAMADIVLPTAQWAEEEGTMTNLEGRVLRRERLRPPPAGVRTDLEIIAALAARLGHAERFPGEPRAVFDELRRASAGGIADYAGISYERITASDGVFWPCPDETHPGTPRMFLDRFATPDGRARLVPVEHRPVAEDIDPEYPYYLTTGRVLAHYQSGAQTRRIGPLVDAAPEPFVEIHPDLAERLGIAEGAPVRVTSRRGTCEVPARLTDTLRFDTVFLPFHWAGAGRANSLTNDALDPTSRMPEFKVCAVAVEPIDDPDDNPDDDRHATGSVPTATVGAAEPVRAMLTGRSQPSGRHQG

SEQ ID NO: 20130 - protein, 273 aa, Oryza sativa
MEALYLVASLATTLLTSTFLSLLLLHRLPLPGHLSPDDARRVASTSGPVHLLTIPKSVGYEQNPLSIYYCYDSAEQGEDEKLKMCIAEVTNTPWGERVMFTFQPGSDLVAKPLHVSPFMDMLGNEFGRGESPGDSLYVVILVQHPTLGNYFTAALHAKLVEKTSSSLRLATFFWLMPHKVAAGIYWEAIRLWLKNVKFLDHPRYLNLNYRDEAQKRDLEIRSSCSFLQKQKLNDQRTGRADETAEITDHHDHNGEESVVKRWCVWTDAQWPWS

SEQ ID NO: 20131 - protein, 335 aa, Candida albicans SC5314
MSSIFPKLSFQEWYQVLYGLWPSNPQFTEKDISSNTLKDKVVVITGGNSGIGYETAKVLAGNTEARIYIWARNRQKSIEAIEKIKLEVAEKHSKDVGDRLQFIQIDLSDLNSIEPAVKEFLQREQRLDIIYHNAGVMESPSDQRTKQDYQMELGVNCIGPQLLQTLLDPLFIKTAEKNPPNLSRIVWVSSTAHMFSPIGGMYLRDPEFKSIDVELKTKYDQSKAINLIQARQWNIHHPGANAISLSLCPGYLKTGIQRHVTGLTKLAYNLFFHDQKMGVYTLLFAGLSPEITTKNKGDHVISFGKLGLIRPDLKDDENGKKVWDYLQDKIKSYVR

SEQ ID NO: 20132 - protein, 492 aa, Hordeum vulgare subsp. spontaneum
YFHETIWKGVPKFLRRVDTALKNIGINERVPYNAPLIQFSSWMGGDRDGNPRVTPEVTRDVCLLARMMAANLYCAQIEDLMFELSMWRCNDELRARADELHRSSKKDAKHYIEFWKKVPPNEPYRVILGDVRDNLYNTRERSRELLSSGHSDIPEEATLTNLEQLLEPLELCYRSLCACGDRVIADGTLLDFLRQVSTFGLSLVKLDIRQESDRHTDALDAITSYLGIGSYREWSEERRQEWLLSELNGKRPLFGADLPMTEEVADVMGAFQVIAELPGDNFGAYVISMATSPSDVLAVELLQRECHIKTPLRVVPLFEKLADLEAAPAALARLFSIDWYRERINGKQEVMIGYSDSGKDAGRLSAAWQMYKAQEDLVKVAKQFGVKLTMFHGRGGTVGRGGGPTHLAILSQPPDTINGSLRVTVQGEVIEQSFGEEHLCFRTLQRFTAATLEHGMRPPISPKPEWRALLDEMAVVATEEYRSIVFQEPRFV

SEQ ID NO: 20133 - protein, 247 aa, Mycobacterium sp. KMS
MERQGRTLIITINRPEARNAVNFAVSQGLADAVDELDSDTSLSVAILTGAGGNFCSGMDLKAFAAGERVDIPGRGIGFTERPPRKPLISAVEGYALAGGTEVVLATDLVVASATAKFGIPEVKRGLVAAGGGLLRLPRRIPYQKALELALTGESFTAEQGAAWGFVNKVTEPGQALAGAVELAERITANGPLAVAVTKEILVRSSEWSEAEMWSKQMELIIPVFSSNDAKEGAIAFAEKRAPNWSGT

SEQ ID NO: 20134 - protein, 119 aa, Oryza sativa
MAALNGKVVVAVMVMAMVVAAPWGVGGDNVGAVWGRAIAPCISYVTGRGGLTQGCCNGVKGLNNAARTTADRQAACRCLKSLAGTIKSLNLGAAAGIPGKCGVNVGFPISLSTDCSKVS

SEQ ID NO: 20135 - protein, 561 aa, Aspergillus oryzae
MTASMSSSSALARRASSVTSSSPASNVAARRLHATARQMTPATTSAATTATEYPTDHKPIANPIDTANFLDNEFVASKATTWIDLHDPATNNLVTRVPQSTDEELRAAVESAEKAFPAWRAMSVIARQQIMFKFVSLIRANWDRLAASITLEQGKTFADARGDVLRGLQVAETACGITTQLTGEVLEVAKDMETRSYREPLGVVAAICPFNFPAMIPLWCIPIATITGNCLILKPSERDPGAAMILAELAKEAGFPAGVVNIVHGSAKTVDFIIDEPAIKAISFVGSNRAGEYIYTRGSANGKRVQANLGAKNHAAVLPDCNKNHTLNAIVGAAFGAAGQRCMALSTVVMVGETEEWLPEIAERAKALNVNGGFEEGADLGPVISPESKKRIEDLIASAEKEGAKILLDGRGYKPEKYPNGNFVGPTIITNVTPEMTCYKEEIFGPVLVCLSVPTLEDAIDLINKNEYGNGAAIFTCSGSTASRFQKDIEAGQVGINVPIPVPLPMFSFTGNKKSIAGGGANTFYGKPGLQFYTQQKTVTSLWRSEDAVSTKAHVVMPTHH

SEQ ID NO: 20136 - protein, 115 aa, Triticum aestivum
MARGAATQLVLVAMVAAMLLVASDAAISCGQVTSALSPCISYARGNGANPPAACCSGVRSLAGAARSTADKQAACKCIKSAAGGLNAGKAAGIPSKCSVSVPYAISSSVDCSKIR

SEQ ID NO: 20137 - protein, 147 aa, Cryptococcus neoformans var. neoformans JEC21
MALKRINKELIDLGRDPPSSCSAGPINDNLFQWQATIMGPADSPYSGGVFFLSLTFPTDYPFKPPKVQFTTKIYHPNINANGSICLDILRDQWSPALTISKVLLSICSMLTDPNPDDPLVPEIANTYKTDRARYEATAREWTRKYAT

SEQ ID NO: 20138 - protein, 327 aa, Nostoc punctiforme PCC 73102
MAETLFFNALREAIDEEMARDSSVFVLGEDVGHYGGSYKVTKDLYQKYGELRILDTPIAENSFTGMAVGAAMTGLRPIIEGMNMGFLLLAFNQISNNAGMLRYTSGGNFKIPMVIRGPGGVGRQLGAEHSQRLETYFQAVPGLKIVACSTPRNAKGLLKSAIRDDNPVLFFEHVLLYNLKEDLPEEEYLLPLDKAEVVRQGKDVTIITYSRMRHHVLQAVKTLEKQGYDPEVIDLISLKPLDFDTIGASVRKTHKVIVVEESMRTAGIGAEVIASINDRLFDELDAPVLRLSSQDIPTPYNGNLERLTIIQPEQIVEAVEKMVALRV

SEQ ID NO: 20139 - protein, 173 aa, Cryptococcus neoformans var. neoformans
MLAAKNCLNKSLRALRPLTERSASPVIARSARASPLLRSRATSARTPPTSTLSHDEYEHVSERDMETLNESLEIFCEDFGNGNWEIEYSSGVLNLTLPPYGTYVLNKQPPNLQIWMSSPVSGPSRFEYINGSWVHHRKEGVKLGELLSGELKEILEKSGNEAAAGVWDGVGLP

SEQ ID NO: 20140 - protein, 327 aa, Arabidopsis thaliana
MGGSREFRAEEHSNQFHSIIAMAIWLGAIHFNVALVLCSLIFLPPSLSLMVLGLLSLFIFIPIDHRSKYGRKLARYICKHACNYFPVSLYVEDYEAFQPNRAYVFGYEPHSVLPIGVVALCDLTGFMPIPNIKVLASSAIFYTPFLRHIWTWLGLTAASRKNFTSLLDSGYSCVLVPGGVQETFHMQHDAESDDFLIELYLTLQNVFLSRRRGFVRIAMEQGSPLVPVFCFGQARVYKWWKPDCDLYLKLSRAIRFTPICFWGVFGSPLPCRQPMHVVVGKPIEVTKTLKPTDEEIAKFHGQYVEALRDLFERHKSRVGYDLELKIL

SEQ ID NO: 20141 - protein, 494 aa, Sinorhizobium meliloti 1021
MQNLPKLSMYIDGQWVAPASGEYIETVDPFTARPWALVPRGNAEDADRAVRAAHRAFSQGPWGKMHPTERGRIIQRFAALIEEHADALADIEVRDNGRLLAEMTHQIRYIPRWYHYYAGFADKIEGTLHPCDKPALSFSRHEPLGVCVGIVPWNAPLLLFSLKAAPALAAGNTLVMKPAEFTSATALKLMELVEKAGFPTGVINVVTGYGPEVGEPLVTHPLTRHVGFTGSTKTGAHLYSLAAKDVKRVSLELGGKSPNIVFGDADLDNAVRGVVGGIFGAVGQTCIAGSRLLVHRSIHDEFLEKLAVFTKTARIGDPRKVETQIGPIANSMQFEKVLGYIDIARREGAELILGGGRPDLEECGTGYFIEPTIFAGVSNDMRIAREEVFGPVLSAIVFDEPEEALAIANDSEFGLGAGVWTSDMRLALKMSERLEAGSVWVNTYRDISYTTPFGGYKKSGIGRENGVAGIYEYLQTKAVWLSTAEEIANPFVIG

SEQ ID NO: 20142 - protein, 303 aa, Bacillus anthracis str. 'Ames Ancestor'
MIYTVTLNPSIDYVVQVNSLDLGAVNRAEKDMKFPGGKGINVSRVLHRLGVENVALGFTGGFTGRFIKDVLQTEGVITNFVQVDGDSRINVKIKGQEETELNGQGPSVTNEQFEQLMKQIESMQKGDYVVLAGSVPASIPTTFYESIAAFGAEKGIRVVVDASGSALQHVVKNKPFLIKPNHHELGELFGVEISTAEDILPYGRKLIEQGVEHVIVSMAGDGALLFTAEGIYEATVPKGVVINSVGAGDSLVAGFVGKYEQTKDIEKAFQYGVATGSATAFSADLCEKEKVEELLSQVIVTKR

SEQ ID NO: 20143 - protein, 303 aa, Mycobacterium tuberculosis CDC1551
MTKWTAADIPDQTGRTAVITGANTGLGFETAAALAAHGAHVVLAVRNLDKGKQAAARITEATPGAEVELQELDLTSLASVRAAAAQLKSDHQRIDLLINNAGVMYTPRQTTADGFEMQFGTNHLGHFALTGLLIDRLLPVAGSRVVTISSVGHRIRAAIHFDDLQWERRYRRVAAYGQAKLANLLFTYELQRRLAPGGTTIAVASHPGVSNTELVRNMPRPLVAVAAILAPLMQDAELGALPTLRAATDPAVRGGQYFGPDGFGEIRGYPKVVASSAQSHDEQLQRRLWAVSEELTGVVYPVG

SEQ ID NO: 20144 - protein, 365 aa, Kalanchoe pinnata
SDSGKDAGRLSAAWQLYKAQEELIEVAKKHGVKLTMFHGRGGTVGRGGGPTHLAILSQPADTIQGSLRVTIQGEVIERSFGEAQLCFKTLQRYTAATLEHGMIPPLTPKPEWRALMDEMAVVATERYRSIVFREPRFVEYFRLATPELEYGRMNIGSRPSKREPSGGIESLRAIPWIFAWTQTRFHLPVWLGFGEAFKHVIDKDNKNLLMLQQMYNEWPFFRVTIDLVEMMFAKGNPGIAALYDKLLVSEELLPLGEELRTAYNDTKSYLLKITGHNEILEGNPFLKQRHKLRTAYITTLNVCQAYTLKRIRDPSYRGPVRPPIAKEISEGSVSSAKKLVKLNPTSEYAPGLEDTLILTMKGIAA

SEQ ID NO: 20145 - protein, 337 aa, Wolbachia endosymbiont of Aedes polynesiensis
  misc_feature (90)..(90): Xaa can be any naturally occurring amino acid
  misc_feature (92)..(138): Xaa can be any naturally occurring amino acid
QALEKSLCDKKIQLGINLTKGLGAGALPDVGKGAAEESIDEIMEHIKDSHMLFITAGMGGGTGTGAAPVIAKAAREARAAVNDRAPKEKXIXXXXXXXXXXXXXXXXXXXXXXXXXXXXXXXXXXXXXXXXXXXXXXXNEKTTFSDAFKLADNVLHIGIRGVTDLMVMPGLINLDFADIETVMSEMGKAMIGTGEAEGEDRAISAAEAAISNPLLDNVSMKGAQGILINITGGGDMTLFEVDAAANRVREEVDENANIIFGATFDQAMEGRVRVSVLATGIDGRNNKSETSSISQSEDSEKEKFKWLYSHSESMQDKTLETKPTEQVSEGAKWSSEC

SEQ ID NO: 20146 - protein, 104 aa, Campylobacter upsaliensis RM3195
MGKYIELTSENFATAKEGVALVDFWAPWCGPCKMLSPVIDELASDFEGKAKICKVNTDEQGDLAAEYGVRSIPTLIFFKNGEVVGQLVGAQSKQTIADKINSLL

SEQ ID NO: 20147 - protein, 364 aa, Kalanchoe pinnata
SDSGKDAGRLSAAWQLYKAQEDLVKVAKEFGVKLTMFHGRGGTVGRGGGPTHLAILSQPPDTIHGSLRVTVQGEVIEQSFGEEHLCFRTLQRYTAATLEHSMCPPASPEPEWRELLDEMAVAATKEYRLFVSHEPRFVEYFRLATPELEYGRMNIGSRPSKRKPSGGIESLRAIPWIFAWTQTRFHLPVWLGFGAAFKHVIDKDIKNLLMLQEMYTRWPFFRVTIDLVEMVFAKGDPGIAALYDKLLVSEDLWPFGEQLRNNYNETKNLLLQVAGHKDLLEGNPYLRQRLRLRDSYITTLNACQAYTLKRIRDPNYHVTVRPPLSKEIMESNKAAAELVKLNPTSEYAPGLEDTLILTMKGIAA

SEQ ID NO: 20148 - protein, 364 aa, Kalanchoe pinnata
SDSGKDAGRLSAAWQLYKAQEDLVKVAKEFGVKLTMFHGRGGTVGRGGGPTHLAILSQPPDTIHGSLRVTVQGEVIEQSFGEEHLCFRTLQRYTAATLEHSMCPPASPEPEWRELLDEMAVAATKEYRSIVFHEPRFVEYFRLATPELEYGRMNIGSRPSKRKPSGGIESLRAIPWIFAWTQTRFHLPVWLGFGAAFKHVIDKDIKNLLMLQEMYTRWPFFRVTIDLVEMVFAKGDPGIAALYDKLLVSEDLWLFGEQLRNNYNETKNLLLQVAGHKDLLEGNPYLRQRLRLRDSYITTLNACQAYTLKRIRDPNYHVTVRPPLSKEIMESNKAAAELVKLNPTSEYAPGLEDTLILTMKGIAA

SEQ ID NO: 20149 - protein, 289 aa, Glycine max
  misc_feature (72)..(72): Xaa can be any naturally occurring amino acid
  misc_feature (78)..(78): Xaa can be any naturally occurring amino acid
MATGSDAGKSAEAVLEWPKQDKKRMLHAVYRVGDLDRTIKRYTERFGMKLLRKRDVPEREVHQWPFLGYGPXEDTNFXALEAGLYKITGGGGGTKPRALGRTQLKIPSIKSSDCDKITRDPGPVKGGSTVIAFAQDPDGYMFELIQRGPTPEPLCQVMLRVGDLDRAIMFYEKALGMKLLRKKDVPQYKYTIAMMGYAEEDKTTVLELTYNYGVTEYNKGNAYAQVAIGTDDVYKSAEAVELVTKELGGKILRQPGPLPGLNTKITSFLDPDGWKVVLVDHADFLKELH

SEQ ID NO: 20150 - protein, 122 aa, Gloeobacter violaceus PCC 7421
MNKIEAIIQPSRLDAVEQALAAIGVQGMTVSRVEGFGRQRGHSVIFRGFGSAAQFLAKLKLEIVVPDEFTETVVERIVQAARTGSVGDGKIFVLPVTQAVRVRTGECDLEAVRFESPAVLIH

SEQ ID NO: 20151 - protein, 365 aa, Kalanchoe pinnata
SDSGKDAGRLSAAWQLYKAQEELIEVAKKHGVKLTMFHGRGGTVGRGGGPTHLAILSQPADTIQGSLRVTIQGEVIERSFGEAQLCFKTLQRYTAATLEHGMIPPLTPKPEWRALMDEMAVVATERYRSIVFREPRFVEYFRLATPELEYGRMNIGSRPSKRKPSGGIESLRAIPWIFAWTQTRFHLPVWLGFGEAFKHVIDKDNKNLLMLQQMYNEWPFFRVTIDLVEMVFAKGNPGIAALYDKLLVSEELLPLGEELRTAYNDTKSYLLKITGHNEILEGDPFLKQRLKLRTAYITTLNVCQAYTLKRIRDPSYQVPVRPPIAKEISEGSVSSANQLVKLNPTSEYAPGLEDTLILTMKGIAA

SEQ ID NO: 20152 - protein, 311 aa, Vibrio cholerae O1 biovar eltor str. N16961
MPVDVIKNICDNVRKNFRSKPVRKVMTAQNIDGTLISQTVRSEVAARVKARVQAGLRAPGLAVVLVGEDPASQVYVGSKRRACEEVGFVSKSFDLPATASEEALLSLVEELNNDPQIDGILVQLPLPAGMDTTKVLESIHPEKDVDGFHPYNVGRLAQRIPKLRSCTPKGIITLLERYNIPLRGKHAVIVGASNIVGRPMTLELLLAGCTTTTCHRFTQDLEGHIRQADILVVAVGKPNFIPGAWIKEGAVVVDVGINRLDTGKLVGDVEYDVARTRASFITPVPGGVGPMTVASLIENTMMACEQFHTQG

SEQ ID NO: 20153 - protein, 373 aa, Kalanchoe pinnata
SDSGKDAGRLSAAWQLYKAQEELVKVAKEYGVKLTMFHGRGGTVGRGGGPTHLAILSQPPDTVHGSLRVTVQGEVIEQSFGEEHLCFRTLQRFTAATLEHGMNPPVAPKPEWRALLDEMAVVATEKYRSIVFKEPRFVEYFRLATPELEYGRMNIGSRPSKRKPSGGIESLRAIPWIFAWTQTRFHLPVWLGFGAAFKHAIEKDVRNLHMLQAMYNEWPFFRVTIDLVEMVFAKGDPGIAALYDKLLVSEDLWSFGERLRTHYDDTKSYLLQIAGHKDLLEGDPYLKQRLRLRDSYITTLNVCQAYTLKRIRDPSYSVTVRPHISKEIMESSSSSSSSSTSNPAYELVKLNTTSEYAPGLEDTLILTMKGIAA

SEQ ID NO: 20154 - protein, 230 aa, Zea mays
MAPSFTSLLSAANSAAAATASRLPSAAAGRASTFVRFPHHPTGWAGASVAAPRTARKRAPGVAYATAATEKSIYDYTVKDIDGKDVPLKKFKNKVLLIVNVASQCGLTTANYTELSHIYEKYKTQGFEILAFPCNQFGAQEPGSNTQIKQFACTRFKAEFPIFDKVDVNGPNTAPIYKFLKSSAGGFLGDLVKWNFEKFLVDKNGKVIERYPPTTSPFQIEKDIQKLLAA

SEQ ID NO: 20155 - protein, 351 aa, Oryza sativa
MAAPPCPPRRPISAPCFLLCFLLGFVAGLFPFAHRHLHLDLHLPLPPPATAILVREDPPSVVVDVDTPLPAAAEERKLLLVVTPTRARPLQAYYLRRLAHTLRLAPSPLLWLVVESGAATRDTAALLRGCGVMYRHLSSPVPDAPQDRPRRRGRRQDRPAVDSRARQRNTALDHIEHHRLHGIVYFADEDNVYSLDLFYHLRDIRSFGTWPVATLPPGKSKTILQGPVCEGSRVVGWHTTDRSKNQRRFHVDMSGFAFNSSKLWDAKNRGHQAWNYIRQLDTAKEGFQETAFIEQLVEDETHMEGVPPGCSKIMNFHLHLEDKNAIYLNGWQTTQNLDVIIPLKKEARPLL

SEQ ID NO: 20156 - protein, 413 aa, Bacillus cereus E33L
MIKKYTCKNGVRIVMENIPTVRSVAIGIWIHAGSRNENEKNNGISHFLEHMFFKGTETRSAREIAESFDSIGGQVNAFTSKEYTCYYAKVLDEHAKYALDVLADMFFNSTFDEEELKKEKNVVCEEIKMYEDAPDDIVHDMLTKATYETHPLGYPILGTEETLNTFTGDTLRQYIKDHYTPENVVVSVAGNIDEAFLQTVEQYFGSYEGTTNREQVHSPIFHFNKVARKKETEQAHLCLGYKGLQMGHEDIYNLIVLNNVLGGSMSSRLFQEVREQRGLAYSVFSYHSSYEDTGMLTLYGGTGSQQLDTLYETMQETLETLKNTGITEKELINSKEQLKGNLMLSLESTNSRMSRNGKNELLLRKHRSLDEIIESVNTVTKENVDELIRNMFTDEFSAALISPDGKLPKGIKL

SEQ ID NO: 20157 - protein, 707 aa, Aspergillus oryzae
MLQDMGAIREDGSDKFFGMENVSLAVSTVIPVIAVVNYPTRTPIESLEAALANTLRYQNFAANLEAEALAEKQKAANAQRPGAPPNQPQKPEDKDSPEYKKKMALQTLPLLETKNNATSYGMSESLFTSLKDLFESVVASQSRIGIIRPQHFLDVLRREHEMFRTAMHQDAHEFLNLLLNEVVANVEAEASKQPEPERSLPPAESADSTELSGSSGSKTPNTTRWVHELFEGTLTSETQCLTCEKVSQRDEVFLDLSVDLEQHSSVTSCLRKFSAEEMLCERNKFHCDNCGGLQEAEKRMKIKRLPRILALHLKRFKYTEDLQRLQKLFHRVVYPYHLRLFNTTDDAEDPDRLYELYAVVVHIGGGPYHGHYVAIIKTQDRGWLLFDDEMVEPVDKNYVRNFFGDRPGLACAYVLFYQETTLEAVMKEQEQENMDLNTSVADINDSTLKQNGYPLSPGLAHVHSASQIPSPSEPARFSNLQRAPTAPPLFPHPEHADSESSPADPSTTASATPPVPPIPDIHSLPLSPKKSDSHFKKERAKEEKERKANEKEKEKQRRRDQEARIREQRREDAEIRAALEASKASKAEEDRRHSPDDTKKSSHGLSRLKRGSKSFSHRLGKDKENRVSSSSHSATPIAEHPPSRNGASESQQQLPNGQSPGSHGLHTRHTGLDEERDTLKDPKHDRSGHHGKWRSFSLKKKSFSILS

SEQ ID NO: 20158 - protein, 147 aa, Brassica napus
MGRKRKHSEAEAAAPVKKDDSAPERPKRTLLGWKDKKEDVEEAKEVSAPSAPGFRNKEKVLVTCSRRISFRYRHLMLNIVSLLPHCKKDSKVEAKSSKGATLNELVELKGSSFCLFFECRKHKDLYMWMVKSPSGPSVKFLVHNGGA

SEQ ID NO: 20159 - protein, 272 aa, Zea mays
MAAQSMLMSTSVNGGRALPSLQAVRPAPYPRLPLPSSSSSSAGYRHSKSVSVKTLALFGKSKVKTAPAKKAAAPKPKPKVEDGIFGTSGGIGFTKENELFVGRVAMLGFAASLLGEAITGKGILAQLNLETGIPIYEAEPLLLFFILFTLLGAIGALGDRGRFVDEEVTGLDKAVIQPGKGFRGALGLSEGGPLFGFTKSNELFVGRMAQLGVAFSIIGEIITGKGALAQLNIETGVPINEIEPLVIFNVLFFFIAAINPGNGRFIIGEEEE

SEQ ID NO: 20160 - protein, 289 aa, Archaeoglobus fulgidus
MKLIVGTRGSKLALAQTNKVAERLKERYEVEIRIVKTAGDIMKDKPLYEFKGMGAFVRALDTALAEGKVDVAVHSFKDVPSQRVEGTVVAAVIERDSPCDVLISRDGSTLEELDEGAVVGTSSLRRRAQLSRLRGDLRFENLRGNLDTRLRKLREGNYDAIVVAEAGLKRLGLDREVEYQPFPPEVIVPPANQGIIAIATRKGEEDLVAFLNDEKTWLEAMVERAVIKELGVGCAVPVGVYAEAQSRVRLICEILDKKYLRVEEKLSKDTAVEEAAEIGKDLRKEIYGG

SEQ ID NO: 20161 - protein, 619 aa, Prosthecochloris vibrioformis
MIAFTDIVGMDLAKQALMLLAVDPSLGGVVIPSTVGSGKSTLARAFADILPEGTPFVELPLNVTEDRLIGGVDLEATLASGQRVVQHGVLSKAHKGVLYVDSLSLLDSSAVSHIMDAMSRGAVIVEREGLSEVHPADFMLVGTYDPSDGEVRMGLLDRIGIIVPFTPVNDYRARKQIVSLVMGTRNEEDTQDELRMLRGIIGAAREQLHHVSITNEQIKGLIQTAISLGVEGNRVDIFAIRAALANAALGQRTEVDDEDLKLAVKLVLVPRATRMPEREPSEEEMQQEEPPPPEEQPEQEGEDENAPPDETDSDADEEQEETPDMIEELMMDAIETDLPENILNISLASKKKAKSGSRGEALNNKRGRFVRSQPGEIKSGKVALIPTLISAAPWQAARKAEKAKKGIKTGALVISTDDVKIKRFRDKSGTLFIFMVDASGSMALNRMRQAKGAVASLLQNAYVHRDQVSLISFRGKQAQVLLPPSQSVDRAKRELDVLPTGGGTPLASALLTGWETAKQARTKGITQIMFVMITDGRGNIPLAAAVDPAAAKAPKEELEKEVEALALSIQSDGIASIVVDTQMNYLSRGEAPKLAQKLGGRYFYLPNAKAEQIVEAALS

SEQ ID NO: 20162 - protein, 478 aa, Oryza sativa (japonica cultivar-group)
MTSLPDRGVSSSSSDPLCEGNIAPCSSSSEQKEDCSLKQSKTSILSCVFNSPFNIFEAHQDSSANKSPKSSSGSYDWSRVLRRIVCSGSMWRFLGTSKVLTSSDVWFLGKCYKLSSEESSSDSDSESGHATFLEDFSSRIWITYRRGFDAISDSKYTSDVNWGCMVRSSQMLVAQALIFHHLGRSWRRPLEKPYNPEYIGILHMFGDSEACAFSIHNLLQAGNSYGLAAGSWVGPYAMCRAWQTLVRTNREQHEVVDGNESFPMALYVVSGDEDGERGGAPVVCIDVAAQLCCDFNKGQSTWSPILLLVPLVLGLDKINPRYIPLLKETFTFPQSLGILGGKPGTSTYIAGVQDDRALYLDPHEVQMAVDIAADNIEADTSSYHCSTVRDLALDLIDPSLAIGFYCRDKDDFDDFCSRATELVDKANGAPLFTVVQSVQPSKQMYNQDDVLGISGDGNINVEDLDASGETGEEEWQIL

SEQ ID NO: 20163 - protein, 410 aa, Bacillus cereus E33L
MKIIVQKFGGTSVRDENGRKHALHHIKKSLDAGYKVVTVVSAMGRKGEPYATDTLLSLVNQEESHISNREQDLLLSCGELISAIVFSNMLNENGIKAAALNGAQAGFVTNDDFTNAKIIEMNCDRIHEELENIDVIVVTGFQGQTKKGDTTTLGRGGSDTSASALGVALHAEYIDIFTDVEGVMTADPRIVKDARHLQTVTYNEICNMAYQGAKVVHPRAVEIAMHAKVPLRVRSTYSDSEGTLIAAYDGATKGQDVEERPVTGIAHVSNVTQIKVLEKETAYDIQQHVFKEMANEGISVDLINISPTGVAYTVNDNVSARAVEVLKQLGYEPIVTEHCAKVSIVGAGMAGIPGVTAKIVTALAEKGIQILQSADSHTTIWVLVKETDLVEAVNALHSAFELSKEKQLEQ

SEQ ID NO: 20164 - protein, 447 aa, Methylobacillus flagellatus KT
MKYQSAHDFLAVVAQKNPGQPEFLQAVTEVVESLWPFISANPRYAEHGILDRLVEPERAILFRVSWVDDKGEVQVNRGYRIQHNGAIGPYKGGLRFHPSVNLSILKFLAFEQTFKNALTTLPMGGGKGGADFDPKGKSNGEVMRFCQAFISELFRHVGSDTDVPAGDIGVGAREIGFMTGMIKKLTNRADCVLTGKGLSYGGSLIRPEATGYGTVYFAEEMLRHSGRTIAGMRVAVSGSGNVAQYAIEKALALGAKVITASDSSGTVIDEAGFTAEKLQILMQVKNVEYGRIKDYAERVGALYVPGGSPWSVKAEVALPCATQNELTKADAATLIANGVLCVAEGANMPCTAEAMKLFDEHHILYAPGKATNAGGVATSGLEMTQNAMRLSWTREEVDARLFDIMKGIHDACVQYGTREDGSVNYVDGANIAGFVKVAEAMLAQGVV

SEQ ID NO: 20165 - protein, 129 aa, Listeria monocytogenes str. 1/2a F6854
MTAKMLHTCIRVKNLTESITFYEKALGLKEVRRKDFPDFEFTLVYMAFEEGGFELELTYNYDQKEAYDLGNGYGHLAVGVPDVRALLKEHQEAGFTVTDLKGLPGEDPFYYFLTDPDGYKTEIIQDGAL

SEQ ID NO: 20166 - protein, 496 aa, Frankia sp. CcI3
MAAPQNYLAVIKVVGIGGGGVNAVNRMIEVGLKGVEFIAINTDAQALLMSDADVKLDVGRELTRGLGAGADPEVGRQAAEDHREEIEEVLKGADMVFVTAGEGGGTGTGGAPVVANVARSLGALTIGVVTRPFTFEGRRRATQADTGIDTLRNEVDTLIVIPNDRLLAMTDRDISVLDAFRSADQVLLSGVQGITDLITTPGLINLDFADVKTVMSHAGSALMGIGRARGDDRATVAAEQAIASPLLEASMDGAQGVLLNISGGSDLGLFEINAAAELVADAAHPEANIIFGAVIDDALGDEVRVTVIAAGFDTVQDRRTRTLNAAGQRRPPGPAGGSAAGPPTVAAPATSPATTILPPLPTISTVPSRTPPAAPATPAAPPPVAPVPPPTPSYLQAPPPPIAPSNVGHYHPEPLPGAPASNEPAAAATAESTVIPTIESRLAPPNREPVEPPVDQAYGQHRPEPPRTAPRPTYPPRRPVRPVADDDELDVPDFLK

SEQ ID NO: 20167 - protein, 828 aa, Salmonella typhimurium LT2
MKLSRRSFMKANAVAAAAAAAGLSVPGVARAVVGQQEAIKWDKAPCRFCGTGCGVLVGTQQGRVVACQGDPDAPVNRGLNCIKGYFLPKIMYGKDRLTQPMLRMKDGSYHKDGEFTPVSWEQAFDVMEEKFKTSLKEKGPEAIGMFGSGQWTIWEGYAAAKLFKAGFRSNNIDPNARHCMASAVVGFMRTFGMDEPMGCYDDIEQADAFVLWGSNMAEMHPILWSRITNRRLSDPNVKVAVLSTFQHRSFELADNGIVFTPQSDLVILNYIANYIIQNNAVNQDFFTKHVNLRKGATDIGYGLRPTHPLEKAAKNPGSDASEPMSFDEYKAFVAEYTLDKTAEMTGVPKDQLEQLAQLYADPNKRVISYWTMGFNQHTRGVWANNLVYNLHLLTGKISQPGCGPFSLTGQPSACGTAREVGTFSHRLPADMVVTNEKHRDICEKHWQIPAGTIPAKVGLHAVAQDRALKDGKLNVYWVMCNNNMQAGPNINEDRMPGWRDPRNFIIVSDPYPTVSALSADLILPTAMWVEKEGAYGNAERRTQFWRQQIKAPGEAKSDLWQLVQFSRRFKTEEVWPEALLAQKPELRGKTLYDVLFATPAVSKFPLSELKEDQLNDESRELGFYLQKGLFEEYAWFGRGHGHDLAPFDDYHNARGLRWPVVEGKETQWRYSEGNDPYVKAGEGYKFYGKPDGKAVIFALPFEPAAESPDNEYDLWLSTGRVLEHWHTGSMTRRVPELHRAFPEAVVFIHPLDAKARDLRRGDKVKVSSRRGEVISIVETRGRNRPPQGLVYMPFFDAAQLVNNLTLDATDPLSKETDFKKCAVKLAKV

SEQ ID NO: 20168 - protein, 288 aa, Chryseobacterium indologenes
MRQLKITKQVTNRETASLDKYLQEIGKVELITADEEVELAQRIRAGDRAALEKLIKANLRFVVSVSKQYQNQGLSLPDLINEGNLGLMKAAKRYDETRGFKFISYAVWWIRQSILQALAEQSRIVRLPLNKIGSINKINKAYAHLEQENERPPSPEELAEVLDMSEEDIKESMKNSGRHLSMDAPLVEGEDSNLYDVLRSGESPSPDKDLMLESLQIEIERALNTLTPREADLVRLYFGLNGKHPMTLEEIGETFDLTRERVRQIKEKAIKRLKHNTRSKILKSYLGK

SEQ ID NO: 20169 - protein, 337 aa, Wolbachia endosymbiont of Aedes polynesiensis
  misc_feature (35)..(37): Xaa can be any naturally occurring amino acid
  misc_feature (40)..(40): Xaa can be any naturally occurring amino acid
  misc_feature (335)..(336): Xaa can be any naturally occurring amino acid
QALEKSLCDKKIQLGINLTKGLGAGALPDVGKGAXXXSIXEIMEHIKDSHMLFITAGMGGGTGTGAAPVIAKAAREARAAVNDRAPKEKKILTVGVVTKPFGFEGVRRMRIAELGLEELQKYVDTLIVIPNQNLFRIANEKTTFSDAFKLADNVLHIGIRGVTDLMVMPGLINLDFADIETVMSEMGKAMIGTGEAEGEDRAISAAEAAISNPLLDNVSMKGAQGILINITGGGDMTLFEVDAAANRVREEVDENANIIFGATFDQAMEGRVRVSVLATGIDGRNNKSETSSISQSEDSEKEKFKWLYSHSESMQDKTLETKPTEQVSEGAKWSXXC

SEQ ID NO: 20170 - protein, 326 aa, Pisum sativum
MAEGKGRVCVTGGTGFLGSWIIKSLLENGYSVNTTVRPDPKRKRDLSFLTNLPGASERLHFFNADLSDPKSFSAAVKGCVGVFHTATPVNFAVSEPEKIVTKRTVDGALGILKACVNSKTLKRFIYTSSGSAVSFNGKNKEVLDETDWSDVGLLKSVKPFGWSYSVSKTLAEKAVLDFGQQNGIDVATLILPFIVGSFICPKLPDSVDKALVLVLGKKEQIGVTRFHMVHVDDVARAHIYLLENSVPGGRYNCAPFIVTIEEMSQLFSAKYPEFQILSVDELKEIKGARLAELNSKKLVAAGFEFKYSVDDMFEDAIQCCKEKGYL

SEQ ID NO: 20171 - protein, 338 aa, Wolbachia endosymbiont of Aedes polynesiensis
  misc_feature (29)..(29): Xaa can be any naturally occurring amino acid
  misc_feature (36)..(36): Xaa can be any naturally occurring amino acid
  misc_feature (40)..(40): Xaa can be any naturally occurring amino acid
  misc_feature (335)..(335): Xaa can be any naturally occurring amino acid
QALEKSLCDKKIQLGINLTKGLGAGALPXVGKGAAXESIXKIMEHIKDSHMLFITAGMGGGTGTGAAPVIAKAAREARAAVNDRAPKEKKILTVGVVTKPFGFEGVRRMRIAELGLEELQKYVDTLIVIPNQNLFRIANEKTTFSDAFKLADNVLHIGIRGVTDLMVMPGLINLDFADIETVMSEMGKAMIGTGEAEGEDRAISAAEAAISNPLLDNVSMKGAQGILINITGGGDMTLFEVDAAANRVREEVDENANIIFGATFDQAMEGRVRVSVLATGIDGRNNKSETSSISQSEDSEKEKFKWLYSHSESMQDKTLETKPTEQVSEGAKWSXNVC

SEQ ID NO: 20172 - protein, 230 aa, Ashbya gossypii ATCC 10895
MPAPDPARRDVLISKSLSYLLRHGALKEQLPIDSDGYVPVSAVLAHNRLKSHRCSFSDLQRIVENNEKKRFHMRPGPDGQEYICATQGHTIEQVLPSADVLTQLIDPGELPAQLIHGTNLRNAVLILDSGCIKRMQRNHVHLSHGVTGKDCVISGMRLSSTVHIYLNTEGILDHLRLYKSRNDVYLTPSDIPVSMFKKVVVRTSRNTKADDVTTLTQRLEQLDVPFEISD

SEQ ID NO: 20173 - protein, 900 aa, Acidobacteria bacterium Ellin345
MSPKDEQRPLWSAADQHERLLELTAATDDPRKEIPLRRDVRSLGILLGRVLVEQAGPQTFNAVETLRNVLIKHRERTRIESGTGTLLEEAQEFVASLDLATMYRISKAFGTYFELTNLAETNHRKRRRRASQLHAEQPALPGSFRGTLQHLRETAISSEQVLQALSELQVVPVFTAHPTEITRRTTLLKRRKIAETLERLDVLPLSEMDAEEHEARLMAEITALWQSDEVRLHRPTVDDEIRGGIRYFNLSLFAAIPELYEEIGAALRATLEVEIEPTDLPIMLRFGSWIGGDRDGNPLVTAKETTDAAELAREAVLHHYVEQARVIGRALSISEHQVGISDNLRALVEDYEKLIPQRASEYERTPKPEYYRRALLLMAMRLSLASREPDHAAAYRDAFEFEKDLRLLHASLCEHNGARLSRQRLDALLLKVRTHGFRLHTLDIRQHARVHNEVLSGETNDAQQVIETLRTVSSLKQRFGDIVRQYVISGAETASDLLGVCELANRAGVSTVGGDTDSGLMPVPLFESIDALRKSAAVMREVWADRAYRKLVDSWGGWQEVMLGYSDSNKDGGMLTSMWEIYNAHHALHDAAREAGVKLRLFHGRGGTVGRGGGPTHSAILAQPAGDFTGQIRITEQGEVLNWKYADPLLAEWNLEVVLAAALEARLRPTSAPQAAWMAAMDEMSREAFSFYRQHIAEDPALLEYFELATPVNELEFARAGSRPARRSSSRSLNDLRAIPWVFGWMQSRHAVPAWFGVGHAFETFGQTELLREMLGGFPLFLDMVQNVELAMAKADLSIAKLYSALVPDRSLRERIFDKLADEFERTRRQILSLKQQSELLEKNPVLLRSIRLRNPYVDPLSLVQVELLRRKRSGMESEELNYALGSTMNGIAAGLHNTG

SEQ ID NO: 20174 - protein, 812 aa, Arthrobacter sp. S37
MTTATRKVVPMTELRQTQPTTNLPGLGRRTFLQGAAVSAAVIATGALFRPAAAATGDPVLRLTYDQPNGSTTVLDEVGRSNFTVHVSNNPAERVPGVRGNAFRTDGFSTWATGQFATPLTTQMTIQTWIALESYPSDSEQPYDALTPSSIIYQRTNDAGFDIAINTYGEWWFTAHVGGQWRTVKAPWLFPLYEWVQIAAVVDGDAGQLRLHLDDAAGPKVASVAIPTGSRFTQAAGAPLVVGKASKDVTTGVFLINALNAAYDDTRIYDIARGAAALTGEYTSGIAGASPAHDVALQVTGLRFADDILRPRYHAMPPANWTNEPHGLVRHDCSYHMFYQRTPNGPFKWQMNWGHMTSTDLVHWTNMPDALRPELNDREARLGAVAGSGLSGQGSKGIWSGDVVSVDGTAHAFFTTVNFGGPFDPGITRASSTDPDLLTWTKASTGVIDKNAPAHVADFRDPYLWQEGGTWHMIIGAATDAGGALEHYTTQDIQGQWTRASRPFSTVSFASMDIGSAIWEMPVFEKIGTHAGRDKYVLVVSPIGRSVSKLSEPYTRSVYWTGTWNGSQFTPDYARPKSLDLIHGHLSPTVAHGPDGKLVAIGIVDERSSSKMQLDLGWAHTFSAPREWRLLEDGQTLGQRPIAQLMTLRAGSAQTATNVAVTGEHNLAAAGNQVEILAKVDPASTGARYGLCIGASPDGSEITRIYYDGNDIVIDKTRSSRNFENEEAVLLRGAYDEAVFGKPHTFHVFVDHSVIDVFINDAAAFSNRIYPTSRGADGAAASTGLRLYSEGGQTRFTQTDVWQLQSAWPTPAF

SEQ ID NO: 20175 - protein, 143 aa, Streptococcus pneumoniae R6
MRLEQDCPVFLKIKEKDMASKMLHTCLRVENLEKSIAFYQDAFGFKELRRRDFPDHAFTIVYLGLEGDDYELELTYNYDHGPYVVGDGFAHIALSTPDLEALHQEHSAKGYEVTEPNGLPGTTPNYYFVKDPDGYKVEVIREK

SEQ ID NO: 20176 - protein, 373 aa, Kalanchoe pinnata
SDSGKDAGRLSAAWQLYKAQEELVKVAKEYGVKLTMFHGRGGTVGRGGCPTHLAILSQPPDTVHGSLRVTVQGEVIEQSFGEEHLCFRTLQRFTAATLEHGMNPPVAPKPEWRALLDEMAVVATEKYRSIVFKEPRFVEYFRLATPELEYGRMNIGSRPSKRKPSGGIESLRAIPWIFAWTQTRFHLPVWLGFGAAFKHAIEKDVRNLHMLQAMYNEWPFFRVTIDLVEMVFAKGDPGIAALYDKLLVSEDLWSFGERLRTHYDDTKSYLLQIAGHKDLLEGDPYLKQRLRLRDSYITTLNVCQAYTLKRIRDPSYRVTVRPHISKEIMESSSSSSSSSTSNPAYELVKLNTTSEYAPGLEDTLILTMKGIAA

SEQ ID NO: 20177 - protein, 555 aa, Acidobacteria bacterium Ellin345
MPTDVIMPQMGESIFEGTITKWLKQPGDQVQRDEPLFEISTDKVDAEIPAPAAGILKEIKAQAGQTVQVNTVVAIIDAAGSATTSAPKPAAAAPPKSAPQPDGVSSSAPSTSAPSVPAAGPKTDVVMPQMGESIFEGTITKWLKNVGDTVQRDEPLFEISTDKVDAEIPAPVAGVLSEIKVQAGATVQVNTVVATIGGAAGASARAPQAAAPAPSAPAPAAPAPQAPAAAEPEEEEISASGDRVRTSPLVRKMAKEANVDLGKVRGTGMGGRITKEDIQAFVEKQKTAPTPTPQPQAAQPSAPAPAPSAPVAATPNKFAGTPGAIEPMSVMRKKIADHMVMSKRTSAHVHGVFEVDFTKIVKLREKNKNSFQEKTGLKLTYTPFYARAVAHALRAWPIINASVEGENIHYKKDINLGIAVALDWGLIVPVVKQADGLSFVGLQRAITDLGERARAKKLKPEDVQGGTFTITNPGIFGAKFGMPIISQPQLAILGIGAITKVPMVVTDKDGNDSIAIRSRCHISIGYDHRVIDGAVADQFMVVVRDYLQNWNEPLI

SEQ ID NO: 20178 - protein, 325 aa, Staphylococcus epidermidis ATCC 12228
MKLMNKIIVPVTASALLLGACGSNATESKDNTLISSKAGDVKVADVMKKMGKEQIANTSFSIVLNKVLADKYKDKVDTKDIDKDIKKEEKQYGGKDQFESMLKQQGMSFDDYKEQKKLSAYQKQLLLDKVNVSDKEIKENSKKASHILIKVKSKSSDKEGLSDKKAKEKAEKIQKEVEKNPNKFGEIAKKESMDSSSAKKDGSLGYVIKGQMVDSFEKALFKLKEGEVSKVVKTDYGYHIIKADKETDFNSEKSNIKQKLIEEKVQKKPKLLTDAYKELLKEYKVDYKDRDIKKAIEDSILDPDKIKQQQQQQSQGGSGLTNSGS

SEQ ID NO: 20179 - protein, 230 aa, Triticum aestivum
  misc_feature (114)..(114): Xaa can be any naturally occurring amino acid
  misc_feature (177)..(177): Xaa can be any naturally occurring amino acid
  misc_feature (198)..(198): Xaa can be any naturally occurring amino acid
MAAAAKIAPSMLSSDFANLASEAERMVRLGADWLHMDVMDGHFVPNLTIGAPVIESLRKHTKAYLDCHLMVTNPSDYVEAFGKAGASGFTFHIEVARDNWKELTQSIKAKGMRXLPGVSLKPGTPVEDVFPLVEAETPVELVLVMTVEPGFGGQKFMPEMMDKVRTLRKKYPSLDIXVDGGLGPSTIDAAASAAHWWXGANCIVAGELRVRRRRTPGEVISALRKKRGGV

SEQ ID NO: 20180 - protein, 106 aa, Mesorhizobium loti MAFF303099
MATVKVDINNFQSEVLESAAPVVVDFWAEWCDPCKMIAPSLEEISVEMESKIKVAKLNIDENPELAAQLGVRSIPALAIFKGGEVADFSVGAKPKTALLNWISNAA

SEQ ID NO: 20181 - protein, 198 aa, Zea mays
MAASDVEYRCFVGGLAWADKIGSESPAADGVGDAARKRPSGDVGPTPGPADKRRRPEHPSSSSAGSRDRHHHHHGRRPPSSADEKVRASHILIKHEGSRRKASWRDPEGVAISATTRDDAADLARALRDQIVSGDREFEDVAAENSDCSSAKRGGDLGSFGRGKMQKPFEKAAFALKVGEISDVVDTESGVHIIKRTG

SEQ ID NO: 20182 - protein, 568 aa, Cichorium intybus
MCSERRVKEILGIWVLSLCLVWVQNGVGVHSSSPTEESQPYRTGFHFQPPKNWINDPNGPMYFNGVYHLFYQYNPYGPLWGNISWGHSISYDLVNWFLLEPALSPKEPYDINGCLSGSATILPGPRPIILYTGQDVNNSQVQNLAFPKNLSDPLLKEWIKWSGNPLLTPVDDIKAGQFRDPSTAWMGPDGKWRIVIGSEIDGHGTALLYRSTNGTKWIRSKKPLHFSSKTGMWECPDFYPVTNGDKKGLDTSVQGNNTLHVLKVSFNSREYYVIGTYDPIKDKFSVVTNDFMVSNTQFQYDYGRYYASKSFYDSVNQRRVIWGWVNEGDSESDAVKKGWSGLQSFPRSIWLSNNRKQLVQWPVDEILKLRTKQVNITNRELAAGELLKIPSITASQADVEVSFSLTNLTEIELIDSEVVDPQLLCAQKNVSISGKFGPFGMLILASKNLTEQTAVFFRVFKGPNKFLVLMCSDQSRSSIAQEVDKSIYGAFLDLDPLHEKIPLRSLIDHSIVESFGGEGIACITSRVYPKLAINEQAELYVFNNGTQSVTMSTLNAWSMKRAQIVPIG

SEQ ID NO: 20183 - protein, 373 aa, Kalanchoe pinnata
SDSGKDAGRLSAAWQLYKAQEELVKVAKEYGVKLTMFHGRGGTVGRGGGPTHLAILSQPPDTVHGSLRVTVQGEVIEQSFGEEHLCFRTLQRFTAATLEHGMNPPVAPKPEWRALLDEMAVVATEKYRSIVFKEPRFVEYFRLATPELEYGRMNIGSRPSKRKPSGGIESLRAIPWIFAWTQTRFHLPVWLGFGAAFKHAIEKDVRNLHMLQAMYNEWPFFRVTIDLVEMVFAKGDPGIAALYDKLLVSEDLWSFGERLRTHYDDTKSYLLQIAGHKDLLEGDPYLKQRLRLRDSYITTLNVCQAYTLKRIRDPSYRVTVRPHISKEIMESSSSSSSSSTSNPAYELVKLNTTSEYAPGLEDTLILTMKGIAA

SEQ ID NO: 20184 - protein, 451 aa, Shigella flexneri 2a str. 301
MTFFVCFLAALAGLLFGLDIGVIAGALPFIADEFQITSHTQEWVVSSMMFGAAVGAVGIGWLSFKLGRKKSLMIGAILFVAGSLFSAAAPNVEVLILSRVLLGLAVGVASYTAPLYLSEIAPEKIRGSMISMYQLMITIGILGAYLSDTAFSYTGAWRWMLGVIIIPAILLLIGVFFLPDSPRWFAAKRRFVDAERVLLRLRDTSAEAKRELDEIRESLQVKQSGWALFKENSNFRRAVFLGVLLQVMQQFTGMNVIMYYAPKIFELAGYTNTTEQMWGTVIVGLTNVLATFIAIGLVDRWGRKPTLTLGFLVMAAGMGVLGTMMHIGIHSPSAQYFAIAMLLMFIVGFAMSAGPLIWVLCSEIQPLKGRDFGITCSTATNWIANMIVGATFLTMLNTLGNANTFWVYAALNVLFILLTLWLVPETKHVSLEHIERNLMKGRKLREIGAHD

SEQ ID NO: 20185 - protein, 620 aa, Candida albicans
MSEQAQPQASADQQQHQHNHHHHHHHHHHNENQSQQQVPIDPAANPANRIGRYQILKTLGEGSFGKVKLAQHLGTGQKVALKIINRKTLAKSDMQGRVEREISYLRLLRHPHIIKLYDVIKSKDEIIMVIEFAGKELFDYIVQRGKMPEDEARRFFQQIIAAVEYCHRHKIVHRDLKPENLLLDDQLNVKIADFGLSNIMTDGNFLKTSCGSPNYMPAPEVISGKLYAGPEVDVWSAGVILYVMLCGRLPFDDEFIPALFKKISNGVYTLPNYLSAGAKHLLTRMLVVNPLNRITIHEIMEDDWFKQDMPDYLLPPDLSKNKNSKIDVDEDVIRALSVTMGYDRDCKIVNVIEKANKQVAAGNSSSQQSKSSNEILDAYLLMKENHALVKDLKKSKSENIESFLSQSPPPSPFPNRGSTSSAPGVQQSLTYQTLATVPDLSTLPNSTIAILPTSLPSIHRAYMAETKQNGDPSQQHAPPPTKKSKTRWHFGIRSRSYPLDVMGEIYRALKNLGAEWAKPTEEELWTIRVRWKYDTSAQFECGSAPNLMKMQIQLFQLEPNNYLVSFKFSGWESAHGNAGTDSPQSHRQQDLDEVGSFSAYPFLHLATRLIMELAVNSQSG

SEQ ID NO: 20186 - protein, 454 aa, Saccharomyces bayanus
MSEPEFQQAYDEVVSSLEDSTLFEQHPKYRKVLPIVSVPERIIQFRVTWENDKGEQEVAQGYRVQYNSAKGPYKGGLRFHPSVNLSILKFLGFEQIFKNSLTGLDMGGGKGGLCVDLKGRSNNEIRRICYAFMRELSRHIGQDTDVPAGDIGVGGREIGYLFGAYRTYKNSWEGVLTGKGLNWGGSLIRPEATGYGLVYYTQAMIDYATNGKESFEGKRVTISGSGNVAQFAALKVIELGGTVVSLSDSKGCIISETGITSEQVADISSAKVNFKSLEQIVGEYSTFTENKVQYISGARPWTHVQKVDIALPCATQNEVSGDEAKALVAQGVKFVAEGSNMGSTPEAIAVFETARATASTLKESVWYGPPKAANLGGVAVSGLEMAQNSQRITWSSERVDQELKKIMVNCFNECIDSAKKYTKEGNALPSLVKGANIASFIKVSDAMFDQGDVF

SEQ ID NO: 20187 - protein, 412 aa, Thiomicrospira crunogena XCL-2
MKMRRVVMTGVGCVTPLGNTVEETWSGLLKGQSGIDFLTTFDTENFAVKFGGEIKGFDITEYIMAKEAKKMDPFIHYGLAAGTQALKDSGLEVTDDNACRIGVSIGSGIGGIGSIEKQHGIMDKSGPRRVSPFFVPSSIINMVSGNLSIMHGLKGPNMAIGTACATGTHSIGDAYRMIQFGDADVMIAGGAEHATTQLGVAGFAAAKALSTRNDDPKAASRPWDQGRDGFVLSDGAGAVVLEEYEHAKARGAEIYCEIVGFGMSGDAYHMTKPADGGEGGARCVTNALNNAGITPDQVDYINAHGTSTPAGDVCEASAIKSVFGEHAHRLAVSSTKSMTGHALGAAGAMEAVFTALAIKEQVLPPTINLETPAEGCDLDFVPGEARQAKVTYAVSNSLGFGGTNASLVFGKV

SEQ ID NO: 20188 - protein, 248 aa, Bdellovibrio bacteriovorus HD100
MYKLVLIRHGESVWNQENRFTGWQDVDLSEKGRAEALKGGKALREKGFSFDVAYTSVLKRAIKTLNFVLDEVDQVWLPVHKDWRLNERHYGALQGLNKAETAARHGEEQVKIWRRSYDTPPPPMEVSDPRHPSHDPRYKNVDAQLLPSNESLKDTVARFLPLWDGTIAPAVKSGKNVLIVAHGNSLRALMQHLEGMTPDEIMGVNMPTGIPMMYELDANLKVLKKEFIGDPDEVKAAIEAVANQGKAK

SEQ ID NO: 20189 - protein, 368 aa, Bartonella quintana str. Toulouse
MTYDQKKFVSALRAFERGEILVVTDDNDRENEGDLTVAAVHCTEEKMAFIIRHTTGIVCAPMLKEEAQRFNLTPMVSDNNSAHRTQFTVTIDFKHGTTTGISAHDRTLAVRNLANSNAGASDFVRPGHIFPLIAHEGGVLMRSGHTEAAVDLCKLANLPPVGVIGELVNDDGSVKHGDEVTKFAQDNRLHIIKVSDLIAYRQRKEMLIKHVGEMHIETPVGPAVFQSYQLPWETVQHVAIIFGDIRDGEDIPVRLHRENIMSDIFGQSSDIITIMRRMMEKEKRGVFVYLREGSVGVQSAVGSQALAMRGLENHVQAIERGEEWRQIGLGSQILKHLGISSVIVYAANERHYLGLEGFGIRVSRTDIL

SEQ ID NO: 20190 - protein, 407 aa, Brassica oleracea var. botrytis
MESRVLLRATETVTGVPQLRRPIRAINRQFSTASSSFTAFAKPIGSIGEGGNLISGRQLRPLLLLDSLPEKREILKPVRAASAEGGDSAGETKVGFLGKYPWLVTGILLLMWYFLNVIFNILNKKIYNYFPYPYFVSVIHLFVGVVYCLVSWSVGLPKRAPVNSDILKVLIPVAVCHAIGHVTSNVSFAAVAVSFTHTIKALEPFFNASASQFLLGQPIPITLWLSLAPVVLGVAMASLTELSFNWLGFISAMISNISFTYRSIFSKKAMTDMDSTNVYAYISIIALFVCLPPAIIVEGPQLLKHGFNDAIAKVGMTKFISDLFWVGMFYHLYNQLATNTLERVAPLTHAVGNVLKRVFVIGFSIVIFGNKISTQTGIGTGIAIAGVALYSVIKAKIEEEKRQGKTA

SEQ ID NO: 20191 - protein, 431 aa, Oryza sativa
MRAVSMAATHRRHRRTDGRLQHNTVTVTEEAGATIPAANMLAAAASVKLSTAGTATAPKMALFKPLHLPPLFAAAAAAAGPRPLSLSARPLYRQQDPLFLASRVASPAPPPPSATADGARPVEAAPAGAAPEEAARRAKIGVYFATWWALNVIFNIYNKKVLNAFPYPWLTSTLSLAAGSAIMLASWATRIAEAPATDLDFWKALSPVAIAHTIGHVAATVSMAKVAVSFTHIIKSGEPAFSVLVSRFFLGEHFPAPVYFSLLPIIGGCALAAITELNFNMIGFMGAMISNLAFVFRNIFSKKGMKGKSVSGMNYYACLSMLSLVILLPFAFAMEGPKVWAAGWQKAVAEIGPNFVWWVAAQSVFYHLYNQVSYMSLDEISPLTFSIGNTMKRISVIVASIIIFHTPVQPINALGAAIAILGTFIYSQAKQ

SEQ ID NO: 20192 - protein, 509 aa, Thermus aquaticus
MLLDADIKAQLAQYLQLLENDIVLTVSAGDDNVSRDMLALIDELTAMSPKIKVEKAKLERTPSFSVNRVGENTGITFAGVPLGHEFTSLVLALLQVSGRPPKVSQDVVDRIQQIRGKHHFETYVSLTCHNCPDVVQALNIMSVLNPDISHTMIDGAAFKEEAEQKGIMAVPTVFLNGKLFASGRMSLEDILAKLGSAPDASSFADKEPFDVLVIGGGPAGATAAIYAARKGIRTGIVAERFGGQILDTLGIENFISVKYTEGPKLAASIEEHVKQYNVDIMNSQRAKRLEKKDLIEVELENGAVLKSKTVVIATGARWRNLGVPGEEEFKNKGVAYCPHCDGPLFEGKHVAVIGGGNSGVEAAIDLAGIASHVTLLEFAPELKADAVLQDRLYSLPNVTVIKNAQTTEITGTDKVNGLTYIDRETGEEHHIELQGVFVQIGLVPNTEWLEGTVERNRFGEIIVDKRGATNIEGVFAAGDCTDSAYKQIIISMGSGATAALSAFDYLIRH

SEQ ID NO: 20193 - protein, 419 aa, Bdellovibrio bacteriovorus HD100
MKQEIKVPAVGESITEATIGSWTKKSGDFVKRNEVLMLLETDKASVEVVAENDGVLTINPGCEAGAVVQIGATVATLDTDAKPAAGAAAPAAETAKAAAPASAPAGAAALPAAAGKDASAHLSPAVNRIVNEKGLDPSAIQGTGKDGRLTKGDVLEAQPGAKPAAPKAAPASAPTGAPALPAAASKQGDKKLVPMTTIRKRISEKLKEAQNTAALLTTFNEVDMGKVMELRSKYKDKFKEKYGVNLGFNGFFVKAVVEALKDFPAVNAWINGTDIEYHNYYNIGIAVSTEKGLMVPNVKDADTLSLAGIELAIRDLAAKGRDGKITPNDLGGGTFSITNGGVFGSLLSTPILNFPQSAILGLHKIQDRPMAINGKVEIRPMMYLALTYDHRIIDGKEAVSFLVKIKELVEDPERLLLEV

SEQ ID NO: 20194 - protein, 611 aa, Photobacterium profundum SS9
MSKPTLLTSPTLSQINVFPVKSIAGLSQSQVWVEKQGISFDRRFMVAKKDGSMITARKHPEMVKVMATIQSHGITLSYPGRMPLILKYADFLMEDTNAEVWGDEFSAYTTTIKADIWFSLLLGQEVQLLYTGEQSNRLRPKINQNVSFADGFPLLVISEASLEALNARSSQRSTMDQFRTNLVVSGTEAFAEDSWKRIRIGEVEFLSVKPCSRCILTTVNPKTAEFNALKEPLATMSKFRADASGDVYFGQNLVALNEGKIKAGDIIEVLETKPKEVYADNSELNLTLTCVEREDIAQDFCTFWLEPTKEQTLPTYQPGQHLPLQLEINGEYISRRYTLSSSPSRPGRYAISVKRVNDGRVSNWLHDHLAVGDTLVAEKPDGTFHLGAHTDKLLLLSAGSGITPMLSMLRYLADHNQVHDVVFYHQCSTQNDIPCLDELELLQEAHPHLTVHVVLSRKDKAWKGLSGRLSAELLSHIPTLAERQVFVCGPDAFMKEAKSLLLAKALPESQYHQEAFGPIQIETGEEKSVTISIDGNIFEGNNQQTVLEQAENAGLKMANSCRAGLCGACKVTLASGEVEQPDVPALFSGEKEEGKVLACCCIPKTDIELVS

SEQ ID NO: 20195 - protein, 463 aa, Oceanobacillus iheyensis HTE831
MIQDKKISSKFIYFFGAFGGILFGYDIGVMTGALPFLQSDWNLQNDPTAIGWITSSLMLGAIFGGALSGQLSDRIGRRKMILIASIIFALGSIMAGISPHNGILFMIVSRIILGLAVGAASALVPAYMSEMAPARLRGRLSGINQTMIVSGMLLSYIVAFVLKDLPETMAWRLMLSLAAVPALILFFGVLRLPESPRFLIKNNKINEARKVLSYIRPKEKIESEISQIQASTKYEEKASQKTSWGTLLSGKYRYLVIAGLGVAAFQQFQGANAIFYYIPLIVENATGNAASSALMWPIIQGIILVLGSLLFLLIADKFNRRTLLTLGGTVMGLSFILPAILNIVIPNASPMMIVVFLSIYVAFYSFTWAPLTWVIVGEIFPLVIRGRSSGLASSFNWIGSFLVGLLFPVMVASMAQEAVFAIFGAICLLGVLFVRLCVPETRGRSLEEIEKIGESKQLHKKTV

SEQ ID NO: 20196 - protein, 206 aa, Bartonella quintana str. Toulouse
MGRTLVLIRHGQSEWNIKNLFTGWKDPGLTEKGHAEAITAGKNLKAAGLKFDIAYTSALQRAQKTAQHILEQMGQSDLPLIKNSALNERDYGDLSGLNKDEVRQQWGEQQVQIWRRSYAVAPPNGESLRDTGARVWPYYLYHIQPHILRSQTVLIAAHGNSLRALIMALEGLNSEEIISQELTTGIPLIYTFNSDSTISSKTIITP

SEQ ID NO: 20197 - protein, 855 aa, Arabidopsis thaliana
MAITDFFAGEIATELLKQLFTISTTAWRYKNTAKQLLTLIDSIRPTIKEIQYSGVELPAHRQAQIGMLFDTLEKGKKLTDKVLSSKRWNLYRQLTLARKMEKLEKTISNFLKNEVFTHILADVHHLRADTSVRLDRVDMSLDRVIQQVGSMKIGGGGLISEAMKRAEAMEIETNDDSEKFGVGLELGKVKVKKMMFESQGGVFGISGMGGVGKTTLAKELQRDHEVQCHFENRILFLTVSQSPLLEELRELIWGFLSGCEAGNPVPDCNFPFDGARKLVILDDVWTTQALDRLTSFKFPGCTTLVVSRSKLTEPKFTYDVEVLSEDEAISLFCLCAFGQKSIPLGFCKDLVKQHNIQSFSILRVLCLAQVANECKGLPLALKVTGASLNGKPEMYWKGVLQRLSKGEPADDSHESRLLRQMEASLDNLDQTTKDCFLDLGAFPEDRKIPLDVLINIWIELHDIDEGNAFAILVDLSHKNLLTLGKDPRLGSLYASHYDIFVTQHDVLRDLALHLSNAGKVNRRKRLLMPKRELDLPGDWERNNDEHYIAQIVSIHTGKCFSTLQIFLVLSCNNHQDHNVGEMNEMQWFDMEFPKAEILILNFSSDKYVLPPFISKMSRLKVLVIINNGMSPAVLHDFSIFAHLSKLRSLWLERVHVPQLSNSTTPLKNLHKMSLILCKINKSFDQTGLDVADIFPKLGDLTIDHCDDLVALPSSICGLTSLSCLSITNCPRLGELPKNLSKLQALEILRLYACPELKTLPGEICELPGLKYLDISQCVSLSCLPEEIGKLKKLEKIDMRECCFSDRPSSAVSLKSLRHVICDTDVAFMWEEVEKAVPGLKIEAAEKCFSLDWLDE

SEQ ID NO: 20198 - protein, 71 aa, Glycine max
ILTLLIQSRKDNVWVGHLLSGYSLPMEDPNQSKGEKNVEIGGTWRQSIKAAYEATYSAFPGGEILAHLDHK

SEQ ID NO: 20199 - protein, 574 aa, Ehrlichia chaffeensis str. Arkansas
MKNRLNQLIGLMEEYEIDVLLLQNTDEYQCEYVHINKQRIRWLCGFSGSNATLIISREGKQNFFTDGRYTLQATRELDCSYYQIHNVCELTPWQWCVENCLSHTVVAYESALFTLSQIRKYEDCGIFLKPIDQILIDKLWIRDFAIEHDIVQHSLEYSGVESYTKSCEVAKYLSDKDAALITNTDVISWMLNIRNKKFLYNPSVLSRAILYKDGRVDLFIDDVYSVNVKYEHLNICSLNNLFNVLKSVKSVVVDASTIPMSIFLSLQQQDVLVNDADFCLLMKARKNDVEIQGAINAHVRDGISIVNLLYWLNMQLDNNQKITELDVESKLLDFRKQQSLFQGESFSTISGFQENGAVIHYRANNDTNKLICKNGLYLLDSGGQYLDGTTDVTRTVAIGEPTSEQITNFTLVLKGHIALAMAVFPLGTTGGMLDILARQYLWKSGLDYQHGTGHGVGSFLSVHEGPCAISYKNDVVLQPNMVLSNEPGYYKNGEYGIRIENLMYVEEYMNGFLRFKQLTCVPIDLRLIDVDMLNHEEINYIDQYHNFVYNTIAPHVSEEVKHWLCHACQSLKGK

SEQ ID NO: 20200 - protein, 287 aa, Flavobacterium johnsoniae
MRQLKITKQVTNRETASLDKYLQEIGKVDLITADEEVELAQRIKAGDQRALEKLTKANLRFVVSVAKQYQNQGLTLPDLINEGNLGLIKAAQRFDETRGFKFISYAVWWIRQSILQALAEQSRIVRLPLNKIGSINKINKMYALLEQSNERPPSAEEIAKELDMTVNDVKESMKNSGRHLSMDAPLVEGEDSNLYDVLRSGESPNPDRELIHESLRTEIERSLETLTPREADVVRLYFGLGDQHPMTLEEIGETFDLTRERVRQIKEKAIRRLKHTSRSKILKTYLG

SEQ ID NO: 20201 - protein, 203 aa, Lentinula edodes
MGRVLLKVIILGDSGVGKTSLMNQYVNKRFSNQYKATIGADFLTKEVMVDDRLVTMQLWDTAGQERFQSLGVAFYRGADCCVLVYDVNSAKSFETLDSWRDEFLIQASPHDPENFPFVVLGNKIDVEENKRQVTQKRAMTWCQSKGNIPYFETSAKEAINVEQAFQTVAKNALTQEAEEQLYVDYPDPIQLDSESSQSYGCNC

SEQ ID NO: 20202 - protein, 169 aa, Nicotiana sylvestris
MASQSSKPQSIYDFTVKDAKGNDVDLSIYKGKVLIIVNVASQCGLTNSNYTDLTEIYKKYKDQGLEILAFPCNQFGGQEPGSIEEIQNMVCTRFKAEYPIFDKVDVNGDNAAPLYKFLKSSKGGFFGDSIKWNFSKFLVDKEGNVVDRYSPTTTPASMEKDIKKLLGVA

SEQ ID NO: 20203 - protein, 110 aa, Lactobacillus delbrueckii subsp. lactis
  misc_feature (101)..(101): Xaa can be any naturally occurring amino acid
LQPDTKIRTFAIGMDQNPIDLKYAREVADYLGTDHTEFIMTREDVLGVLREVIYTLETWDITTIRASIGMYILCKKIHETTDLKVILTGECSDELFGYKYXDFAPSPEEF

SEQ ID NO: 20204 - protein, 571 aa, Ashbya gossypii ATCC 10895
MAQLKWGAGRADDGQDGREVDIEERWHGGAKPDSADGSRRIQIQAVNDEDDTSELITFNQDVSWFIVMLTFVASLSGFLFGYDTGYISSALQSVGTDLGHQLTYRDKEYITSATSLGALIAALGAGICADLFGRRKCIMFSNILFVVGTVLQVAAFNFWQMVVGRLVMGFGIGFGSLISPLFISEIAPKMIRGRLTVINSLWLTGGQLIAYACGAGFQHVKHGWRILVGISMLPAVLQFVSFIFLPDTPRFYVMKGRLEDAANVLERTYVGAERALIDRKIEELVLLNKTIPGRTVFHRVWNTIVAIHTVPANLRALIIACGLQGIQQFCGWNSLMYFSGDIFSLVGFKDPVAVSIVVAATNFIFTLVAFFAIDKIGRRIILLIGLPGMTTAMTVCAIAFHYIKTEVDGEKLKPVGESNAWGIVVVIFIIVYAAFYALGIGTVPWQQSELFPQPVRGVGTSFATATNWAGSMVIASTFLTMFKNITPTATFGFFAGISVISLVAVYLCYPELSGLELEEVQFVLKDGFNIKASKALAKKRKFQMAESRKQARELDLESLHKAKPSDEFTES

SEQ ID NO: 20205 - protein, 608 aa, Ustilago maydis 521
MSVADLKAKGNAAFAAKDYQGAIQNYNDAIAAATSAEDNVHVLYSNRSACYAGLRDWNKALEDAEACINANPSFAKGYGRKGAALHGARRLEEAVDAYDAGLKIAPEDAGLKKGLADVRRAVENEAANGPGPEASLGQMFNDPQLFAKLSANPKTAGLLSDPAFMAKLKSIQANPKEAGMAFQDPRMIQVMGVLMGIDLQAFERPEGSNELPGDLENRRQDIEEQTGASASKPKPAAAAAASTSSADDVEMKDAKPSSSTTAQSAPVEEEEEDEEKKAKAAADAEKKLGNERYLKRDFEAAIAHYQKAWELHKDITYLNNLGACYFEQAKYDDCIKACEQAVEEGRSMRADFKLVAKAYGRIGSAYAKQDQLDLAITNFEKSLTEHRTPDVLAKLRETEKLQKERTRQAYIDPAKAEAERARGNELYKNGDFPGAVAAFTEAIKRDPSDARGYTNRASAYTKLAALPEALKDSEEAIKVDPNFVKGYIRKANVLASMKEFTKAMEACQQAENVDAAQQGGAKNAREIQALMNKCMNELYSQRSGETEQETLQRAMRDPEVAQIMQDPVMQSILQQAQGNPAALQEHMKSPIIRDKVQKLIAAGIIRTR

SEQ ID NO: 20206 - protein, 108 aa, Colwellia psychrerythraea 34H
MSDKIVQLTDDSFEADVLKASGLVLVDFWAEWCGPCKMIAPVLDDIATEYDGKVTVGKLNIDQNSATPPKYGVRGIPTLLLFKDGEIADTKVGALSKTQLKEFLDKNL

SEQ ID NO: 20207 - protein, 312 aa, Zea mays
  misc_feature (75)..(75): Xaa can be any naturally occurring amino acid
  misc_feature (160)..(161): Xaa can be any naturally occurring amino acid
  misc_feature (163)..(163): Xaa can be any naturally occurring amino acid
  misc_feature (165)..(165): Xaa can be any naturally occurring amino acid
  misc_feature (167)..(167): Xaa can be any naturally occurring amino acid
  misc_feature (170)..(170): Xaa can be any naturally occurring amino acid
  misc_feature (172)..(172): Xaa can be any naturally occurring amino acid
  misc_feature (176)..(178): Xaa can be any naturally occurring amino acid
  misc_feature (213)..(213): Xaa can be any naturally occurring amino acid
  misc_feature (305)..(305): Xaa can be any naturally occurring amino acid
LTVVLASPRLLRCSLQALTVRRRGGAFEPTRKRLLVPWPKKRKHTDAQAETAGAEKPDDSAPARPERTLFGFKAXPAPDAVPASAASRAAVAPFRNREKVLITCSRRITYRYRHLMQDVLSMLPHAKKDSKVESKQSKGNALNEMPELRSCSSCLFFRVXXHXDXYXWMXKXPGGXXXKFLVNAVHTMEELKLTGNHLKGSRPLLTFSTNFDXQPHWKLVKEMITQIFATPKDHRKAKPFHDHVFVFSIVDGHVWFRNYQISVPHNEIDKVDKGGLDKMTLIEVGPRFCLNPIKIFGGSFGGSYXYENPYYI

SEQ ID NO: 20208 - protein, 163 aa, Arabidopsis thaliana
  misc_feature (6)..(6): Xaa can be any naturally occurring amino acid
  misc_feature (89)..(89): Xaa can be any naturally occurring amino acid
  misc_feature (105)..(105): Xaa can be any naturally occurring amino acid
  misc_feature (108)..(108): Xaa can be any naturally occurring amino acid
  misc_feature (122)..(123): Xaa can be any naturally occurring amino acid
  misc_feature (125)..(125): Xaa can be any naturally occurring amino acid
  misc_feature (127)..(127): Xaa can be any naturally occurring amino acid
  misc_feature (129)..(129): Xaa can be any naturally occurring amino acid
  misc_feature (132)..(132): Xaa can be any naturally occurring amino acid
  misc_feature (139)..(141): Xaa can be any naturally occurring amino acid
  misc_feature (143)..(143): Xaa can be any naturally occurring amino acid
  misc_feature (146)..(146): Xaa can be any naturally occurring amino acid
  misc_feature (148)..(149): Xaa can be any naturally occurring amino acid
  misc_feature (156)..(156): Xaa can be any naturally occurring amino acid
  misc_feature (160)..(160): Xaa can be any naturally occurring amino acid
  misc_feature (162)..(162): Xaa can be any naturally occurring amino acid
MASSMXSSTAVVTSPAQATMVAPFTGLKSSASFPVTRKANNDITSITSNGGRVSCMKVWPPIGKKKFETLSYLPDLSDVELAKEVDYLXRNKWIPCVEFELEHGXCVXREHGETLPDTYDWXXLXQXWXVPXLFGLDRXXXKXLRXVXXCKKGFPXASFXFXG

SEQ ID NO: 20209 - protein, 416 aa, Thermotoga maritima
MPEKSLYEMAVEQFNRAASLMDLESDLAEVLRRPKRVLIVEFPVRMDDGHVEVFTGYRVQHNVARGPAKGGIRYHPDVTLDEVKALAFWMTWKTAVMNLPFGGGKGGVRVDPKKLSRNELERLSRRFFSEIQVIIGPYNDIPAPDVNTNADVIAWYMDTYSMNVGHTVLGIVTGKPVELGGSKGREEATGRGVKVCAGLAMDVLGIDPKKATVAVQGFGNVGQFAALLISQELGSKVVAVSDSRGGIYNPEGFDVEELIRYKKEHGTVVTYPKGERITNEELLELDVDILVPAALEGAIHAGNAERIKAKAVVEGANGPTTPEADEILSRRGILVVPDILANAGGVTVSYFEWVQDLQSFFWDLDQVRNALEKMMKGAFNDVMKVKEKYNVDMRTAAYILAIDRVAYATKKRGIYP

SEQ ID NO: 20210 - protein, 151 aa, Methanosarcina mazei Go1
MARINYSINADPENTSKAMGSELHISPKKSREVCCKIKGMKASEARKFLEDVIAMKQAVPFKRHSEGAGHRKGPMAGGRYPVSASKEILKVLKNAESNAEYKGLEPANMYIIHAAIQRGRVIHGFMPRARGRASPKDTETVNIEMILSEVR

SEQ ID NO: 20211 - protein, 484 aa, Streptococcus pneumoniae TIGR4
MEWTTERRYRLYQDWTQEEIQHIKENMAQSPWHTHYHVEPKTGLLNDPNGFSYFDGKWILFYQNFPFGAAHGLKSWAQLESDDLIHFKETGIKVLPDTPLDSHGAYSGSAMQFGDNLFLFYTGNVRDKNWIRHPYQIGALMDKEGKITKIDKILIDQPADSTDHFRDPQIFNFQGQYYAIVGGQDLEKKGFVRLYKAVNNDYTNWQAVGDLDFANDRTAYMMECPNLVFVEEQPVLLYCPQGLDKKVLDYDNIFPNMYKIGASFDPKNAKMVDVSQLQNMDYGFEAYATQAFNAPDGRALAVSWLGLPDVSYPSDRFDHQGTFSLVKELTIKDDKLYQYPVAAIKDLRASEEAFSNRSQTKNTYELELNLEANSQSEIVLLADKEGKGLSINFDLVNGQVTVDRSQAGEQYAQEFGTTRSCPIENQATTATIFIDNSVFEIFINKGEKVFSGRVFPHADQNGILIKSGNPTGTYYELDYGRKTN

SEQ ID NO: 20212 - protein, 635 aa, Candida glabrata CBS 138
MNSVAYSSIRYLPLLLRYGRALPLLNNPHALEQEHHESESDLVYYGVVSMFLVVLGGVFAGLTLGLMGQDEIYLTVINTSGTQKEKQLSGKVLRLISRGKHWVLVTLLLSNVITNETLPIVLDRCLNGGWQAVISSTILIVVFGEIIPQSICVKYGLEVGAFFAPFVLVLMYLMYPVAYPIALLLDYILGEDHGTVYKKSGLKTLVTLHQTMGVERLTTDEVTIISAVLDLKDKKVKEIMTPIENVFTLSADKILDEKTIEEIFNSGFSRIPIHLPNEPMNFIGMLIVRILISYDPEDALPISSFPLATLPETSPNTSCLNILNYFQEGKSHMCIVSERPGSSNGSIGVVTLEDVIEELIGEEIVDESDVFVDIHQHIMREQPGPLSKRHVTSYLHHLYTTSSKDSCVPLLNSKLNNYSSINEHKPVNHSHPPNLPNGSQLQLAPSNLASNPLDIKKSFVTIKKLPPGELISPSNKDYSNEHLRLNEQQGENRRLSQGEQQLLQEHANLSHKAIDYTQSSGKPIRITSSTTTHDPNENGTEDSAKNVLISSSYQSTANGIVESVITVKGVAKTIIEDDQSVYHDNHEIQHDISKMNSSTDLLLADHDEKSRSSTPVSDNGKKKKKSKKKKRRSKK

SEQ ID NO: 20213 - protein, 338 aa, Colwellia psychrerythraea 34H
MSATKKLTIARAMAESLAQEMRADPKVFIMGEDIAQLGGVFGNTRGLYDEFGGERVRDTPISETAFIGAGVGAAMDGMRPVVELMFVDFFGVCFDAIYNMMAKNIYFSGGNSHVPMVIMASTGAGYSDGGQHSQCLYGTFAHLPGMKVVAPSNAYDAKGLMTAAIRDNSPVIYLFHKGLQGMGWLGNEPAAINQVPEENYELEIGKARTVVEGADISIVSLGIGVHHALKAAQELEKQNISIEVVDLCSLVPLDREHIIASVKKTGRLLVVDEDYHSFGVSGEIIASVTEHDHKMLKTPPCRITFPDIPIPFSRPMEQWALPSTEKIINVCLNMMESK

SEQ ID NO: 20214 - protein, 542 aa, Bartonella henselae str. Houston-1
MTLMTVLTKAFDDQKLGTFGLRKKVSVFQQPHYVENFIQSLFNSIGSVEGKLFILGGDGRYFNRNLLQIVLKMAAAHGVACVKVGKEGLLSTPAVSHLIRKYHAYGGIILSASHNPGGREGDCGIKYNIANGGPAPASLCDAVFAASKRLSSYRIMEVPDIDLEREGTTFLGPMQIDIIDPVADYVALMQEIFDFDCIAKAVAEGLTLRFDALHAVTGPYAHEIFEKCLGFSEGTVVNGVPLPDFGGKPPDPNLLHAKALYDLVMSDQGPDLGAASDGDGDRNLIMGRGQFVTPSDSLAIMVDHAHLIKGYRQGIVGIARSMPTGRAADLVAEKKGLNFFETPTGWKFFGTLLDAGYVTFCGEESFGTGSNHIREKDGLWAVLFWLNLLAVTGKTVAQIVQQHWRTYGRFYTLRYDYEEVETCKASAIINALRAYLPKPGSEIAGLSVEKADDFTYHDPVDQSISTGQGVRIFFKNGARLVVRLSGTGTVGATLRLYFEQFEGDPRKHNQDPQKVLQPVQQAAFQLLNIKQHLRRTQPDVIT

SEQ ID NO: 20215 - protein, 699 aa, Adiantum capillus-veneris
MAKPCTIVWLRRDLRLEDNPALCAAGRIGNVVPVFIWSPEEERQFHPGRVSRWWLKQSLIQLDVSLRSFGVPLVMRKSTDTLGTLQELIKATGATQVFYNHLYDPISLVRDHHVKQGLTQSGIQVQSFNGDLLYEPWEVLNDDGKPFTSFESYWQKCLNMPFEPDSPLLPPRRLTSIAGSIPTYTPEELGLEDETEKSSNALLARAWAPGWSNADRALEAFLAGPLLEYSRNRHKIDGPTTSLLSPHMHFGEVSVRKVYHSVRRLQLLWAKDGSKLGEESIYFFMRSIGFREYSRYLSFNFPFTHERSLLSNLKSFPWRVDEGFFKAWRQGRTGYPLVDAGMRELWATGWLHNRVRVIVSSFCVKFLQLPWRWGMKYFWDTLLDADLESDVLGWQYISGSLPDGHELDRMDNPQTEGYKHDPVGEYVRRWLPELVRLPTEWIHHPWDAPPAVLRAAGVELGSNYPRPIVEVAAARERLRQAVAQMWEQEAALKAAGVATDAEALDENLEVKVVTPPLVSTHSLKTAVAGTLSRSSLRDQRVPTCGKQLSMENGVPHEGDNSPDIAMSPQQDNLLATTAPPEAHSTAEKCDNKSMNCDQTPEPKHNVPPPAVSDGNSTAESSSSPKQVNDELRNGVPLVWVPSIVNQQPVVEPSCVPYAGDAGQLRKHLLALQNSRTENKMEEKSPLSEWRRRTKRKAKA

SEQ ID NO: 20216 - protein, 987 aa, Vibrio sp. Ex25
MLLATASIGRKLLLSFIAMAMLVMLSALIGVSGFSLVAKTERNVVDSAIPAMIEARQVSELSTRIISSVQLLSNARNEQERKESGRVLFEQLESLLTHIKELGSESFDSQLLEDLENNVQNVIDNLAELGVSVERKLWLAKEIDTRVEEMRLLSEELEQLTRTQVQNTSTIAVANVTHIYDLLESNKKSQVYQALDALVEVDLDLTERLHELHLLAFKMLNQIEEARTLTNIERIQQVQSDFESNLKIMKRRVLAVEDPTRSKQMSQLLTELGKRQVVFTILMQQYENNEQSQQLMQKTLELFSELNGTVNKLVDDSNKTTTVAVDELTSTLKFAQWSLTVISIVGLIVLVLILWRVVYLSVVKRLAEYSAALLSVAQGNLAVELEVKGKDELAHMGQAIITARNTAQALKVVAEGEAQAKRELEEHKEHLEELVEQRTSQLKQANRRLNEEVLNHAKARKQAEQASRAKSAFLATMSHEIRTPMNGVLGTARLLIDSGLNPIQKRYAEIINRSGKTLLAILNDVLDYSKIEAGHLEIRHMGFDLHQMVEDTFQLMNSRAQEKRLLFSYHIESDVSRYWKGDVTRISQVLNNLVGNAIKFTDEGEIDIYVSLNPEDESQVLFEVSDTGIGIAKKDQRTLFDAFTQAEGGMSQTGGTGLGLAISKRIIEAMGGILEVDSEEGHGSRFWFSIPLEESEPVETGAVATARCKVKAKVLLVEDNEVNRVVAEGFLESMGHQVVMAENGSQAEQLISTQDFDIALVDINLPDCDGTELIQRLKQIECNKPANKALAATPMIAVSAHVFAEEVERYLAAGFDGYLPKPLAKEALAALIQDVLDGKPLLLPQNADCTPFDQTSPQEQAIQSKVVQVPKTEESDVVIINPSVIESDMKILGREKMLHIINLFRTTSADVLSKLQASAGGNDSKEVKNLAHKLKGSAGSLGLTALMNSCQAIEAAPQPLDTYMATKDQLASQVSESIQALDELMAK

SEQ ID NO: 20217 - protein, 117 aa, Arabidopsis thaliana
  misc_feature (19)..(19): Xaa can be any naturally occurring amino acid
HQTLRPSSTLSSATMVASXAQAGIYTPGNGLKSSAAFPATRKANNNITSITSNGGRVNCMQVWTTIGKKNFETLSYLPDLTDSELAKEVHYLIHNKSIPCVQFKLQHPFVYRKHSNS

SEQ ID NO: 20218 - protein, 487 aa, Adiantum capillus-veneris
MTTSTTIVWLRRDLRLDDNPALKEASKIGNAVVPVFVWVPEEEGQFQQGRMSRWWLKQSLKQLAQSLDSLGSPLIIRRSSSSLQALMDLVIHTQASQVFFNHLYDPISLVRDQRVKEGLLQTGIHVRTFNADLLYEPWQVNDPSGKAFTTFNEFWDKCLNMPEEPHAPLLPPTRSLLAFAGHLPGCTVEDLELENNSEKDSNALLARSWTPGWINAEKALEAFVERHLLQYAANQHMVDGSTTSFLSPHLHFGELSVRKVFYNVRIKAVQWTKEGKPDGEQSVNLFLRSIGLRDYSRYICFNFPFTHERLILQNRRPFPWRVDEGLFKAWRQGRTGYPLVDAGMRQIWATGWLHNRIRVIVSSFFVKVLQLPWTWGMKYFWDALLDADLENDILGWQYISGGLPDGHELERMDDLQIEGYKYDPRGEYVRKWLPELSRLPTEWIHHPWDAPPRALRAAGVELGSNYPRPLVEFAAAWSRLQTALREA

SEQ ID NO: 20219 - protein, 309 aa, Thiomicrospira crunogena XCL-2
MEFCYTEIEISYHIAYSVTFNKDINMSAQILDGKAIALELRDSIQKEVEAQVANGKKPPGLAVILVGEDPASQVYVKNKKIACEKAGFNDVSMVLPAETSQAELLAKIDELNTRDDVHGIIVQLPVPDHIDPEEIIERIDPKKDVDGFHPYNMGRLATRLPELAPCTPHGVMTMLAKTGIPLRGLNAVVVGASNIVGVPMALELLNERATVTVCHSATKDLPQKVAEADLVVVGVGIPNMVKGDWIKDGAIVIDVGINRLDDGSLCGDVEYDVAKEKASWITPVPGGVGPMTIATLLQNTLQAAYGVKA

SEQ ID NO: 20220 - protein, 395 aa, Mycoplasma mycoides subsp. mycoides SC str. PG1
MAKEQFDRSLPHVNIGTIGHVDHGKTTLTAAITKVLSEQGNAEFKDYANIDNAPEERERGITINTAHVEYKTANRHYAHVDCPGHADYVKNMITGAAQMDGAILVVAATDGPMPQTREHILLSRQVGVPKIVVFLNKCDMVEDDEMIDLVEMEIRDLLTEYDFDGEGAPVIRGSALGALNGDSKWTGAINELMAAVDEYIPTPQRDADKTFLMPVEDVFTITGRGTVATGRVERGTVKVNEEVEIIGLKEEPTKTVVTGLEMFRKLLDFAVAGDNVGALLRGVDRHSVERGQVLAKPGTIKPHTVLKASVYALTQEEGGRHKPFFNKYRPQFYFRTTDVTGEVTLPEGTDMVMPGDNVEMEIQLIKPVAVEEGTKFSIREGGRTIGAGTVISIEK

SEQ ID NO: 20221 - protein, 1331 aa, Vibrio cholerae O1 biovar eltor str. N16961
MRSIKAMFVLLFCLMAILAVAMFKVTRQVADLRLESHQYSEQLFHFYRLSQELKQSSDHLTKFARAYASTGNERWLRMFNQVLNVRNGKLPAPSNNDYEFWDVVVLNDSSELTPNANQRYPTLIERIRQSGIGSVEFLELQNALALSDQLVALEREAFMAVKGWKREFAGEYRYTGEPDLNFARSLLYSEKYFLEKAKIMAAIGSAHSNIVDRIESEVRAADEKAQFYERVNLVLVSLSLLVIIASFILLWVIYIAPLSILLKTVVRQVRSEDYKFTLTQKAYGELQRFIDSLNVVFHHISEQLSFNTLVKDFNIIIRNHPTTEALCNQVTQFLLHHFPVELIGLYLYQNGVLTRIAGVGQSESAQRDYSDPTTTHCSVLRSGKPYAMKSLNGNFQVVSTSGVIALNEVYYLPLQVNNQPIALLELGTVGMLTMQQYHWLSQMLDDLSVAIQLSQNAEQQRLAERKVLEQSQLNQEILDATPNPMYCLSADGKFLTVNAKFLDLMGLYNNEVIDKEPQEIFPAEVAERFAAAHQVLTQQQSSQNYEVSLVDYTGVQREMLVYEASFSDRADKVNGIVGILLDMTERKEMEDELRKAKEAADAMSQAKGDFLANMSHEIRTPMNAILGMAHLALNTPLDTTQRKYVTRINESAKNLLGIINDILDFSKMEAGKLNVERIDFNLDDVLDNVTAVVSLKAQEKGIEFLMDIDPHIPLGLIGDPLRLGQVMVNLCGNAVKFTSQGEIVLSARVSQLNEQQVTLRFAVKDTGIGIAQDKLDDLFDAFSQADNSITRQYGGTGLGLSISKQLVELMGGQITVHSEEGKGSTFEFSVVCGLQDAKMRDISQPVHGLADKRVLVVDDNDSARHILDSLLTAMRFNVVTVSNGFEALSEIQQKPFDMLFVDWNMPGMNGIELLTRVKTLGLRGHMKSFLVTAYGREINLDGENSKLVDALIVKPVNPSNLLDAIVTSYGIEHVRHKTNEAHHNSRPNFAGQSLLLVEDNEVNQEVALGLLQDTGLNVVVANHGQEALERLEHADFDLVLMDMQMPVMDGITATEHIRANPRWHSLPIVAMTANAMAIDIERCLQAGMNDHLSKPIEVDKFYQVLRHFLQVSDEQSFSSHSPNKPSASKPAMNALLDLPQLTGVDLEQAIFRIGGNQQRYFEILRHFIDSQVDELNSVTGLIEAQDWSSATRVAHTLKGSAANLGLEALAQLAAEMEQSLEQQVLPSFELLQQAQSLLTQVDDELSAWEHQHKEPLLAENLDWGLWYQQLQQAINDYDVTALSLSKSIRQVSQWDSAQQAALISAIEDFDFEQAKALLASYPQLSGERLNQ

SEQ ID NO: 20222 - protein, 494 aa, Psychrobacter arcticus 273-4
MHHVKQLINGQFVDSNTSEWIDITDPATQEVIAKVPQTTDDEINQAVAAAQKAFQTWRKTPITTRARIFLRYQALIRDHMDELAEILTAEQGKTIADARGDVFRGLEVVEHAAGIANLQIGDFVENVASGVDTYSIWQPLGVCAGITPFNFPAMIPLWMFPMAIATGNTFILKPSEQDPMVTMRLVELAVEAGVPEGVLNVVHGGKATVDAICDHPDIKAVSFVGSTNVGKHVYERASQSGKRAQCMMGAKNHGVILPDANKEQTLNQLAGAAFGAAGQRCMALSVVVLVGAAGEWIDDIKAKAEGLIVSAGKHDKDLGPLISPAAKARVEHLIGTGVEEGASLILDGRGITVEGYEKGNFVGPTIFDNVTSDMQIYQQEIFGPVLCIMRANSLDEAIELLNANPHGNGTAIFTQSGAAAHKFQQDIQVGQIGINLPIPVPLPMFSFSGSRASKLGDLGPYGKQAVQFYTQTKTVTARWFDDEASRGVNTTISI

SEQ ID NO: 20223 - protein, 107 aa, Glycine max
MGVTLMATTMHIIAITCGQVAGDVSPCLSYLRSGGKPSDACCNGVKSLSGAVKTTVDRQAACNCLKNLANNMGQSLNAGNAASLPGKCGVNMPYKISTSTNCATIKF

SEQ ID NO: 20224 - protein, 260 aa, Psychrobacter arcticus 273-4
MTDYTNLKLSIDGHTATLTLNNPPAHTWTMDSLKALKQLVTDLNANDEVYALIIHGDGEKFFSAGADLNNFADGDKGRAISMAIAFGEAFEALSAYRGVSIAVINGYAMGGGLECALACDIRIAEDHAQMALPEAGVGLLPCAGGTQNLTALVGEGWAKRMILCGERVDAQTALRIGLVEEVAAKGEGLQVAQALAQKVAKQSPVAVSYSKALIQAARHTPPAKNLIHEREAFVKLFDTEDQREGVQAFLEKRKPVWQNK

SEQ ID NO: 20225 - protein, 209 aa, Bordetella parapertussis
MSVSPARDLSTTLLADAGARVMSAGIKPLRAGWHVHGRALTVSVDAGDNLAIHAALAQARPGEVLVIDAQGYLDRAVMGGIMCAQAAAVGLAGVIIDGAMRDLAELRAGTLPAYALGGSPAGPTKRGGGTVRRAIRCGGVDVRPGDWIMADDDGVVVYRDDEAEAVLAAALAKQQAEAARMAAIARGELRPAWLDDALARAPIDTGESA

SEQ ID NO: 20226 - protein, 309 aa, Bacillus cereus E33L
MRKIIVGSRKSKLALTQTNWFIDQLKALGLPYEFEVKEIVTKGDVILDVTLSKVGGKGLFVKEIEHALLTKEIDMAVHSMKDMPAVLPEGLMIGCTPKRVDPRDAFISKSGASFKELAEGAILGTSSLRRSAQLLAARPDLQVKWIRGNIDTRLRKLKEEDYDAIILATAGLQRMGWDDEVITEHLDETLCVPAVGQGALAIECREDDTDLLQLLAHINDAVTERTVAAERVFLHKLEGGCQVPIAGYATLTENDAIELTALVGSMDGSVLLKETVVGTDPEKVGLEAADRLIKQGAKELILAANKGQQ

SEQ ID NO: 20227 - protein, 116 aa, Triticum aestivum
  misc_feature (58)..(58): Xaa can be any naturally occurring amino acid
MARGAATQLVLVSMVAAMLLVACDAAISCGQVTSALSPCISYARGNGANPPAACCSGXVRSLAGAARSTADKQAACKCIKSAAGGLNAGKAGGIPSKCGVSVPYAISSSVDCSKIR

SEQ ID NO: 20228 - protein, 315 aa, Nicotiana sylvestris
MSCATKPIIKPSSMATNSCLISLPPLFATTTKSKSFAYPYLSNTLKPIKLLHLSCTYSPCILSPKKKTSVSALQEEENTLILDGQGQESGDLFNFEPSGEETEEEGFVEAVGDAGESDEVEADEEEEEFQEPPEDAKLFVGNLPYDVDSEGLARLFEQAGVVEIAEVIYNRDTDQSRGFGFVTMSTVEEAEKAVEMYNRYDVNGRLLTVNKAARRGERPERPPRTFEQSYRIYVGNIPWGIDDARLEQLFSEHGKVVSARVVYDRETGRSRGFGFVTMASEAEMSDAIANLDGQSLDGRTIRVNVAEDRSRRNTF

SEQ ID NO: 20229 - protein, 352 aa, Cryptococcus neoformans var. neoformans JEC21
MPRPPEDPDVRNSKTLAYILRHGAEKEGLYIRSDGFIKLADVLARPKLKGVDEPTILHLVQTNAKKRFELFWGYDPSPPRPKKKPTQGKTKKQLQRDRETAAAAAASAAVAASGTGEGQEKGKEPDAATIDIIASSLASTDLTAPPSSLSINSTAPAPAQSSTSVDPPELPLISLPDPHTSASDSDANASANSDNPKGEYFIRATQGHSIQLESTAHLEQVKDDEEGKRKVGLMVHGTRWELWDTLKEQGLQKMTRQHIHLAPGFSGPITPRPNSTLYIYLDLSKLVAAGIPVYVSANGVVLTPGSKGGENGEGAGVGKEFWRRAVRRKEGKRWVVWEDGREVEREELSGEE

SEQ ID NO: 20230 - protein, 231 aa, Streptococcus pneumoniae TIGR4
MSPLKLERIAGVDFVVVRELTGGIYFGYHILEERNARDINDYSYEEVERIIRKAFEIARNRRKIVTSIDKQNVLATSKLWRKVAEEVAQDFPDVTLEHQLVDSAAMLMITNPAKFDVIVTENLFGDILSDESSVLSGTLGVMPSASHSENGPSLYEPIHGSAPDIAGQGIANPISMILSVSMMLRDSFGRYEDAERIKRAVETSLAAGILTRDIGGQASTKEMTEAIIARL

SEQ ID NO: 20231 - protein, 204 aa, Synechococcus sp. WH 8103
IQPSQNAKIEVIGVGGGGSNAVNRMILSDLEGEAYRVLNTDAQALIQSQAQHRLQLGQTLTRGLGAGGNPTIGQKAAEESRTDLHDALQGSDLVFIAAGMGGGTGTGAAPVVAEVAREVGALTVGIVTKPFGFEGRRRMRQADEGIARLAEHVDTLIVIGNDRLREAIAGAPLQEAFRSADAVLRMGVKGISDIITCPGLVNVD

SEQ ID NO: 20232 - protein, 406 aa, Methanocaldococcus jannaschii DSM 2661
MTKVLVMFMDFLFENSWKAVCPYNPKLDLKDIYIYDTTLRDGEQTPGVCFTKEQKLEIARKLDELGLKQIEAGFPIVSEREADIVKTIANEGLNADILALCRALKKDIDKAIECDVDGIITFIATSPLHLKYKFNNKSLDEILEMGVEAVEYAKEHGLFVAFSAEDATRTPIEDLIKVHKAAEEAGADRVHIADTTGCATPQSMEFICKTLKENLKKAHIGVHCHNDFGFAVINSIYGLIGGAKAVSTTVNGIGERAGNAALEELIMALTVLYDVDLGLNLEVLPELCRMVEEYSGIKMPKNKPIVGELVFAHESGIHVDAVIENPLTYEPFLPEKIGLKRNILLGKHSGCRAVAYKLKLMGIDYDREMLCEIVKKVKEIREEGKFITDEVFKEIVEEVLRKRNKN

SEQ ID NO: 20233 - protein, 799 aa, Arabidopsis arenosa
  misc_feature (332)..(332): Xaa can be any naturally occurring amino acid
  misc_feature (334)..(334): Xaa can be any naturally occurring amino acid
FVVGKIGNYLIEEASMLIGVKDDLEELKTELTCIQGYLKDVEAREREDEVSKEWTKLVLDIAYDVEDVLDTYHMKLEERSKRRGVKRWTNKIGRKIDAYNIIDDIRILKRRILDITRKRETYGIGGLKEPQGGGNISSLRVRQLRRALSVDQEELVVGLEDDAKILLAKLLDVREYNRFIISIFGMGGLGKTALARKLYNSGDVKRRFDCRAWTYVSQEYKTGDILVRIIRSLGMTSGEELENIRKFAEEELEVYLHGLLEGKKYLVVVDDIWEREAWESLKRALPCNHEGSKVIITTRIRAVAEGVDGRFYAHKLRFLTFEESWKLFEQKXFXNMEWVDEDLLKTGKEMVQKCRGLPLCIVVLAGLLSRKRPSEWNDVCNSLWRRLKDDSIHVSTVFDLSFKDMRHESKLCFLYLSIFPEDHEIDIEKLIWLLVAEGFIKEDEEMKMEDVARYYIEELIDRSLLEAVRRERGKVMSCRIHDLLRDVAIEKSKELNFVNVYNDHVAQHSSTTCRREVVHHQINRYLSEKHWNKRMRSFLFFGESRDSRDLETIYLQLKLLRVLDLGGVRFAWEEGKRSLPEVIGDLIHLRYLGIADTFLSNFPSFISNLRFLQTLDSSGNESKVDLRHITSLRHVIGNFAGGLLLGESVNLQTLRAISADSWSKLKHELLINLRDLEIYVGFATVERGVPVRWASLTKLRNLRVLRLHSDDIPLSLESEEAVRSMDVISPSLESVTFFGIYLKEDPMPFFQKMPRLEDLILENCYYSGEKISVSEQGFGRLRKLQLYMESLDELQIEEE

SEQ ID NO: 20234 - protein, 251 aa, Brassica napus
MATFLTPLVSIKPTVFSFPSQSVTSPHRQTNVLSLKPFPSPAGAQSSRVRFIPHAVETEEKPASDPNAESSRRVYIGNIPRTVDNEQLSKLVEEHGAAENVQVMYDKYSGRSRRFGFATMKSVEDANAVIDKLNGTTIEGREVKVNITEKPIASSSSPDLSLLQSEDSAFVDSPYKVYVGNLAKTVTKQMLENLFSEKGKVVSAKVSRVPGTSKSSGFGFVTFSTQEDVEAAILALNNSLLEGQKIRVNKA

SEQ ID NO: 20235 - protein, 534 aa, Triticum aestivum
MLRAVLLRSASGLRRSPMAAPLSTAAASWLAEGTSPSPPRVRLLIGGDFVESRATEHVDVTNPATQEVVSRIPLTTADEFSAAVDAARTAFPGWRNTPVTARQRIMFKYQELIRANMDKLAENITTEQGKTLKDAWGDVFRGLEVVEHACGMGSLQMGEYVSNVSHGIDTFSIREPLGVCAGICPFNFPAMIPLWMFPIAVTCGNTFVLKPSEKDPGAAMMLAELAMEAGLPKGVLNIVHGTHDVVNNICDDEAIKAVSFVGSNTAGMHIYSRASASGKRVQCNMGAKNHAIILPDADRDATLNALIAAGFGAAGQRCMALSTAVFVGGSEPWEDELVKRASSLVVNTGTANDADLGPVISRQAKDRICKLVQSGADSGARLVLDGREIVVPQFEDGNFIGPTVLADVKSDMECYQEEIFGPVLLLMKAESLDDAIQIVNRNKYGNGASIFTTSGVSARKFQTDIEAGQVGINVPIPVPLPFFSFTGSKASFAGDLNFYGKAGVQFFTQIKTITQQWKESSPQRVSLSMPTSQK

SEQ ID NO: 20236 - protein, 117 aa, Oryza sativa
MARAQLLLVALVAALLLAGPHTTMAAISCGQVNSAVSPCLSYARGGSRPSAACCSGVRSLNSAATTTADRRTACNCLKNVAGSISGLNAGNAASIPSKCGVSIPYTISPSIDCSSVN

SEQ ID NO: 20237 - protein, 389 aa, Chlamydomonas reinhardtii
MADPGAQPVPAPQSAEEPVTGGLQESVEVTASGKLDSYNREYNQFLVCGSLFECPAKYLPIKPIGKGAYGVVCSAKNLDNQEKVAIKKIANAFDNVIDAKRTLREIKLLRHLQHENIVQIKDIIPPTNRDAFKDLYVVYELMDTDLHQIIRSPQALSNDHSQYFLYQLLRGLKYIHSANILHRDLKPSNLLVNANCDLKICDFGLARTSTSNEKEFMTEYVVTRWYRAPELLLSCSGYTTAIDVWSVGCIFAELLGRKPLFPGKDYVHQLSLITKVIGSPSEEELGFITSEKAKRYIRSLPRSERVDFGQLWPHVTKTALDLIDKMLVFDPTKRITVEQALEHPYLASLHDVSDEPVCPTPFTFDFDSEHLTPDVVREVILQDMAELHT

SEQ ID NO: 20238 - protein, 334 aa, Triticum aestivum
  misc_feature (50)..(50): Xaa can be any naturally occurring amino acid
AYLGDTTEQVCTKKQAGTGPEFPADRRPTRPLGTVHHELHFTVQEGIDAXEEVIYHIETYDVTTIRASTPMFLMSRKIKSLGVKMVLSGEGSDEIFGGYLYFHKAPNKKELHEETCRKIKALHLYDCLRANKATSAWGLEARVPFLDKNFINVAMDLDPECKMIRRDLGRIEKWVLRNAFDDDEKPYLPKHILYRQKEQFSDGVGYSWIDGLKDHANAHVSDSMITNASFVYPENTPTTKEAYYYRTVFEKFYPKNAARLTVPGGPSVACSTAKAVEWDAAWSKLLDPSGRAALGVHDAAYEEEKAPALADHVFRPPAHGESILVETGVPAAAV

SEQ ID NO: 20239 - protein, 418 aa, Emericella nidulans
MSDLQVQGRKVFKVFNQDFIVDDRYTVTKELGQGAYGIVCAATNVQTGEGVAIKKVTNVFSKKILAKRALREIKLLQHFRGHRNITCLYDMDIPRPDNFNETYLYEELMECDLAAIIRSGQPLTDAHYQSFIYQILCGLKYIHSANVLHRDLKPGNLLVNADCELKICDFGLARGFSIDPEENAGYMTEYVATRWYRAPEIMLSFQSYTKAIDVWSVGCILAELLGGRPFFKGRDYVDQLNQILHYLGTPNEETLSRIGSPRAQEYVRNLPFMPKVPFQRLFPNANPDALDLLDRMLAFDPSSRISVEEALEHPYLAIWHDASDEPSCPTTFDFHFEVVDDVQEMRRMIYEEVVRFRQSVRMPPQAQSLAQQQQIGNIPIPEHQQGVWRQEEPRPQEAGAVGGNHNDLESSLQRGMDA

SEQ ID NO: 20240 - protein, 297 aa, Ustilago maydis 521
MLVLVIGDLHIPFRAHDLPAKFKKLLVPGKIQQIICTGNVCNTDYLHYLRTIAGDVHLVKGDYDDNPHFPSSLILNHPPLRIGVLHGHQVVPAGDTQSLAAVARAMDVDILLTGHTHRFEAFELEGRFFVNPGSATGAWHPTWPLRDPASLAALSERTAAKTKEDATIADKKADEPKPKKGAKTSDNKKNDDSAKDKPSASELKDANKDAESNKDGDEEEEEAKEAAAPVPSFALLDIQGAVVVTYVYQLIDGDVKVEKIEYRKNLDSNSLALQRGASGNAVAVGASATNYGQYGGR

SEQ ID NO: 20241 - protein, 292 aa, Rickettsia sibirica 246
MAILINKKTQVICQGFTGLQGTFHSEQAIAYGTNMVGGVTPGKGGHTHLDLPVYNTVHEAKAKTGANASVIYVPPGFAADSILEAIDAEIEVVVCITEGIPVLDMVKVKRALAGSKTRLIGPNCPGVITPGECKIGIMPGHIHKRGTIGIVSRSGTLTYEAVAQTTAVGLGQSTCVGIGGDPVNGTNFVDCIEMFLKDDETKAIIMIGEIGGNAEEDAAEFIKQSKIKKPIVSFIAGITAPPGKRMGHAGAIIVGRTGSAEDKLEALQSAGVIITRSPADIGKTMLDLLNKG

SEQ ID NO: 20242 - protein, 394 aa, Arabidopsis thaliana
MASIRRTLSPMYHDRSHENGGSHKGFTIGGSSSKHNSSQFLSYLTKLLGVTSDPKSSRRGPWRRPFYQFLVFFLLGFVLGLTPFGKMEDVNGSDRFSFEIKQPYVEERLENRKREEAAVDAVSFVAETENGKKEVNFVPKKLLIVVTPTYNRAMQAYYLNRVAQTLRLVESPVLWIVVEGNVASFETSEILRKTGVMYRHLVCKRNMTSIKDRGVHQRNTALEHIELHKLDGIVYFADDDNIYSLELFQSLRQISRFGTWPVAMLAQSKNKAILEGPVCNGSQVIGWHTNEKSKRLRRFHVDMSGFAFNSTILWDPKRWRRPFSHPTRQLDTVKEGFQETSFIEQVVADESEMEGVPPACSSILNWHLHLDALDVPYPQGWAIQKNLQALITMK

SEQ ID NO: 20243 - protein, 1065 aa, Bacillus anthracis str. 'Ames Ancestor'
MDKKVSAIPQPKTYGPLGNLPLIDKDKPTLSFIKLAEEYGPIFRMQTLSDTIIVVSGHELVAEVCDETRFDKSIEGALAKVRAFAGDGLFTSETQEPNWQKAHNILMPTFSQRAMKDYHAMMVDIAVQLVQKWARLNPNENVDVPEDMTRLTLDTIGLCGFNYRFNSFYRETPHPFITSMTRALDEAMHQLQRLDIEDKLMWRTKRQFQHDIQSMFSLVDNIIAERKSSENQEENDLLSRMLNVQDPETGEKLDDENIRFQIITFLIAGHETTSGLLSFAIYFLLKNPDKLKKAYEEVDRVLTDSTPTYQQVMKLKYIRMILNESLRLWPTAPAFSLYAKEDTVIGGKYPIKKGEDRISVLIPQLHRDKDAWGDNVEEFQPERFEELDKVPHHAYKPFGNGQRACIGMQFALHEATLVMGMLLQHFEFIDYEEYQLDVKQTLTLKPGDFKIRIVPRNQTISHTTVLAPTEEKLKNHEIKQQVQKTPSIIGADNLSLLVLYGSDTGVAEGIARELADTASLEGVQTEVAALNDRIGSLPKEGAVLIVTSSYNGKPPSNAGQFVQWLEELKGDELKGVQYAVFGCGDHNWASTYQRIPRYIDEQMAQKGATRFSTRGEADASGDFEEQLEQWKQRMWSDAMKVFGLELNKNMEKERSTLSLQFVSRLGGSPLARTYEAVYASILENRELQSSSSERSTRHIEISLPEGATYKEGDHLGVLPINSEKNVNRILKRFGLNGKDQVILSASGRSVNHIPLDSPVRLYDLLSYSVEVQEAATRAQIREMVTFTACPPHKKELESLLEDGVYQEQILKKRISMLDLLEKYEACEIRFEPFLELLPALKPRYYSISSSPLVAQDRLSITVGVVNAPAWSGEGTYEGVASNYLAQRHNKDEIICFIRTPQSNFQLPENPETPIIMVGPGTGIAPFRGFLQARRVQKQKGMNVGEAHLYFGCRHPEKDYLYRTELENDERDGLISLHTAFSRLEGQAKTYVQHVIKEDRIHLISLLDNGAHLYICGDGSKMAPDVEDTLCQAYQEIHEVSEQEARNWLDRLQEEGRYGKDVWAGI

SEQ ID NO: 20244 - protein, 412 aa, Mesorhizobium loti MAFF303099
MTEMARGMVIIGAGECGGRAALTLRDLGYDGPVTLVGDEPHLPYERPPLSKEAMASDAPEIKAIASDAVLAERSIRHIHSVQAAAIDRAAHSVRLSDGSVLPYDKLLLATGATPRKLSMPGLGARCVYLRTFADALAIRGHLRAGSRIAVIGGGFIGLELAAASRRLGAAVTVIEAQPRILMRGVPAEIAEIVHDAHIAEGVDIVCGQGIASIADDGRQVRVTLAGGREVSADLAIIGIGAVPVTGLAADAGLMIDNGIAVDAELCSSDPDIFAAGDCCSFPLAVYGGRRVRLEAWRNAQEQGALAAKNMLDAGEAHAAVPWFWSDQYGLSLQIAGLSDEGKNTVRRDLDDGAFILFHLAEDGTLVAASGIGPGNAVARDIRLAEMLIGKRAKPAPEALGSQAVKLKSLLAA

SEQ ID NO: 20245 - protein, 410 aa, Triticum aestivum
  misc_feature (94)..(94): Xaa can be any naturally occurring amino acid
  misc_feature (121)..(121): Xaa can be any naturally occurring amino acid
  misc_feature (129)..(129): Xaa can be any naturally occurring amino acid
  misc_feature (136)..(136): Xaa can be any naturally occurring amino acid
  misc_feature (151)..(151): Xaa can be any naturally occurring amino acid
  misc_feature (317)..(317): Xaa can be any naturally occurring amino acid
MASPMLSTAMAPLQGGMLEFSGLRSSSSLPLRRNATSDDFMSAVSFRTYAVSTSGGSRKAPTEAKLKVAINGFGRIGRNFLRCWHGRGDSSPLXVIAINDTGGVKQASHLLKYDSTLGIFXDADVKPVXGDNAISXVDGKVIKVVSDRNPXNLPWGEMGIDLVIEGTGVFVDRAGAGKHLEAGAKKVLITAPGKGDIPTYVCGVNAELYTHADSIISNASCTTNCLAPFVKVLDQKFGIIKGTMTTTHSYTGDQRLLDASHRDLRRARAAALNIVPTSTGAAKAVALVLPNLKGKLNGIALRVPTPNVSVVDLVVQXVSKKTLAEEVNQAFRDAAANELKGILDVCDEPLVSVDFRCSDVSSTIDASLSMVMGDDMVKVIAWYLGRDHRAAARAGTRPLRCPDCPCSAFL

SEQ ID NO: 20246 - protein, 856 aa, Gloeobacter violaceus PCC 7421
MAVGFSLRVLVVAANGPLVHALEKTLLSGGYDLALRWAAGTASLHQALMSERPEMILAADGPGEIDALLLLRSLTVHNCCELPLVWIGDAPSTPEGGYLNGADLHLLVLTVERALHQAQQRRETGVARAALRRSEQRLDLFFSQSLDGFFFMMLDRPVRWDATVDKERTLDYVFAHQRLTRVNDALLAQYRASGEQLLGRTPADLFAHDLELGRRLWREFFDRGKLHVETDERRFDGSPMWVEGDYSCLYDEQGRITGHFGIQRDVTVRKLAQEALRTSEAALQEQLQRTLLLQRICEQIRSSLESRQIFQATVDQVGQALGVNCVRILVYSPTPKPELHFAAEYLEAGYPPVHHGSVPVAGDPHAQRVLECDRAVCSPDVYADPQLAPVHELCRSVGLKSLLAVRTSYQGKPNGVITVQQRDRFRRWTPEEIALLEAVAAQVGIALNQAKLLEQEKAQSLLLAEQNAALARARQAAEAASRTKNEFLATMSHEIRTPMNGVIGLADVLLADGGLTHRQRDSIETIRASGETLLTIINDILDFSKAESGCIELETKRFDLHALLAGCVDLLRPEATQKHLQLCCTLHGQVPQAVVGDAARLRQILVNLIGNAVKFTTSGAVSVNVTAARPAAEPPQKWELHFAVRDTGIGIPAERMDRLFKPFSQVDASTTRRYGGTGLGLAICKRLAELMDGRIWVESEPGRGSTFSFTIVAAAATDAPAPAPPVEASWSKPLPLRILLAEDNPLNQKVALQLLRRLGYRANVATDGEEVLRALRRQRYDLVLMDVQMPMIDGLEATRRIASEFAAAERPRIIALTAGATLQDEQACLRAGMDGFISKPIRIGELRRALERWGTG

SEQ ID NO: 20247 - protein, 224 aa, Glycine max
  misc_feature (216)..(216): Xaa can be any naturally occurring amino acid
MVLKGLCERIVSSKCSSKSSTETVDNTQVPVYSKAGSSDSSEKKAVPSRSSGWAAAVRKVVTGGSMRRFQERVLGSSRTDISSSDGDIWLLGVCHKISQQESTGGVDTSNGLASFEQDFSSKILVTYRKGFDAIGDTKYTSDVNWGCMLRSSQMLVAQALLFHKLGRSWRKPIDKPLDKEYIDVLQLFGDSEASAFSIHNLLQAGKGYGLAVGSWXGPYAMCRT

SEQ ID NO: 20248 - protein, 317 aa, Gloeobacter violaceus PCC 7421
MEQFDFDVVIVGGGPAGCTCALYTARSELKTVILDKNPAAGALAITHKIANYPGVPGEMSGDHLLEVMRDQAVEFGTVYRRAQVYGLDLSEPVKKVYTPEGIFTGRALVLATGAMGRIASIPGEAEYLGRGVSYCATCDGAFYRNREVVVVGLNPEAVEEAQVLTKFASTVHWITPKDPHTLDGHADELLAHPSVKLWEKTRLIRIKGEEAGVTAVEVRHPGESDSQELLAEGVFVYLQGSKPITDFVAGQVEMKPDGGVWVDEMMQTSVPGVWGIGDIRNTPFKQAVVAAGDGCIAAMAIDRFLNSRKAIKPDWAH

SEQ ID NO: 20249 - protein, 334 aa, Medicago truncatula
MKATLRYLAGIAGPSGFGSNSTAEQVTQNCSSFLPSGLTALITGGTSGIGAETARVLAKRGVRIVIGARDLKKAMKVRDNIQKESPNAEVILLEIDLSSFCSVQRFCSDFLALDLPLNILINNAGVFSQDLEFSAEKIEMTFATNYLGHFLLTEMLLDKMIETSKKTDIQGRIINVSSVIHSWVKRHGFCFKDILNGKKYNYNGTRAYAQSKLANILHAKEIARQLKARKARVTMNAVHPGIVKTGIIKSHKGLITDSLFFIASKLLKSTSQGAATTCYVALSPKTEGVSGKYFTDCNESKCSRLANEESEAQKLWNNTHALIHKRLHQATNNM

SEQ ID NO: 20250 - protein, 79 aa, Triticum aestivum
MSTNPSKYVFNHTMIRVKDPKASIKFYTEVIGMKLITSADYEQSKFTLYFLAFIDSVPESEEEKKKLAFSIPGVLELTQ

SEQ ID NO: 20251 - protein, 291 aa, Chlamydia muridarum Nigg
MLELLNKDLPIITQGITGKAGSFHTTQCVAYGSNFVGGVTPGKGGTQFLDLPIFDSVLEAKQATGCRASMIFVPPPFAAEAIFEAEDAGIELIVCITEGIPVQDMLAVNSLMEKSSCRLVGPNCPGVIKPGACKIGIMPGYIHLPGNVGVISRSGTLTYEAVWQLTQRKIGQSVCIGIGGDPLNGTSFIDVLQELEKDEQTEAILMIGEIGGSAEEDAADWISQHCSKPVIAFIAGATAPKGKRMGHAGAIISGNSGDAFSKQRALREAGVVVVESPALIGEAVASVLNSH

SEQ ID NO: 20252 - protein, 284 aa, Triticum aestivum
PRATSFSSNDEAFTWAKKDNRRLLHVVYRVGDIDRTIKFYTECLGMKLLRKRDIPEEKYTNAFLGYGPEETNFAIELTYNYGVDSYDIGAGFGHFGIATDDVAKTVELIRAKGGKVTREPGPVKGGKTVIAFIEDPDGYKFEILERPGTPEPLCQVMLRVGDLDRAISFYEKACGMKLLRKRDNPEYKYTIAMMGYGPEDQNAVLELTYNYGVTEYDKGNAYAQIAIGTDDVYKTAEVVKLSGGKVVREAGPLPGLGTKITAILDPBGWKSVFVDNIDFAKELE

SEQ ID NO: 20253 - protein, 591 aa, Arabidopsis thaliana
MTMMSDLSLDLVEEILCRVPITSLKAVRSSCKLWNVLSKNRILCKTEARNQFLGFTIMNHRLYSMRFNLHGIGLNENSEEFIDPSIKPIGNLLNQVEISKVFYCEGLLLCVTRNHSSKLVVWNPYLGEIRWIKTRNDYHIGVTYALGYDNNKNHMILRFFSEQGYYEIYDMNSSDSWDCFYGIPNKGLKCYQPGASLNGNAYFLTEGREVMEGYDCLLGFDFTTKKFGPLLSLSFSHDFIETGRLSCVKGEKLAVLYQRCYTYEMEVWVTTKIEPNAVSWSKFLAVEMEPLTSLKFNDDSGSFFIDEEKKIVVVFDIDESERNNTAYIIGDYGCLKEVDLDEVVNPQESVEVGDRIYSFSPFVCSCSYVPSLVKFKEDAEHERKDKKRKSKRKRTNKDGYDFILCFDFTTERFGQILPLPFKHSFRDTWTLSSVKEEKLAVAVLYWKNTCVMIEIWMTIKIDPNVESWSKFLRVDRKPCIDLRFDDRNDSFFIDEEKKVVVFFSSDKVKTSTAYVIGDNRYLRTVDLEKAANSQESVEVGERVYCFSPLVCSCSYYVPSLVKINHNAGRKRKEKKTKRKSKDKQMKLSNKV

SEQ ID NO: 20254 - protein, 341 aa, Oceanobacillus iheyensis HTE831
MNTKRIAITGFGRIGRMIFRQAIQNDQFEVVAINASYPAETLAHMVKYDSVHGIFDGDVKALEGYLEIDGKKVEIVNNRQPELLPWKKLDIDIVIEATGKFNSKEAAGLHIKAGAKKVIITAPGKQVDKTIVMGVNEAAYIPESDDVISNASCTTNCLAPVVKVIDDHFTIKNGLMTTVHAFTNDQKNLDNPHKDLRRARGCTQSIIPTTTGAAKALGEVLPHLNGKLHGMALRVPTPNVSLVDLVIDVEENVTVEQLNQLFKDASKGYMKGVLEYSDEPLVSIDYTTSDFSAIIDGLSTIVMEGKKIKVIAWYDNEWGYSKRVLDLALYVGDRLKKEMKV

SEQ ID NO: 20255 - protein, 653 aa, Zea mays
MQLLLLLILASFLLRPPAAAASAADSSSGCWPKTCGDLNVTYPFWVEEPGRPPCGPPTFQLKCDSSGAFLIRSVYQASQVLGIFPENNSFHVVDHNLPLATGCPAPTVNLSLLFPGTFVLSRANKELLFLGKCTGFPPAESAGFRSLPCDNSSFVRLGDGRNFSSQSIQGGVPQGCLFTVLPTLGAPDGNGDDYVASMRNGFLVDWKAVPGDCPKCMARGGECTYGGPDAEFACDCSGGKCGTKGNGRKIPLIVSISVAASLLLPCIYVLVWHRKKLEFFLCRKTSSAIEENIEALILAHGSLAPKRYRYSEVTKITSSFNIKLGEGGYGMVFKGRLDDGRLVAVKFLHDSKGDGEEFVNEVMSIGRTSHINIVSLFGFCLEGSKRALIYEYMSNGSLDKYIYTENPKAVLGWDKLYTIAIGIARGLEYLHHSCNTRIVHFDIKPHNILLDQNFHPKIADFGLAKLCHMKESKLSMTGARGTPGFIAPEVHSRTFGVVSTKADVYSYGMMLLEMVGGRKNVNSAAQESSEKYFPHWIYDHFGQEDGLQACEVTRENEGIAKKLSVIGLSCIQILPMHRPTIGKVMEMFERGSDELDMPPRQNFSQIFQDPVHSLNAETMSMISGTKAKASSEVLKMKGISVVNSKTIQRLPTL

SEQ ID NO: 20256 - protein, 205 aa, Brassica napus
  misc_feature (26)..(26): Xaa can be any naturally occurring amino acid
  misc_feature (45)..(45): Xaa can be any naturally occurring amino acid
MGVDYYNVLKVRRDANDDDLKKSYRXLAMKYHPDKNPTSKKEAEXKFKQISEAYDVLSDPRRRQIYDQHGEEGLKSSDLPSAAETASSAAAAAKQRSYSSRRDDSEFRYYPRDAEDIFAEFFGTSRDSFAGGGTSGVGGGGRRFKSAEAGGQANKKTSPANKKAAPANRKAADIESALPCTLEELYKGGKKKMRISRLVPDEFGK

SEQ ID NO: 20257 - protein, 931 aa, Bartonella quintana str. Toulouse
MQERSFFSRHIGLRSDETQKMLDVLGLDCIDTLVSQAIPHSIHLGRVLNLPKAVSEGQALEELSKIMGRNHVHKSFIGQGYHGTCVPPVILRNLFENPAWYTAYTPYQAEISQGRLELLFYFQTLISELTGLPVAAASLLDEATALAEANAVAVRFAREKKTKISLQSLLHPQILSVVQTRAETQGISISENSEICSNTAAIVLSWPDTKGFFNDYSEVIKEAKAKGALVIVVADPLALTLMEPPAQWGADIVVGSMQRYGVPMGFGGPHAGYLAVSDALIRLIPGRIVGQSVDTKGRVGFRLALQTREQHIRRDKATSNICTAQALLANMATAYAVWHGPQGLQEIAQRIHSLTCRFMGGLEAAGIPCEGESFFDCVSVVVKGKAQEIARQAKAGGRLVRILDDDRVAVNFDELSTEEDACTLAQLFGAQLVDQVSPRLWGKGRDAAFLSQPFFHVVHSETDMMRFLRRLSDKDLALDRAMIPLGSCTMKLNAAAELMPVSWPTVANIHPFVPKEDAAGYQEMINQLNAWLCEITGFAQVSFQPNSGAQGEYAGLLAIRRYYQSRGENQRTLCLVPASAHGTNPASAHMAGMEVVVVKCLSDGDVDIDDLKMKAQLHKDRLAALMITYPSTHGVYEENIKDICSLIHENGGQVYFDGANLNALVGLTRPADIGADVCHMNLHKTFAIPHGGGGPGVGPIGVAEHLKPFLPGHAQNGTTHAVSAAPYGSASILVITWMYIRMMGAKGLKYATQTAILNANYIAERLSQAYSILYRGKHGRVAHECIVDTRVLKEQYGVSVDDIAKRLIDYGFHAPTMSFPVPGTLMIEPTESEPKAEIDRFCDALLSIAEEAKKVGAGVWPKDDNPLVNAPHTLVDTLDDAWVHPYSRQEAAFPNHHLDPTNKYWPPVSRIDNVAGDRVLICSCPPLGNTS

SEQ ID NO: 20258 - protein, 779 aa, Magnaporthe grisea 70-15
MGWKDKIFRGTGAGTSGSSGNASASKKKEKEEPPPELTPLEKLLQNAGAVREDGSDKFFGLENSALEDHVSELHIDIIIPSYCNSIVQALYYSEIFRESVVNYPPFSPSDTPNGKRAKISVQIRPPPKKEAEDEPQGKKKTSTKDVLKQRQMINSGQGGPGLQPTRPEDKPDSPEYKKKQAMLKGPVLELAQENSASYGMDESTFTGLKDLFLALIESQSRTGVLSPQRFLEIFKRDNEMFRNSMHQDAHEFYGLVLNDVISTVEANAKRLQEQEQAAAKDGLAKSVEDALSPTNALVKAPAGYRSPGTGWVHDIFEGLLTSETRCLTCETASQRDETFLDLSIDLDEHSSVTSCLRKFSAEEMLCERNKFHCDHCGGLQEAEKRMKIKRLPKVLALHLKRFKYTEDYSRLQKLFHRVVYPYHLRMFNTTPDAEDPDRVYELYAVVVHIGGNAYHGHYVSVIKTADRGWLLFDDEMVEPVDKHFVRNFFGDRPGMACAYVLFYQETTLEKAMEEEDYEGIEEIRLATQTADLASDKPSGAESLPPLEKPLTTPIPPVADHDAMAALDHALTAPNGTTPAVPQTPANPSVPAVPAEAPFSHPLVAAPPKPAAEIKPSSKEDKAREKQLQKEKKAAEKEQVKREEKERKERESRQREARKSEQEDLRRAMEASKQTAAEEEQKQKADNALSSKEAPTSPALGGGIGNLMKRGSLSRASLGFLNREKEKEKDKSSGNGVANGSSSDHAANGSAASPHPESPASLKKKFSFALGRKKSTHVLS

SEQ ID NO: 20259 - protein, 535 aa, Treponema pallidum subsp. pallidum str. Nichols
MNWRNLDECAAYARLQAIRAPSLKTVLCGPEGIERVRRYCTDAGAGLRYHYAAKTVNEEILTALAALADEQELVAKYDALRAGAQINTGEKRKVLHHLTRLGVQGSSLASLPCEVRDMHAFYTKEYERVCAFARQVHEGGLRTSRGAPFTDVVQIGIGGSDLGPRALYLALEGWAQRHQAVKMRTHFISNVDPDDAALVLSKLPLETTLFILVSKSGTTLETLSNELFVAHVLRQAGLEPHTQFVAVTSETSPLANNPQYLASFYMDDFIGGRYSSSSVCGAVVLTLAFGPQVFGHFLSGAAEADRAAQEQDIRRNAALLDALIGVYERTILGYEHTAVLPYSQALARFPAHLQQLDMESNGKSVNRFGIPITYKTGPVIFGEPGTNGQHSFYQHLHQGTSVVPLQFIAFQHSQLGQDPIIRGSTGQQKLLANVVAQIVAFARGKEHADANKTFSGERPSSLLYAKALTPQTLGALLAHFENKIMFQGFAWNLNSFDQEGVQLGKTLAQHILAGEVEGVLRAYADLFDLAHAPTC

SEQ ID NO: 20260 - protein, 276 aa, Nicotiana sylvestris
MATNGCLISLPPFFTTTKSISSYPFLSTQLKPISLSSSLPTLLSLNKRTTQFPTFVSVLSEDDNTLVLDDQEQGGDFPSFVGEAGETEEYQEPSEDAKLFVGNLPYDIDSEGLAQLFQQAGVVEIAEVIYNRETDRSRGFGFVTMSTVEEADKAVELYSQYDLNGRLLTVNKAAPRGSRPERAPRTFQPTYRIYVGNIPWDIDDARLEQVFSEHGKVVSARVVFDRESGRSRGFGFVTMSSEAEMSEAIANLDGQTLDGRTIRVNAAEERPRRNTY

SEQ ID NO: 20261 - protein, 273 aa, Nicotiana sylvestris
MASSASSLHFLSLTPQTLPLPKPTSQTTSLSFFSLPPSSLNLSLSSSSSCFSSRFVRKVTLSDFDQIEDVEDGDDGVEEERNFSPDLKIFVGNLPFSADSAALAELFERAGNVEMVEVIYDKLTGRSRGFGFVTMSSKEEVEAACQQFNGYELDGRALRVNSGPPPEKRENSSFRGGSRGGGSFDSSNRVYVGNLAWGVDQDALETLFSEQGKVVDAKVVYDRDSGRSRGFGFVTYSSAEEVNNAIESLDGVDLNGRAIRVSPAEARPPRRQF

SEQ ID NO: 20262 - protein, 211 aa, Triticum aestivum
MASVTSRCSGLLLPDLRPGLAGLRSRSRPPSSPRVSLRGGRRRPRTLSCVAPPDSAEPKTDEQNVKAELGEEKPQPSSSSSSSTPQEAAAEPPVPDRGLNRRIAVLTTLAAVGLFGSQRLQLGGFSLKDLAANAVPYEEALSNGKPTVVEFYADWCEVCRELAPDIYKIEQQYKDRINFVMLNVDNTKWEQELDEFGVEGIPHFAFLDKRD

SEQ ID NO: 20263 - protein, 882 aa, Agrobacterium tumefaciens str. C58
MPAETKTTCPYCGVGCGVIATVNDSGVVSVKGDPDHPANFGRLCSKGSALAETIDLDGRLLHPEIAGRRAAWDEALDLVASRFSDAIAEHGPDSVAFYVSGQLLTEDYYLANKLMKGFIGSANIDTNSRLCMSSSVAGHRRAFGADTVPGTYEDMELADLVILTGSNLAWCHPVLYQRLAAAKAARPGMKVVVIDPRRTMSADIADMHLAIRPDGDVALFTGLLAHLFASSAIDRGYVENHTAGFEAATQAASEHSLPEIAEATGLTIAELIPFYELFERTEKTVTCYSQGVNQSESGTDKVNAIINCHLATGRIGRPGMGPFSLTGQPNAMGGREVGGLANMLAAHMSIENADDRDRVQRFWASPAIAQKPGLKAVDMFRAVADGRIKALWIMATNPVVSMPDAGAVEVTIKACPFVVVSDVMANTDTARHAHVLLPSLGWGEKDGTVTNSERRISRQRSFLDAPGEAKADWWQMAEVARRMGFDAAFAYQQPSEIFAEHAALSGFENAGRRDFDIGGIERDSYETMAPVQWPKAGAGEAEVTRFFANGRFYHADGKARFIATALPETDRTSADYPLTLNTGRIRDQWHTMTRTGKSARLTAHIAEPFAEIHPRDAQALGIKSADLVELESPHGKVLLRALVSERQARGSVFAPMHWNDQFASRARIDVVVAPVTDPHSGQPASKNVGVRVTRFEASAYGFAICRSRPDAPDCAYWAVAKAEGGYRMELAFAEAPEDWTLWARRVFGIDVRIEPLGYSDRQTGDLRLAFFDGDTLLAALFIAREPVAVARNWAISQLSERHEDLRMRFALVAGRPGAGRADPGATVCSCFNVGVNQITAAIREGCHSVEAIGNALNAGTNCGSCRAEIRGIIDGCLKTAAE

SEQ ID NO: 20264 - protein, 485 aa, Xanthomonas oryzae pv. oryzae KACC10331
MATELAPPQNAEILERLGRRYDAGFITEIESDSLPPGLDEDVIRALSAKKDEPQWMTDWRLEAYRHWLKMPMPEWAKLQISPIDFQALSYYSAPKGPKYASLDEVPKELLDTYDKLGVPLHERAKLAGVAVDAVFDSVSVGTTFRNELAEKGVIFCSMSEAIKEHPEIVKQYLGSVVPVGDNYFAALNSAVFSDGSFVFIPKGVRCPMELSTYFRINAGHTGQFERTLIVCEDKAYVSYLEGCTAPMRDENQLHAAVVELVTLDDAEIKYSTVQNWYPGDEEGRGGIYNFVTKRAECRGARSKVTWTQVETGSAITWKYPSCVLIGDDSVGEFHSVALTHHRQQADTGTKMIHIGKRSKSKIVSKGISAGRGQNTYRGLVKVDRNADGARNYTQCDSLLIGKQCGAHTFPYIEVKNPGATVEHEATTSKISDDQLFYCRARGISQEDAVSLIVDGFCKQVFRELPMEFAVEAKKLLEVSLEGSVG

SEQ ID NO: 20265 - protein, 290 aa, Haloarcula marismortui ATCC 43049
MSVLVDEDTRVVVQGITGGEGKFHTEQMLEYGTNVVAGAVPGRGGQEVAGVPVFDTVQGAAREADANAAVVFVPPAFAGDACFEALDAKGIDLVVAITEGIPTQDMARVYRKLQETDTHLVGPNCPGVITPGVAKLGILPGNIFSSGNVGLVSRSGTLTYQVVDNLTNRGIGQSTAIGIGGDPIIGTDFIGALEQFEADPDTHAVVMCGEIGGEDEEEAARFIGEHMDTPVAGFIAGRTAPPGKRMGHAGAIVSGSGTGTAQSKITALEDNGVPVGDTPEEVADHVEDLL

SEQ ID NO: 20266 - protein, 422 aa, Streptomyces sp. 275
MRRRVVVTGLGLVAPGASAPRPSGNSSAPGGRPPGRSPCATPPRSVPGSLPSATSTRSCTDSHPKRSAAWTGPPSSPPPPRHEAVAEAGLRFEDLDPHRTGVTVGSAVGCTTSLEREYATVSNGGRAWLVDHTYAVPHLYGHFVPSSMAAEVAWRVGAEGPVGVVSTGCTSGLDAVAHARELILEGSADIMVAGATDAPISPITLACFDAIKATTPRNDDPEHASRPFDATRNGFVLGEGAAMFVLEEHGHAVRRGARVLAELSGFASRCNAFHMTGLRPDGREMAEAIRGALTEAGARPDDIDYVNAHGSGTKQNDRHETAAFKAALGESAYRTPVSSIKSMVGHSLGAIGAIEIAACVLALRHGVIPPTANLHEPDPECDLDYVPLTSRRADLATVLTVGSGFGGFQSAMVLSRPGEHAA

SEQ ID NO: 20267 - protein, 413 aa, Listeria monocytogenes str. 1/2a F6854
MDKRRVVVTGVGAVTPIGNDAETSWENAKKGVNGVAKMTRLNPDDFPVKIAAELKDFDVEKYLEKKEARKMDRFTHYAIASAEMAVQDSGLVIDDSNANRVGVWIGSGIGGMETFETQYEIFLNRGHRRVSPFFVPMMIPDMGSGQVSIRFGAKGINSTTVTACATATNSIGDAFKVIERGDADAMITGGAEAPITKMSLAGFTANKALSLNPDPETACRPFDKDRDGFIIGEGAGIVILEEYEHAKARGAKIYAEIVGYGATGDAYHITAPAPNGEGAARAMKMAIDDAGITPDKVDYINAHGTSTPYNDEYETQAIKTVFGEHAKKLAISSTKSMTGHTLGASGGIEAIFALLTIRDNIIAPTIHLKNQDEVCDLDYVPNEAREANVNVVISNSFGFGGHNATLVFKRIED

SEQ ID NO: 20268 - protein, 373 aa, Acinetobacter sp. ADP1
MPLSHVEALVEDIRAGKMVILMDDEDRENEGDLVMAATHVRPEDINFMITHARGLVCLTLSRERCQQLNLPLMVDHNGAQHATNFTLSIEAAEGITTGISAAERAHTIRTAVAAHAKPSDIVQPGHIFPLMAQPGGVLHRAGHTEAGCDLTRLAGLEPASVICEIINEDGTMARREDLEVFAEKHGLKIGTIADLIHYRMTNEQTVERLGQQTIETDYGSFELYRYREIGNPDIHLALVKGEPKDGVTTVRVHGFNPTRDLLKLKKQDGEPAWNLDRALQSIASAERGVLVWIGQNHLQDLGPALESLTQPKPLKSNAALSHQYQTIGVGAQILRDLGVEKMKLLSSPLRFNALSGFNLEVVEYITADQTIEN

SEQ ID NO: 20269 - protein, 158 aa, Streptococcus pneumoniae R6
MTSLYDFSVLNQNNQATPLDSYRGKVLLIVNTATGCGLTPQYQGLQELYERYQDQGFEILDFPCNQFMGQAPGSAEEINTFCSLHFQTTFPRFAKIKVNGKEADPLYVWLKDHKSGPLGKRIEWNFAKFLIGRDGQVFERFSSKTDPKQIEEAIQTLL

SEQ ID NO: 20270 - protein, 392 aa, Glycine max
MDVIDNGVPAPLSMFSESDSDMKSVNIDDLLPKEKLQRKLPKPSAGRRKNGYLQNGGSVHPYADPEQCADTKQSFGASSSGVTSLDSIQKHKLNIDSDSLGCIQTQIPMTRPDYSHAPNHTSLFPTLSGSRSEHDGHLSPSLKESSYASNMESSHGHSLEAAALKTKENREKLYNCCDGPLNSSFKNENTPNQMPFCSPGSAQQVGHHFENENEGHSEFRGVGLGFSPEIDSSTVQESSSMGSALDQASLEATSFCHLQQIMDQLDIKTKMCIRDSLYRLAKSAEHRHNNSNANGCIGDDETCKAMMAQDANRCAGLMDMETDTNPIDRSVAHLLFHRPSDPSVLLPNETLPFKSSATMHHGSVINPPVKTEKQVCQEDSTGVEKKVLRGNT

SEQ ID NO: 20271 - protein, 539 aa, delta proteobacterium MLMS-1
MNEFGFEEIFAELLDEDRSRQLFLEALAAMVPGSDLLLLGPGQLSLSLGKAIELGVDEAAQLGRQVSGGQVIARPWSEGWLYVLAVPQLEATLCWRLPGQRDLSGEPALLAFLRHGVAYALEEEKRREEAAQDEQYRHQIEVLKKQHGELIEDNYRQYRINQQQQEEYTRNLESEIARQTAELRQANARLEESSRLKSEFLANMSHELRTPMNAITGFAELLAETPLNQEQDEYCRTIRQAAAALLNLINDILDLAKIEAGKLDLETVPFSLDELLEGVRAMFTLAARKKGIEITIKRGEGLPDTLRGDSHRLRQVLINLLGNAIKFTEQGGVELEVAAGSTAADKVRLFFAVRDSGMGISPHRLEAIFEKFTQADGSTTRRFGGTGLGLAICRQLVELMGGQIEVSSQQGKGSTFSFEIELERESAAKKPPPAPATVPGPVAGDGVSRVLLVEDNPVNQRLASLLLAKQGCQVTVAGDGRQALEKLAVQEFELVFMDIQMPRLDGLEATRRLRELEADPAARAAHAALARRTTPLPVV

SEQ ID NO: 20272 - protein, 104 aa, Glycine max
MVEGGAPMAHAVLTSGQVTGSLPNCIGYLQKGGTPSSECCNGGKSLKAAAKTTANRKTGCNCLRSAASKISGLNANNAAWFPGNCGVSIPYKISTLTNCVTIKV

SEQ ID NO: 20273 - protein, 149 aa, Oryza sativa
  misc_feature (66)..(66): Xaa can be any naturally occurring amino acid
  misc_feature (75)..(75): Xaa can be any naturally occurring amino acid
RCTTRDHSLLGSTTCLARPGRRPCPVERAVVVMEADAQAKVALIRIGTRGSPLALAQAHETREKLXAAHSELAEXGAIEIVMIKTTGDMTSDKPLADIAGKGLFTKEIDDALLQGRIDLAGHSMKDVPTYVPEGTISPCNLTREDVRYA

SEQ ID NO: 20274 - protein, 338 aa, Arabidopsis thaliana
MESSILKSPNLSSPSFGVPSIPALSSSSTSPFSSLHLRSQNHRTISLTTAGKFRVSYSLSASSPLPPHAPRRRPNYIPNRISDPNYVRIFDTTLRDGEQSPGATLTSKEKLDIARQLAKLGVDIIEAGFPAASKDDFEAVKTIAETVGNTVDENGYVPVICGLSRCNKKDIETAWEAVKYAKRPRIHTFIATSDIHLKYKLKKSKEEVIEIAKNMVRFARSLGCEDVEFSPEDAGRSEREYLYEILGEVIKAGATTLNIPDTVGITLPSEFGQLIADIKANTPGIQNVIISTHCQNDLGLSTANTLSGAHSGARQVEVTINGIGEELETLHWKRLSWP

SEQ ID NO: 20275 - protein, 497 aa, Mesorhizobium loti MAFF303099
MKGDDGLTVTQSLTRRLKNPELFDDLAGVPGRKAEQSTRRFSVFNPSTGELLAELPDMDVRDVSKAIDKAEAAQEHWAALTARERSDILWEWHQLILDHSEDLAAILTAEMGKPLAEAKSEIAHAAAYLQWYAEEANRIYGETISPPSNDRRMLVIKQPIGVVGAITPWNFPASMVARKISPALAAGCAIVLKPAEQTPLVAGAMFTLARMAGFPDGVLNLIYASEGDAVGRELCSNPKVRKISFTGSTEVGRLLMRECSDQIKRTSFELGGNAPFIVFDDADVDAAVDGALQAKFRNAGQTCVSANRLYVQSSVYNEFCDKFTKRVSALRVGDGFEPEVAIGPLIDKCALAKIEDHIRDAVRQGGKIRCGGNRIGESGTFFEPTVITDVERTMRVAQEETFGPLAPIIRFNDPDQVVREANDTIYGLAAYFYASNLKRVWRVAEALEYGMVGINTGRMSSEAAPFGGMKQSGIGREGSRHGLEDYLEMKYLCMGGL

SEQ ID NO: 20276 - protein, 77 aa, Brassica rapa
FTRYSRLRVIAEIRHGDIFHSANIVSSIEFDRDDELFATAGVSRCIKVFDFSSVVNEPADIQCPIVEMSTRSKLSCL

SEQ ID NO: 20277 - protein, 490 aa, Oryza sativa
MGKKRKLDSKSPAAARSAAARAAAAAAAAAAAAAVAEPSSQPEALAEDPAPSSQPLGLSSEGAGERMMSREAGGGEEEEVEEVEVEEEVEVDEDEDGEGEGEEEEEAAERDADSIQALLNSFPKDQLVELLSAAALSHEDVLTAVHRAADADPALRKIFVHGLGWDATAETLTEAFSAYGEIEDLRVVTDRATGKCKGYGFILFSRRSGARAALREPQKKIGNRTTACQLASVGPVPPGGMATNPAPAVAPAPAQLALPPVSEYTQRKIFVSNVGADIDPQKLLQFFSKYGEIEEGPLGLDKVTGKPKGFALFVYKTLDSAKKALQEPHKQFEGVVLHCQKAIDGPKPNKGGGLGGLYGAGTSGGRKGAGGYGAHSHSLPGAAVGGHVMPSPVSSLTSLPGVAGGPGVNPALGQALTAILASQGGGLGLNNILGVGANGSGLPNPGASAGLGSSGLPGMPGAGGYLGGYGGGGGYGSTPPGGPGRNYMGH

SEQ ID NO: 20278 - protein, 515 aa, Glycine max
MLSNRIWQRRALISARTLFSGSASHSSSSSHAISLRFAKANAPSSSHVIFNFARVDRYWFSTQPALELPASKIVDVPLAQTGEGIAECELLKWYVQEGDYVEDFQPLCEVQSDKATIEITSRYKGKISNILYVPGDIVKVGETLLKILVDESTFPSGIPCDSENAKSPDTDQTLVNESVFTTVIDDSDNGKLIDSDPGKGRQTGVSSTPAVRSLAKQHGIDITEICGTGKDGRILKEDVLNFSVKKGIIKNPSTVLQSDSGEQLQGAEGYNCNVATKSYRPSDDRTLPLRGFQRAMVKSMSLAAKVPHFHYVDEINCDALVELKTSFQKNNPYPDVKYTFLPILIKSLSMALSKYPFMNSCFKEDALEVILKGSHNVGIAMATSHGLVVPNIKNVQSLSIMEITKELARLQQLASNNKLTSEDICGGTITLSNIGAIGGKFGSPLINLPEVSIIAVGRIQKVPRFADNGNVYPASLVNVNIGADHRVLDGATVARFCNEWKQLIENPELLTLHLK

SEQ ID NO: 20279 - protein, 956 aa, Arabidopsis thaliana
MERARRLAYRGIVKRLVNDTKRHRNAETPHLVPHAPARYVSSLSPFISTPRSVNHTAAFGRHQQTRSISVDAVKPSDTFPRRHNSATPDEQTHMAKFCGFDHIDSLIDATVPKSIRLDSMKFSKFDAGLTESQMIQHMVDLASKNKVFKSFIGMGYYNTHVPTVILRNIMENPAWYTQYTPYQAEISQGRLESLLNFQTVITDLTGLPMSNASLLDEGTAAAEAMAMCNNILKGKKKTFVIASNCHPQTIDVCKTRADGFDLKVVTSDLKDIDYSSGDVCGVLVQYPGTEGEVLDYAEFVKNAHANGVKVVMATDLLALTVLKPPGEFGADIVVGSAQRFGVPMGYGGPHAAFLATSQEYKRMMPGRIIGISVDSSGKQALRMAMQTREQHIRRDKATSNICTAQALLANMAAMYAVYHGPAGLKSIAQRVHGLAGIFSLGLNKLGVAEVQELPFFDTVKIKCSDAHAIADAASKSEINLRVVDSTTITASFDETTTLDDVDKLFKVFASGKPVPFTAESLAPEVQNSIPSSLTRESPYLTHPIFNMYHTEHELLRYIHKLQSKDLSLCHSMIPLGSRTMKLNATTEMMPVTWPSFTDIHPFAPVEQAQGYQEMFENLGDLLCTITGFDSFSLQPNAGAAGEYAGLMVIRAYHMSRGDHHRNVCIIPVSAHGTNPASAAMCGMKIITVGTDAKGNINIEEVRKAAEANKDNLAALMVTYPSTHGVYEEGIDEICNIIHENGGQVYMDGANMNAQVGLTSPGFIGADVCHLNLHKTFCIPHGGGGPGMGPIGVKNHLAPFLPSHPVIPTGGIPQPEKTAPLGAISAAPWGSALILPISYTYIAMMGSGGLTDASKIAILNANYMAKRLEKHYPVLFRGVNGTVAHEFIIDLRGFKNTAGIEPEDVAKRLMDYGFHGPTMSWPVPGALMIEPTESESKAELDRCLRCSHFNQGRNCTD

SEQ ID NO: 20280 - protein, 477 aa, Vibrio parahaemolyticus RIMD 2210633
MQQIKNETLKEVFKQWASDDGVVVINPATEQELIRLKPSSIEELDCLIEACSAEQVRWAKLSAKERSSCLKNWHQLLMEHAEDIATIITLEQGKPLSESRGEVSYGASFVEWFAEEARRAYGEVIPAPAIDRRLSTIKQPVGVCAAITPWNFPIAMITRKAAPALAAGCGMIIKPSELTPLTALAVVELAYQAGIPKPLLPVVISEQAAEFGQVLSMDPRIKKISFTGSTRVGKILMKQASETVKAVSMELGGNAPFIVFEDADLESAADGLIASKFRNAGQTCVCTNRLYVHQNAKERFMEKVLAKMTELNVGNGLESGVTVGPVITMASKHRLEAVIDQALQEGATIANRPQKLAGRFMEPVILDNVDQGMAIVQQELFGPVLPVLTFEDDEQVLAMANDTEYGLACYFYTDSLKRIIKFTEGLEYGMVGVNEGIISTEVAPFGGIKESGVGREGAKQGLDEYLETKYICLGGLN

SEQ ID NO: 20281 - protein, 501 aa, Aspergillus nidulans FGSC A4
MATAVSLTAPNGHKYEQPIGLFINNEFVASKSGEKFATVNPSDEEEITQVYAAGEEDIDIAVKAARKALKDPSWKLLTATDRGNLMLKLADLIDQNKETLAVIETWDNGKPYQVSLNDDLSEVVNTIRYCAGWADKIHGQTISTTPAKFAYTLRQPIGVVGQIIPWNFPLAMAAWKLGPALACGNTVVLKPAEQTPLSILYLAKFIKEAGFPPGVVNIVNGLGRVAGSALVTHPGVDKVAFTGSTMTGKEIMKMAAGTMKNVTLETGGKSPLLVFDDADLEQAAKWAHIGIMYNQGQVCTATSRILVHEKVHDEFIRLFREAVATTSKVGDPFSDDTFQGPQVTKAQYERVLSYIESGKQEGATLVDGGVPYKNVKDGKGFFIAPTIFTNVKDNMRIYREEVFGPFVAIARFSTEEEAIDRANDTTYGLGAAVFTKDIERAHRVASEIEAGMVWINSSNDSDFRVPFGGVKQSGIGRELGEAGLEAYTQIKAVHVNMGTKL

SEQ ID NO: 20282 - protein, 319 aa, Oceanobacillus iheyensis HTE831
MKRIGVLTSGGDSPGMNAAIRAVVRKAIYHDLEVYGIKNGYQGLMDGNIEKMTLGSVGDIIHRGGTILFSARSEEFKTDEGQFRAIEQLNKHNIDGLVVIGGDGSFQGAKKLTEKGFPCIGVPGTIDNDIAGTDYTIGFDTSLNTIIDAVDKVRDTATSHERTYIIEVMGRDAGDLALWAGLAVGAESILIPEEKEDFSSIVQRLKNGHDRGKKHSIILLAEGVGSGFEFGKRIEEVAELETRVTVLGHIQRGGSPTGQDRVLASRLGARAIELLIDNQGGRMVGIQKNVLVDYTFDEVFNVEHTIDKGMYKLSKELSI

SEQ ID NO: 20283 - protein, 815 aa, Agrobacterium tumefaciens str. C58
MTQKLVIIGNGMAPGRMLENLFETAPGLYDVTIFNAEPRVNYDRIMLSPVLSGEKSYEDIVIHNDEWYAANNVTLHKGAKVTRIDRANKIVTSENGITASYDRLVIATGSLPFIIPVPGHQLPGVLAYRDLDDVTKMLEIAKGKGRAIVIGAGLLGLEAAYGLKRQGMDVTVIHLMPTIMERQLDPAAAYLLEKALNERGIDIITKANTKCILGEEKVEGIELEDGRIIKGDMVVMAVGIRPASGLAKEAGIAVNRGIVVDDGMMTSDASIYALGECAEHRGMCYGLVAPLYESARVLADRLCGGSAEYHGSVTNTKLKVTGINLFSAGDFAEGDDREEIVLRDATAGVYKRLILKENRIIGAVLYGETADGSWFFDLMKKSTDISAMRETLIFGQAYQGGSPLDPMAAVAALPDDAEICGCNGVCKGKITSAITSKGLTSLDDVRAHTKASASCGNCTGLVEQLMTLTLGDTYNPAAVQPMCKCTDLGHDDVRRLIKAKGLKTIPAVMQELEWKTSCGCAKCRPALNYYLVCDFPDEYADDYQSRYINERVHANIQKDGTYSVVPRMWGGVTNADELRAIADVVDKFEIPLVKVTGGQRIDLLGIEKEDLPAVWADLGKAGFISGQAYAKGLRTVKTCVGEQWCRFGTQDSTGLGIRIEKFMWGSWTPAKLKLAVSGCPRNCAEATCKDIGVICVDSGFEIHFAGAAGLDIKGTEVLGLVHTEDEALEHIVALTQMYREQARYLERIYKWAKRIGYDEVRRQIMDDADKRKAYFDRFVFSQKFAQVDPWSERVSGHDKHEFRPMAAIGFSEAAE

SEQ ID NO: 20284 - protein, 210 aa, Salmonella typhimurium LT2
MILHPSLASADPLRYAEALTALHDAPLGSLHLDIEDTSFINNITFGMKTIQAVAQYTRHPLSFHLMVSSPQRWLPWLAAIRPGWIFIHAESVQNPPEILADIRAIGAKAGLALNPATPLLPYRYLALQLDALMIMTSEPDGRGQQFIAAMCEKVSQGREHFPAAECWADGGITLRAARLLAAAGAQHLVIGRALFTTANYDVTLSQFTAL

SEQ ID NO: 20285 - protein, 222 aa, Medicago sativa
MAASITAITVENLEYPAVVTSPVTGKSYFLGGAGERGLTIEGNFIKFTAIGVYLEDIAVASLAAKWKGKSSEELLETLDFYRDIISGPFEKLIRGSKIRELSGPEFSRKVMENCVAHLKSVGTYGDAEAEAMQKFAEAFKPVNFPPGASVFYRQSPDGILGLSFSPDTSIPEKEAALIENKAVSSAVLETMIGEHAVSPDLKRCLAARLPALLNEGAFKIGN

SEQ ID NO: 20286 - protein, 531 aa, Methylobacillus flagellatus KT
MRDMFTKDGRRFEKFSLEAEGLLLDYSKHRITDETLPLLFKLARDSKVEEWRDRMFAGEKINFTENRAVLHTALRNRSNTPVYVDGKDVMPDVNRVLAQMRKFSTSIRSGEWKGYSGKRITDVVNIGIGGSDLGPVMVCGALKPYAQAGLNAHFVSNIDGTHLAQTLERCDPETTLFIVASKTFTTQETMTNARSARSWFLQAAKDEAHVAKHFVAISTNADEVGKFGIDAANMFEFWDWVGGRYSLWSAIGLSIAIYIGMDHFEELLQGGYEIDRHFKNAPLEQNIPVIMALLGIWYNNFFGADSLAILPYDQGLARFPAYLQQADMESNGKFVARDGRIVQCTTGPIIWGEAGTNGQHAFYQLIHQGNRLIPCDFMMPLQSHYSMGKNGNEHHLILLANCFAQTSALMQGKTLDEAKAELVAQGLTGEALETLLPHKVFEGNRPSTTILFDKLTPKTLGKLIAIYEHKIFVQGIIWNINSFDQWGVEYGKQIAKKILPQLSEDQASTEYDSSTNGLMNYFKSRTQSSGT

SEQ ID NO: 20287 - protein, 298 aa, Synechococcus sp. WH 7805
MLSAVMASRYGHSPRDVWDSRIRSGELLLNGQSLQNDVPVGSRDVVQWRRPPWLEPAIPDQWSVVYDDGDVLVINKPSGLPVMPGGGFLQHTLSALLMEASRSAGASQVPKPVHRLGRFTSGLQVCARRPQTRAELSRQFRPEGGCRKTYLAWANPVKGLRADQPLVVTTDVVERVHPLLGWVWGPDPFDGEPLRRRLHARSELRLLKRCDQGDLVEVAISTGRPHQIRIHLAQLGSPLLGDPLYLPQQRINAAAVPGDGGYRLHAHTLALENGLHLSCVAGSGFAPGELLLAASQEL

SEQ ID NO: 20288 - protein, 238 aa, Synechococcus sp. WH 7805
MTPEQQLKDKLAEKQEVKGYFETTGFDRWNRIYSESDDVNKVQRNIRIGHQKTVDEVLAWIKDSGEFSDVSFCDAGCGVGSLSLPLAAMGAGSISASDISEAMAQEAERRAREAGLDMTKLNFFASDLESLSGAFHTVCCLDVFIHYPQAAAEEMVKHLCSLSEQRLLVSFAPYTPLLALLKSIGQLFPGPSKTTRAYTLKEEGIVKAAMACGYEPVRRSLNKAPFYFSRLIEFRKKE

SEQ ID NO: 20289 - protein, 474 aa, Mycobacterium sp. KMS
MRRSHSPGSRADGSARDDGWVVTDLDLDLQALPLAPKNPLPYRQLLPLVRHFHTGQEVLRQAAGPVIRLKLGPKWMIPEIVVVTSPAGIRDVLGRNHASAERCRVHDEVRDLGGESLFVLPNDPWIPRRRALQPVFTKPSVRGFGGHMSRAAEMVGERWGQTAQVNLDEECRRLTMRSLGRSILGLDLDAKADLIAGPLPVAAGYAADRALKPVRAPRWLPTPQRRRANAAVATMKAVTNDILQACRADPARDAPLVHALINASDPETGRSLSDDDICNELLVFMLAGHDTTATLLTYALWALGHHPDIQDRVAAEACALGDRLPTPDDVGRLGYTVQVLNESLRLCPPAAGVGRMALRDVEVDGYRVEAGSLVGIGIYAVHRDPELWDRPLEFDPERFSPENVKDRDRWQFIPFAGGPRACIGQHFAMLEATLALATLIRSHEIRSIDDDFPLETPYTTVAAGPIWARVHRRT

SEQ ID NO: 20290 - protein, 452 aa, Nostoc punctiforme PCC 73102
MQQLKSAEEIPGSYGLPILGETLEIFRDSELYLWRRFQQYGSVFKTSVLGRKRAYLIGPSANRLVLVEQAENMSSRIGWYFLESTFGNNILLQDGEEHRLTRRLMYPAFHGKAIATYFDTIQNIVQDFLKDWGERGTISLNSSFRQLTLMIATRLFLGSQNKSEVEQTSQWFTQLLDSSMAIFKWNVPFTLYGRGQNARGKLVAFLREAIAQRIEQGNLEESKDVLGLLLAAVDEDGNKLSETQVINEALLLLFAGHETTASLLTWVIFELGNHPEWRERLRQEQLAVVGNNPLSLSHLKQFPQLTNVLKEAERLYPPVYAYNRGVLKDIEYGGYRIPAGWFVTISPMLTHRLPELYTEPDRFDPDRFAPPREEDKKHPLALMGFGYGSHSCLGMEFAQMEMKIVLSTLLRHYDWTVKPDYSAIAPVRQPSKVKDILQAYIEPLLIKHPLDS

SEQ ID NO: 20291 - protein, 448 aa, Streptococcus pneumoniae TIGR4
MHRHLKLWDLILLGIGAMVGTGVFTITGTAAATLAGPALVISIVISALCVGLSALFFAEFASRVPATGGAYSYLYAILGEFPAWLAGWLTMMEFMTAISGVASGWAAYFKGLLSQYGIAFPQALNGTFNPQAGTFVDLLPILVLVLVTSLVLLNAKAALRFNSILVILKFSALALFVLVGIWNIKFDNWSNFAPYGFGQIYGASTGIMAGASLMFFGFLGFESISMAVDEVKTPQKNIPRGIVLSLSIVTILYALVTLVLTGVVHYSHLNVDDAVAFALRSVGISWAANYVSLVAILTLITVCISMTYALSRMIYSLARDGLVPAAFKELTKTSKIPKNATILTGLASAVAAGMFPLASIAAFLNICTLAYLIMLAYGLIRLRKEKGMPKAGEFKTPLVPLLPILSIIICLSFMLQYNMNTWIAFLVALLVGSIIYFTYGYKHSTIEE

SEQ ID NO: 20292 - protein, 222 aa, Medicago sativa
MAASITAITVENLEYPAVVTSPVTGKSYFLGGAGERGLTIEGNFIKFAAIGVYLEDIAVASLAAKWKGKSSEELLETLDFYRDIISGPFEKLIRGSKIRELSGPEYSRKVMENCVAHLKSVGTYGDAEAEAMQKFAEAFKPVNFPPGASVFYRQSPDGILGLSFSPDTSIPEKEAALIENKAVSSAVLETMIGEHAVSPDLKRCLAARLPALLNEGAFKIGN

SEQ ID NO: 20293 - protein, 375 aa, Oryza sativa (japonica cultivar-group)
MPASDPAPAAAAAAYDRTAELRALDATLSGVRGLVASGATHLPRIFHNVVHGDQEPPEATAPSSAATTTTTVPVIDISGSRAAVVDAVRRAAAEWGFFQVTGHGVPLAAMDAAAGAARAFHESGGGEGSDKARLYSREPGRAVKYHCNFDLYQSPVANWRDTLYLRMAPDPPPAADLPEICRDALFEYAKQVKNLGNTLFELLSEGLGLKPSYLTDIECNQGQIILCHYYPPCPQPELAIGTSRHSDSGFLTILLQDDIGGLQILHEDRWVDVTPTPGAFIVNVADLLQLISNDNYKSVEHRVVAKNTEPRVSIACFFSTHFHPISTRMYGPIKELLSDENPPLYREALVRDYTARYYSVGLDGKFKTTLSEFRL

SEQ ID NO: 20294 - protein, 243 aa, Acidobacteria bacterium Ellin345
MWRVGTVVALRDETQTAKTITLRVVDWPNHVAGQHVDVRLTATDGYSAVRSYSIASAPNAEGRVELTVEQLPEGEVSPYLTQELAIGDHIELRGPIGGWFIWRPRQTEPIQLIAGGSGIVPLMAMIRSRASTGSTVPFRLLYSVREPGAVYYRNELQAISSRDDWLTTTHAYTRAAPKDWLRPPGRVDTSLIANVTWPSSQTPTCYVCGPTAFVESIAAMLVSCGNHPDKIKTERFGPTGGLK

SEQ ID NO: 20295 - protein, 388 aa, Mesorhizobium loti MAFF303099
MAGTFIIAQGGGPTAVINQTVVGATLEIRKRHPGAKVLGSIHGVRGIRDGNYVDLSAIPEDRLRLIAGTPSAALGSTRDKPDAAYCDVILKGLKKAGADAFIYIGGNDTSGTQQILTDAAGGSIAFVHAPKTIDNDLEENDHTPGFISAAEFVAGAFLSVDLDFRALPGIYVGIVMGRHAGFLTAAAAAWQLDPDSGPHLVYVPERPFSAAGFIDDVRATLDRHKRCIVAVSEGVSTADGKALVESLVPPEKLERDAHGNVKLSGSDLPAALERALAEGLPGKRARVDALGYMPRGYVGAISAVDAQEAFDAGAFAVSVAEQGGGSVALQYDGTKTVLKKVPLKNVAGKTRHMPDDFMKPDVNQLSEAGMAYLKRLVPEKYKVGKPFV

SEQ ID NO: 20296 - protein, 323 aa, Arabidopsis thaliana
MPFGGAALDLVGVPLPEETSTAAKQSDAILLGAIGGYKWDKNEKHLRPEMGLLNIRRDLNVFANLRPATVLPQLVDASTLKKEVAQGVDMMIVRELTGGIYFGEPRGITINENGEEVGFNTEIYAAHEIDRIARVAFETARKRRGKLCSVDKANVLDASILWRKRVTALASEYPDVELSHMYVDNAAMQLVRDPKQFDTIVTNNIFGDILSDEASMITGSIGMLPSASLGESGPGLFEPIHGSAPDIAGQDKANPLATILSAAMLLKYGLGEEKAAKMIEDAVVDALNKGFRTGDIYSPGNKLVGCKEMGEEVLKSVDSKVPV

SEQ ID NO: 20297 - protein, 148 aa, Xanthomonas campestris pv. vesicatoria str. 85-10
MTDAPLLIACPSCAAMNRIAPTRLRDAPNCGSCHRPLFLGTPVALSAADFDKHAVRSALPLVVDFWAPWCGPCLSMAPKFAAAAAALEPQVRLAKVDTDLHPALGTRFGIRSIPTLLVIQGGQELGRHSGAVSSAQIVNWVRSVLSKR

SEQ ID NO: 20298 - protein, 434 aa, Listeria monocytogenes
MILTIKFLIIALLIAISAFFVATEFAIVKMRPSRLDQLIAEKDKRAVLARHIYNHLNAYLSACQLGITISSLGLGWLGESTVEAALHPLFSLMELPQSAITILSFTIAFLFITFLHVVVGELVPKTLAIDKTETVALAVARPLHIFYKVMFPFIWILNGSAVFIARLFGLEPASEHEIAHTEDELKIIVGESYKSGEINQSEFRYVNKIFDFDERMAKEVMIPRTEIVTVDTGSTIGELSDIMQNERYTRYPVIDGDKDHVIGVLNLKEILSAYVEHGSSPSFSIDPYVKPIIRVIETIPIKELLFRMQRERSHIAILLDEYGGTSGLVTVEDIVEEIVGDIRDEFDADEIPEIRKIKDGHYIVDAKLLIDEVNNILGTEIEEEEVDTIGGWFLTQNYEVEVGDEIDYDGFIFRVKQGEPHHIEYIEIIKKTND

SEQ ID NO: 20299 - protein, 347 aa, Triticum aestivum
  misc_feature (275)..(275): Xaa can be any naturally occurring amino acid
HASGSCFFHTIGPSRPILDVSTRSGASTVTTPTPSRPLPAGPQRRRYRPTVLAIAGGSKPPRRRAPAAATSCAALAAPEKQSTATAKLSTWGGAGHASEGTDYDKVAATLETLYKLSPVIVEEDEKRTKKQAATKKKRKQGRTKSAATTTTATPRRTVVVRSHRRRWMDLGKRVEMRDLAVGRADEHRDGERPIHEVPLPEHAASTDMGSLHWRRLKTPPVLSGPQSARLFTIMQPIKAIVGGARYPCGPARTAIPTAPKVAPACQLPLEGVRRXLDPRRVATNKLIKHHPSVQPGARNQLLITRDRSATQPSPPRCRGRLPTGLSAQAHRSAPRLPISASQDHALW

SEQ ID NO: 20300 - protein, 486 aa, Nocardioides sp. KP7
MINAKLIINGREETSDRTIDVVSPADTRVVLGSVPDATSEQVDEAVQAAATAFPEWSSRPLEERQGALFAAAGAIHDMIEEYAPLLSRENGKILEESHIDLEFASGICGYTAGISAEALADQRIHDAGGTTLIRRRPIGPVAAVTPWNFPVVLSFMKLAPALVAGNTVVLKPSENSPLVLTEVIRALQEHFPPGVLNMVTGGDATGEALVAHPLIRKIGFTGGIDTGRKVMAVAAQDIKRVTLELGGNDPAVVLDDVDLSPETMRRIAKGAFSATGQVCFGLKSIYVPTRIHDRFVEAFHAAVDEIVVGPGDDPRSTMGPLNNAQQKGSVEKILEEARGAGAVVTTLGRKLDTAAWEHGHFMMPSVVTDADPRLAIVEQEQFGPTVPVVRYTELDEVIRLTNRSQFGLAASIWSADEDRAFELGRRLDTGSVFINSHSFSSLDPRAPFGGTKNSGLGREFSPASLDAYTELQTISRRTGPPGPPLS

SEQ ID NO: 20301 - protein, 414 aa, Nocardioides sp. KP7
MTGGQVAALIGGGMAGVHAAEVLRRDGFDGRVLLVSAEQHLPYDRPPLSKALLRGELALADCLLRPPEWYEEQGIEVLLGVSVDALDPGRRTLRLSTGEQVEFDRALLATGARPRWPLGLAPGCGPVFALRTVDDCLAIRSRLRSGASVVVVGGGFVGAELASSAASLGCRVTMLEAADAPFQRVLGRTVGELFGRFYATGGIRLVTGVQVTGTSVGPEGARLTAGDGRFWDADVVVVGVGVVPNTELAVDAGLRVSDGVEVDAYCTTSAPHVFAAGDVANRPDPVLGRRVRIEHWQNAQHQGTAAGRAMLGIREPFDGVPWFWSDQFGLNLQVAGFPDRADRVVVRGRLEGDRFAAFYLAGPTLVAALGVGCAGEVHLSRRLIAARAHVDPQRLTDEHSDLRDALLASDVPTA

SEQ ID NO: 20302 - protein, 218 aa, Desulfovibrio vulgaris
MSDEPKGAILQRDKLTYAIVPRTPCGLLTPDVLDAVSRVCRKYEVPIIKITSGQRLALVGMKKEAVEPMWEELRLDVGRAVELCVHYVQACPGTAVCRFGLQDSLGIGVAIEEEYVGHDFPAKVKFGISGCPFCCGETYLRDVGLVGTKKGWTLIVGGNSGGHPRIGDVLAEELSTDEAKGLIRKFMEFYRDNSGKRLRVSKFVEKTGIEAIRQAVLG

SEQ ID NO: 20303 - protein, 224 aa, Oceanospirillum sp. MED92
MPDFKIAPSILSADFARLGEEVENVLSAGADIVHFDVMDNHYVPNLTIGPMVCSALRKHGIQAPIDVHLMVKPVDRLIGDFIEAGASYITFHPEGSEHIDRSLQMIRDGGCKSGLVFNPATPLSHLEYVLDKVDMVLLMSVNPGFGGQKFIPGTLDKLRQARKIIDESGYDIRLEIDGGVGVGNIKEIAEAGADTFVAGSAIFNTDDYADTIAQMREQLAMADL

SEQ ID NO: 20304 - protein, 409 aa, Aspergillus nidulans FGSC A4
MPSDRITPPSALLLLPPPPIVSFDEFRTVYEPVLSSVFANLLNALNGSNRTASLDIALSLPGLLSPSCQPPTRAFASLQRIVEHMYRLIGVISIERKIEMEAPGGIDSRVILLDFDSVRGTPATAANSGLVERNGPIVDLKTLASSGRLWDNIYYPETSVGQELATAFSNIYTSTKDPNGGLPQSISGSPQWTPGQSLVDSAGSVGSALHHSVILGGTFDHFHIGHKLLLTATALVLQPAGTGPTGQNRTITIGVTGDEMLKNKKYAQFLESWDERCRSTGAFLTSIMDFGPPETEPAHIERIYNPGPNGRQIVMKIRPGITLKMAQIHDPYGPTITEEDLSALVVSKETRSGGAAVNQERAKRGWKQLEVFEVDVIHTGEVPPGDVEDFASKISSTDIRRRRMELAMI

SEQ ID NO: 20305 - protein, 320 aa, Magnaporthe grisea 70-15
MSSLIPGSNTFNPDKDIPDLSGKHYIVTGGSAGIGFGIAAHLLQHKADNVTILSNKEEHAQSALEELKEYGDASKAHWVKCDFEDLKFTEKVANELARSQDKLDGLVLNAGLGVGVYNETKDKIDSHFQVNILSQFLLLKKLLPRLQKTPGARLVFESSDLHKAADGGAQFKDEAEINNDIGPTQLYNRTKLALILLARALQRRKEAGELGFQPGQSVFINAVHPGAVATDQQLQAEEAYGTLGVVGHAIVRPFLKDPVSQGCRPALFATTSKEIEEQEISGQYIVPDKKVTSPSSKAQDDELGERLWNLMEQMLKDRLG

SEQ ID NO: 20306 - protein, 192 aa, Triticum aestivum
  misc_feature (64)..(64): Xaa can be any naturally occurring amino acid
  misc_feature (88)..(88): Xaa can be any naturally occurring amino acid
  misc_feature (94)..(94): Xaa can be any naturally occurring amino acid
  misc_feature (102)..(102): Xaa can be any naturally occurring amino acid
  misc_feature (137)..(137): Xaa can be any naturally occurring amino acid
  misc_feature (147)..(147): Xaa can be any naturally occurring amino acid
  misc_feature (178)..(178): Xaa can be any naturally occurring amino acid
MLGVARRRLGSGCVLAQLAQALRPAAAPARTYSAAAKEITVREALNTALDEEMSADPSVFLMGXEEVGEYQGAYKISKGLLDKYGPRXGLDTPXTEAGFTGXIGVGAAYNGLRPIVEFMTFNFSMQAIDHIINQAAXSNYMSAGQIXVPNVFKGPNGLLLEWCQHSHAINLDQCPGLXSPHPRMPVTHRIVV

SEQ ID NO: 20307 - protein, 604 aa, Burkholderia mallei ATCC 23344
MNARLPDPSPVPARLALLRGAMTREDLAAYVVPSADPHLSEYLPERGQARQWLSGFTGSVGTLVVTADFAGLWVDSRYWMQAEAQLAGTGVALMKMVGGQQTQPHVEWLAEHVPEGTTVGVDGAVLGVAAARALTSALTPRGIVLRTDLDLLDAIWPQRPSLPGDAVFEHAAPQADTARAGKLAQVRRAMHEQGAQWHFVSTLDDLAWLFNLRGADVNYNPVFVAHALVGLERATLFVADGKVSAELATSLARDGVDVKPYDAAAAALAALPEGAGLLIDPRRVTYGLLQAVPQQVRVIEAVNPSTFAKSRKTPAEIEHVRATMEHDGAALAEFFAWFERALGRETITELTIDEQLTAARARRPGYVSPSFATIAGFNANGAMPHYRATRAAHATIEGDGLLLVDSGGQYLSGTTDITRVVPVGAIGDAHRRDFTIVLKAMMALSRARFPRGIRSPMLDAIARAPMWAAGLDYGHGTGHGVGYFLNVHEGPQVISHYAPAEPYTAMEEGMITSIEPGVYRPGNWGVRIENLVVNRAAGQTEFGDFLEFETLTLCPIDTRCVLPALLDDVERAWLNAYHATVRERVGKHVSGDARAWLDARTQPI

SEQ ID NO: 20308 - protein, 422 aa, Frankia sp. CcI3
MALLVAKFGGSSVADADRIKRVAERIVENRRAGNDVVVVVSAMGDTTDELLDLAEQVSPLPPARELDMLLTAGERISMALLAMAITTLGAEARSFTGSQAGVITDSVHGKARIIDVTPGRIRAALDSGAIAIVAGFQGVSQDTKDITTLGRGGSDTTAVALAAALGADACEIYTDVDGVFTADPRIVPDARRIDTISYEEMLEMAACGAKVLMLRCVEYARRYSVPVHVRSSFSAKPGTWVTEIPEEQLVEQAIIRGVAHDLSEAKVTVVGCPDKPGVAAAVFRAVADTDVNLDMIVQVGSVAGSGRTDISFTLPKADGRTALTALTKVQSEIGFERTLYDDHIGKLSLIGAGMKSHPGVSARFFGSLADAGVNVEIISTSEIRISVVVRDTDLPLAVRAVHGAFDLGDPNGGAIVYAGTGR

SEQ ID NO: 20309 - protein, 691 aa, Oryza sativa
MDTPLLLLLPFLAACLLAPRHAAEAAVTSCAPRRCGNVTIAYPFWLPDSSPPPSSSSAPCGPAAFQVNCDNGSRASLARSFRSGYKILGVSYANRTVVVANDNVQTDASGCPVPKIDVSASLTLAPFTASPANSQLVFLFNCTSSSRPPPAGFVNVTCPGAKAVVRLDTSYNNTAARVVAGGCDYAAVPVVGVPGASPTDYPQLLRGGYMLEWRAPAGDCMACNASGGQCGYDADTEAFACICSDGSSRPGICGWLELTKGNAKKSGNKVILIVSLSICATGLVLLACIAIVYKCRRRMQNRFSFLNAMDGASRTDTAKVEKLLQSYGSLAPRRFRYSELKKITKSFSQRLGEGGYGTVFSGTLADGRAVAVKFLHHSKPNGEEFLNEVVSIGRTSHVNIVSLLGFCLEGSKRALVYEYMPNGSLDKYIYSTSAAAAAEAEEAEATASPDRDVLGWKVLQEIAVGVARGLEYLHDGCNTRIIHFDIKPHNVLLDEGFRPKIADFGMAKLCNPKESILSMADTRGTIGFIAPEVFSRGFGDISTKSDVYSYGMLLLEMVGGGSNVKAYAEKGASGTFFPLWVYDHLLEDGGVLQSVAAAAAATAGGGAGSPGGEEIARKMALIGLWCIQTVPANRPSMGKVLEMLERSVHELAMPPRPYHSNSSSPSRPSSYPSSASDFTQRSRLSTPGSTA

SEQ ID NO: 20310 - protein, 366 aa, Cryptococcus neoformans var. neoformans JEC21
MTIDQSQINFNVPSTYKLEEIVGEGAYGLVVAGTHLPSGTQVAIKRITPFDHTMFCQRTLREIKLLRHFHHENIISILDLIQPESYEVFNEVYLVQELMETDLHRVIRSQELSDDHCQYFVYQTLRGLKALHSADVLHRDLKPSNLLLNANCDLKICDFGLARSSAKPPPGTSDGGQGFMTEYVATRWYRAPEVMLSFQEYTKAIDLWSVGCILAEMINGKPLFPGRDYHHQLSLILQVLGTPTMDDFNEITSQRSKDYLRALEFTRRQDFSAICPKAKPAAVDLLKQTLTFSPSKRITVEEALMHSYVEAYHDPHDEPNAEPLKPGFFDFEFHQEKLSRDQWKRMIYDEVQDPVPTILSQWTESH

SEQ ID NO: 20311 - protein, 667 aa, Nicotiana tabacum
MAAAAPSPSSSAFSKTLSPSSSTSSTLLPRSTFPFPHHPHKTTPPPLHLTHTHIHIHSQRRRFTISNVISTNQKVSQTEKTETFVSRFAPDEPRKGSDVLVEALEREGVTDVFAYPGGASMEIHQALTRSSIIRNVLPRHEQGGVFAAEGYARATGFPGVCIATSGPGATNLVSGLADALLDSVPIVAITGQVPRRMIGTDAFQETPIVEVTRSITKHNYLVMDVEDIPRVVREAFFLARSGRPGPILIDVPKDIQQQLVIPDWDQPMRLPGYMSRLPKLPNEMLLEQIVRLISESKKPVLYVGGGCSQSSEDLRRFVELTGIPVASTLMGLGAFPTGDELSLSMLGMHGTVYANYAVDSSDLLLAFGVRFDDRVTGKLEAFASRAKIVHIDIDSAEIGKNKQPHVSICADIKLALQGLNSILESKEGKLKLDFSAWRQELTEQKVKHPLNFKTFGDAIPPQYAIQVLDELTNGNAIISTGVGQHQMWAAQYYKYRKPRQWLTSGGLGAMGFGLPAAIGAAVGRPDEVVVDIDGDGSFIMNVQELATIKVENLPVKIMLLNNQHLGMVVQWEDRFYKANRAHTYLGNPSNEAEIFPNMLKFAEACGVPAARVTHRDDLRAAIQKMLDTPGPYLLDVIVPHQEHVLPMIPSGGAFKDVITEGDGRSSY

SEQ ID NO: 20312 - protein, 664 aa, Nicotiana tabacum
MAAAAAAPSPSFSKTLSSSSSKSSTLLPRSTFPFPHHPHKTTPPPLHLTPTHIHSQRRRFTISNVISTTQKVSETQKAETFVSRFAPDEPRKGSDVLVEALEREGVTDVFAYPGGASMEIHQALTRSSIIRNVLPRHEQGGVFAAEGYARATGFPGVCIATSGPGATNLVSGLADALLDSVPIVAITGQVPRRMIGTDAFQETPIVEVTRSITKHNYLVMDVEDIPRVVREAFFLARSGRPGPVLIDVPKDIQQQLVIPDWDQPMRLPGYMSRLPKLPNEMLLEQIVRLISESKKPVLYVGGGCSQSSEELRRFVELTGIPVASTLMGLGAFPTGDELSLSMLGMHGTVYANYAVDSSDLLLAFGVRFDDRVTGKLEAFASRAKIVHIDIDSAEIGKNKQPHVSICADIKLALQGLNSILESKEGKLKLDFSAWRQELTVQKVKYPLNFKTFGDAIPPQYAIQVLDELTNGSAIISTGVGQHQMWAAQYYKYRKPRQWLTSGGLGAMGFGLPAAIGAAVGRPDEVVVDIDGDGSFIMNVQELATIKVENLPVKIMLLNNQHLGMVVQWEDRFYKANRAHTYLGNPSNEAEIFPNMLKFAEACGVPAARVTHRDDLRAAIQKMLDTPGPYLLDVIVPHQEHVLPMIPSGGAFKDVITEGDGRSSY

SEQ ID NO: 20313 - protein, 265 aa, Pinus strobus
RENYTVMHLDLASLESVRQFVDNFRQSGRPMDVLVCNAAVYLPTAKVPTFTAEGFELSVGTNHLGHFLLSRLLLEDLKKSDFKSKRVIIVGSITGNTNTLAGNIPPKANLGDLRGLSARLNGVNSSPMIDGGEFDGAKAYKDSKVCNMLTMQEFHRRYHEETGITFASLYPGCIATTGLFREHVPPFRLLFPPFQKYITKGFVSEEEAGKRLAQVVSDPSLTKSGVYWSWNNDSASFENQLSEEASDPGKARKVWEISEKLVGLA

SEQ ID NO: 20314 - protein, 481 aa, Sordaria macrospora
MSAKSILEADGKAILNYHLTRAPVIKPSTLPNPTKHNPPPRLASLHFAEDADVNGVLSQAEVTYPWLLQDGARFVAKPDQLIKRRGKSGLLALNKTWPEAKAWIAERAGKAQKVEHTEGVLRQFLVEPFVPHPQETEYYINGDWILFYHEGGVDVGDVDAKAEKILIPVDLSQYPSNEELASTLLKHVPKGIHNVLVDFIARLYAVYVDCQFTYLEINPLVVIPNEDATSAEVHFLDLAAKLDQTADFECGNKWAIARSPAALGIVAQSSNGGVNIDAGPPIEFPAPFGRELTKEEAYIAELDAKTGASLKLTVLNPNGRIWTLVAGGGASVVYADAIASAGFADELANYGEYSGAPTESQTYHYARTVLDLMLRAPVSEQGKVLFIGGGIANFTNVASTFKGVIKALREYGKALIEHNTQIWVRRAGPNYQEGLKNLKAATQELGLNAKIFGPEMHVSGIVPLALVPGKWEESGAVEFQA

SEQ ID NO: 20315 - protein, 479 aa, Trichodesmium erythraeum IMS101
MAKPIKFGTDGWRGVIADDFTFERVTLVAPIAAKILDKNYADSTNNSKTIIVGHDRRFMAEEFAQVAAEAIQNAGFDVLLTDTYAPTPAFSLAAFQKKALGAIVMTASHNPGKYLGLKVKGAFGGSVPPEITKQIEDLLTVETEKNLVQEGKIETFNPWQNYCETLKKMVEIHSIKSAINEGKLKVFADVMHGAAAGGLQQILGVEIEEVNGNRDPFFDGGAPEPLPRYLSKLFKRIKSYRAANEGSLAIGLVFDGDSDRIAAVDGEGNFLSSQILIPILIEHLTTTHGCSGEVVKTISGSDLFPKVAELYKMPVFETPIGYKYIADRMLSTQVLVGGEESGGIGYGTHIPERDALLSALYLLEAVVMSSEDLTTIYRHLQEKTGFSSVYDRIDLPLLNMGVRSRLLEELINNPVTEVAGQKVLDCITIDGYKFRLADGRWLLIRFSGTEPVLRLYCEATDMQKVKQTLEWAKNWANSI

SEQ ID NO: 20316 - protein, 237 aa, Oryza sativa
MVMNPDAVRNVVGIIGNLISFGLFLSPLPTFVTIVKKKDVEEFVPDPYLATFLNCALWVFYGLPFIHPNSILVVTINGTGLLIEIAYLAIYFAYAPKPKRCRMLGVLTVELVFLAAVAAGVLLGAHTYDKRSLIVGTLCVFFGTLMYAAPLTIMKQVIATKSVEYMPFTLSLVSFINGICWTIYAFIRFDILITIPNGMGTLLGAAQLILYFCYYDGSTAKNKGALELPKDGDSSAV

SEQ ID NO: 20317 - protein, 446 aa, Oryza sativa (japonica cultivar-group)
MAPPSAMNTSRAEEKAIDDWLPITSSRNAKWWYSAFHNVTAMVGAGVLSLPFAMSELGWGPGVAAMIMSWVITLYTLWQMVEMHECVPGRRFDRYHELGQHAFGDKLGLWIVVPQQLVVEVGVCIVYMVTGGKSLKKFHDLVAPPSAPPIRTSYFIVIFGCLHLVLSQLPNFNSISGVSLAAAVMSLSYSTIAWAASLHHHNHNNGAAAGGVDYSLTEATPAGRTFNFLSALGDVAFAYAGHNVVLEIQATIPSTAERPSKGPMWRGVVLAYGVVAVCYLPVAFAGYYVFGNAVDDNVLITLERPAWLIAAANMFVVVHVVGSYQIYAMPVFDMLETFLVKKLRFKPGMPLRLIARSLYVLFTMFVAIAVPFFGGLLGFFGGFAFAPTTYFLPCIMWLSIMKPKRFGLSWCINWFCIIIGVLLSVFAPIGGLRSIIVNAQSYKFFS

SEQ ID NO: 20318 - protein, 140 aa, Thiomicrospira crunogena XCL-2
MIIMCPHCGGLNRIPDEKLNDHPNCGKCQSALFTGQPIEMNSEQFLRALHKTDQPLVVDFWASWCGPCKMFAPTFSQAAAQLEPHAKFIKINTETEQQIAAQFNIRSIPTLAIFKNGQEIARQSGAMDLGSFTNWVKSTI

SEQ ID NO: 20319 - protein, 264 aa, Triticum aestivum
  misc_feature (176)..(176): Xaa can be any naturally occurring amino acid
  misc_feature (233)..(233): Xaa can be any naturally occurring amino acid
  misc_feature (252)..(252): Xaa can be any naturally occurring amino acid
NKFVQKSRLVPVRNSRDIVDPRVRKYNMGNGGPAPESVTDKIFSNTKTITEYLIAEDLPNVDISVIGVTSFTGPEGPFDVDVFDSATDYIKLMKTIFDFESIKKLLASPKFSFCFDGLHGVAGAYAKRMFVDELGASESSLLNCVPKEDFGGGHPDPNLTYAKELVDRMGLGKTSXVEPPEFGAAADGDADRNMVLGKRFFVTPSDSVAIIAANAVQSIPYFASGLKGVARAXTSAALDVVAKILISSSFEXPTGWEFFENLMD

SEQ ID NO: 20320 - protein, 261 aa, Clostridium acetobutylicum
MELNNVILEKEGKVAVVTINRPKALNALNSDTLKEMDYVIGEIENDSEVLAVILTGAGEKSFVAGADISEMKEMNTIEGRKFGILGNKVFRRLELLEKPVIAAVNGFALGGGCEIAMSCDIRIASSNARFGQPEVGLGITPGFGGTQRLSRLVGMGMAKQLIFTAQNIKADEALRIGLVNKVVEPSELMNTAKEIANKIVSNAPVAVKLSKQAINRGMQCDIDTALAFESEAFGECFSTEDQKDAMTAFIEKRKIEGFKNR

SEQ ID NO: 20321 - protein, 498 aa, Bradyrhizobium japonicum USDA 110
MRSIGHFIGGKEVKGTSGRTADVFEPMTGDVQAKVALASKAEVRAAVENARAAQPEWAATNPQRRARVMMKFVELVQRDYDKLAELLAREHGKTVPDAKGDIQRGLEVAEFACGIPHLMKGEYTEGAGPGIDIYSMRQALGVVAGITPFNFPAMIPMWKFAPAIACGNAFILKPSERDPGVPMLLAELMMEAGLPAGILNVVNGDKEAVDAILDDPDIKAVGFVGSTPIAQYIYERAAQTGKRCQCFGGAKNHAIIMPDADMDQAVDALIGAGYGSAGERCMAVSVAVPVGKPTADRLMEKLIPRVESLKIGTSIDPSADYGPLVTREAVEKVKGYIDIGIKEGATLAVDGRGFKMQGYEKGFYLGGSLFDNVTKDMRIYKEEIFGPVLSVVRAHDYKEALALPSEHDYGNGVAIFTRDGDAARDFAAKVNVGMVGINVPIPVPIAYYTFGGWKKSGFGDLNQHGPDSVRFYTKTKTVTSRWPSGVKEGAEFSIPLMK

SEQ ID NO: 20322 - protein, 319 aa, Thiomicrospira crunogena XCL-2
MSTKHCKLLILGSGPAGYTAAVYAARANLEPVMVTGMQQGGQLTTTTEVDNWPGDVEGLTGPDLMVRMQKHAERFGTEILFDHIHTAELNQRPFKLIGDSAEYTCDALIIATGASAKYLGLESEEAFKGKGVSACATCDGFFYRNQKVAVVGGGNTAVEEALYLSNIASEVTVIHRRDSFSSEKILSKQLLEKAENGNINIEFNSALEEVLGDKMGVNGLRIKNNQTNESKEIDVAGVFIAIGHTPNTGIFDGQLDMDHGYLKVQSGLQGNATQTSIPGIFAAGDVMDQVYKQAITSAGAGCMAALDAEKFLDQLEAQG

SEQ ID NO: 20323 - protein, 289 aa, Listeria monocytogenes
MTHVTLPILEDWEGLSLTTILQEKFHLGKKARHEIRMSQNVLLNNKPLDDWNTPLFVGASLSLPIFLHDKIPVYEYDLEIIYEDDFLLVVNKPVDMKTHPNDSYETDTCANAVQYYLEKTGQDANALAVHRLDQTTSGLVLFAKNKLAIAGLSWQMENRAIHRTYLAAVDGTWGLVMQTINKPIGEDRHHGSRRQISPYGQPAVTHVKVLENDNEKNTSLVECQIETGRTHQIRVHLSGIGHPIIGDTLYGGSPRANRIMLHAEKLHLNHPFKGKEMNFSAPAGDDWVF

SEQ ID NO: 20324 - protein, 373 aa, Methanosarcina acetivorans C2A
MNEIITWILIALCLTQSAIFSGLTIGIFGLGRLRLEIEAEANNKDAIKILQLRKDSNFLLTTMLWGNVGINVLIALLTDSVMAGTSAFLFSTFGITCFGEIAPQAYFSRNALSVGAKLTPLIRFYQMLLYPVAKPTALILDWWLGREKLELFREQAMRIMLEKHIESGKTDIGLFEGIGALNFLSIDDVNISDEGSIIDPRSVISLPVENNRPVFPAFNRDPADPFLQKIEASGRKWVIITNPTDEPVMVLDADGFLRDAVYKKGPFIPLSYCHFPVVVKSPKTRLEKVIRQFKVYPQYPEDDVIDQDLILYWGEEKRIVTGSDILGRLLRGIVVECDVGSGCEMPPAKQPGLVRRAAFRKDKRKEKTEQRKK

SEQ ID NO: 20325 - protein, 365 aa, Oceanobacillus iheyensis HTE831
MQERLENFLNKLKEQTIDSAFITSKANVYYLSNYYTEPHERIVGIYLSENFDPIFLLPKMEESDARNAGWKYTILSYYDHENPWEILKDYLNKQNHQPQSVALEQDHITMDRYQAIQNTLPEAQFQDAKEILAQLRVIKSDKELSLLKTAAELADFGIQTGVETIQEGISELDLVATIEYSLKKQGIREMSFQTMALSGAKTASPHGHPSTSKLEKNGFVLFDLGVIYQGYCSDITRTVAFGNLTEEQKNVYETVLNAEEAAIEKSVVGTSVGVIDQTARKVINDAGYGEYFTHRIGHGLGIETHEYPSMHGENNLPLQSGMTFTIEPGIYVPNVGGVRIEDMIHMTEEGPKTLTKYPKNLQIVN

SEQ ID NO: 20326 - protein, 259 aa, Legionella pneumophila subsp. pneumophila str. Philadelphia 1
MMNLIEQDIDNNGILTLTLNRPEKLNALSTDVLSALNELFFQAKSNPKVKALLLTGNGKAFCAGADINRLAECNAQTGYEFACQGQEVFRLLETMGKPSLAAVNGFAFGGGCELAISATLRIASNKAMFGQPEVKLGVIPGYGGTQRLARLIGKGRAMDLCLTGRFINAETALNWGLVSEVVAPEDLLTQGKNILNGILSMAPLAVASVMEVIDHGYDLSLTEALHLEAIHFAKVCATEDKKEGVAAFLDKRTADFKGV

SEQ ID NO: 20327 - protein, 187 aa, Arabidopsis thaliana
  misc_feature (15)..(15): Xaa can be any naturally occurring amino acid
MASSMLSSAAVVTSXPAQATMVAPFTGLKSSAAFPVTRKTNKDITSIASNGGRVSCMKVWPPIGKKKFETLSYLPDLSDVELAKEVDYLLRNKRIPCVEFELEHGFVYREHGNTPGYYDGRYWTMWKLPLFGCTDSAQVLKEVEECKKEYPGAFIRIIGFDNTRQVQCISFLGLQTPSFSRKPIFSF

SEQ ID NO: 20328 - protein, 504 aa, Vibrio cholerae O1 biovar eltor str. N16961
MEKINLVWLKRDLRLTDHAPLQAALTSGRPTLLLYLFEPMLLGDAHYSERHWRFVWQSLQAINRDLAQSKGEVLIVTSDWQTCFARIAERYAIEAIYSHQEVGLACTFQRDLALAQWCQQHDIVWHEFPYAAVIRGAQTRKNWDEHWQQVMRSPCCDPDLTRANWLKLDAATLGLRSDIPATWQSKQAGMQTGGSDMAWATLEDFFARRGREYYRSISSPSLARHACSRMSPYLAWGNISLREMYQTLLKHWSVAGFRRSLIALSSRLHWHCHFIQKFESECEMEFRCVNRAYDSLLQQSSDAPAAQLAAWQTGHTGIPLVDACMRCLIQTGYLNFRMRAMLVSVLTHHMNVDWRAGVTYLAQLFLDFEPGIHYPQFQMQAGVTGTNTIRIYNPTKQAQEHDSEGQFIHKWVPELAQVPVPLLFEPWLMTPLEAQMYQVPLESPYLKPVMDLEASAKQARDRLWQWQKLPAVQAEAMRILARHVRQAKPRTSPRQPNKRQPEMD

SEQ ID NO: 20329 - protein, 433 aa, Cytophaga hutchinsonii
MNEVVVFWFRRDLRLTDNAGLFQALTSGYAVLPVFIFDINILNALEHKNDARVEFIHDTIQSLKNELQKIHSDMEVYHATPAEAFEQLVKKYTVKAIYTNTDYEPAAIKRDNEISDWAAQQQIAFKSFKDQVIFEKNEILTDTGAPYRVYTPYKNKWLKKLTENPVTHSPSEKHTDAFLRMEAKPIVTLKQLGFTPSSIQIPPLETLRKTIQEYDKTRDYPYLEHGTSLLGIHFRFGTISIREKVVKALPLNATWLSELIWREFFMQLLFHFPHVVTESFQSKFNRLEWRYSQADFEKWCTGKTGYPLVDAGMRELNTTGHMHNRVRMVVASFLTKHLFIDWRWGEAYFAQKLLDYDLSANNGNWQWAAGTGADAQPYFRIFNPISQQEKFDPDFIYIKKWVPEFGTSSYIEPIIEHKKATERAKLLFSVLKN

SEQ ID NO: 20330 - protein, 919 aa, Corynebacterium glutamicum ATCC 13032
MTDFLRDDIRFLGQILGEVIAEQEGQEVYELVEQARLTSFDIAKGNAEMDSLVQVFDGITPAKATPIARAFSHFALLANLAEDLYDEELREQALDAGDTPPDSTLDATWLKLNEGNVGAEAVADVLRNAEVAPVLTAHPTETRRRTVFDAQKWITTHMRERHALQSAEPTARTQSKLDEIEKNIRRRITILWQTALIRVARPRIEDEIEVGLRYYKLSLLEEIPRINRDVAVELRERFGEGVPLKPVVKPGSWIGGDHDGNPYVTAETVEYSTHRAAETVLKYYARQLHSLEHELSLSDRMNKVTPQLLALADAGHNDVPSRVDEPYRRAVHGVRGRILATTAELIGEDAVEGVWFKVFTPYASPEEFLNDALTIDHSLRESKDVLIADDRLSVLISAIESFGFNLYALDLRQNSESYEDVLTELFERAQVTANYRELSEAEKLEVLLKELRSPRPLIPHGSDEYSEVTDRELGIFRTASEAVKKFGPRMVPHCIISMASSVTDVLEPMVLLKEFGLIAANGDNPRGTVDVIPLFETIEDLQAGAGILDELWKIDLYRNYLLQRDNVQEVMLGYSDSNKDGGYFSANWALYDAELQLVELCRSAGVKLRLFHGRGGTVGRGGGPSYDAILAQPRGAVQGSVRITEQGEIISAKYGNPETARRNLEALVSATLEASLLDVSELTDHQRAYDIMSEISELSLKKYASLVHEDQGFIDYFTQSTPLQEIGSLNIGSRPSSRKQTSSVEDLRAIPWVLSWSQSRVMLPGWFGVGTALEQWIGEGEQATQRIAELQTLNESWPFFTSVLDNMAQVMSKAELRLAKLYADLIPDTEVAERVYSVIREEYFLTKKMFCVITGSDDLLDDNPLLARSVQRRYPYLLPLNVIQVEMMRRYRKGDQSEQVSRNIQLTMNGLSTALRNSG

SEQ ID NO: 20331 - protein, 425 aa, Streptomyces roseofulvus
MNRQVAVTGIGVVAPGGIGRKPYWEQLTSGRTATRAISFFDASPFRSRIAAEVDFDPAAAGLSPREVRRMDRAAQFAVVSARESLADSGLDVADLDPHRIGVSIGSAVGGTTSLEREYLALSDSGRQWELDLSYLSPHLYDAFTPSSLAREVAGVIGAEGPAAVVSTGCTSGIDSLGHARDLIAEGSADVVLAGGTDTPISPIAVACFDAIKATSPSNDDPAHASRPFDRERNGFVLAEGAAVLVLEELGHARARDAHVYALVSGYATRCNAYHMTGLTPHGREMAEAIRHALAESGTDPAAVDYVNAHGSGTKQNDRHETAAFKATLGERARSVPVSSIKSMIGHSLGAIGSLEIAAWALAMEYGVVPPTANLDTPDPECDLDYVPHEARETRVDRVLSVGSGFGGFQSAMVLTRDTGARLPTA

SEQ ID NO: 20332 - protein, 357 aa, Corynebacterium glutamicum ATCC 13032
MPTNQPTPAQIKRWRGYLANEQAEAAAYRDLAKRREGEERDILLALADAEHRHAAYWVEKLGPDAENPPKADVKTRLLGFLARRFGSVFTLALMQSAETRSPYDDDADASRQISADERIHAEVVRGLASRGRERMSGNFRAAVFGINDGLVSNVALVMGVMATGVPAQIVLITGISGLLSGALSMAAGEYISVRSQTELLDASLPDPKAREALHALDVESNELELVYRARGMSEDEARAKASQVFQRISDQKRISDNVLGSTEIQSAGSARSAATFSFLSFAIGAFLPIVPYVFGMEGLAGAVVSLVLVGLSLMATGATTGLLSGKPPGIRAVRQLSIGYGAALVTYVLGLLFGMIL

SEQ ID NO: 20333 - protein, 397 aa, Xylella fastidiosa
IARELRRPTLAVLSRCLQADIETSARALESATKPRLHVFLSTSPLHREHKLRMSKEQVLESVHKHVSLSRTLIDDVEFSAEDATRTEEDFLIEVTRVAIAAGATTINLPDTVGFSTPEEIRNMFTRVIANVEGANKVIFSAHCHDDLGLAVANSLAAIEGGARQIECTINGIGERAGNCALEELTMVLKVRNAFYNIDTSIHTSRIVSTSQLLQRLVGMPVQRNKAVVGANAFAHESGIHQHGMLRHRGTYEIMRPQEVGWVCSHMVLGRHSGRAAVEQRLRALGYLLEEEDLKLVFEEFKQLCEKQRLVTDVDLQVLMQDTTVQHGYRLASMTISDVGNRANALVELSNPQGQRVAETAQGNGPVDALFGALAAATGVKLELDSYQVHSVGIGADA

SEQ ID NO: 20334 - protein, 334 aa, Corynebacterium glutamicum ATCC 13032
MTIRVGINGFGRIGRNFFRAVLERSDDLEVVAVNDLTDNKTLSTLLKFDSIMGRLGQEVEYDDDSITVGGKRIAVYAERDPKNLDWAAHNVDIVIESTGFFTDANAAKAHIEAGAKKVIISAPASNEDATFVYGVNHESYDPENHNVISGASCTTNCLAPMAKVLNDKFGIENGLMTTVHAYTGDQRLHDAPHRDLRRARAAAVNIVPTSTGAAKAVALVLPELKGKLDGYALRVPVITGSATDLTFNTKSEVTVESINAAIKEAAVGEFGETLAYSEEPLVSTDIVHDSHGSIFDAGLTKVSGNTVKVVSWYDNEWGYTCQLLRLTELVASKL

SEQ ID NO: 20335 - protein, 376 aa, Pichia pastoris
MDGEDVAALVIDNGSGMCKAGYAGDDAPHTVFPSVVGRPRHQGVMVGMGQKDSFVGDEAQSKRGILTLRYPIEHGIVTNWDDMEKIWHHTFYNELRLAPEEHPVLLTEAPMNPKSNREKMTQIMFETFNVPAFYVSIQAVLSLYASGRTTGIVLDSGDGVTHVVPIYAGFSLPHAILRIDLAGRDLTDYLMKILSERGYTFSTSAEREIVRDIKEKLCYVALDFDQELQTSSQSSSIEKSYELPDGQVITIGNERFRAPEALFHPSVLGLEASGIDQTTYNSIMKCDVDVRKELYSNIVMSGGTTMFPGIAERMQKELTALAPSSMKVKISAPPERKYSVWIGGSILASLGTFQQMWISKQEYDESGPSIVHLKCF

SEQ ID NO: 20336 - protein, 387 aa, Xylella fastidiosa
LIARELRRPTLAVLSRCLQADIETSARALESATKPRLHVFLSTSPLHREHKLRMSKEQVLESVHKHVSLSRTLIDDVEFSAEDATRTEEDFLIEVTRVAIAAGATTINLPDTVGFSTPEEIRNMFTRVIANVEGANKVIFSAHCHDDLGLAVANSLAAIEGGARQIECTINGIGERAGNCALEELTMVLKVRNAFYNIDTSIHTSRIVSTSQLLQRLVGMPVQRNKAVVGANAFAHESGIHQHGMLRHRGTYEIMRPQEVGWVCSHMVLGRHSGRAAVEQRLRALGYLLEEEDLKLVFEEFKQLCEKQRLVTDVDLQVLMQDTTVQHGYRLASMTISDVGNRANALVELSNPQGQRVAETAQGNGPVDALFGALAAATGVKLELDSY

SEQ ID NO: 20337 - protein, 282 aa, Acinetobacter sp. ADP1
MALVLDGRALAKKIEADLLVRVEALKAKSGRTPILATILVGDDGASATYVRMKGNACRRVGMDSLKIELSQETTTEQLLAEIEKLNANPDVHGILLQHPVPAQIDERACFDAISLAKDVDGVTCLGYGRMAMGEAAYGSATPAGIMTILKENNIEIAGKHAVVVGRSAILGKPMAAMLLEANATVTICHSRTQNLAEFVKQADIIVGAVGKAELIQKDWIKPGAVVVDAGFHPRDGGGVGDIQLQGIEDVASAYTPVPGGVGPMTITTLIRQTVEAAEKALA

SEQ ID NO: 20338 - protein, 416 aa, Exiguobacterium sibiricum 255-15
MEIKVPELAESITEGTVASWLKQPGDQVEKGEAIVELETDKVNIEVPSDEAGILSEVMAAEGDTVRVGETIAIITAGGEAAQQAATTPAPEQKEAPVAQEAKKEQPAPVAATEATSVADRPIASPAARKMAREKGIDLAQVATQDPLGRIRVQDVATFEVAPREQAKAPQAPAPQATPSAAPGKPEERIKMSRRRKTIANRLVEVQQTAAMLTTFNEIDMSAVMSLRKRRQEKFVKDNEVKLGFMSFFTKAAVAALKKMPYLNAEIQGDEIVLKKFYDIGIAVSAPDGLVVPVVRDADKKNFGEIEKDIINLAVKARDNKLGLSDLTGGTFTITNGGTFGSLMSTPILNGPQVAILGMHAINLRPVAIDAERMENRPMMYVALSYDHRIVDGKEAVTFLKHIKDLLEDPESLIFEA

SEQ ID NO: 20339 - protein, 403 aa, Sinorhizobium meliloti 1021
MLTQKTKDIVKATAPVLAQHGYAIIQHFYKRMFQAHPELKNIFNMAHQERGEQQQALARAVYAYAANIENPESLSAVLKDIAHKHASLGVRPEQYPIVGEHLLASIKEVLGDAATDEIISAWAQAYGNLADILAGMESELYERSEERAGGWAGWRRFIVREKNPESDVITSFVLEPADGGPVADFEPGQYTSVAVQVPKLGYQQIRQYSLSDSPNGRSYRISVKREDGGLGTPGYVSSLLHDEINVGDELKLAAPYGNFYIDVSATTPIVLISGGVGLTPMVSMLKKALQTPPRKVVFVHGARNSAVHAMRDRLKEASRTYPDFKLFIFYDEPLPTDIEGRDYDFAGLVDVEKVKDSILLDDADYYICGPVPFMRMQHDKLLGLGITEARIHYEVFGPDLFAE

SEQ ID NO: 20340 - protein, 250 aa, Zea mays
MALNGGKTLVQDEEKQQLLLEKHTEKHFTAGEVVRDIIIGVSDGLTVPFALAAGLSGANASSALVLTAGLAEVAAGAISMGLGGYLAAKSEADHYNRELQREQDEIDTVPDVEAAEIADILSQYGLGPEEYGPVVTSLRNNPKAWLEFMMKFELGLERPEPRRALVSAATIALSYVAGGLVPLLPYMFVPEAARAMAVSVAVTLAALLFFGFVKGRFTGDRPFFSAVQTTVVGALASAAAFAMARAVQSI

SEQ ID NO: 20341 - protein, 259 aa, Ralstonia eutropha JMP134
MTAQLLTSRVDSTLVLTISNPEARNALHPDIYAASFEALNAAAGDDSVRAVIITGADGIFCAGGNLNRLLGNRSKPREVQAQSIETLNHWIETLHAFPKPVIAAVEGAAAGAGFSVVLACDFVVAASDAKFVMAYVKVGLTPDGGGSYELARALPRALASELMMEGKPVDGARLAQFGLVNRVVPPGQALTEALRLAEAIAEQSPHAVGRIKGLINHAATASLSEHLVAERDNFVAALHHPDGGEGISAFLEKRKPRYR

SEQ ID NO: 20342 - protein, 398 aa, Streptococcus pneumoniae TIGR4
MRKSIVLAADNAYLIPLETTIKSVLYHNRDVDFYILNSDIAPEWFKLLGRKMEVVNSTIRSVHIDKELFESYKTGPHINYASYFRFFATEVVESDRVLYLDSDIIVTGELATLFEIDLKGYSIGAVDDVYAYEGRKSGFNTGMLLMDVAKWKEHSIVNSLLELAAEQNQVVHLGDQSILNIYFEDNWLALDKTYNYMVGIDIYHLAQECERLDDNPPTIVHYASHDKPWNTYSISRLRELWWVYRDLDWSEIAFQRSDLNYFERSNQSKKQVMLVTWSADIKHLEYLVQRLPDWHFHLAAPCDCSEELTSLSQYTNVTVYQNVLHSRIDWLLDDSIVYLDINTGGEVFNVVTRAQESGKKIFAFDITRKSMDDGLYDGIFSVERPDDLVDRMKNIEIE

SEQ ID NO: 20343 - protein, 117 aa, Brassica napus
MVGLLKWACWVWACLMVAGPITPTAVLSWGPVGGTLAACLGSLTQKGPFPRGGCTGVPNLTTLARPTPDRQKACRCFVGAVNSFLTLNVARAVGLLKACGVIFLSKFSKGPTCTSFG

SEQ ID NO: 20344 - protein, 377 aa, Oryza sativa (indica cultivar-group)
MADAEDIQPLVCDNGTGMVKAGFAGDDAPRAVFPSIVGRPRHTGVMVGMGQKDAYVGDEAQSKRGILTLKYPIEHGIVSNWDDMEKIWHHTFYNELRVAPEEHPVLLTEAPLNPKANREKMTQIMFETFNTPAMYVAIQAVLSLYASGRTQGNVLDSGDGVSHTVPIYEGYALPHAIPRLDLAGRDLTDYLMKILTERGYSFTTTAEREIVRDMKEKLSYIALDYDQEMETAKTSSSVEKSYELPDGQVITIGAERFRCPEVLFQPSFIGMEAAGIHETTYNSIMKCDVDIRKDLYGNIVLSGGTTMFPGIADRMSKEDHCLAPSSMKIKVVAPPERKYSVWIGGSILASLSTFQQMWIAKAEYDESDPSIVHRKCF

SEQ ID NO: 20345 - protein, 460 aa, Candida glabrata CBS 138
MSSQVNEPEFQQAYHEVVSSLKDSSLFEKHPKYAKVLPVVSVPERIIQFRVTWENDNHEQEVATGYRVQFNSAKGPYKGGLRFHPSVNLSILKFLGFEQIFKNALTGLDMGGAKGGLCVDLKGRSDNEIRRICYAFMRELHRHIGADTDVPAGDIGVGGREIGYLFGAYRHYTNSWEGVLTGKGLNWGGSLIRPEATGYGLVYYTQSMIDYATKGKESFSGKRVAISGSGNVAQFAALKVIELGGIVVSLSDSKGCIISETGITTEQIASIAEAKIKFKSLEQIVGEYSAFAENKVEYVAGARPWTLVGKVDIALPCATQNEVSGDEAKALVAAGVKFVAEGSNMGCTPEAIDVFESSRATASAPGEAVWYAMGKNSNLGGVLTSGLEMAQNSQRMSWTSEEVDQELKKGMVNCFNDCIEAAEKYSNESNKNALPSLVKGGNIASFIKVADAMFDQGDVF

SEQ ID NO: 20346 - protein, 204 aa, Triticum aestivum
MHPTRCELAHMVDLQAAALVISVVAAEVYRAAAAMVKYSTDPANPTKSAKAMGRDLRVHFKNTRETAFALRKMSLNKAKRYLEDVLAHKQAIPFRRYCRGVGRTAQVKNRQPNGQGRWPAKSAKFVLDLLKNAESNAEVKGLDVDALYISHIQVNQAQKQRRRTYRAHGRINPYMSNPCHIELILSEKEEPVKKEAESQIARKA

SEQ ID NO: 20347 - protein, 345 aa, Ananas comosus
MTSKVQLVFLFLFLCVMWASPSAASCDEPSDPMMKQFEEWMAEYGRVYKDNDEKMLRFQIFKNNVNHIETFNNRNGNSYTLGINQFTDMTNNEFVAQYTGLSLPLNIKREPVVSFDDVDISSVPQSIDWRDSGAVTSVKNQGRCGSCWAFASIATVESIYKIKRGNLVSLSEQQVLDCAVSYGCKGGWINKAYSFIISNKGVASAAIYPYKAAKGTCKTNGVPNSAYITRYTYVQRNNERNMMYAVSNQPIAAALDASGNFQHYKRGVFTGPCGTRLNHAIVIIGYGQDSSGKKFWIVRNSWGAGWGEGGYIRLARDVSSSFGLCGIAMDPLYPTLQSGPSVEVI

SEQ ID NO: 20348 - protein, 336 aa, Debaryomyces hansenii CBS767
MTSFDPESISYFNPNVDRRVALITGGNSGVGWYTVLHLYLHGYIVYIAARSKTRVNTSINELKEEAMVIRLKYTSQQSSNERFLGELYFLDIDLLSLSSVLNAVKTFKSREKHLNILINNASVMALPYSITKDGFEIQMQTNYISPFLLTTKLLPLLESSSELFPKSGPPKIIYLSSIGHQLAFKYFNLNSTFNYRPNIVFTWFRYGLAKTCGIHFMKMLALRNPKILCMSVHPGFVMNTNLFSYWTRLPIIGILFWCLFQIFGFLFGVSSEQGSYATVRCCLDPKLSLEEDNGKYFATNGAEAEPSKIARNMNFAARTWIWTVQELSERKISIPN

SEQ ID NO: 20349 - protein, 309 aa, Thiomicrospira crunogena XCL-2
MKKTLRIATRKSPLAMWQAEFVKAELEKHHEGLTVELLPMSTKGDKILDVPLAKIGGKGLFTKELEDRMLAGEADIAVHSMKDVPMVLPEGFALGAILERHEPTDAFVSNDYAHFEELPQGAVLGTSSLRRKAQLMAARPDLVVKDLRGNVGTRLGKLDAGDYDAIVLATSGLKRLELDERIRHELSPETCLPAVSQGTLGIEYFEKDPEVLELIQVLNHRDTEIRTLAERAMNHRLEGGCQVPIGVYAELEDDQIYLRGLVGALDGSEILRSEARGSQKDPETLGVYVAEQLLEQGAGEILKEVYDQA

SEQ ID NO: 20350 - protein, 106 aa, Magnetospirillum magnetotacticum MS-1
MSSTVRASHILLMYKGSMRSQATRSKDEALTEINNIKEELNQGADFGQMARQYSDCPSGEDGGDLGEFPKGAMVPEFEVAAFALKSGEVSGVVETPFGFHLIQRTD

SEQ ID NO: 20351 - protein, 165 aa, Leptospira interrogans serovar Lai str. 56601
MRFNMNETLYDLTATLNNGKEQKLENYKGKVLLIVNTASECAFTPQYAGLQNLYSKYKTEGLEILGFPCDQFKHQEPGSDETIKNFCQKNYGVEFPIFKKIEVNGDNAHPVFRFLRNKASGFFGNSIKWNFTKFLVDKQGNVIKRYSPITTPENIEKEIQNLLKR

SEQ ID NO: 20352 - protein, 420 aa, Yarrowia lipolytica CLIB122
MTRVVVTGLGLVSPLGVGVKQAWNRLIAGKSGIVALDERFDALSCRVGGVVPQDEWSEASSANLAAGEIKRVPLFAQYAMVAAQEAVNDSKLLADAGESAKHTDIGCSIGTGIANMAELADTVTAFNNKGPRGISPLFVPRIIANMGAGHVSMRFGLQGPNHSVSTACATGAHSIGDAANFIRLGYAKAMIAGSTEACMHPIALGGFARAKSVATKWNDSPSEASRPFDKDRGGFVMGEGSAVLVLEEYEHAVARGAPIYAEVCGYGLSGDAHHITAPPDDGNGAYRAMKQALKQANVSAVKIDYVNAHATSTPLGDAAENAALTQLFEGRNLSDIAVSSTKGAIGHLLGGAGSVEALFTIKALETGDLPPTLNLNELSDPDVFKFNFVPKETQHRDVRYALNNSFGFGGTNSSLLFGKV

SEQ ID NO: 20353 - protein, 364 aa, Methanocaldococcus jannaschii
MKFLKNVLEEGSKLEEFNELELSPEDKELLEYLQQTKAKITVVGCGGAGNNTITRLKMEGIEGAKTVAINTDAQQLIRTKADKKILIGKKLTRGLGAGGNPKIGEEAAKESAEEIKAAIQDSDMVFITCGLGGGTGTGSAPVVAEISKKIGALTVAVVTLPFVMEGKVRMKNAMEGLERLKQHTDTLVVIPNEKLFEIVPNMPLKLAFKVADEVLINAVKGLVELITKDGLINVDFADVKAVMNNGGLAMIGIGESDSEKRAKEAVSMALNSPLLDVDIDGATGALIHVMGPEDLTLEEAREVVATVSSRLDPNATIIWGATIDENLENTVRVLLVITGVQSRIEFTDTGLKRKKLELTGIPKI

SEQ ID NO: 20354 - protein, 533 aa, Burkholderia mallei ATCC 23344
MKSSIQRNIGPFALMLTGLGSIIGSGWLFGAWKAAKIAGPAAICAWIIGAVVILAIALTYAELGAMFPESGGMVRYARYSHGSLVGFISAWANWIAIVSVIPIEAEASIQYMSTWPYAWAHALFVNGELTTPGLLLSAILVVIYFLLNYWGVKLFARANTAITIFKFLIPGLTIAGLLLSSFHSENLGTAGGSSGFAPYGWSAVLTAVATSGIVFAFNGFQSPVNLAGEARNPSRSVPFAVISSILIALVIYVLLQVAYIGAVNPADVAKGWAHFNFASPFAELAIALNLNWLAILLYVDAFVSPSGTGTTYMATTTRMIYAMERNNTMPKIFGSVHPLYGVPRPAMWFNLMVSFVFLFFFRGWSSLAAVISVATVISYLTGPISLMALRCAATDLERPLAIPCMKLIAPFAFVCASLILYWAKWPLTGEIILLMIVALPVYFYYQGKAGWSGWGRDLKAAWWLVAYLPTMAVLSLIGSKEFGGHGVLPYGWDMLVVAAIAPVFYYWGVHTGYRTEYLDERESRDEILEGIGA

SEQ ID NO: 20355 - protein, 366 aa, Pyrococcus woesei
MSLEESPKRKIRCPEVQVPQSNIDEELEKIVEQIKARIYVVGVGGAGCNTVNRMMEVGVTGAKIIAVNTDAQDLLKVKAHQKILIGKELTRGLGAGNDPKIGEEAAKESERELRDALEGADMVFITCGLGGGTGTGAAPVIAEIARKMGELTVSVVTLPFTMEGIRRAKNAEYGLKRLVKYSDTVIVIPNDKLLEVAPKLPIQMAFKVADEILVQAVKGITELITKPGLVNLDFNDVRAVMKDRGVAMIGIGESDSEKRALEAAEQALNSPLLDVDISGASGALIHISGADVKLEEAQQIIEYVTRNVDSKAQVIWGIQLEPELEKTIRVMVVITGVTSRYITPEEETPLETPEESPSIEISIPEL

SEQ ID NO: 20356 - protein, 422 aa, Corynebacterium glutamicum ATCC 13032
MSEHEQAHSQLDSVEEAIADIAAGKAVVVVDDEDRENEGDIIFAAELATPELVAFMVRYSSGYICAPLTAKDADRLDLPPMTAHNQDARGTAYTVTVDANTGTTGISATDRAHTLRLLADPEADRTDFTRPGHVVPLRAREGGVLVRAGHTEAAVDLARAAGLRPAGVICEVVSEEDPTGMARVPELRRFCDEHDLKLISIEQLIEWRRKNEILVERQVETVLPTDFGTFKAVGYRSIIDGTELVAIVAGDVASDGGENVLVRVHSECLTGDVFGSRRCDCGQQLHESLRLIQEAGRGVVVYMRGHEGRGIGLLAKLRAYQLQDEGADTVDANLALGLPADAREFGTSAQILYDLGVRSLNLISNNPAKKVGLEGHGISIASRTPIPVAVHEDNVRYLKTKRDRMGHDLPDVALWEQEHPEN

SEQ ID NO: 20357 - protein, 406 aa, Xylella fastidiosa
QSDYEAMTLIARELRRPTLAVLSRCLQADIETSARALESATKPRLHVFLSTSPLHREHKLRMSKEQVLESVHKHVSLSRTLIDDVEFSAEDATRTEEDFLIEVTRVAIAAGATTINLPDTVGFSTPEEIRNMFTRVIANVEGANKVIFSAHCHDDLGLAVANSLAAIEGGARQIECTINGIGERAGNCALEELTMVLKVRNAFYNIDTSIHTSRIVSTSQLLQRLVGMPVQRNKAVVGANAFAHESGIHQHGMLRHRGTYEIMRPQEVGWVCSHMVLGRHSGRAAVEQRLRALGYLLEEEDLKLVFEEFKQLCEKQRLVTDVDLQVLMQDTTVQHGYRLASMTISDVGNQANALVELSNPQGQRVAETAQGNGPVDALFGALAAATGVKLELDSYQVHSVGIGADA

SEQ ID NO: 20358 - protein, 298 aa, Brassica napus
  misc_feature (139)..(139): Xaa can be any naturally occurring amino acid
MASSDQTAKIIDGKAIAHTIRSEIAEEVRDLSEKHGKVPGLAVVIVGVRKDSQTYVNMKRKACAEVGIKSVDVDLPEDVSEADLISKVHQLNSDPDVHGILVQLPLPKHINEENVLSAISIDKDVDGFHPLNIGKLAMXAESPSSFPCTPKGCLDLLKRSGVKIKGQRAVVVGRSNIVGLPVSLLLLKADATVTPVHSHTKDPEAIIREADIVIAAAGQACMIKSDWIKPGAAVIDVGTNAVSDPSRKSGYRLVGDVDYAEACKVAGCITPVPGGVGPMTVAMLLRNTLDGAKRVIGQ

SEQ ID NO: 20359 - protein, 406 aa, Xylella fastidiosa
QSDYEAMTLIARELRRPTLAVLSRCLQADIETSARALESATKPRLHVFLSTSPLHREHKLRMSKEQVLESVHKHVSLSRTLIDDVEFSAEDATRTEEDFLIEVTRVAIAAGATTINLPDTVGFSTPEEIRNMFTRVIANVEGANKVIFSAHCHDDLGLAVANSLAAIEGGARQIECTINGIGERAGNCALEELTMVLKVRNAFYNIDTSIHTSRIVSTSQLLQRLVGMPVQRNKAVVGANAFAHESGIHQHGMLRHRGTYEIMRPQEVGWVCSHMVLGRHSGRTAVEQRLRALGYLLEEEDLKLVFEEFKQLCEKQRLVTDVDLQVLMQDTTVQHGYRLASMTISDVGNQANALVELSNPQGQRVAETAQGNGPVDALFGALAAATGVKLELDSYQVHSVGIGADA

SEQ ID NO: 20360 - protein, 542 aa, Pediococcus pentosaceus ATCC 25745
MTEKAMSILNNPYLNKGTAFTKEERDQLGLNGLIPPYIQTIDEQVEQVYAQFQTKANDLEKRLFLMQIFNENRVLFYKLFSQHVVEFMPIVYDPTIADTIENYSELYVQSQNATFLSIDDPDMMEEALKNSAAGRDIRLIVVTDAEGILGIGDWGTNGVDISVGKLMVYTAAAGIDPSQVLPVVLDVGTNNQDLLKNPMYLGNRHERIKGDRYYDFVDKFVETAENLFPNMYLHFEDFGRDNAANILNKYKDRYVIFNDDIQGTGIITLAGILGALNISKQKITDQVYLSFGAGTAGAGILGRIYEEMIENGLSEEEAKKHFYMVDKQGLLFDDDETLTPEQKPFARKRSEFDNADELTDLLSVVKAVHPTIMVGTSTQPGSFTEEVVREMAAHTERPIIFPLSNPTKLAEAKAEDLLKWTDGRALIATGIPVGDIEYNGVTYQIGQANNALVYPGLGLGVIASTAKVLNDTMISKAAHSLGGIVDVDQPGAAVLPPVSKLSDFSNTVAKAIAQSAVDQGLTKEKIDNVDQAVEDTRWNPEY

SEQ ID NO: 20361 - protein, 581 aa, Desulfitobacterium hafniense DCB-2
MSKIKMTPSEAICETLVAEGITHVSGIVGSAFMDLIDLFPTAGIEFISVRHEQSAGHMEDAFCRVTGKAGVIIGQNGPGITNMVTSVAAANSAHTPMVIICPSAGTPTVGWDGFQEADTVQIFKAITKAAIQVPHPSRAADCLRTAFRIAYAERGPVLYDIPRDYFYGEVEEQILEPHQYRVSQRGCGDLASLDKAAELLFSAERPVIISGRGVVDTQARDIVAGIAGLLTAPVACTYLHNDAFPADHPLWVGPIGYMGSKAAMHSLAEADVILALGTRLSVFGTLPQYDINYFPENAKIIQVDINPRHIARTHPVEIGIIADAKEAAKEILKRLEAKIPAPEVNKGRLATIKARQKDWEDEIVSLAMVDGDPINPRRGLYEVQKALPENAIVATDIGNVSSTANSYLKFTGKGMHIAALTFGNTGFAYPAALGAQLADRNAPVVAIIGDGAWGMSLHEVSTAVEQNLPVVAIVFRNGGWCAEKKNQVDFYNNRFVGADIPNPESFVPVAIAMGAEGVRIEKAEEVGPALARALAARKPTVLEIVCDGTQLAPPFRKDALKLPVRLLPKYQKLDYRNWDKN

SEQ ID NO: 20362 - protein, 160 aa, Pseudomonas fluorescens Pf-5
MSAFHDLKLKALDGQELPLAPFKGHVVLVVNVASKCGLTPQYAALENLYQQYKAQGFSVLGLPCNQFAGQEPGTEQEIQEFCSLNYGVTFPLSSKLDVNGPERHQLYRLLAGEGAEFPGDITWNFEKFLLGKDGRVLARFSPRTAPDDPTVVQAIEKALS

SEQ ID NO: 20363 - protein, 238 aa, Bifidobacterium longum DJO10A
  misc_feature (221)..(237): Xaa can be any naturally occurring amino acid
MAINPPVDATQTPEWAALQKHYDELQVEGVSLKKWFAEDAERVEKLSFDAGDLHFDLSKNLIKPETLQLFANLAKAVKLDERTKAMYTGVHINNTEDRAVLHTALRRPVEDEGKYIVDGQDTVKDVRETLDKIYAFADDVRSGKWTGVTGRKIETVVNIGIGGSDLGPVMVYEALKPYADAGISARYISNIDPNDLAEKTKGLDPETTLFIIVSKTFTTLXXXXXXXXXXXXXXXXXP

SEQ ID NO: 20364 - protein, 265 aa, Bifidobacterium longum DJO10A
MIFGPARFEEFLHGFHEIDEYFANTPFEKNVVVLLGMLNVWYRNFFKVASHAVLPYDQYLHRFPAYLQQLTMESNGKSVRWDGTPVTSETGEIFWGEPGTNGQHAFYQLIHQGTQLIPADFIAFVNTPNPTKDGDQDVHELFLGNYFAQTKALAFGKTADEVRAEGTPEEIVPARVFSGNRPTTSIFGVALTPFALGELIALYEHITFVEGTVWGLDSYDQWGVELGKQLAKQITPAISQDDDALAAQDASTQSLIKFYRANREF

SEQ ID NO: 20365 - protein, 104 aa, Streptococcus pneumoniae TIGR4
MAKAITDATFEQETKDGLVLVDFWATWCGPCRMQGPILDKLSEELSEDVLKIVKMDVDENPNTARAFGIMSIPTLLFKKDGQVVKQVAGVHTAEQIKAIIAELS

SEQ ID NO: 20366 - protein, 320 aa, Pseudomonas fluorescens Pf-5
MSEVRHSRVIILGSGPAGYSAAVYAARANLKPLLITGMQAGGQLTTTTEVDNWPGDVHGLTGPALMERMREHAERFETEIVFDHINAVDFAAKPYTLTGDSATYTCDALIIATGASARYLGLPSEEAFMGKGVSACATCDGFFYRNKPVAVVGGGNTAVEEALYLANIASTVTLIHRRETFRAEKILIDKLNARVAEGKIILKLNANLDEVLGDNMGVTGARLKNNDGSFDELKVDGVFIAIGHTPNTSLFEGQLTLKDGYLVVQGGRDGNATATSVEGIFAAGDVADHVYRQAITSAGAGCMAALDTERYLDGLQNASF

SEQ ID NO: 20367 - protein, 184 aa, Burkholderia pseudomallei K96243
MSSSYFIATRASKFLSYVLRHRPDSIGVTLDAQGWADVSELLTKAAAAGMALTLDELKQVVAENDKKRFVLNDDATRIRAAQGHSVDVDLQLPVKAPPPVLYHGTVGKSMADIRKQGLTPMNRHDVHLSPDRETATRVATRRGKPVILVIETYPLLRDGYQFRVSDNGVWLVPEVPAKYIKFPG

SEQ ID NO: 20368 - protein, 373 aa, Methanosarcina barkeri str. fusaro
MNEIIIWILIIFCLVQSAIFSGMTIGLFSLGRLRLEIEAEADSKDAIKILQIRRDSNFLLTTLLWGNVGINVLIALLTGSVLTGASAFLFSTFVITSFGEIVPQAYFSRNALSIGAKLTPLVRFYQMLLYPVAKPTALILDWWLGREKLELFKEQSMRIMLEKHIESGKSDIGTFEGIGALNFLSIDDVSISDEGSLIDQRSIISLPVENNRPVFPPFKREPEDPFLQKIEASGKKWVIITNPQDEPVMVLDADGFLRDAVYKKGPFIPLSYCHFPVVVRSPKTRLEKVIRQFKVYPQYPEDDVIDQDLILYWDQEKRIITGSDILGRLLRGIVVECDLKSGCETPVPPSQPGVVRRSLRRGKKKESEEQKKE

SEQ ID NO: 20369 - protein, 632 aa, Actinobacillus pleuropneumoniae serovar 1 str. 4074
MSKQINVPDIGSDEVSVTEVMVKAGDTITVDQSIINVEGDKASMEVPAPEAGVVKEVLVKVGDKVTTGSPMLVLEAAESAPALVAEAPVQAVAPVATASAVVEVNVPDIGSDEVNVTEIMVKVGDSVEVDQSIINVEGDKASMEVPAPIAGVVKEILINVGDKVTTGKLIMKFETVSAAPAAEEAPAQAAAPVATASAIKEVNVPDIGGDEVNVTEIMVNVGDTVSEEQSLITVEGDKASMEVPAPFAGVVKEILVKSGDKVSTGSLIMKFEVAGAAPAAAPAPAVQAAAPAPAAQPAAQPAQSGNVSGLSQDVVAAAGAYAHATPVIRRLAREFGVNLDKVKGSGRKGRIVKEDIQTYVKTAVQVFEKQGGTAAAATGAANGAGLGLLPWPKVDFSKFGEVEEVELSRINKISGANLHRNWVMIPHVTHFDRTDITDLEAFRKEQNKLAEKQKLDVKITPVVFIMKAVAKALEAFPRFNSSISEDAQRLTLKKYINIGVAVDTPNGLVVPVFKNVNKKGIVELSRELMEVSKKARDGKLTASDMQGGCFTISSIGGLGTTHFTPIVNAPEVAILGVSKSEMAPVWNGKEFEPRLMLPLALSFDHRVIDGADGARFLTYINGVLADIRRLVM

SEQ ID NO: 20370 - protein, 422 aa, Candida glabrata CBS 138
MFKKYKNQDLDVSFWWKKNPKTPSDYVKLINEQLNKIEPTPLPNGTNITSSSSDNKRKAQEEVAKYLVGMKHYILGDVDPKPTSEAIDEFYSAMLSSDIFHNLLVHIADLDFESRKEVLLILSICLNYSKDNKFVTVDYLVSQSKTLSLMLRTMGLTLQRRDTYDIFIIVGNMIIECIKYEQLCHIFLTDTQLWSLFEFAGIANFEISTQSMQILNSVLTTHPKLVAREFFSQEKNINLFIRHINKLMAHGSYVTKRQSSKLLASLIIIRAHNVLMMTYINAPENLKLIMTLLTDKSRNLQLEAFNIFKVMVANPKKSKLVFDILVKNRDKLLAYLELFGKEVQDSTFLDEKEFIMREIESLPRIKPNTNEHNINMSNSPPKGLLHSDQKKTASSQQFNENHNELSGNNSSGNVTKSLASIG

SEQ ID NO: 20371 - protein, 276 aa, Frankia sp. CcI3
MRMLDGRSMAAEIGRYVVDEAERLAAAGVTPTLAVVLPTADPAAYSYAEIIERTAGKVGVHCVLHEPKGEPAAILDTIDTVAADPTVHGIIVQTPLPGGLTSREVGEHIPTAKDVDGMNPSSLGRLALGLPSFAPATAAAVVEILTRARIPMSGARVCVIGRGPVVGKPVSLLLLAEDATVTICHSRTKGLVSIAHEADIIVSATGHPRLVGAGFVRPGAAVIDVGTVVTETGQVGDVDAAAVSSVAGALTPVPGGVGPVTTMLLLRNTIRAARAA

SEQ ID NO: 20372 - protein, 320 aa, Enterobacter cloacae
MIKKIGVLTSGGDAPGMNAAIRGVVRAALTEGLEVFGVYDGYLGLYEDRMVQLDRYSVSDMINRGGTFLGSARFPEFRDEHVREVAIENMKKRGLDALVVIGGDGSYMGAKRLTEMGFPCIGLPGTIDNDIKGTDYTIGFFTALGTVVEAIDRLRDTSSSHQRISIVEVMGRYCGDLTLAAAIAGGCEFIVVPEVEFSREDLVAEIKAGIAKGKKHAIVAITEHICDVDELAKYIEAETKRETRATVLGHIQRGGSPGPYDRILASRMGAYAIDLLLQGHGGRCVGIQNEKLVHHDIIDAIENMKRPFKGDWLDCAKKLY

SEQ ID NO: 20373 - protein, 1006 aa, Yarrowia lipolytica CLIB122
MCQNLIRWRLKYENILWSHLLANYTTSLVYHQLLMTMSRLVRRLPGRIPTFRVAHSLSLSALRHYATATNIDGKQMAKDIRLELHDEIKQIQAKKPHFQPKLIIIQVGERPDSSAYVRMKLKAAREAQIDCELRKFSEDMAEDHLLEELDILNDDPSVHGILVQLPLPKHINETRITDSVITAKDVDGFGPLNVGELSKRGGNPAFVPCTPKGVMEMLDRSGIELRGKNAVVIGRSDIVGTPVASLLKGADATVTVCHRYTENLPAIVKNADVVVAAIGAPNFVKGEWLKPGAVVVDVGINYVKDETKKSGQRLVGDVDFDSAKEVASFITPVPGGVGPMTVAMLVNNVVTAAKRQSLEQQKMQVKPLPLKLRTPVPSDDAISRAQIPKNVKTVAKEAGLTEHEFEPYGAYKGKVSLTTLDRLKDRKDGKYVLVAGITPTPLGEGKSTTTVGLVQAMCAHLGKLAFANVRQPSMGPTFGIKGGAAGGGYAQVIPMDEFNMHLTGDIHAISAATNLLAAAIDTRMFHESSQKDAALYKRLVPSVKGKRQFIPSQLQRLEKLGINKTNPNDLTDEEISKFVRLDIDPETITWKRVVDCNDRLLRGITVGEGPSEKGRTRETGFDISVASECMAILALSNSLADMRRRLGNMVVASSREGLPVTCDDIGAGGALTALMKDAIKPNLMQTLEGTPVFVHAGPFANISIGASSVLADKIALKLAGTKTKGDEPGYVVTEAGFDFTMGGERFFNIKCRDSGLVPDAVVIVATVRALKLHGGGPEVKPGAQLAPEYQNENVDLVTAGAKNLGKQIENARSFGVPVVVAINQFATDTPAEIEAIRTAALKAGAAEAIVSNHWEKGGEGAIDLAKGVVKVCSQTDNVEKNPNFKFLYDIDTSAEEKLNTIAKEMYGAKGIELSPLARKKIDTYTAQGFGNLPICIAKTQYSLSHDPALKGVPKDFVVPIRDVRASVGAGYLYALAADIMTIPGLPTRPGYMNVEVDSKGQIEGLF

SEQ ID NO: 20374 - protein, 289 aa, Zea mays
MATVFLRSLAMAMADTALPPTHKLLPTVSLPLLPSSTRAAPLLLCASRRLPPAPLVASSDAVETSIEWVDDEEEEAGEAFDEEGEDVEEEVLASGDEGEGEYAAVEPPEEAKVYVGNLPYDIESEGLAQLFDQAGVVEVAEVIYNKETGQSRGFGFVTMSTIEEADKAIEMFNRYDISGRLLNVNRASPRGTRMERPPRQFAPAFRAYVGNLPWQADDSRLVQLFSEYGEVVNAAVVYDRETGRSRGFGFVTMVSKEELDDAISALDGQELDGRPLRVNVAAERPQRGF

SEQ ID NO: 20375 - protein, 813 aa, Bacillus clausii KSM-K16
MNKEKVVLIGNGMAGIRTLEEIIKREPSRFQFTVFGAEPHPNYNRILLSSVLQGDASVSDIVLNDYDWYERNQIELFTGDAVVRVDCRKKEVWSASGIKRTYDRLIFATGSDPFMLPLPGAEKEGVIAFRNIADCESMINAAKSYQKAVVIGAGLLGLEAARGLLNLKMDVDVIHIADHLMDRQLDSDAGKMLKAELEQQGMQFHLNKKTVKINGHKRVKGISFSDQTSIKADLVVMAVGIRPNVQLAKQSGLKVNQAIVVNDYMETSEEDVYAVGECAEHRGIVYGLVAPLYEQGKVLAEHICTNTSNEVSGYKGSIVSTKLKVSGVNVFSAGAFRDQDETKSIRIHDEFAGVYKKLVVKNNQVVGAVLFGDTNDANRILSLIRSGEDISAISKAALFPSETNDSSPSVVATMADEETICGCNGVSKGEIVCAIKEQGLSTVAEIRQCTNASRSCGGCKPEVAELLALTTGTDIMAKPEPLCGCTELTHEAVVASIREMGLSYVREVISVLGWKSEEGCSKCRPALNYYLGLISPLDYTDDAHSRFVNERVHANIQKDGTFSVVPRMYGGVTNPEQLRKIADVAEKYNVPLLKVTGGQRIDLLGVEKEKLPNVWRDLGMRSGYAYGKTLRTVKTCVGEDFCRFGTQDSISLGIEIEKKYEGLNTPHKVKMAVSACPRNCAESGIKDVGIVGVEGAWEIYVGGNGGVDLRSAELLCKVETNEEVMETISAFLQYYREQATYLERTSHWIERVGLESIKKVIFDDSIERAALIERMEMALSRHKDPWTEIVESEEKQNQLFEKKKIAVKQGGGM

SEQ ID NO: 20376 - protein, 337 aa, Ustilago maydis
MSQVNIGINGFGRIGRIVFRNSVVHNTANVVAINDPFIDLEYMVYMLKYDSTHGVFNGDISTKDGKLIVNGKSIAVFAEKDPSNIPWGQAGAHYVVESTGVFTTIDKASAHIKGGAKKVVISAPSADAPMYVCGVNLDAYDPKAQVVSNASCTTNCLAPLAKVIHDKFGIVEGLMTTVHATTATQKTVDGPSAKDWRGGRAAAANIIPSSTGAAKRVGKVIPSLNGKLTGMAFRVPTTNVSVVDLTARLEKGASYDEIKAEVKRASENELKGILGYTEDAVVSQDFIGNSHSSIFDAAAGISLNNNFVKLVSWYDNEWGYSNRCLDLLVFMAQKDSA

SEQ ID NO: 20377 - protein, 338 aa, Gibberella zeae PH-1
MAPIKVGINGFGRIGRIVFRNAVEHPDIEVVAVNDPFIEPHYAVYMLKYDSSHGIFKGEVGNQGNDLVVNGKTIKFYSERDPANIKWSETGADYVVESTGVFTTIDKAKAHLQGGAKKVIISAPSADAPMYVVGVNENKYDGSADIISNASCTTNCLAPLAKVINDKFGIVEGLMTTVHSYTATQKTVDGPSSKDWRGGRGAAQNIIPSSTGAAKAVGKVIPELNGKLTGMSMRVPTANVSVVDLTVRLEKGASYDQIKQVIKEASEGDLKGVLAYTEDDVVSSDLNGNTNSSIFDAKAGISLNDNFVKLVSWYDNEWGYSRRVLDLLAHVAKVDASK

SEQ ID NO: 20378 - protein, 108 aa, Thiomicrospira crunogena XCL-2
MSDNMIATSDANFDSEVLQSDVPVLVDFWAEWCGPCKMIAPILDEVAGEYAGKIKVAKLNIDENPATPPKYGVRGIPTLVLFKNGEVDATQVGALSKSQLCAFLDGNL

SEQ ID NO: 20379 - protein, 524 aa, Deinococcus radiodurans R1
MTQPNPTQPSPTQQNHDLARQLRESRLSRGLQHFIGGEWVDAHSGKTFDAHSPVDNDFLVKVAEGDASDIDRAAKAAHDAFQTWREVSGAERRKILHKVADLIEKRAQEIAVLESVDTGQAIRFMKSAAARGAENFRFYADRAPGAQDGQSLPAPGFINYSIRQPIGPVGVITPWNTPFMLSTWKIAPALAAGCTVVHKPAEWSPVSATLLTEIMDEAGLPGGVHNLVHGFGESAGKSLTEHPLVKAVAFVGETTTGSHIMRQGADTLKRVHFELGGKNPVVVFDDADLDKALDAVVFMIYSLNGERCTSSSRVLIQEGIYDEFTRRIAERAANIRVGDPLDPDTEVGPLVHPRHFEKVMSYFECARQEGATIAAGGERVGEAGNFVRPTLFTAARNDMKIAQEEIFGPVLTAIPFKDEADALELANDVNYGLAGYLWTNDLTRAHRFAHGLEAGMIWVNSENVRHLPTPFGGVKNSGIGRDGGDYSFEFYMETKNIAISLGTHKTAKLGVGQAPAVGKKEAGE

SEQ ID NO: 20380 - protein, 478 aa, Silicibacter sp. TM1040
MTHTVEKIGGTSMSRVNELVGTLFTGGRKPDDLYGRVFVVSAFGGITNLLLEHKKTGEPGVYARFADAESDHGWHEALSRVGDEMRKAHEAVLENAGDVAQADAFVSERIEGARNCLIDLQRLCSYGHFRLAEHMLQIRELLSGLGEAHSAYVTALLLQRAGVNARFVDLSGWRDEGDVTLEERISSALNDVDPATEMPIVTGYAQCAEGLMREFDRGYSEVTFSCLAALTGASEAIIHKEFHLSSADPKLVGEGVAQKLGHTNYDVADQMSNMGMEAIHPKAAKTLRQADVPLRVTNAFEPEDPGTLIDDKPADQPAVEMITGLDIIALELFEQDMVGVKGYDAAILEVLTRHDVRIVSKTSNANTITHYLDTSLTVLKRVEKDLAKIYPNADISARLLSMASAIGRDLKGLSVLTRGLQAIADVGLASLGASQGPRNVDVQFIVEREDLKPVISALHKVLVEGRPAKQEKPIKAAA

SEQ ID NO: 20381 - protein, 131 aa, Oryza sativa
APQSTVVPVLAPWVRGCGAATVTTMKLNPAVDDGGSFKTRVVARDNAAHIIKSEVLDVPAGSKVGKLKSHVTETKIEAAGAGSCLAKINVEYELEDGGSLSPEKEKLILDGYFGMLKMIEDYLVAHPTEYA

SEQ ID NO: 20382 - protein, 142 aa, Glycine max
  misc_feature (66)..(66): Xaa can be any naturally occurring amino acid
LKEMITQIFATPKDHRKAKPFHDHVFVFSIVDDHIWFRNYQISVPHNEIDKVDKGGLDKMTLVEVXPRFCLNPIKMFGGSFGGPTLFENPFYVSPNQIRALEKRKKAGKYAKKVKAKVRRKMHEMENTLEPDEFADLWKGED

SEQ ID NO: 20383 - protein, 65 aa, Triticum aestivum
  misc_feature (44)..(44): Xaa can be any naturally occurring amino acid
ARLTVVKINHDAYPQLIGEYKVYGLPPLILFKNGQEVPESRRLXAIHNSKLIEYVDALLESKTVS

SEQ ID NO: 20384 - protein, 849 aa, Nocardia farcinica IFM 10152
MNPATTERKTVVVVGHGMVGHRFVEALRSRDESGTWQVVILSEERLPAYDRVGLSSYVGAWDPAALALPGNDYAGDELVELRLGQRAEAIDRQARKVTTATGETIGYDALVLATGSYAFVPPVPGHDLDGCFVYRTIDDLDGIRATAEAAGPGAHGVVIGGGLLGLEAANALKLLGMTPHVIEYNNRLMPAQVDEGGGAILERLVTDLGLTVHTGVGTQSIERAEDGTLRLTLSDDSTIDASMVVFSAGIRPNDRIAREAGLEVGPRGGIVTDLSLQTSDPNIWAVGECAAVEGTCYGLVAPGYTTAEIVADRLLGGRGEFPGADMSTKLKLMGVDVASFGDAHGVTEGALSVVLHDAAKGTYAKLVVSDDATTLLGGILVGDASQYAALRPLVGRPLPAAPAALISPAGAELGADALPDDAQICSCNNVSKGAICGAIAEGACDIPAIKSCTTAGTSCGGCVPMLKKLLEQSGVAMSKALCEHFEQSRAELFQIVQVTGIRTFSGLIAKYGKGSGCDICKPTVASILASTSSDHILDGEMAALQDTNDHFLANLQKNGTYSVVPRMPGGEVTAEQLITIGEVAKEFGLYVKVTGGQRIDLFGARVEQLPRIWQRLVDAGMESGHAYGKSLRTVKSCVGSTWCRYGQQDSVGMAVLLEKRYRGLRSPHKLKLAVSGCARECAEARGKDVGVIATENGWNLYVGGNGGLTPKHAVLLAGELDDETLIRYIDRYLMFYIRTADRLQRTAPWQEALEGGIDYLKQVICEDSLGIADELEAAMARHVEGYKDEWAAVLEDEEKLARFVSFVNAPEEADPTIAFDDSGERKVPVLLGMPEVAPRVESVTAAQAK

SEQ ID NO: 20385 - protein, 368 aa, Gibberella zeae PH-1
MAPLDNPAVPKGSVVLVTGVNGFLGSHVAKQFLEFGYKVRGTVRDPAKNSWLSTAFDNQYGQGNFELVKLADMTSEEDLKEVVKGVSVIAHTASIMSLNPDPNKVIPDAIAGALTALKVAYGEPSVKRFVLTSSSSAATISMPGKPHALVNEESWSEGAVKIAWSDPPYTMARAGAVYAASKVQSEQAIWKYHKEHQSERPDLVVNTVLPNYNWGKTIDAANQGYPSSSGLPVMLYKNKVATMHRRTAPQYFIDVDDTGRLHVAAAIFDHVKDQRIFGFAGRFNWNQVLDILRKHYPEKTFPENFADGEDANEIEPRDKAEQLLKDLGRPGWTSLEDAIIANVEDLDKDGDDVWYKDYAELESLAQPA

SEQ ID NO: 20386 - protein, 269 aa, Oceanospirillum sp. MED92
MTKTILITGSTDGIGLATALRLAEEGHHILLHGRSEKKLAEAQNKLKQVEGSGGVSCYQADLSVMADVVRFAEKVKAEQTHIDVLINNAGIFKTEERITSDGLDVRFAVNTVAPYLLTEKLLPMLGNQGRVINLSSAAQSEVNLEALLGVVSVEQDFNAYAQSKLAITMWSRVLAKSLTAGPAVIAVNPGSMLGTNMVQKGFGVSGNDISIGVNILTALALDDKYQQCSGQYFDNDAGHFADPHIDALDQHKSVAVVDAIKNILTELKL

SEQ ID NO: 20387 - protein, 546 aa, Cytophaga hutchinsonii
MTNTSDFTSWKKLNEHYSKSSNLQMRDLFAADKDRFSKYSVQFNDILVDYSKNRITDETISLLIALAEEAGLKQAIEDMFAGKKINNTEKRSVLHVALRNRSNTPILSDGKDVMPEVNAVLEKMKGFCEKVRSGAWKGYTGKSITDIVNIGIGGSDLGPVMVTEALKPYGSPTLHVHFVSNVDGTHIVETTKKLNPETTLFIIASKTFTTQETITNAESAKAWFLQTAKDEAAVAKHFVALSTNAKSVAAFGIDTENMFEFWDWVGGRYSLWSAIGLSIALYIGYDNYIELLSGAHAMDKHFKETPFAKNIPVLLALIGIWYNNFYKAESHAILPYDQYMHRFAAYFQQGDMESNGKRVTKDGTAVTYSTGPIIWGEPGTNGQHAFYQLIHQGTKLIPCDFLAPVISQNPIGDHHPKLLANFFAQTEALMKGKTAAEAKAELEKAGLSAEDVAALVNHKVFEGNRPTNSIFFKKLTPFTLGSLIAMYEHKIYTQSVVWQINAFDQWGVELGKQLANAILPELKDNAAVTSHDSSTNGLINFYKANK

SEQ ID NO: 20388 - protein, 471 aa, Legionella pneumophila str. Lens
MTIALVWFRQDLRLTDNPAFIEACSHHEIVIPLYIYDDKCSVLGQAQAWWLHHSLIALGKSLNQQGLCLVLRKGAPQEIILELVAQYGVESVYWNRCYEPQAIARDKKIKLALGEREIKVQSFNGNLLHEPWTIKNKNGDFFKVFTPYWKQCRQILNIPSPFMLTKRPRGIKITSDDLGKWKLLPAINWAARFSEYWTPGEEGAQKKLDEFIVHHLSGYKRERDFPAKNATSRLSPHLHFGEISPWVILRALELAKLEQTCDLASVEHFLSELGWREFSVYLLYHFPKLDCENFRKEFDAFPWQNDEQLLTCWQKGMTGYPIIDAGMRELWATGYMHNRVRMIVASFLTKDLLIDWRSGAQWFLDTLVDADLANNSASWQWVAGCGADAAPYFRIFNPVLQSQKFDPDGVYIRQWIPELAQLNSQSIHQPWTDADASSIFLGKKYPKPIIDHQEARTKALSYYQQIKKGMD

SEQ ID NO: 20389 - protein, 95 aa, Vibrio parahaemolyticus RIMD 2210633
MQINIQGHHVDLTDSMQDYVQSKFQKLERFFDHINQVQVVLKVEKINQIAEATLHVNHGEIHASADDENMYAAIDSLVDKLVRQLNKHKEKLNSH

SEQ ID NO: 20390 - protein, 610 aa, Chlorobium tepidum TLS
MSILANKDTRAVIIGGVAGVNAAKRMAQFDYLINRPLTVQAFVYPPEAGQQKEIFRGGELKNVTVYPSLAPALNEHPDINTALIYLGASRATEAAMEALESPNIQLVSMITEGVPEKDAKRLKKLAQKLGKMLNGPSSIGIMSAGECRLGVIGGEYRNLKLCNLYRQGSFGVLTKSGGLSNEAMWLCAQNGDGITSAVAIGGDAYPGTDFVTYLEMFEKDPATKAVVMIGEVGGNLEEEAAEWLAAEPRRIKLIAAIGGTCQEVLPQGMKFGHAGAKEGKKGAGSARSKMNALREAGALVPDTFGGLSKAIKQVYEELLASGAIKPKPEIDEALLPELPPSVQEVMKQGEVVVEPLIRTTISDDRGEEPRYAGYAASELCSKGYGIEDVIGLLWSKKLPSREESEIIKRIIMISADHGPAVSGAFGTILAACAGIDMPQAVSAGMTMIGPRFGGAVTNAGKYFKMGVKEYPNDIPGFLAWMKKNVGPVPGIGHRVKSLRNPDQRVKYLVSYVKNETSLHTPILNYALEVEKITTAKKENLILNVDGTIGCILMDLGFPEHSLNGFFVLARTIGMIGHWIDQNNQNSRLIRLYDYLINYAVKPERPVPDKK

SEQ ID NO: 20391 - protein, 364 aa, Ipomoea batatas
MVTTISATVPSRVERLAGSGIERIPKEYIRPEEERPSIGDIFAEEKMGGGPQVPTVDLKRINSEDLEVREKCREELRKAAVDWGVMHLVNHGIPEELTGRVKAAGEGFFGQPIEEKEKYANDQAAGNVQGYGSKLANNASGQLEWEDYFFHCVFPEDKTDLSIWPKTPSDYIDATREYAKQLRALTTTVLAVLSQGLGLEEGRLEKEVGGMEELLLQMKINYYPKCPQPELALGVEAHTDVSALTFILHNMVPGLQLFYEGKWVTAKCVPNSIIMHVGDTVEILSNGKYKSILHRGVVNREKVRVSWAVFCEPPKEKIILQPLPETVSEADPPRFPPRTFAQHIKHKLFRQTDQEGADTPKPDE

SEQ ID NO: 20392 - protein, 464 aa, Bacillus licheniformis ATCC 14580
MVNEKKISSGFIYFFGAFAGILFGYDIGVMTGALPFLQNDWNLQDNAGVIGWITSSVMLGAIFGGALAGQLSDRLGRRKMILISAIIFVVGSILSGIAPHNGILFLIVSRVLLGLAVGAASALVPAYMSEMAPARLRGRLSGINQTMICSGMLLSYIVDFLLKDLPETMAWRLMLGLAAVPALILYVGMLKLPESPRFLIKNNKLDEARKVLSYIRSNKGEIDSEITQIQETAREEAKANQNASWATLLSNKYRFLLIAGVGVAAFQQFQGANAIFYYIPLIVEKATGNAASSALMWPIIQGVILVLGSLIFLVIADKFNRRTLLTVGGTIMGLSFILPAILNILIPNANPMMMVVFLSIYVALYSFTWAPLTWVIVGEIFPLVIRGRASGLASSFNWIGSFLVGLLFPVMTASMSQEAVFAIFGVICLLGVVFIRTRVPETRGRSLEEIGKNGENKRVDGKSA

SEQ ID NO: 20393 - protein, 362 aa, Ipomoea batatas
MVTTITVPSRVERLAGSGIERIPKEYIRPEEERPSIGDIFAEEKMGGGPQVPTVDLKGINSEDLEVREKCREELRKAAVDWGVMHLVNHGIPEELTGRVKAAGEGFFGQPIEEKEKYANDQAAGNVQGYGSKLANNASGQLEWEDYFFHCVFPEDKTDLSIWPKTPSDYIDATREYAKQLRALTTTVLAVLSQGLGLEEGRLEKEVGGMEELLLQMKINYYPKCPEPELALGVEAHTDVSALTFILHNMVPGLQLFYEGKWVTAKCVPNSIIMHVGDTVEILSNGKYKSILHRGVVNREKVRVSWAVFCEPPKEKIILQPLPETVSEADPPRFPPRTFAQHIKHKLFRLTDQEGADTPKPDE

SEQ ID NO: 20394 - protein, 296 aa, Acinetobacter sp. ADP1
MSVLINKDTKVLVQGFTGKNGTFHSAQALDYGTKVVGGVTPGKGGTTHLDLPVFNTMKDAVRETGADASVIYVPAPFVLDSIVEAVDSGVGLIVVITEGVPTLDMLKAKRYLETNGNGTRLVGPNCPGVITPGECKIGIMPGHIHQPGRIGIISRSGTLTYEAVAQTTKLGLGQSTCIGIGGDPIPGMNQIDALKLFQDDPDTDAIIMIGEIGGTAEEEAAEYIQSNVTKPVVGYIAGVTAPKGKRMGHAGAIISGGKGTAEEKFAAFERAGMAYTRSPAELGSTMLQVLKEKGLA

SEQ ID NO: 20395 - protein, 80 aa, Arabidopsis thaliana
  misc_feature (12)..(12): Xaa can be any naturally occurring amino acid
MASSMLSFSTMXASPAEGFICRSWSGDHKTSPSFPTPPKANNDITSITSNGGSINCMQVWPSIGKKKFETFFFPSDLTHS

SEQ ID NO: 20396 - protein, 174 aa, Synechococcus sp. CC9605
MYGRYSRLTSALHPCFTMAISVSAVSVTTPDGSSKSLGDYAGKVLLIVNVASRCGFTKQYAGLQALNEAYAAKGLAVLGFPCNDFGAQEPGSLDEIKSFCSTTYGADFELFEKVHAKGSTTEPYTTLNQMEPSGDVEWNFEKFLVGKNGTVIARFKSGVTPEDLKSAIEAALAA

SEQ ID NO: 20397 - protein, 742 aa, Bacillus clausii KSM-K16
MGSESRQRLVLIGNGMAGVRVVEEVLKLAPRQFAITILSEEDRPSYNRILLSSVLQGKQTLHSIGIHPFQWYVDHGIELRLGEEATRIDPVAQKVYTDKGELAYDKLVIATGSEPFVLPVPGVEKEGVFVFRTIRDCERLTEWSTRYQKAAVIGGGLLGLEAAQGLAHLGVDVSVIHLSDRIMERQLDETAARLLKQSLESKGIHFLLQKQTAEISGEERVTGLLFHDGTTLSADFVVMAAGVQPNIAIAKESNIPTKRGIVVDDRLRTDVSGVYAVGECAEHNGISYGLVAPLYEQAKVLARELCGLPGLYYNGTVLATQLKISGVNVFSAGETTCSGTCTVLKTLNEITGQYKKLLFKEDCLAGAVLFGNTRQSDQLLQLIRANTPLSDDEKTQLLTEDGTAFERELASLPASHLICNCNAVSKGDIMSAMAAGQHTIAQIKAGTKAASSCGGCEVRVAAMLESFKHGQLQATVDIAERKPLCPCTSLTEQQVAQSIAEKRLVVFSDMSEKLGWKNKNGCRVCREVSAYYAGLFFPGGAPKERNGKQENDGSYTITLPHIAGRLSTDQLKQFALMAEELQVPRIDFSARNQVQLKGLTEKQLPYVFEQLDMPPAVLAGKRLQVAIDDSHYNWPEGRHLAERLLDLFNCVPFPAETEVCVTLAARRHELAAIRLSRSPLNWEVAIGSELFCSNDSVEGTFQLVCALLQYFRQSAQYSENIHAWLVRKGAVHVREVVFDAAC

SEQ ID NO: 20398 - protein, 834 aa, Sinorhizobium meliloti 1021
MTGELTRREMLKAHAAGIAAATAGIALPAAAQPVPGGVEALQITWSKAPCRFCGTGCGVMVGVKEGQVVATHGDMQAEVNRGLNCIKGYFLSKIMYGTDRLKTPLLRKRNGAFAKDGEFEPVSWDEAFDVMAEQAKKVLKDKGPTAVGMFGSGQWTIFEGYAATKLMRAGFRSNNLDPNARHCMASAAYAFMRTFGMDEPMGCYDDFEHADAFVLWGSNMAEMHPILWTRLADRRLGHEHVKVAVLSTFTHRSMDLADIPIVFKPGTDLAILNYIANHIIQTGRVNEDFVRKHTTFMVGATDIGYGLRPDNPLEVKAVNAKDAAKMTPSDFESFKSFVSEYTLDKVVELTGVEAGFLEQLADLYADPKRKVMSLWTMGFNQHVRGVWVNQMVYNLHLLTGKISEPGNSPFSLTGQPSACGTAREVGTFAHRLPADMTVTNPEHRKHAEEIWRIPHGIIPEKPGYHAVEQDRMLKDGKLNFYWVQVNNNVQAAPNTQNETYQGYRNPDNFIVVSDVYPTITAMSADLILPAAMWVEKEGAYGNAERRTHVWHQLVDAPGEARSDLWQMVEFSKRFTTDEVWSTDILDANPGYRGKTLYDVLFKNGNVDSFPASEINKEYANREAEAFGFYIQKGLFEEYASFGRGHGHDLAPYDRYHDERGLRWPVVDGKETLWRYREGYDPYVKPGEGVKFYGRPDGKAVILAVPYEPPAESPDDEYNVWLVTGRVLEHWHSGSMTMRVPELYKAFPGAVCFMNAGDARDRGINQGAEVRIVSRRGEIRARVETRGRNRMPPGVIFVPWFDASRLINKVTLDATDPISKQTDFKKCAVKIVSVA

SEQ ID NO: 20399 - protein, 309 aa, Listeria monocytogenes str. 4b F2365
MKRKIIVGSRRSKLALTQSNWVINKLKENYPEFDFEIKEIVTKGDRILDVTLSKVGGKGLFVSEVEQALSDEVIDFAVHSMKDVPSSLKEGLIIGAIPKRESPLDCFVFNRVNSLDELPQGSVIGTSSLRRAAQLLKHRPDFVIKPIRGNIDTRLQKLHAENFDAIILAKAGLARMGWLENTTLKLEDIPPELCLPAVGQGALAIECRESDQQIRDMLTSIHHEETGICVEAERVFLKKLNGGCEIPIAGFATRANEVVHFKGLVGNADGSIILASEQAGANPSEIGNKVAEDLLSEGADTIIKELRNI

SEQ ID NO: 20400 - protein, 361 aa, Debaryomyces hansenii CBS767
MPHNTKSMDNTLNIKDNHVQIGGRKSKLAVVQSEIVKECIVEKFPELSCSVLALSTLGDKVQSKPLYSFGGKALWTKELEILLLEQVEEYPRLDLIVHSLKDIPTNLPEEFELGCILNREDARDALVMKSGSSYKSLADLPDGSLVGTSSVRRSSQLLKNHPKLRFDSVRGNLQTRLNKLDDENSPFECLLLASAGLIRIGLGDRITAHLDAPEMYYAVGQGALGIEIRKGDEKMLQLLKTIEDLPTTYCCLAERSLMRHLEGGCSVPIGVQSHYNESTNELSLKAIIVSPDGIHFVEDEYKGVVNNKDDADAIGIKVGDLLSAKGGREILNSINFERINLPPSSNTPTPQPITPITTNNS

SEQ ID NO: 20401 - protein, 110 aa, Eubacterium acidaminophilum
MSALLVEIDKDQFQAEVLEAEGYVLVDYFSDGCVPCKALMPDVEELAAKYEGKVAFRKFNTSSARRLAISQKILGLPTITLYKGGQKVEEVTKDDATRENIDAMIAKHVG

SEQ ID NO: 20402 - protein, 291 aa, Zantedeschia aethiopica
MHYTKYGGGGVGAAGVASTLEVDAVIGADGANSRVAKAIGAGDYEYAIAFQERVKIPEEKMEYYKERAEMYVGADVSSDFYAWVFPKCDHVAVGTGTVIDKGDIKRFQAATRLRAGDKIEGGRILRVEAHPIPEHPRPRRVLDRVALVGDAAGYVTKCSGEGIYFAAKSGRMCAEAILEGSEAGSRMVDESDLRRYLNKFDKTYWPTYKVLDVLQKVFYRSNPAREAFVEMCADEYVQKMTFDSYLYKRVVPGSPLEDLKLAVKTIGSLIRANALRNYMDTNTLTAPTNLR

SEQ ID NO: 20403 - protein, 607 aa, Zea mays
MNSHKFLLAVLLLLLLNYASYAATSKEDDDFRKSCPSHRCHKHGPEIRFPFRLPSHPPSCGTPGMQLSCSGHDTILDHPVLGSCRVTAIYYRHRVMNVIPPEDSSSHCQLQKLVKRNQSTDVYTPVVNPVSVLVGCSREATNQDGIVGPSSCLSLINNASQLWYLVDPSTDMSTLPMGCEVVAKGIPVPYTYDKNGPNYNTFSGRSLFNEKANRTINFGETSFNWNLNNITGSCQRCEQEGKHCGFSSNRRQAFCLHHGSHVILIAATTSVATFVVLVVTALYLSLKKRYNEAIHLKVEMFLKTYGTSKPTRYTFSEVKKIARRFKEKVGQGGFGTVYKGQLPNGVPVAVKMLENSTGEGEDFINEVATIGQIHHANIVRLLGFCSEGTRRALIYEFMPNESLGRYIFLPQELLVPEKMLDIATGIARGMEYLHQGCNQRILHFDIKPHNILLDYSFNPKISDFGLAKLCARDQSIVTLTAARGTMGYIAPEIYSPNFGGVSYKSDVYSFGMLVLEMVSGRRNSDPGIENQNGVYLPEWVYERVVTGQDLTLSKKIADQEKETVRQLAIVALWCIQWNPKNRPSMTKVVNMLTGRLQNLPIPPKPYA

SEQ ID NO: 20404 - protein, 530 aa, Zea mays
MQDWRVREFEGKFTDEFAHSSSNEHKGGVEASGVISSKKLKHAVANEKIQGVIPGTNSSGSLKRNSENIQHANGVLSQNISCAGDYKNGSIAFPLREENTITETRCPDDNWNSCQFALNNGSSILNNHSAPQDSLTYGDNDLNYIEWPGIDNFEDVDTLFRSSDSTYGQQQLENADGLSWIPSSDAVYSTDVALQQGLDSSYSDYGILDDLSAFQCAEDKSLPLVDPSSALCDNQFNDTYLFSEQKNVNAYGEQIYQEDLMELLPTDQICSGHENIDMVGNQYPSENAIQGTEDKKFSIASTSQLSSQNLLNQRHHLDSSSPSNITSESYPGKFGPSSCSSAQRNSKVQKKTVNIQPRQPANDNVMNTSRASYPCENYETERRGLGKRTLGDPQVTMGSSMVVDGSFVSSMSSDNSVEESSFQQLQDAVSQLDVQTKLCIRDGLYRLARSAQHRQVFPNTMNSNGGSEDGKELENAETSCKFMDPRSIETQTNPIDRSIALLLFRESSGGHVHVAVAADDASSLKSPAGV

SEQ ID NO: 20405 - protein, 558 aa, Saccharophagus degradans 2-40
MSTQGKPCLKKLWPALALAAAVASPNAFSACEYVVSNQWDSGYSATIKIHNDTNSTINGWNVNWQYSGDNRVTNLWNAAYVGSNPYSASNLSWNSTVGAGQTIEFGFQGAKNGGSAEVPVVTGDVCSGGGSSSGSSSSSSSSSSTGSSTSSSSSSSSSSSTGGSTSSSSSSSSTGGNGGAQQCNWYGEIRPLCNNQDSGWGWENQQSCIGRDTCSNQSGNGGIIGGSSSSSSSSSTGSSSSSSSSSSSSSSSSSSTSSSSSSSSSTSSSSSSSSSSSSSSSTSSSSSSSSSSSSSSSSSTSSSSSSSSSSSSSSSSSSSSSSSSSSSGGGVIFSADFESDSDSTQPAGWDNFIGWRQNGPNPNGSTFALVESGRAHSGNNAVHFSGGASPAMIARALPADLDTLYVRAWVYMTRQLGMNPGDNHETLIALRGSAGNANNEVRFGEIKGVIGTNEVPSDNIAPTMASWGGGPAYASDTWHCIEVAFLSQPAYDTVNAWVNDALVHTIDEGSDWNNGALEADWLSNKYVELAFGWHSFSGNDVDVWMDDIVVSTTPIGCD

SEQ ID NO: 20406 - protein, 130 aa, Arabidopsis thaliana
  misc_feature (15)..(15): Xaa can be any naturally occurring amino acid
  misc_feature (36)..(36): Xaa can be any naturally occurring amino acid
VRCISINHVDSYVLXSESSILVYHYKGFTKTCGYTXRRRSITGPRELAGELALTDQSVMYNRGSFLCPGCQPFPQSTIPEKLPSTDRQLIQLGINTVTHLIGKGDEIKKLHVSAASAQDSMICHDCVYTL

SEQ ID NO: 20407 - protein, 364 aa, Aminobacter ciceronei
MATYHLKIVGKRDEGNDAASLWLEVPQDLRGAFSYRPGQFLTVERDGDGGRIARQYSLSSTPEAHRDLRITVKKIDGGAVSPWLVQDVGEGQALEVQPPRGRFFRGFDEPRHVLMLACGSGIAPILSIARHLLAQDAGHRVTIIYGNRTPDAVILGDEVGALAESHPTACHVEQVMSRAGESWHGARGRIDKTFIETRWKDWQAASHGLSTSIFLCGPQEFMDDAERAFVDLGLALADIHRESFDLVLNDDDGEPGLTLVGVNDPGESGPCERIVAVVGGEEYETVPEEGESILAALIRAEADVPFSCQEGTCASCISKLTEGSASVRPGVLQTLRQDDLDEGLTLACLSRPTTRSVRIDFDEI

SEQ ID NO: 20408 - protein, 714 aa, Arabidopsis thaliana
MMSIPMELMSIRNPNSTLLYRAHSRPPVKLCAPPRSLLPSRRHFSAPRAVVSYPGIRFGFTSPEVLLNRSVVAFAASHEDSGESGVEVGKEKSDIDVEDDTSKEAWKQTLESFKEQVSKMQSVSSEAYSVNSQKAMTVLKETSEQLRIQAEKAKEELGTKAKVVSEEGREYILKAAEESPSDVKEIVEAFASTEDLKNVSRANDFHVGIPYGLLLLVGGFINFMVSGSIPAIRFGVILGGALFALSLASLKSHRKGESSTKFLKGQMAIVAIIFLRELRLLLSQKSTFLGFFTTLTSGGVLGFYLYKMVVKREKGPTLEDGGEDESSDGFLGIVGTMESDLIDLFEGAKKAADAAALDGVTSSGPEVSQCIDALKQLKKFPVTYDTLVATQVGKKLRSLAKHPVEDIKSVATDLLEIWKKVVIEETAKAKKTEGTNGCKEAKVNKMDVEKPSNPAPVKVQKLQRGDSAKSIKVERKEPDNKVVTGVKIERKVPDIKVTNGTKIDYRGQAVKDEKVSKDNQSSMKAPAKAANAPPKLTAMLKCNDPVRDKIRELLVEALCRVAGEADDYERESVNASDPLRVAVSVESLMFEKLGRSTGAQKLKYRSIMFNLRDSNNPDLRRRVLTGEISPEKLITLSAEDMASDKRKQENNQIKEKALFDCERGLAAKASTDQFKCGRCGQRKCTYYQMQTRSADEPMTTYVTCVNCDNHWKFC

SEQ ID NO: 20409 - protein, 151 aa, Methanosarcina acetivorans C2A
MARINYSINGDPETTSKAMGSELHISPKKSREVCCKIKGMKASEARKFLEDVIAMKQAVPFKKHHDGSGHRKGPMAAGKYPISASKEILKVLKNAESNAEYKGLEPANMYIIHAAIQRGRVIHGFMPRARGRATPKDTETVNIEMILSEVR

SEQ ID NO: 20410 - protein, 460 aa, Euglena gracilis
MAVGSSMSATTQMHVQPAVRATTRVQPTLAMRGQISRLAANSQVYAEAPAAYEFQAPAQASGVSSGIAAMVMAPVAAAAAFFAYKKGQSDAQTYEVADPAGVQTYGTELVFAMNATIGNKYPGNSNTKAAISGFGRIGRNVLRCWYGRNPKPFDIVAINAGSMSPEQAAHLLKYDSVLGTFEADVQYGDDWISVDGKKLKLLTTRDPAQAPWKELGVEIVIEGTGAFNSLDGSSKHLTAGAKKVVITAPGKNCPTYVCGVNEDQYNPATDHVISNASCTTNGMAGVCKVLDENFTVQYGTMTTTHSYTGDQMILDGRHSDLRRARAGAVNIVPTSTGAAKAVALVLPNLKGKLNGIALRVPTPNVSIVDLVVKVDKKTTKEEVNAALKKAADGPLNGVLGYTELPLVSSDFKGTNVSATVDGQLSMVMGEDMVKVVMWYDNEWGYSQRVVDLTAVVAGKL

SEQ ID NO: 20411 - protein, 354 aa, Arabidopsis thaliana
MKISALGRGGSSPLSACFHPSATAINDDLPSALPSPSNPSYISTSGDATTTCQYHTNVGVFFLSWSRSFLRRSLHLHFYSCNSTNCYLHSLDCYRHSIPFAFRLEIKPLTFWRKNGSKKLSRKPDIRVVWDLTHAKFGSGPDPESGFYVAVFVSGEVGLLVGGGNLKQRPRRQILVSKKENLFGNRVYSTKIMIQGKLREISIDVKVVNDDASLRFSVDDKSVLKISQLQWKFRGNTKIVIDGVTIQISWDVFNWLFGGKDKVKPDKIPAVFLLRFENQEVEGNDVLMMNKRVRDDVILRKENCRTPSFWASTYSHWSSSRMSSVMEWSSCREEDERSFGSKSWFSLIIYAWRK

SEQ ID NO: 20412 - protein, 530 aa, Lactobacillus sakei subsp. sakei 23K
MLEKNKMSLFSLVMLGLSSIIGSGWLFGAWEATTVAGPAAIISWVVGAIVIGAIAFNYVELGTMFPESGGMSHYAQYSHGSLLGFIASWSNWVSLVTIIPIEAVAAVQYMSSWPWSWANWTNRFMHHNEISTRGLLVVFAFIIVFTLLNFWSVKFLTRFTSFIAIFKLAIPLLTIIMLVSTGFHAENFGHSVATFMPYGSAKIFAATSISGIIFSYNAFQTVINVGSEIRDSKRNIGRGIAISLGISIVIYLLLQITFIGAVSPALIAKTGWHGLNFQSPFADLAILLGIHWLAVLLYLDAFISPFGTGVSFVASCARTLAALKQNKHMPPIVGKMNHQYNIPRVAMAINAVVSMLLVSVFRSWGTLASVISTATLIAYLTGPVTVMSLRKMAPDMNRPVHSPWMKVMAPLSFVLASLATYWAMWPTTIKVIGVIMLGLPFYFYYEYRIHWENTWAQFKGSLWLIIYLALLSLISFLGSREFNGINVIPYPLDFVLISALALIFYYWGIISRFYSKYFSRAKRINKDVQL

SEQ ID NO: 20413 - protein, 242 aa, Arabidopsis thaliana
MVSMTTSSSSYGTFSTVFNSSRPNSSATFLVPSLKFSTGISNFANLSNGFSLKSPINPGFLFKSRPFTVQARAAAEKTVHDFTVKDIDGKDVALNKFKGKVMLIVNVASRCGLTSSNYSELSHLYEKYKTQGFEILAFPCNQFGFQEPGSNSEIKQFACTRFKAEFPIFDKVDVNGPSTAPIYEFLKSNAGGFLGGLIKWNFEKFLIDKKGKVVERYPPTTSPFQIEKDIQKLLAELKNFCS

SEQ ID NO: 20414 - protein, 419 aa, Galdieria sulphuraria
MTVAFVGSTNFSANLFGSKNKHGLQSKSFLGVSVSSEHPISRVQFTPAGGKSRIVCLAWGVKGGVEKFADSLIETARSIASPGKGILAVDESTKTIGKRLASIGVENTEENRQAYRELLFTCEGLGQYISGAILFEETLYQNARNGKSFVDCLRGVGVIPGIKVDKGLSPLPGGEAIETWCTGLDGLSERAAAYYKQGARFAKWRAVLQISPETPTELCVQENARGLARYAKTVQEQGLVPIIEPEILMDGDHDIERTAQVQEHVLATVYKECDSNGVLLEGSLLKPNMTVPGADCKRQVSAEDIARYTIRTMERRVPSAVPGIMFLSGGMSEEEASVYLNVMNKIQRRGPWSLSFSYGRALQQSCLKSWKGKQENVKAAQEALLARARANSKANLGKYVPGSEPTLDKTGTFEKAYVY

SEQ ID NO: 20415 - protein, 402 aa, Acinetobacter sp. ADP1
MATEIKAPVFPESVADGTIATWHKKVGEAVSRDEVICDIETDKVVLEVVAPADGQLVSIIKDEGETVLSDEVIAQFQEGAVSGANETQAVQSDSKVEQAAAKTEAGAAPVVERAQPVSDQAPAVRKALTESGISASDVQGTGRGGRITKEDVVNHQSKPAAQPLSVAVGERIEKRVPMTRLRKRVAERLLAATQETAMLTTFNEVNMKPIMEMRAQYKDAFEKRHGARLGFMSFFVKAATEALKRYPAVNASIDGDDIVYHGFYDIGVAVSSDRGLVVPVLRDTDRMNYAEVENGIRDYAVKARDGKLGIEDMTGGTFTITNGGTFGSLLSTPILNTPQTAILGMHKIQERPMAVNGQVEILPMMYLALSYDHRLIDGKEAVGFLVTIKELLEEPAKLILDL

SEQ ID NO: 20416 - protein, 362 aa, Perilla frutescens
MVTSAMGPSPRVEELARSGLDTIPKDYVRPEEELKSIIGNILAEEKSSEGPQLPTIDLEEMDSRDEEGRKKCHEELKKAATDWGVMHLINHGIPEELIDRVKAAGKEFFELPVEEKEAYANDQAAGNVQGYGSKLANNASGQLEWEDYFFHCVYPEHKTDLSIWPTKPPDYIPATSEYAKQLRALATKILSVLSIGLGLEKGRLEKEVGGAEDLIVQMKINFYPKCPQPELALGWEAHTDVSALTFILHNMVPGLQLFYEDKWVTAKCVPNSIIMHIGDTLEILSNGKYKSILHRGLVNKEKVRISWAVFCEPPKEKIVLQPLPETVSEVEPPRFPPRTFAQHLKHKLFRKTDGDLDEKPTY

SEQ ID NO: 20417 - protein, 120 aa, Streptomyces noursei ATCC 11455
MTMSGTTAPHGAAEISEITDDTFAAEVLTAELPVLVEFTADWCPPCRQLAPVLAAIADEERGRLKVVQLDVDRNPRTMIAYGVRSAPTLIVFRDGEPVRSMVGARSKRRLLQELAPVLEA

SEQ ID NO: 20418 - protein, 118 aa, Glycine max
MAGLMKLACLVLACMIVAGPITSNAALSCGTVSGYVAPCIGYLAQNAPALPRACCSGVTSLNNMARTTPDRQQACRCLVGAANAFPTLNAARAAGLPKACGVNIPYKISKTTNCNSVK

SEQ ID NO: 20419 - protein, 198 aa, Pyrococcus horikoshii OT3
MNGAELIIQEINKEAERKIEYILNEARQQAEKIKEEARRNAEAKAEWIIRRAKTQAELEKQRIIANARLEVRRKRLAIQEEIISSVLEEVKRRLETMSEDEYFESVKALLKEAIKELNEKKVRVMSNEKTLGLIASRIEEIKSELGDVSIELGETVDTMGGVIVETEDGRIRIDNTFEARMERFEGEIRSTIAKVLFG

SEQ ID NO: 20420 - protein, 112 aa, Symbiobacterium thermophilum IAM 14863
MAGDKVVTLSASNWAAEVEQSSLPVLVDFWAVWCGPCRMIAPVVEEIAADYEGRMKVGKLNVDENNDLAARYGVMSIPTLILFKNGEPVERIVGFQPKKELAAKIDRALAQA

SEQ ID NO: 20421 - protein, 371 aa, Ralstonia eutropha JMP134
MTFSPEPAYQHGQAPRTAILLVNLGTPDAPTPKAVGRYLKEFLSDPRVVEIPRLAWLPLLYGVILPLRARASALKYESIWLREAHMTGSPLLVYSERQAHALQRLLNQQGYELTVACAMRYGNPSIASVLEALRRQGTEQVLVLPMYPQYSGTTTATAFDEVFRVLGQWRNQPEIRLVKHFHDHPAYIAALHQQVGAYWAQHGTPDFARGDKLILSFHGVPRRTLELGDPYHCECLKTGRLLGDALGLQPGQYQVTFQSRFGKAEWLQPYTAPTLAELGKVGAGRVDVFCPGFPADCIETLEEIAMEGQTEFMVAGGKTFHFIPCMNDAQPWISALAEIALQHVQGWPLNMPHAHELEARRSRAQTRGAAA

SEQ ID NO: 20422 - protein, 293 aa, Burkholderia pseudomallei K96243
MSILINKDTKVITQGITGKTGQFHTRACREYANGREAFVAGVNPKKAGEDFEGIPIYASVKEAKAETGATVSVIYVPPAGAAAAIWEAVEADLDLAICITEGIPVRDMIEVKDRMRREGRKTLLLGPNCPGTITPDELKIGIMPGHIHRKGRIGVVSRSGTLTYEAVAQLTALGLGQSSAVGIGGDPINGLKHIDVMKMFNDDPDTDAVVMIGEIGGPDEANAAQWIKDNMKKPVVGFIAGVTAPPGKRMGHAGALISGGADTAEAKLEIMEACGITVTRNPSEMGRLLKAAL

SEQ ID NO: 20423 - protein, 432 aa, Desulfitobacterium hafniense DCB-2
MSADKYEVIIIGAGLAGLSAAYKLAKAGMEVVVVERGDYPGSKNLSGGVLYSRILDQLIPDFWEEAPIERYITNYLTTLMTPTDYVNIEYKDQELAKPPYNAVTVLRAKFDRWLAEKAEEAGAMIVTGVKVDKVLKEGGRITGITTGDEEMLADVVIAADGINSFIAQEAGLRGEIEPAHLAVGAKALIELPQQAIEERFRLEGNEGTAYAMLGDATHGVAGGGFFYTNRESLSIGVVMRLDDLVKEKVKPFEVLDDLLRHPLVAPLVKDGTMTEYGAHLTAEGGVHMVPSQLHTDGMLIVGDAAGFTINSGLVIRGMDLAIGSGMAAAEAVLEAKERGDYSAAALSSYQRKLDEGFIMKDLKLYAKAVDFMETDRLYKNYAPLANHLFGRIYNHDLSPKEHLWKSVLGSVQESGISWLDLARDGIKGVRAL

SEQ ID NO: 20424 - protein, 698 aa, Rhodopseudomonas palustris CGA009
MASKAKTVQVQDKDKDDKVDAPEKDSVDAPSPLLDLSDAAVKKMIKQAKKRGFVTFDQLNEVLPSDTTSPEQIEDIMSMLSDMGINVSEAEDTEAEEEEAKEEADEELDNDLVEVTAKAVTETKKSEPGERTDDPVRMYLREMGTVELLSREGEIAIAKRIEAGREAMIAGLCESPLTFQAIIIWRDELNEGKIFLRDIIDLEATYAGPEGKNNIGEPGEEAAAEGEGGAPAHVAPPAAPPSATPFRPAQQRGAAPAEAEGEGAPEGDGDDDEFENQMSLAAIEAELKPKVVETFDKIADNYKKLRKLQEQDIANQLQNEQLSPSQERKYKKLKDEIIVEVKSLRLNQARIDSLVEQLYDINKKLVSFESRLMRLADSHGVARDDFLRNYQGSELDPRWLNRVSKLSAKGWKNFVHHEKDRIKDLRQEVQSMAALTGLEIGEFRKIVHSVQKGEREARQAKKEMVEANLRLVISIAKKYTNRGLQFLDLIQEGNIGLMKAVDKFEYRRGYKFSTYATWWIRQAITRSIADQARTIRIPVHMIETINKIVRTSRQMLNEIGREPTPEELAEKLGMPLEKVRKVLKIAKEPLSLETPVGDEEDSHLGDFIEDKNAVLPIDAAIQSNLRETTTRVLASLTPREERVLRMRFGIGMNTDHTLEEVGQQFSVTRERIRQIEAKALRKLKHPSRSRKLRSFLDN

SEQ ID NO: 20425 - protein, 439 aa, Streptococcus pneumoniae TIGR4
MGDKKYTVEKANRFIAENKHLVNTQYKPEEHFSAEIGWINDPNGFVYFRGEYHLFYQFYPYDSVWGPMHWGHAKSKDLVTWEHLPVALAPDQDYDRNGCFSGSAIVKDDRLWLMYTGHIEEETGVRQVQNMVFSDDGIHFEKISQNPVATGSDLPDELIAADFRDPKLFEKDGRYYSVVAAKHKDNVGCIVLLGSDNLVEWQFESIFLKGGEHQGFMWECPDYFELDGKDCLIMSPMRYQREGDSYHNINSSLLFTGKVDWREKRFIPESVQEIDHGQDFYAPQTLLDDQNRRILIAWMQTWGRTLPTHDQEHKWACAMTLPRILRLEDGKLRQFPVKKGQYQIQIDKDCHYHLGNDIDYLEFGYDSNAQQVYIDRSHLIQKILGEEEQDTSRRYVDIEAKELEVVLDKNSIEIFVNQGEASLTATYYLTVPAELSRID

SEQ ID NO: 20426 - protein, 490 aa, Vibrio vulnificus YJ016
MDFLIIQTDLSKLLCPFPHQNKHRMLDYQRLIFFGSRGRNAVSALNVAKFGGTSVANFEAMSRCSAIIENNPETRLVVSSACSGVTNLLVELANGVQSQERRAELLAQLAEIHDAILNQLEDATEAAAEVYAILDTITSLAEAASIQASNKLTDHLVACGELMSTHILAQLMRERGVNAVRFDIREVLRTDDNFGRAEPDVAKIAELAQEKLLPLCRDYVVVTQGFIGSDEEGNTTTLGRGGSDYSAALIAEGVKASGLEIWTDVPGIYTTDPRIAAKAAPIPEISFAEASEMANFGAKILHPSTLVPALRHDIPVFVGSSKEPEKGGTWIRHEAQSSPLFRALALRCNQTMVTLRSAKMFHAYGFLAKVFEILAKHKISVDLITTSEISVSLTLDKTDTSGGAPEVPQAAREELEELCTVEVEHNLCLVALIGNHMETKGYAKEVFSTLGDFNLRMICYGASDHNLCFLVDAHDSKSVIQKLHQDLFER

SEQ ID NO: 20427 - protein, 148 aa, Alkaliphilus metalliredigenes QYMF
MDLTMKICYNDIRIKKERGYFMKYKMLHTCIRVMDLEKSLRFYEDALGLVEKRRKDFPEHEFTLVFLSDEAGHYDLELTYNYNQDQSYEIGNGFSHIAVSVDDLEASQERHRKMGYKVTKLTGLPGSPPRYYFVTDPDGYDVEVIRAD

SEQ ID NO: 20428 - protein, 572 aa, delta proteobacterium MLMS-1
MSRKIVIIGGVAAGPKTASRVKRLLPEADVTIIDQDNLISYGGCGIPYYIGGDVSDEKELRNTSFHLTRNEDFFLKAKGVTVRTKTRALAIDRPNQKVRVQALDGGAREEIPYDQLVIATGSQPNRLPLPGVELDGVFTISDLHQAIEIKERIARGKVSRAVIIGGGAIGIEMAEAFVDLWGLEADLLEFMPQLLPRLVDWEFARMLENHLRQQGVNIYTNEAARAIEGEAGKVSRVVTPQRTLAAELVIMAVGVRARGELAAEAGLPVDGQGNILVNDRLQTADPNIYAAGDCIAVKNRLTGKSGIAPMGSLANREGRIVADNLAGIPTRYQGWVGSFTLKAFECCIAATGLSLESARAEGFDAAAVTTAQSDRAHFFPTQTVIPLRLVFDRSNRQLLGVQGFGPMGDAVLARIDAAAALLQQGGTIDDVSQLEMAYAPPFATALDALNATGNVADNLAAGRLRCVETADFLAWMEDFASRPDLVALDIRHPNEASLLADKFGRDQWLTIPYVDIRERHRELPTDRTMIIICDAGTRSSEIQIFLDSVGLANNLVLGGGFNLIRRMGVAWM

SEQ ID NO: 20429 - protein, 107 aa, Mesorhizobium loti MAFF303099
MGATVKVDKNNFQADVLNANVPVVVDFWAEWCGPCKQIAPSLEDIATELGAKIKIAKLNIDENPELAAQFGVRSIPTLMIFKGGEVADMKVGAAPKTALSHWINGSL

SEQ ID NO: 20430 - protein, 725 aa, Burkholderia thailandensis E264
MREHAGDARLPSGELLADHATGTSTIMQRLNVDPPATQAAALFALAPYLSDPEKQIAERFGDEVAHLVTDVRKLLRLGTVSLRAAQSVPVDAGRDAQAERRAQIEALRKMLLAFAQDIRVVLIRLASRLQSLRHYAAAKIEPPPDVARETLEIYAPLANRLGIWQLKWELEDLAFRFEDPVTYKRIAKLLDEKRVEREAYVADAIAQLQRELAAAHIQAEVSGRPKHIYSIWRKMRGKELDFSELYDVRAFRVIVPDIKDCYTVLGIVHHLWQPVPKEFDDYISRPKPNGYKSLHTVVIGDDGRAFEVQIRTHEMHRFAEYGVAAHWRYKEAGARGYGGQFSASEKYDEKIAWLRQLLAWKDEIADSGGADASGHEAWAQLRETTLDDDHIYVLTPQARVIALPQGATPVDFAYHLHSELGHRCRGARVDGAMVPLNTPLANGQTVEIVAVKEGGPSRDWLNPQLGYLSSSRARQKVRAWFNAVDQQENVAHGRALVEKTLQREGKTSVNLEHLAAKLGFKSPDELFSVVGKEEFSLRNVEQALSDAPAPEPEPEAPAHFEKRASGANVAHGASTGVLVVGVDALLTQLARCCRPAPPDPISGFVTRGKGMSIHRSDCATFRRMAERAPERVLQTTWSADVLGGRGASVYPVDLMIEASDRQGLLRDISEVFAREKMNVIGVKTQSRRNAAFMQFTVEVSSASQVQRACTLLGEVQGVVRAARKA

SEQ ID NO: 20431 - protein, 578 aa, Burkholderia thailandensis E264
MKASRFFIGTLKEAPADAEIVSHKLMVRAGMIRRVAGGIYNYLPVGLRSIRKVEAIVREEMNRAGAIELLMPAVQPAELWQESGRWEQYGPELLRFKDRKQNEFVIGPTHEEVVTDIARNQIKSYRQMPVNFYQIQTKFRDEIRPRFGVMRGREFIMKDAYSFDKDHESLKESYKKMYDAYVRIFTRIGLEFRPVAADNGSIGGSGSHEFHVIADTGEDAIAYCPTSDFAANVEAAEALPLLASRAAPAEAMQKVATPGKAKCEAVAELMGIPLERTIKSIVLATDNEGAEPTVWLLMLRGDHDLNEIKTAKLPGLAGYRFATEAEIVEWFGTPPGYLGPIGTKKPVRVVADRTVANMSDFVVGANEVDYHIAGVNWGRDLPEPVIADIRNVKAGDPSPDGKGVLDICRGIEVGHVFQLGTKYSDAMGATFIDESGKAQPMVMGCYGIGVTRILGAAIEQNFDDKGIIWPEAIAPFEVVLCPMGYDRSDAVREAADKLYADLAAAGIDVILDDRGERPGVMFADWELIGVPHRLVIGERGLKDGKIEYQGRRDAEATLLPADSAATAVAEKVRAALAR

SEQ ID NO: 20432 - protein, 125 aa, Triticum aestivum
MGIQASRALAALLLAALAAATLRGASAVVQCGQVTQLMAPCMPYLSGAPGMTPYGICCNSLGVLNQLAASTADRVAACNCVKAAASGGFPAVDFSRAAALPAACGLAINFAVTPNMDCNQVTDEP

SEQ ID NO: 20433 - protein, 341 aa, Hanseniaspora osmophila
SCVFPSIVGRPRHQGIVVGMGQKDSYVGDEAQSKRGILTLRYPIEHGIVTNWDDMEKIWHHTFYNELRVAPEEHPVLLTEAPMNPKSNREKMTQIMFETFNVPAFYVSIQAVLSLYSSGRTTGIVLDSGDGVTHIVPIYAGFSLPHGISRIDLAGRDLTDYLMKILSERGYSFTTTAEREIVRDIKEKLCYVALDFDQEMQTAAQSASIEKSYELPDGQVITIGNERFRAPEALFNPSLVGLESSGIDQTTYNSIIKCDVDVRKELYGNIVMSGGTTMFPGIAERMQKEITSLAPSSMKVKIIAPPERKYSVWIGGSILASLTTFQQMWISKQEYDESGPS

SEQ ID NO: 20434 - protein, 306 aa, Aspergillus nidulans FGSC A4
MNSKQYLSYGSADNTHPTDIFALAVTEKQILSASGSNALQVHSTTNPDFPLVQTLEAHKAGCHHVVTDAKGSRAVSVGFGGEVVIWESHEGTWSKTKDVVLADIWAVALSADGQYLAGTTQDGHVKVWDMNANEEEIRDHETKGSFGTCIDLSPDGRFIASGHENGSVYIFSTETGRMPFSLSGLVKPVRSVAFSPGGKFLAAAGDSRVIVLYDTTSGEQVASLTGHAAWILSLSWSNTGEYLLSGSFDGKVKVWSIDTRNCVATHSETERAIWSVIWLPKIGKSEGFATAGANRSISFYREATGG

SEQ ID NO: 20435 - protein, 530 aa, Xanthomonas campestris
MLDANLKTQLTAYLERVTRPIQINASIDDSAGSREMLDLLEELVLLSDKISLDIHRDDNQRKPSFALTTPGQDISLRFAGLPMGHEFTSLVLALLQVGGHPSKAAAELIEQVQHLEGDYQFETYFSLSCQNCPDVVQALNLAAVLNPRIKHVAIDGAWFQDEVQARQIMSVPTVYLNGELFDQGRMTLEQIVAKLDTNAAKRDAAKIAAKEAFDVLVVGGGPAGSAAAVYAARKGIRTGVAAERFGGQVLDTMSIENFISVPETEGPKMAAALEQHVRQYDVDIMNLQRAEQLIPAGADGLIEIKLANGASLKSKTVILSTGARWRQMNVPGEDQYKNKGVAYCPHCDGPLFKGKRVAVIGGGNSGVEAAIDLAGIVAHVTLVEFDDKLRADEVLQRKLRSLHNVRIITSAQTTEVLGDGQKVTGLVYKDRTGGDIQHIELEGVFVQIGLLPNTEFLRGTVALSPRGEIIVDDRGQTDVPGVFAAGDATTVPYKQIVIAMGEGSKAALSAFDHLIRTSAPATADSVAQAA

SEQ ID NO: 20436 - protein, 150 aa, Brassica napus
MSSTANTGNTGDPYASDQDGSQGVCSLYFPQCCYIIFPPPPFPSSPDFFDDSSDSSFSPSSISPTGLLARTFILASSYTLVSKYCLPSKYCRRSTAATISSSAVVTDTWQRSNGASNPIGLDETEILTKSVYKYRKGDGFVESSDCSVCL

SEQ ID NO: 20437 - protein, 88 aa, Zea mays
VDKSLCEHFAYTRQELYALVRVEGILTFDELLAKHGRGHTGCDVCKPAVGSILASCWNQPIMDASLVPLQDTNDTFMANMQKNGTYSV

SEQ ID NO: 20438 - protein, 381 aa, Burkholderia mallei ATCC 23344
MMRDAANFEPADSRVTRPAFWQALPERWTSDVEETLVCCHVRQETHDVKSFFFRSPQGRAFSFEPGQFVTLELDIDGETINRCYTISSSPARPHTISITVKRVPGGKVSNWLHDNLQPGAPLRVLGPAGEFTCARHPARKYLFLSAGSGITPLMSMSRAHHDLAEDRDIVFVHSARTPDNIIFARELDLIASTHANFRTAFVCERLGARTNWHGVTGFLSLPLLKLVAPDFMEREIFTCGPAPYMKAVRELLAEAGFDRSRYHEESFSFETLAQGEAPADAPAGEDAAARGAQVRQYTIAFAKSHREIACGADQHVFDAARRAGVRLPASCTQGMCGTCKVKLVSGQVDMKHNGGIRQREIDQGMVLLCCSKPLSDLVVDK

SEQ ID NO: 20439 - protein, 363 aa, Corynebacterium glutamicum ATCC 13032
MALADTRFATRRRALAAKLAAQRIDSILVTSPIHVRYLSGFTGSNGALIVNKDLSAQICTDGRYTTQIAEEVPDIEALIERASATTLLAQVEGPRRIAIEAAQTTLDQLDSLREATQEDVELIPVSGVVESIRLTKDSFELDRLRDVAALASQAFEDLLAAGELAEGRSERQVAADLEYRMRLLGAERPSFDTIVASGPNSAKPHHGAGDRILQRGDLVTIDFGAHARGFNSDMTRTLVMGEAGEFEAEIYDIVLRSQLAGVEAAYSGANLFDIDAACRKIIEDAGYGEYFVHSTGHGIGLEVHEAPSASKTSQGVLETGSTLTIEPGIYVPGKGGVRIEDTLIITSGAPEIITKVSKDLIVV

SEQ ID NO: 20440 - protein, 312 aa, Cytophaga hutchinsonii
MNKTVRIGTRGSKLALWQAEHVAACLQTKGLEPQIVIIDTTGDKILDQSLSKIGSKGLFTEELEEQLHAGTIDIAVHSAKDLQTHLKGGMYILAITERELVNDVLVSHKPIDTLKNNPDLIIGTSSTRRRALLRKFYPQAKMVDMRGNLQTRIRKMEEGACDAMLLAYAGMHRMGYDSLIKEKLSLEEFIPAAGQGTLAIEAASTLDKEKAAVIRAVLNDAATETAVSAERAFLRTLEGGCSIPVFALAVERDTDYLLTGGIVSLDGTKYLRKEIRFTAADAEQRGVELATVLLKDGADEILAEIKKGLSKS

SEQ ID NO: 20441 - protein, 146 aa, Brassica napus
  misc_feature (51)..(51): Xaa can be any naturally occurring amino acid
  misc_feature (56)..(56): Xaa can be any naturally occurring amino acid
  misc_feature (67)..(67): Xaa can be any naturally occurring amino acid
  misc_feature (83)..(83): Xaa can be any naturally occurring amino acid
  misc_feature (104)..(104): Xaa can be any naturally occurring amino acid
  misc_feature (116)..(116): Xaa can be any naturally occurring amino acid
MAYSMLSSAAVVTSPAQATMVAPFTGLKSSSAFPVTRKANNDITSIVSNGXGRVSXALQVWPPIGKXKKFETLSYLPDPYRKXMGVREVDYLLRNKWDFLCVEXFELEQRDFVYRXEHGSTPELLTMGRYWTNGESFPLVRMHCSG

SEQ ID NO: 20442 - protein, 397 aa, Clostridium acetobutylicum ATCC 824
MCGIAGFVNFKKNLIDKKSIIEDMTNTLIKRGPNEKGYYISKNALLGHRRLIVVDPKGGSQPMIKIHNGKKYIIVYNGELYNTEDIRKELLEAGYEFSSYSDTEVLLTSYIHWKEDCVNHINGIFAFAIYSETDKKIFLARDPLGVKPLFYTIKNNNLIFGSEIKTLLANPLVEPILTKEGLTEIFALGPARNLGSGVLKDIHEIPPANFIEFTEHKFKLHEYWRLSCKPHTENASETAEHIKFLLTDAIKRQLYADVPVCTFLSGGLDSSIISAVAASEFKKHGKTLNTYSIDYKDNNLYFKNDNFVITPDSVWAEKMRKFIGSNHHKIINNNLDLASALYDAVKANDIPGMADIDSSLFLFCKGVAEKNVVSLSGERAIQMITNLVKQFINIGEL

SEQ ID NO: 20443 - protein, 488 aa, Legionella pneumophila str. Lens
MEIYEMYIDGKFTLAKSGATRDIIDPANGELIAKVPESAKEDAILAIKAARKAFDEGEWRISLALDRGKLLFKLADLIRANAKMLAELETRNCGKPLPEAEFDVTDAANCFEFYGGLATKIHGETMSVPANSFSYVVREPIGVCGQIIPWNFPLLMAAWKLAPALAAGNTVVLKPSELTPITALELFKLIDQCGFPAGVVNLITGPGIGVGEELASNAMVDKVAFTGGSATGRKIMQAATGNLKKISLELGGKNPNIVFADCDLEMAIDGALFGAFANQGEVCSAGSRLLVERSIHKKIVEGMLKKIPNIKLGHGLDAGVKMGPLVSSAHREKVESYVKLGMEEGAKLLCGGKRPTGSEFAKGHFFEPTIFDEVKSTMRIAREEIFGPVLVVIPFDTEEEAIRIANDTDYGLSGAVWTKNVTRAHRVTSQIRAGILWVNHYHPTYNEMPWGGYKQSGAGRELGLYGIESYLEVKQVNINLDETPIGWY

SEQ ID NO: 20444 - protein, 330 aa, Streptococcus pneumoniae TIGR4
METKTMSFRDTIILAMSEEMRRDENVFLMGEDVGVFGGDFGTSVGMLEEFGPERVRDCPISEAAISGAAAGAAMTGLRPIVDMTFMDFSVIAMDNIVNQAAKTRYMFGGKGQVPMTVRCAAGNGVGSAAQHSQSLESWFTHIPGLKVVAPGTPADMKGLLKSSIRDNNPVIILEYKSEFNQKGEVPVDPDYTIPLGVGEIKRQGTDVTVVTYGKMLRRVVQAAEELAEEGISVEIVDPRTLVPLDKDIIINSVKKTGKVVLVNDAHKTSGYIGEISAIISESEAFDYLDAPIRRCAGEDVPMPYAQNLENAMIPTVESIKDAIRKTYNKE

SEQ ID NO: 20445 - protein, 566 aa, Arabidopsis thaliana
MGSGTNHLKSNTFIKREANMLGKNPWPEKDSGGSSVSRDTGTGKDVQDMTLEDTNTSDHGFNGGHVDVVENFSTGDPMLCDTSAATNDGVYNYSLNSIPDAENDLSFFDNGDKEKNDLFYGWGDIGNFEDVDNMLRSCDSTFGLDSLNNEGDLGWFSSAQPNEETAGAMTDDLKPDKMLENQRTAMLQVEDFLNNSEPNHAVEDEYGYTIEDDSAQGKSSQNVFDTSLQKKDILMLDVEANLEKKQTDHLHHLDGKSDGFSENSFTLQHSGISREIMDTNQYYPPSAFQQRDVPYSHFNCEQPSVQVSACESKSGIKSENKPSPSSASNESYTSNHAQSIESLQGPTVDDRFRKVFETRANLLPGQDMPPSFAANTKKSSKTDSMVFPDAAPIQKIGLENDHRKAATELETSNMQGSSCVSSVVDDISLEATSFRQLQQVIEQLDVRTKLCIRDSLYRLAKSAEQRHHGGNRPEKGAGSHLVTGEADKYAGFMDIETDTNPIDRSIAHLLFHRPSDSSLSSDNNVLSYKSHPMIPQPNSSPSLRIEKQEETTELRPEAEVVTSDNN

SEQ ID NO: 20446 - protein, 533 aa, Burkholderia thailandensis E264
MKSSIQRNIGPFALMLTGLGSIIGSGWLFGAWKAAKIAGPAAICAWIIGAVVILAIALTYAELGAMFPESGGMVRYARYSHGSLVGFISAWANWIAIVSVIPIEAEASIQYMSTWPYAWAHALFVNGELTTPGLLLSAVLVVIYFLLNYWGVKLFARANTTITIFKFLIPGLTIAGLLLSSFHSENLGTAGGSSSFAPYGWSAVLTAVATSGIVFAFNGFQSPVNLAGEARNPSRSVPFAVISSILIALVIYVLLQVAYIGAVNPADVAKGWAHFNFASPFAELAIALNLNWLAILLYVDAFVSPSGTGTTYMATTTRMIYAMERNNTMPKIFGSVHPLYGVPRPAMWFNLIVSFIFLFFFRGWSSLAAVISVATVISYLTGPISLMALRRAATDLERPLSIPGMKLIAPFAFVCASLILYWAKWPLTGEIILLMVVALPVYFYFQGKSGWSGWGRDLKAAWWLVAYLPTMAVLSLIGSKEFGGHGLLPYGWDMLVVAAIALVFYYWGVNTGYRTEYLDERESRDEILEGIGA

SEQ ID NO: 20447 - protein, 312 aa, Shewanella oneidensis MR-1
MMFFEGAEKKLEISLTPKAVSLRQRGLAFWTTLVACANAEILSKISNKDCDAYLLSESSLFVWDNKILILTCGNSTLIEAACYFINSLGSEHIAALCYQRKNEYQAQLQSTTFAEDIAQLRTLISGQAFRVGHLDAHHHYVFCAAGVPITQVGTRLELMMYHIRGELAEYLNDPVQTEQGIVHRLKLTQLFPEFQLDMHCFKPTGFSLNAIQGSHYFTLHITPSAGQGEHSYVSFETNLNLAAYPYPVVAQLISLFAPSSWDLVSVNQLISTAGLSEHLCVGHCSITTEQGNYIDFNHYQQRQTEELFPKFM

SEQ ID NO: 20448 - protein, 502 aa, Pyrococcus horikoshii OT3
MYRQARWDEPLIFELSRPGRVGYTLPKPIEDVKVEIPEKLKRKTPLELPEVSEPEVVKHYTRLSEMNYGVDSGIYPLGSCTMKYNPKINEEIANHPKVAFIHPYQDERTVQGALKIMWELEQWLKEITGMDRFTLQPAAGANGEFTGVMIIKAYHLDRGDTQRTEILVPDSAHGTNPASASMAGFKVVEIPSNENGTVDLEALENAVSERTAGLMLTNPNTLGIFEDEIEEIAKIVHKVGGLLYYDGANLNGILGKVRPGDMGFDIVHLNLHKTFSTPHGGGGPGAGPVGVKEFLKDYLPVPLVSYDEENDRYYLDYNVPKSIGKVKELFGNFAVLVKALTYLKIMGKEGLREVSEVAVLNANYLARKLKGTRGYELPHKELRKHEVVFSAEPMKKETGVRTLDVAKRLLDFGLHAPTIYFPLIVHEALMIEPTESVSKEELDAYVEALKKISEEAYTNPEIVKSAPHNTAVRRVDDVLAAKKPVITWKMYKELKEKGEIDY

SEQ ID NO: 20449 - protein, 361 aa, Myxococcus xanthus
MRLGVLTGGGDCPGLNALIRGLVKRGTHEFGYEFVGIENGYMGLVEPGLAHPLTEEDTRGILPKGGTILGTSNKANPFSYATREDGHWVERDVSDQVLLRCEELGLDGLIAVGGDGTLSIAHRLVEKGLKVVGCPKTIDNDLSGTDQTFGFDTARLIVTEALDRLHSTAEAHDRVMVVEIMGRHAGFLTLESGIAGGADVILIPEIPYSVESVVEKIRRRSTRRRSFSIIAISEGAFPQGGELAVLDTAEAIPGRGVVRLGGSGKALADLLARHIEAEIRVTVLGHLQRGGSPSAADRVLATRYGCKVLDLVSAGQWDHMVALRAGEIIAVPLSESRKERRVDPAGELVRFTKSMGISFGD

SEQ ID NO: 20450 - protein, 449 aa, Pyrococcus horikoshii OT3
MGNHYIPNSAHKEEMLKEIGLSSIEELFADIPEKFIKEELNLPEGKSEYEVFLEMNEILEKNKTVLEMPTFLGAGTYFHYIPAHVKHLIERSEFLTSYTPYQPEISQGMLQALFEYQSLIAELVGLPVVNSSMYDWGTAMAEAALMTVRLHKGKRKKFVVPKHTHPERLQVLRTYTRGPEVEIVTVNWNERGQVDVEDLKEKVKDAAGVYIEIPNFFGLLEEEIREVGEIAHEAGAYFVVGVDPTILGIVEAPGELGADIVVGEASYFGNPMNFGGPRAGIFAVKNDMKLIRQMPGRIIGMTKDAEGKRAFVMTLQTREQHIRRAKATSNICSNEALVAVAAAIHIASLGPKGIRELGEVILKNTAYLKKRLSEVAEIPFDGVNFKDVLVRFDKPYREIHEELLKRNIHGGYYVGSHFPELGEAALFAATETTRKEWVDALISALKEVI

SEQ ID NO: 20451 - protein, 446 aa, Yarrowia lipolytica CLIB122
MCATDNAPAANAAPEKPSNVGVEVGHTGEQTNPYGANPADFLSNVSKFQLIESTLREGEQFASAFFDTETKIEIAKALDDFGVDYIELTSPAASEQSRSDCEAICKLGLKAKILTHIRCHMDDARLAVSTGVDGVDVVIGTSQFLRQYSHGKDMNYIAQSAVEVIEFVKSHGIEIRFSSEDSFRSDLVDLLNIYRTVDKIGVNRVGIADTVGCANPRQVYELVRTLKSVVSCDIECHFHNDTGCAIANAYTALEAGANLIDVSVLGIGERNGITSLGGLMARMIAADRDYVLSKYKLHKLRDLENLVADAVQVNIPFNNPITGFCAFTHKAGIHAKAILANPSTYEILNPADFGLTRYIHFANRLTGWNAIKSRVDQLNLHLTDAQCKDVTAKIKKLGDVRSLNIDDVDSIIREFHADVTSTPTVAATEGPAVEDEPAAKKAKTEE

SEQ ID NO: 20452 - protein, 128 aa, Klebsiella oxytoca
MGTAKHSKLLILGSGPAGYTAAVYAARANLQPVLITGMEKGGQLTTTTEVENWPGDPNDLTGPLLMERMHEHATKFETEIIFDHINSVDLQNRPFRLVGDSGEYTCDAPDYRYRRISALSGSAIGRRV

SEQ ID NO: 20453 - protein, 550 aa, Vibrio vulnificus YJ016
MLKTINPTQTQAWNALTAHFESAQDMDLKDLFAQDAARFDKFSARFGSDILVDYSKNLINEETLKHLFALAKETELSAAIKAMFSGEAINQTEGRAVLHTALRNRSNQPVLVDGEDVMPAVNAVLEKMKSFTDRVIGGEWKGYTGKAITDIVNIGIGGSDLGPYMVTEALAPYKNHLNLHFVSNVDGTHIVETLKKVDPETTLFLIASKTFTTQETMTNAHTARDWFLATAGDQAHVAKHFAALSTNAPAVSEFGIDTDNMFEFWDWVGGRYSLWSAIGLSIALAVGYDNFVELLEGAHEMDNHFVSTELESNIPVILALIGIWYNNFHGAESEAILPYDQYMHRFAAYFQQGNMESNGKYVDRNGNPVTYQTGPIIWGEPGTNGQHAFYQLIHQGTKLIPCDFIAPAVSHNPAGDHHQKLMSNFFAQTEALAFGKNEATVKAELVKAGKNAEEVAAIAPFKVFEGNRPTNSILVKQITPRTLGNLIAMYEHKIFVQGVIWNIFSFDQWGVELGKQLANQILPELADDSEISSHDSSTNGLINAFKAFKA

SEQ ID NO: 20454 - protein, 333 aa, Pichia pastoris
MAITVGINGFGRIGRLVLRVALSRADIKVVAINDPFIAPEYAAYMFKYDSTHKAYKGEVSASGNKINIDGKEITVFQERDPVNIPWGKAGVDYVIESTGVFTTLEGAQKHIDAGAKKVVITAPSKDAPMFVVGVNEEKYTSDLNIVSNASCTTNCLAPLAKVVNDTFGIESGLMTTVHSMTATQKTVDGPSHKDWRGGRTASGNIIPSSTGAAKAVGKVIPELNGKLTGLAFRVPTVDVSVVDLTVNLKKETTYEEIKSVIKAASEGKLKGVLGYTEDAVVSSDFLGDERSSIFDASAGIQLTPSFVKLISWYDNEYGYSTRVVDLLQHVAKA

SEQ ID NO: 20455 - protein, 477 aa, Deinococcus radiodurans R1
MTATPQASARPERPFATVNPYTGETVKTFPFLESAEIPALIERADQAYREWGQRPVTERAAIMRRAAELMLERTDELASLITLEMGKLLREAKGEVALAASILNYYGEQGPSFLEPKTIPVPQGEAAVLHAPLGVLLGIEPWNYPLYQVVRFAAPNLVVGNTVLLKHSELCPQSALALEQLFHDAGVPQGAYTNLFLRIADIEQVIAHPAVQGVSLTGSERAGASVAELAGRHLKKCVLELGGSDPFIVLDAEDLDTTVKAAATGRLSNTGQACIAAKRLMVVDDLYDEFVSRLGQTFSAFVPGDPADPSTRLGPLSSEQAARDLQAQVQDAIDKGATVVAGGQRPEHPGAFVQPTVLTDVTPDMRAYHEELFGPVAVVYRVRDEDEAVALANASTYGLGGAVFSSDLDRAQRVAERLDTGMVWINHPTSSAADLPFGGVKRSGFGRELSSMGMLEFTNQKLVRAFPTKQKPAQVAG

SEQ ID NO: 20456 - protein, 415 aa, Burkholderia mallei ATCC 23344
MTEHAGADATAMPRTVVVIGGGQAAGWVVKTLRDEGFAGRIVMIADEAHLPYERPALSKAVLAGEADIATVRVMQPDAFGALDVDAWQPERAASIDRARRVVRTASGREIEYDRLVIATGGTPRRLPDAIVGTAHLHYLRTLDEALALGEKLRASRRVLVIGGGWIGLEVAATARKLGVDALVVEGAPRLCARSVPGAVSDFLLDLHRANGVDVRLNASLASLDAHPDDARRVRATLAGGGVVDADFAVAGIGLALNTSLATEAGLHVDDGIVVDEYGATSDPAIFACGDVANHPNAWLKRRVRLESWANAQHQAIAAAKAVLGVRAPYAEIPWFWSDQYDVNLQILGDLPADARCIVRGELAAKRATLFFVADGALRGVIAINAARELKLARKWMNQGRAIDVAALADTAKALA

SEQ ID NO: 20457 - protein, 488 aa, Legionella pneumophila subsp. pneumophila str. Philadelphia 1
MEIYKMYIDGKFTLAKSGATRDIFDPANGDLIAKVPESAKEDAILAIKAARKAFDEGEWRKSLALDRGKLLFKLADLIRANAKMLAELETRNCGKPLLEAEFDVTDAANCFEFYGGLATKIHGETMSVPANSFSYVVREPIGVCGQIIPWNFPLLMAAWKLAPALAAGNTVVLKPSELTPITALELFKLIDECGFPAGVVNLITGPGIGVGEELASNAMVDKVAFTGGSATGRKIMQAATGNLKKISLELGGKNPNIVFADSDLEMAIDGALFGAFANQGEVCSAGSRLLVERSIHKKIVEGMLKKIPNIKLGHGLDAGVKMGPLVSSAHREKVESYVKLGMEEGAKLLCGGKRPTGNEFAKGHFFEPTIFDEVKSTMRIAREEIFGPVLVVIPFDTEEEAIRIANDTDYGLSGAVWTKSVTRAHRVTSQIRAGILWVNHYHPTYNEMPWGGYKQSGAGRELGLYGIESYLEVKQVNINLDETPIGWY

SEQ ID NO: 20458 - protein, 335 aa, Haloarcula vallismortis
MMSEPVRVGLNGFGRIGRNVFRASLHSDDVEIVGINDVMDDSEIDYFAQYDSVMGELEGASVDDGVLTVDGTDFEAGIFHETDPTQLPWDDLDVDVAFEATGIFRTKEDASQHLDAGADKVLISAPPKGDEPVKQLVYGVNHDEYDGEDVVSNASCTTNSITPVAKVLDEEFGINAGQLTTVHAYTGSQNLMDGPNGKPRRRRAAAENIIPTSTGAAQAATEVLPELEGKLDGMAIRVPVPNGSITEFVVDLDDDVTESDVNAAFEDAAAGELEGVLGVTSDDVVSSDILGDPYSTQVDLQSTNVVSGMTKILTWYDNEYGFSNRMLDVAEYITE

SEQ ID NO: 20459 - protein, 342 aa, Bacillus cereus ATCC 14579
MTRVAINGFGRIGRMVFRQAIKESAFEIVAINASYPSETLAHLIKYDTVHGKFDGTVEAFEDHLLVDGKMIRLLNNRDPKELPWTDLGVEVVIEATGKFNSKEKAILHVEAGAKKVILTAPGKNEDVTIVVGVNEDQLDITKHTVISNASCTTNCLAPVVKVLDEQFGIENGLMTTVHAYTNDQKNIDNPHKDLRRARACGQSIIPTTTGAVKALAKVLPHLNGKLHGMALRVPTPNVSLVDLVVDVKRDVTVEAINDAFKTVANGALKGIVEFSEEPLVSIDFNTNTHSAIIDGLSTMVMGDRKVKVLAWYDNEWGYSRRVVDLVTLVVEELAKQENVQHI

SEQ ID NO: 20460 - protein, 458 aa, Nocardia farcinica IFM 10152
MEAGRKIARMAVLDEKLHEVYEEILRRNPGEIEFHQAAFEVLESLGPVVAKHPEYTDGAVLRRLCEPERQIIFRVPWVDDQGRVQINRGFRVEFNSALGPYKGGLRFHPSVYLGIVKFLGFEQIFKNSLTGMPIGGGKGGSDFDPKGRSDGEVMRFCQSFMTELYRHIGEYTDVPAGDIGVGGREIGYLFGQYKRITNRYESGVLTGKGLTWGGSQVRPEATGYGTVFFVDEILRSRGDSFEGKKVVVSGSGNVAVFAIEKVEQLGGTVVACSDSGGYVVDDKGIDLDLLKDLKQVRRGRMCDYVEERGGTARYVENQSVWDVPCDIALPCATQNELDGEAAATLIRNGVRIVAEGANMPCTPEAARAFTEAGVTFAPGKAVNAGGVATSALEMQQNASRDSWSFEHTEERLAEIMRGIHDRCLETADEYGSPGSYTAGANIAGFTRVADAMLALGII

SEQ ID NO: 20461 - protein, 119 aa, Vitis berlandieri x Vitis vinifera
MGSSGAVKLACVMVICMVVAAPAAVEAAITCGQVSSALSSCLGYLKNGGAVPPGCCSGIKNLNSAAQTTADRQAACKCLKTFSNSIPGINLGLASGLPGKCGVSVPYKISPSTDCSKVT

SEQ ID NO: 20462 - protein, 388 aa, Arabidopsis thaliana
MTIMSDLPRDLLAEILSRVPLTSLRAVRLTCKKWNDLSKDRSFLKKQIVETKKKQLESKEIEVIMMRNFRVYLTSIDIHNNVDPSFTPKGTLISLSDDANHHQVDNVSRVFHCDGLLLCITKDLHYRLVVWNPYFGQTRWIQPRNSYHRKDNYALGYDEKKNHKILRLKDNYYAPRERICEFELYSFESNSWKVVLDVSPDWYIPSYNRGLSLKGNTYWYATEKHVNVDFLICFDFTTEKFGPRLPLPFNATESPTYEDVVTLSSVGEEQLAVLFQSEYTLMMEIWVTSKVESTEVLWNKLFLEVDLIAISSHFQFLAEAGSFFIDQKKNVVVVFDKDMDEATDRDMAYVVGKNGYFKKVDIGEEAYTSCFPLVCSYVPSSEQIRQLT

SEQ ID NO: 20463 - protein, 607 aa, Zea mays
MNSHKFLLAVLLLLLLNYASYAATSKEDDDFRKSCPSHRCHKHGPEIRFPFRLPSHPPSCGTPGMQLSCSGHDTILDHPVLGSCRVTAIYYRHRVMNVIPPEDSSSHCQLQKLVKRNQSTDVYTPVVNPVSVLVGCSREATNQDGIVGPSSCLSLINNASQLWYLVDPSTDMSTLPMGCEVVAKEIPVPYTYDKNGPKVETFSGRSLFNEKANRAINFGETSFNWDLNNITGSCQTCEQEGKHCGFSSNRRQAFCLHHGSHVILIAATTSVATFVVLVVTALYLSLKKRYNEAIHLKVEMFLKTYGTSKPTRYTFSEVKKIARRFKEKVGQGGFGTVYKGQLPNGVPVAVKMLENSTGEGEDFINEVATIGQIHHANIVRLLGFCSEGTRRALIYEFMPNESLGRYIFLPQELLVPEKMLDIATGIARGMEYLHQGCNQRILHFDIKPHNILLDYSFNPKISDFGLAKLCARDQSIVTLTAARGTMGYIAPEIYSPNFGGVSYKSDVYSFGMLVLEMVSGRRNSDPGIENQNGVYLPEWVYERVVTGQDLTLSKKIADQEKETVRQLAIVALWCIQWNPKNRPSMTKVVNMLTGRLQNLPIPPKPYA

SEQ ID NO: 20464 - protein, 271 aa, uncultured bacterium
NSRLCMSSAVAGYTRSLGSDGPPCSYEDLDHCTVAFLIGTNTAECHPVLFQRLLKRKKRHPGSVTIVVIDPRQTDTAKAADIHLAVAPGSDLALLHGIAHLVMRENGQDPTFIDDCTDNYDSFFDVVARWTPRRVALFCGIPEKRLREVAQLFHRREKVLSLWSMGVNQRREGTAVVGGIINLHLLTGQIGKEGAGPFSLTGQPNAMGGREAGGLSHLLPGYRQVTNPEHRAEVEQTWGFPQGKIAPDPGLTAWQQVEAMERGELDLWWVA

SEQ ID NO: 20465 - protein, 516 aa, Chlorobium tepidum TLS
MVQKLIFILTGVLLMLGIAMGGDLHAYTQPDPSGAKVGVTADISAANPGKPTAAEITDQIGKNKVSINMVWVLITGFLVMFMQAGFAMVEAGLTRAKNAAHTMSMNMMIYPIGMLGFFVSGFAIMFGGLGTLGTLGGYEGLNQEFAINLFGHTIGLFGMKGFFLNNVYDVGVFALFLFQMVFMDTTATIPTGSMAERWKFSAFAIYGIFVGTIIYPLYGNWVWGGGWLATLGSNFGLGHGHVDFAGSSVVHMTGGVLALVGAIIIGPRIGKYNKDGSPNAIPGHNIPMAIVGAFILAFGWFGFNPGSTLAGTDLRISVVAVNTMIASATGAAASMLYMWLFKTKKPDPTMMINGLLAGLVAITAPSAFVNVQAAALIGLISGVLVIEAAFFIEKVLKIDDPVGAVAVHGVNGAWGCLALGLFADGTYGDGWNGVAGPVTGLFYGNPGQFYAEVIGVLANIIYVGAIGWVVFKLIDVTIGNRVNPDDELDGLDIPEMGVEGYCGIRLDKNSETPLSK

SEQ ID NO: 20466 - protein, 99 aa, Xylella fastidiosa Ann-1
MKLITAIIRPFKLDEVREALSQVGVSGITVTEVKGFGQQKGHTELYRGTEYVIDFLPKIKIEMVVTDERLDAVIEVIRIAAVTGKIGDGKIFVTKIEQV

SEQ ID NO: 20467 - protein, 117 aa, Chlorobium tepidum TLS
MKKIEAIIRTSQYEAVKKALHEIDIDFFTWWDVTGQGNDKKHRTEIYRGTVRDTSYISRRYLSIVVRDVNLQKTVDCLIKNARTGEVGDGKIFVSDIEQSYRIRTGESGDESLYNKD

SEQ ID NO: 20468 - protein, 155 aa, Triticum aestivum
MQFLRGVGGGGGGAGSTAWEAFRRHFSRKRAVDIRRINPKVPKEEAVAISGRLLQILADHGPLTVGSTWNHAKDAAIDGLNSKTHMKILLKWMWGRRIIKLSCTQAGNTKKFLYSPFTAEDTEAAEEPAEEQPKRKGWKGKHPKYQTKKQPATAA

SEQ ID NO: 20469 - protein, 271 aa, uncultured bacterium
NSRLCMSSAVAGYTRSLGSDGPPCCYDDLDHCSVAFMIGTNTAECHPVLFQRLLKRKKRNPGSLKIVVVDPRRTDTAKAADIHLPIAPGSDLALLHGIAHLILRENGQDPAFIDDHTENYEAFFDVVARWTPRRVARFCNLPEKRLREVAQLFHHRETVLSLWSMGVNQRREGTAVVSGLINLHLLTGQIGKEGAGPFSLTGQPNAMGGREAGGLSHLLPGYRLVANDQHRQVVEQAWNLPAGSIAAKPGLAAWQQIEAMERGELDLWWVA

SEQ ID NO: 20470 - protein, 229 aa, Glycine max
MLSFRLFVRALGYPRDKDGGCFQMRISYSPAAPLFLFLVQWTDYRLAGALGLLRILIYVTYGNGKNTMSIYERKASIRQFYSIIFPALLQLEKGITDLEERKQKEVYALRYQRKSEFNERRQSEIDIEREEECGVCLEVKAKVVLPNCCHYMCLKCYRDWCQRSQSCPFCRDSLKRTNSGDLWIYTDTSDIVDVGTIFKENCKMLFLYIEKLPLIVPDPRYVFYDPLLR

SEQ ID NO: 20471 - protein, 271 aa, uncultured bacterium
NSRLCMSSAVAGYTRSLGSDGPPCCYDDLDHCSVAFLIGTNTAECHPVLFQRLLKRKKRNPGSVTIVVVDPRRTDTAKAADIHLPIAPGSDLALLHGIAHLVLRENGQDPAFIDDHTENYEAFFDVVARWTPRRVARFCNLPEKRLREVAQLFHRRENVLSLWSMGVNQRQEGTAVVCGLINLHLLTGQIGKEGAGPFSLTGQPNAMGGREAGGLSHLLPGYRLVANDQHRQDVEQAWKFPAGSIAATPGLAAWQQIEAMERCEIDLWWVA

SEQ ID NO: 20472 - protein, 336 aa, Emericella nidulans
MAPKVGINGFGRIGRIVFRNAIEAGTVDVVAVNDPFIETHYAAYMLKYDSQHGQFKGTIETYDEGLIVNGKKIRFHTERDPANIPWGQDGAEYIVESTGVFTTQEKASAHLKGGAKKVVISAPSADAPMFVMGVNNETYKKDIQVLSNASCTTNCLAPLAKVINDNFGIIEGLMTTVHSYTATQKVVDGPSAKDWRGGRTAATNIIPSSTGAAKAVGKVIPSLNGKLTGMAMRVPTSNVSVVDLTVRTEKAVTYDQIKDAVKKASENELKGILGYTEDDIVSTDLNGDTRSSIFDAKAGIALNSNFIKLVSWYDNEWGYSRRVVDLITYISKVDAQ

SEQ ID NO: 20473 - protein, 271 aa, uncultured bacterium
NSRLCMSSAVAGYTQSLGSDGPPCCYDDLDHCKVAFLIGTNTAECHPVLFQRLLKRKKRNPGSLKIVVVDPRRTDTAKAADIHLPIAPGSDLALLHGIAHLILRENGQDPAFIDDHTENYEAFFDVVARWTPRRVARFCNLPEKRLREVAQLFHHRETVLSLWSMGVNQRREGTAVVSGLINLHLLTGQIGKEGAGPFSLTGQPNAMGGREAGGLSHLLPGYRLVANDQHRQVVEQAWNMPAGSIAAKPGLAAWQQIEAMERGELDLWWVA

SEQ ID NO: 20474 - protein, 590 aa, Desulfitobacterium hafniense DCB-2
MDIQERVAKLRKLMTDHGLAAYIIPSSDSHLSEYVADHFKSRQWISGFTGSAGTVVITLKDAGLWTDGRYYIQAERQLRDSGIRLFKAADPQVPSYTEWLKEHLPEGSVLGLDGHVFSAKQLRDMEKEWAGKITIEFDQDLVGQLWQDRPPIPARDIFVHDVSYAGRSRVEKLNELRQQMKGKGANVHVLTALDDIAWLLNIRGADVPNNPVTIAHVLVTEDACTLCIDPGKVPAPVKAELERDGIQIKGYAAVAGLLQGLGWDDAVLIDPESVNAFLDHAIHPQTKKIEGANPTAMLKAVKNEIELDNLKTSNIHDGVAMVRFIKWLKTTLGKEEITELSAEDTLETLRRANKECVGLSFDTIAGYKDHAAMMHYKATPESAYTLAAEGFLLVDSGGQYFGGTTDITRTIVLGPLTEEEKRDFTLVLKGHIALATVKFLYGATGSNLDVLARQPIWKYGMDYKCGTGHGVGMFLNVHEGPQRLSQTPNTVKLEAGMILTNEPGIYKEGKHGIRTENMMVVRKAEETEFGQFMGFEAVTYCPIDLGGVDQSLLTEEEQTWLDDYNQMVYTTLEPYLDAEEKAWLAQECGR

SEQ ID NO: 20475 - protein, 604 aa, Zea mays
MAERLTRIAIVSEDKCKPKKCRQECKKSCPVVKTGKLCIEVTSASKLAFISEELCIGCGICVKKCPFDAIEIINLPKDLEKDTTHRYGPNTFKLHRLPVPRPGQVLGLVGTNGIGKSTALKVLAGKLKPNLGRFKNPPDWQEILTYFRGSELQNYFTRILEDNLKAIIKPQYVDHIPKAVQGNVGQVLEQKDERDMKAELCVDLELNQVIDRNVGDLSGGELQRFAIAVVAVQNAEIYMFDEPSSYLDVKQRLKAAQVIRSLLRPNSYVIVVEHDLSVLDYLSDFICCLYGKPGAYGVVTLPFSVREGINIFLAGFVPTENLRFRDESLTFKIAETQESAEEIETYQRYKYPTMSKTQGNFKLTVVEGEFTDSQIVVMLGENGTGKTTFIRMLAGLLKPDTVEGTDIEIPEFNVSYKPQKISPKFKNTVRHLLHQKIRDSYMHPQFVSDVMKPLQIEQLMDQEVVNLSGGELQRVAICLCLGKPADIYLIDEPSAYLDSEQRIVASKVIKRFILHAKKTAFIVEHDFIMATYLADKVIVYEGRPSIDCSANAPQSLVSGMNKFLSHLDITFRRDPTNYRPRINKLDSTKDREQKSAGSYYYLDD

SEQ ID NO: 20476 - protein, 125 aa, Glycine max
  misc_feature (39)..(39): Xaa can be any naturally occurring amino acid
  misc_feature (57)..(57): Xaa can be any naturally occurring amino acid
  misc_feature (62)..(62): Xaa can be any naturally occurring amino acid
  misc_feature (67)..(68): Xaa can be any naturally occurring amino acid
  misc_feature (77)..(77): Xaa can be any naturally occurring amino acid
  misc_feature (82)..(82): Xaa can be any naturally occurring amino acid
  misc_feature (85)..(85): Xaa can be any naturally occurring amino acid
  misc_feature (89)..(89): Xaa can be any naturally occurring amino acid
  misc_feature (92)..(92): Xaa can be any naturally occurring amino acid
  misc_feature (94)..(94): Xaa can be any naturally occurring amino acid
  misc_feature (98)..(99): Xaa can be any naturally occurring amino acid
  misc_feature (102)..(102): Xaa can be any naturally occurring amino acid
MGTKEGKWVGAIFFNCKFWFFGADFEAIMGKKRKHSETXSKKEDAAPERPARTLLGXKDKNXVEDNXXADSPIFRNXEKLLXTCXRRIXYRXRXHLMXXLVXLLPHCHGKPRKTPPLQLAHPPFE

SEQ ID NO: 20477 - protein, 183 aa, Zea mays
  misc_feature (28)..(28): Xaa can be any naturally occurring amino acid
  misc_feature (88)..(88): Xaa can be any naturally occurring amino acid
  misc_feature (104)..(104): Xaa can be any naturally occurring amino acid
  misc_feature (117)..(117): Xaa can be any naturally occurring amino acid
  misc_feature (156)..(156): Xaa can be any naturally occurring amino acid
KRPTTRRLASSMFFSADAITSPAQATMXTPFTGLKSSAAFPDTPKRNNYITSIASNAGRVSCMKERPPVVKKNDNTLSLSFLIVTVSXIAVIECKYLLHNKRIXCVEFELEHGFVYXREHVNTPGYYDVRYWTMSNLPLIGCTDSAQVLNEVQECXIYDPNAFMTIILFYNNRQVQCISFIAY

SEQ ID NO: 20478 - protein, 113 aa, Glycine max
MFVQALGLRVVKKTDRPEYKYTIAMLGYAEEHETTVLELTYNYGVTEYTKGNAYAQVAIGTDDVYKSAEVVNIVTQELGGKITRQPGPIPGLNTKITAFLDPDGWKTVRNFFV

SEQ ID NO: 20479 - protein, 239 aa, Glycine max
MNDADVSKQIQQMVQFIRQEAEEKANEISVSAEEEFNIEKLQLVEADKKKIRQEYERKERQVEIRKKIEYSMQLNASRIKVLQAQDDVISSMKEAASKELLNVSHHHHLNLLSHHHHEYRNLLKDLIVQCLLRLKEPSVLLRCRKDDLHLVEHVLDSSAQEYAEKANVDPPEIIVDNQVYLPPGPSHHNSHDLYCSGGVVLASRDGKIVCENTLDARLDVVFRKKLPEIRKQLFGQVVV

SEQ ID NO: 20480 - protein, 434 aa, Burkholderia thailandensis E264
MSSQSQSPSVAQSIPSYLHADDLGPWGNYLQQVDRVAPYLGSLSRWIETLKRPKRILIVDVPIELDNGTVAHFEGYRVQHNVSRGPGKGGVRYHQDVTLSEVMALSAWMSVKNAAVNVPYGGAKGGIRVDPRKLSRGELERVTRRYTSEIGIIIGPNTDIPAPDVNTNEQIMAWMMDTYSMNQGQTATGVVTGKPISLGGSLGRKEATGRGVFVVGCEAAKKKGVEIEGARIAVQGFGNVGGIAAKLFQEAGAKVIAVQDHTGTIHQPAGVDTAKLLDHVGRTGGVAGFEGAEPMPNDEFWTVETEILIPAALENQITEKNASKIRTKIIVEGANGPTTTAADDILSANGVLVIPDVIANAGGVTVSYFEWVQDFSSFFWTEDEINHRLERVMREAFAGVWAVAEEHKVSVRTAAFIVACKRILMAREMRGLYP

SEQ ID NO: 20481 - protein, 398 aa, Arabidopsis thaliana
MMSDLPRDLLEERLSRVPVKSLREARFTCKNWKTLSKKRSFTKKHLAQEATSRESEFKVVMVLHCKVYLTSINLRGIHNGFDPSINRQAKLVSLNGTDQIDISEVYHCDGLLLCISKDYTRVVVWNPYRSQTLWLKPSSPDHRMDWYICAIGYEKRKSSLRYKVLRFVDFAEEEFVEYEIYELKSNSWRVLDVTSDWEVEFYARGVSLKGNTYWFATDKFPEISSNLIHSVYFLLCFNFTSERFGPRLHLPCYPMDVDTVSLSSVREEQLAVLFQRKDNLHMEIWVTTKIEPEEVMWSKLFLAVDMQPLTDFKFGIADASFIIDEEKKVVVVFAKDKDVMYPTHNTAYIIGEDGYYKEVDLGKTTDKIRDPLVCSYVPSSAQIKQGGKRKKKGKLITD

SEQ ID NO: 20482 - protein, 484 aa, Bacillus licheniformis ATCC 14580
MITTNAKKMMNHIDGEWVNSLGAESEEVVNPANGNVIAYAPLSVRADVDRAVQAAKHAYQTWSLVPVPNRARLLYKYLQLLQEQKEQLADIITTENGKTLKDARGEVQRGIEVVELATATPTLMMGESLPAIAGGIDGSIWRYPLGVVAGITPFNFPMMVPLWMFPLAIACGNTFVLKPSERTPILAGKLVELFYEAGFPKGVLNLVHGGKDVVNGILENDDIKAVSFVGSEPVAKYVYQTGTANGKRVQALAGAKNHAIVMPDCHLEKTVQGIIGAAFGSSGERCMACSVAAVVDDIADDFMEMLVSETRKLKTGDGRSEDHFVGPLIREVHKQRVLDYIDSGIKEGAALAVDGRNPDVREGYFVGATIFDHVTPEMKIWQDEIFAPVLSVVRVQDLDEGIELANQSKFANGAVIYTSSGKSAQQFRDKIDAGMIGVNVNVPAPMAFFSFAGNKASFYGDLGTNGKDGVQFYTRKKVVTERWF

SEQ ID NO: 20483 - protein, 117 aa, Oryza sativa (indica cultivar-group)
MARAQLVLVALVAAALLLAGPHTTMAAISCGQVNSAVSPCLSYARGLRPSAACCSGVRSLNSAASTTADRRTACNCLKNVAGSISGLNAGNAASIPSKCGVSIPYTISPSIDCSRVN

SEQ ID NO: 20484 - protein, 282 aa, Picrophilus torridus DSM 9790
MHIRIGTRSSKLAMIQAMMVKDRLDSLGIETEVKGFTSKGDINLDSPLYSIGGTGVFVDDLNRMILKNEIDIAVHSAKDIPSFIDDSLEISAVLKRDDPRDVLISQHSLNDLEASSVIGTSSLRRIKELKTLRNDILIKDLRGNIDTRLKKLDNGDYDGIIMAKAAYDRMRINRRHFILNYDDFVPAPNQGIIAIISKKDSEINDVLKKINDDETYNDMKAERLILSGLNLGCSKPVGIYAHKNRIFMRFYSLKNDDYKDIVMDYNNIDLEFIRSEIHDYGY

SEQ ID NO: 20485 - protein, 606 aa, Parvularcula bermudensis HTCC2503
MFQNFDPSSDRGFAAAHVPLVREAMGELALDGLLVPHDDSYFNEYLPDNAERLMWLSGFSGSAGFAILLKERGAVFSDGRYTLQLKEQVDTAFFELHNSGETSPADWLVDTTPQGAVIGYDPHHFSKKTLAPFLAAAERGGFELRPLDHNPIDQAWRDQPPAPCAPVVIHPEAFSGRSHETKRQLVAEAISSVNADAALLSFPPSLAWIFNIRGGDVHASPLALGRALVFANGGAILYIDHRKMSGQVRDHLGGAVTLADESQLIDDLEAMGRERKAIAIDPDHTPVIFTQSITAAGGRIIEAPDPCSLPRARKTMAELEGSRAAHRRDGAAVTRFLHWFAETAPSGGLTEIEAATKLERFRVETGALLDISFDTISGAGAHGALPHYRVNRDSDARITQGSLYLVDSGGQYRDGTTDITRTLAVGTPSEAMRRCYTLVLKGHIALATARFPAGTTGHQLDSLARLPLWEAGFDYDHGTGHGVGSYLGVHEGPQNISKRAIAQPLLAGMICSNEPGYYRSGEFGIRIENLVIVTEATPIEGGDRPMHGFETITLAPLERELIDVSLLSPQEIAWVDTYHQTVCDTLCPDLPEATARWLQTRTAALV

SEQ ID NO: 20486 - protein, 149 aa, Zea mays
  misc_feature (69)..(69): Xaa can be any naturally occurring amino acid
ASFPVSRKQSLDITSIASNGGRVSCMQVWPPINMKKYETLSYLPDLSDEQLLSEIEYLLKNGWVPCLEXFETEHGFVYRENHKSPGYYDGRYWTMWKLPMFGCTDATQVLAEGQEAKKAYPQAWVRIIGFDNVRQVQRIRFIGYKPEGY

SEQ ID NO: 20487 - protein, 205 aa, Neurospora crassa
MLRTSNAMMPSVMGAAQRRALSDSAEPARVPSVESARVPEKLAKEDSPLATPKRNSPDYNVPIDKATSTWTPVPKHIQNGSEEGILPAAVVSGAPMELQARTVRIYLPSKPATQSSNSRVLWRMDWDVLEKGHRWENELMGWQSSGDFVQGTHLTFRTKEEAIQFAEKQGYEYFVQEPNQRHFTPKAYANNFLYSPKKLKIVRTK

SEQ ID NO: 20488 - protein, 406 aa, Lactobacillus delbrueckii subsp. bulgaricus
MRVVVTGMGAVSPNGNGCQAFVENTLNGVVGIKPIKKFDASETGISVAGEIDDFDVSQVVGKKNGKRMDLYSQYAIQACQEAYEMAGLTPETVKAEELGVIFSSGIGGLTTIEEQVIKVHDKGPKRMSPFFVPMAIANMAAGNISIRFNAKNISTSIVTACASGTNSIGEAYRQIKEGRAEVMITGASEASVNETAISGFADLNALSTSTDPLKASLPFDQNRHGFVLGEGAGALILESLDHAQKRGAKILAEVVGYGATSDAYHITSPDPKGEGAARAMRLAVEEADIKPDQVGYINAHGTATKANDSGEAKAIKEVFGDQVLVSSTKGMTGHLLGAAGAVEAVITCASLEKGILPANVGCFAQDPECPVKLVKAGDQEQAVDYALSNSFGFGGHNAVLAFRKWA

SEQ ID NO: 20489 - protein, 99 aa, Arabidopsis thaliana
  misc_feature (62)..(62): Xaa can be any naturally occurring amino acid
FGEGFERGLDLAWGDPQDPNKAVDLPPKSKSMLVPGKIQHIICTGNLCIKKIHDSLKTICPXDWHIVQGGLAKNPRTLGNKTLPFGQLKLGLGHGHQGI

SEQ ID NO: 20490 - protein, 409 aa, Haemophilus influenzae
MAIEILVPDLPESVADATVATWHKKLGDTVKRDEVIVEIETDKVVLEVPALSDGVLAEVVQAEGETVVSKQLLGKISTAQEGDVSSATLKATNEPTPSDRQNAAIENSHNHNADQSPVIRRLLAEHDLQADQIQGSGVGGRLTREDIEREIAKRQAQQVKQEAATEQNTISTVAYSARSEKRVPMTRLRKRIAERLLEAKNSTAMLTTFNEVDMQPIMTLRKTYGEKFEKQHSVRLGFMSFYIKAVVEALKRYPEVNASIDGDDVVYHNYFDISIAVSTPRGLVTPVLRDCDKLSMAEIEKQIKALAEKGRDGKLTVEDLTGGNFTITNGGVFGSLMSTPIINPPQSAILGMHAIKERPIALNGQVVIRPMMYLALSYDHRLIDGRESVGFLVTIKELLEDPTRLLLEI

SEQ ID NO: 20491 - protein, 387 aa, Synechocystis sp. PCC 6803
MGRVGVLLLNLGGPEKLEDVRPFLFNLFADPEIIRLPFPWLQKPLAWLISTLRAKKSQANYAEIGGGSPLLQITEAQASALTTRLERLGQDAKVYIGMRYWHPFTEEAVEKIKGDRLQRLVILPLYPHFSISTSGSSFRVLEEMWHNDPSLRQLDYSLIPSWYDHPGYLQAMADLIAQELKKFPNPDQAHIFFSAHGVPQSYVDEAGDPYQAEIEACTRLIMRTLDRPNQYTLAYQSRVGPVEWLKPYTEEALQKLGAEGIDDLLVVPISFVSEHIETLQEIDIEYREIAEEAGIDNFQRVPALNTHPVFIDALAQMVMDSLNDPPCTFETVPHPKKNMKMYPQERWEWGLTTAAEVWNGRLAMLGFIALLVELISGQGPLHFVGLL

SEQ ID NO: 20492 - protein, 592 aa, Arabidopsis thaliana
MFRRKSRSISPRRHRSRSVTPKRRSPTPKRYKRQKSRSSTPSPAKRSPAATLESAKNRNGEKLKREEEERKRRQREAELKLIEEETVKRVEEAIRKKVEESLQSEKIKMEILTLLEEGRKRLNEEVAAQLEEEKEASLIEAKEKEEREQQEKEERERIAEENLKRVEEAQRKEAMERQRKEEERYRELEELQRQKEEAMRRKKAEEEEERLKQMKLLGKNKSRPKLSFALSSKMTTMSDLDEIMVAEILCRTPMTCLKTVRSVCKKWNALSKKWFFFGKAKQFLGFMMMDSRVCSLRFDLRKDLVVEPPSIKQVSILDQIEVSKIFHSDGLLLCIIKNDTTRLLVWNPYLEQTRWIQPRHNFHILDCYAIGHDKNRKHKILRFVDDFLPVENVVFGGNTYFFAKERYIFEGKGPEEIDITETEDFLLCFDFTAERFGPRLPLPFHSYYAETVTLSCVKEDQLSVLCQRQPSEPSEILEIWVSTNIQPNAVSWSIFLKVDMRPLTGFQFNDMAGSFFIDQENKVAVVFDLDPSQICRYQTAYIIGQEYGGYFNSVNIGEVPNLWIPGSVGYADTTSCIPPVCSSYVPSLVQIG

SEQ ID NO: 20493 - protein, 567 aa, Haemophilus influenzae
MSKQIQIPDIGSDEVTVTEVMVNVGDTISVDQSIINVEGDKASMEVPAPEAGVVKEILVKVGDKVSTGTPMLVLEAAGAAPAADEPTAPVADAPTAPVVATAPTASAIVEVNVPDIGGDEVNVTEIMVAVGDTITEEQSLITVEGDKASMEVPAPFGGVVKEILVKSGDKVSTGSLIMRFEVLGAAPAESASAPASTSAPQTAAPATTAQAPQAAAPDTTAQAPQAAAPDTTAQAAQSNNNVSGLSQEQVEASTGYAHATPVIRRLAREFGVNLDKVKGTGRKGRIVKEDIEAYVKTAVKAYESGATAQATGNGVANGAGLGLLPWPKVDFSKFGEIEEVELSRINKISGANLHRNWVIIPHVTHFDKADITDLEAFRKEQNALREKQKLGVKITPVVFIMKAVAKALEAYPRFNSSITEDAQRLILKKYINIGVAVDTPNGLVVPVFKNVNKKGIIELSRELMEVSKKAREGKLTASDMQGGCFTISSLGGIGTTHFAPIVNAPEVAILGVSKSSMEPVWNGKEFAPRLILPMSLSFDHRVIDGADGARFISYLGSVLADLRRLVM

SEQ ID NO: 20494 - protein, 466 aa, Arabidopsis thaliana
MFIAMADFKILLLILILISLFELDLLHFHHDFFSPYPVKIGLLLISIFFYAYSTTRSKPVYLVDFSCHQPTDSCKISSETFFNMAKGAQLYTDETIQFMTRILNRSGLGDDTYSPRCMLTSPPTPSMYEARHESELVIFGALNSLFKKTGIEPREVGIFIVNCSLFNPNPSLSSMIVNRYKLKTDVKTYNLSGMGCSAGAISVDLATNLLKANPNTYAVIVSTENMTLSMYRGNDRSMLVPNCLFRVGGAAVMLSNRSQDRVRSKYELTHIVRTHKGSSDKHYTCAEQKEDSKGIVGVALSKELTVVAGDSLKTNLTALGPLVLPLSEKLRFILFLVKSKLFRLKVSPYVPDFKLCFKHFCIHAGGRALLDAVEKGLGLSEFDLEPSRMTLHRFGNTSSSSLWYELAYVEAKCRVKRGDRVWQLAFGSGFKCNSIVWRALRTIPANESLVGNPWGDSVHKYPVHVT

SEQ ID NO: 20495 - protein, 405 aa, Oceanospirillum sp. MED92
MRRVVVTGMGIVSCLGTDKEAVLESLQQGRSGIKFQEDYKERGFRSQVAGSIDIDFSEKIDRKLLRFMGDAAAYTYIAMQEAIADSGLGEDQVSNERTGLIVGSGGASADNIVETADITREKGVKRVGPYRVTRTMGSTVSACLATPFKIKGVNYSITSACATSAHCIGNAAEQIQLGKQDVVFAGGGEELHWVQTAMFDAMGALSSKYNETPEKASRAYDANRDGFVISGGAGILVIEEYEHAKARGAKIYAELVGYGATSDGYDMVAPSGEGAARCMKQAMATVDGKIDYINAHGTSTPAGDMQELKAMKEAFGDDMPTVTSTKSLSGHSLGAAGVQEAVYSLLMQENNFIAASANIDELDADAEGMPIAVEKQDNVDLKRVMSNSFGFGGTNCTLVFEKLDS

SEQ ID NO: 20496 - protein, 537 aa, Bacillus clausii KSM-K16
MTYFTDFDISDQVKQAIQDMGFEEPSPIQEKAIPAILTGGDVIGQAQTGTGKTAAFGIPVVDKVTEERYIQALILTPTRELAIQVSGELQKLSAHKRIRTLPIYGGQSIGHQIKALRQGVQVVIGTPGRMLDHLRRGTLKLNSVHTVVLDEADEMLDMGFVDDIEAILKEVNQVRQTLLFSATMPPAIRKLSRKYMNDPKTVTINKGEVTAPSINQVYYKVLERNKIDSLCRIIDSDDVELGILFCRTKKGVAELTEALQARGYLVDGLHGDLTQSQRDVVMKKFRDSSIEFLIATDVAARGIDVENVTHVINYDIPQDPESYVHRIGRTGRAGRTGAAITLVTPREMKHLRSIEKEIKMHIPSASVPTIEEVVEKQQSSWKNLIQDTIEQGGKEMELFLPLVDEILAEQDPKQVVAALLKLKFSTETATEDAGYSFGDTGGAKGMVRFFINVGRNVNLTPKILGEEIGRLVGIPVKSIGRIDIFENFSFVDVPEEAAPFVYEGLRYSRINGARVNLEPAKPRPKRERRTPAGSRRS

SEQ ID NO: 20497 - protein, 92 aa, Legionella pneumophila subsp. pneumophila str. Philadelphia 1
MMKQKKIYVGNLPFGTTEEALSIQFSQYGKIEEMFLIKDRLTGQMKGFGFITFSAQQEAESALEMNGQPFDGRSLKVCMAQKKTNSVSRSRW

SEQ ID NO: 20498 - protein, 117 aa, Triticum aestivum
MSDKVRASHLLIKHSGSRRPASWKDPEGAEITKRTKEQAIAILQGHRDAIVSGKANFADLAKQHSDCGSAQNGGDLGEFGRGAMQKPFEDATYALKVGELSGIVDTDSGVHIIQRTA

SEQ ID NO: 20499 - protein, 421 aa, Streptomyces tubercidicus
MVDAHQTFVIVGGGLAGAKAAETLRAEGFTGRVILICDERDHPYERPPLSKGFLLGKEERDSVFVHEPAWYAQAQIELHLGQPAVRLDPEAKTVRLGDGTLIAYDKLLLATGAEPRRLDIPGTGLAGVHHLRRLAHAERLRGVLASLGRDNGHLVIAGAGWIGLEVAAAARSYGAEVTVVEAAPTPLHGILGPELGGLFTELHRAHGVRFHFGARFTEIVGQDGMVLAVRTDDGEEHPAHDVLAAIGAAPRTALAEQAGLDLADPEAGGGVAVDATLRTSDPYIYAAGDVAAADHPLLDTRLRVEHWANALNGGPAAARAMLGQDISYDRVPYFFSDQYDVGMEYSGYAPPGSYAQVVCRGDVAKREFIAFWLGEDGRLLAGMNVNVWDVAETIQQLIRGGVRLEPGELADPEVPLTSLLP

SEQ ID NO: 20500 - protein, 271 aa, uncultured bacterium
NSRLCMSSAVAGYTRSLGSDGPPCSYEDLDHCTVAFLIGTNTAECHPVLFQRLLKRKKRHPGSVTIVVVDPRQTDTAKAADIHLAVAPGSDLALLHGIAHLVMRENGQDPTFIDNCTDNYDSFFDVVARWTPRRVALFCGIPEKRLREVAQLFHRREKVLSLWSMGVNQRREGTAVVGGIINLHLLTGQIGKEGAGPFSLTGQPNAMGGREAGGLSHLLPGYRQVTNPEHRAEVEQTWGFPQGKIAPDPGLTAWQQVEAMERGELDLWWVA

SEQ ID NO: 20501 - protein, 350 aa, Mycoplasma penetrans HF-2
MSFKTELMKYTLEVNKADAFFIVSDTNRFWLSEFMSSAGYVVATKKLVYLFLDKRYYQKAMDTITDPDIKIVCFTAKSQILDCLKENNVETLMVEKEYFSFNDYLFVKNSIKNIINFTSDVLRIQKTEFEVYNTQKAVDITCETLNWIQEQTLVGLTEIEVANMVTCHMLELGASKNSFDPIVASGKNGAYPHHQPTNKIIENDEFVTIDTGCIYKGYCSDVTRTFPIGFPPELLINAYKAVYHSNSLGIQKAAYKMIGQDVDKLCRDTVTSYGFGEYFVHGTGHGVGINIHELPNVNSAYTGKLENNSIVTIEPGIYIPDLGGIRIEDMVLIKTDSTVWMTEKGKRWVF

SEQ ID NO: 20502 - protein, 271 aa, uncultured bacterium
NSRLCMSSAVAGYTRSLGSDGPPCCYEDLDHCSVAFLIGTNTAECHPVLFQRLLKRKKRDPKGLTIVVVDPRCTDTAKIADHHLAIAPGTDLALLHGLARLVIEDNGFDSDFIDAATEGFSDYTKTIHAWSAQETAKLCGITEQELRDVGRLWSRKAGILSLWSMGVNQRREGTAVVSGLINLHLLTGEIGKPGAGPFSLTGQPNAMGGREAGGLAHLLPGYRLVANPEHRSEVEQAWGLASGSIAAEPGLSAWQQVEAMERGELDLWWVA

SEQ ID NO: 20503 - protein, 271 aa, uncultured bacterium
NSRLCMSSAVAGYTQSLGSDGPPCCYDDLDHCSVAFLIGTNTAECHPVLFQRLLKRKKRNPGSVTIVVVDPRRTDTAKAADIHLSIAPGSDLALLHGIAHLILRENGQDPAFIDDHTENYEAFFDVVARWTPRRVARFCNLPEKRLREVAQLFHRREDVLSLWSMGVNQRQEGTAVACGLINLHLLTGQIGKEGAGPFSLTGQPNAMGGREAGGLSHLLPGYRFVANGQHRQDVEQAWDFPAGSIAATPGLAAWQQIEAMERGELDLWWVA

SEQ ID NO: 20504 - protein, 83 aa, Triticum aestivum
PTRPEGIDAIATTRVVITGDVSADKPALTSNSNRSFSGSGAAMDVVVSSVRAYLSALNKMSSYVGAVKASSEAPETISVQTTE

SEQ ID NO: 20505 - protein, 219 aa, uncultured bacterium
NSRLCMSSAVSGYTQSFGSDGPPCCYDDLDHCKVAFLIGTNTAECHPVLFQRLLKRKKRNPGSLKIVVVDPRRTDTAKAADIHLPIAPGSDLALLHGIAHLILRENGQDPAFIDDHTENYEAFFDVVARWTPRRVARFCNLPEKRLREVAQLFHRRENVLSLWSMGVNQRQEGTAVVCGLINLHLLTGQIGKEGAGPFSLTGQPNAMGGREAGGLSHLL

SEQ ID NO: 20506 - protein, 219 aa, uncultured bacterium
NSRLCMSSAVAGYTRSLGSDGPPSCYEDLDHCSVAFLIGTNTAECHPVLFQRLLKRKKRNPGSITIVVVDPRKTDTAKAADIHLPIAPGSDLALLHGIAHLVLRENGQDPAFIDDHTENYDAFFDIAARWTPRRVALFCNIPEKRLRDVAQLFHRRERVLSLWSMGVNQRREGTAVVQGIINLHLLTGQIGKEGTGPFSLTGQPNAMGGREAGGLSHLL

SEQ ID NO: 20507 - protein, 946 aa, Oryza sativa
MPPLLLLLPVVLALFAAADASPSACRNATCGDVPVAYPFWLIDNSSALGCGYPGLGLRCVDNTTLILPFRTHQYRVLDIEYGKHTISLTDADMQHSDTNNSCPHLHANLTIDDNSWLQLASSDSNITFLYNCKSNSSLLSSTSVVKLTGCGAGPEHIGSSYVFLDGWITGEAYDYECETVVVAPVIDAHKKAMVDAHGGLPPADGSFGDVLSAGFELTYSAHSDKCGKCERTKGWCGYRHNETSTTMDFTCFCDEGPTKSHCVAHRTKLVPRIKSRRSSKMRRLCLAAMAHLPLLLLSFLVLIGVHASVSHGSPPLPSTYDPSICSKSSECGGVNISYPFYLSNATDYYTRFSCGYTDLKISCSRDRDGRNETPTILLGGDNYTVLDIIYDSHTIVLADTDALRGGSCPRVRHNITFAQADEWLQYTGPRDNLTFFFGCKLNLPPPIDPGLVSLADKHQINCKDFSNWPDSGDSFVFTSAELEAPVESELARRCRQVIVVPVNGDILNSSNQSALPSGGYGQVLNKGFDLAWNSRKDEQCYQCEQSQGHCSYGQNRVFLDCLCSDGKVGNQDCRNSGASNSSTLRYSSLKGRMKLYIIAGISSVLLLCLLSFPCLFSLKKYRHRRISKGTPRIESFLQRNGTLHPKRYTYTEVKRMTKSFAEKLGHGGFGAVYRGNLSDGRQVAVKMLKDSKGDGEEFINEVASISRTSHVNVVTLLGFCLHRSKRALIYEYMPNGSLERYAFRNNSKGELSLTWEKLFDVAVGIARGLEYLHRGCSTRIVHFDIKPHNILLDQEFCPKISDFGMAKLCANKESIVSIAGARGTIGYIAPEVYSKQFGAISSKSDVYSYGMMILEMVGARERNIEANSESSSHYFPQWIYEHLDEYCISSSEIDGETTELVRKMVVVALWCIQVVPTNRPTMTRVVEMLEGSTSGLELPPKVLLSW

SEQ ID NO: 20508 - protein, 585 aa, Elaeagnus umbellata
MCGILALLGCSDDSQAKRVRVLELSRRLKHRGPDWSGLFQFGDCYLAHQRLAIIDPASGDQPLFNEDKTVVVTVNGEIYNHEELRKKLSHHKFRTGSDCDVIAHLYEEYGEDFVDMLDGIFAFVLLDTRDNSFIVARDAIGVTSLYIGWGLDGSIWISSELKGLNNDCEHFETFPPGHLYSSKAGGMRRWYNPVWFSETIPSAPYDPLALRRAFENAVIKRLMTDVPFGVLLSGGLDSSLVASITARHLSGTKAAKQWGTKLHSFCVGLEGSPDLKAAKEVAAYLGTVHHEFHFTVQDGIDAIEDVIYHVETYDVTTIRASTPMFLMSRKIKSLGVKMVMSGEGSDEIFGGYLYFHKAPNKEEFHEETCRKIKALYLYDCLRANKSTTAWGLEARVPFLDKEFINVAMNIDPEYKKIKRDEGRIEKWVLRKAFDDEERPYLPKHILYRQKEQFSDGVGYSWIDGLKAHAAKHVTDKMIRNAAHIFPHNTPNTKEGYYYRMIFERFYPQNSARLTVPGGASVACSTAKAVEWDESWSKNLDPSGRAALGVHLSAYDNQVPSGVVQPEIISNVPQITVNTLGLEIQS

SEQ ID NO: 20509 - protein, 149 aa, Triticum aestivum
HASALQLQRGQLLTVPASVVERRKQHFHHLEQYDADLILGCNGFIWVGEHVAVDEGTNLNEDQHKLSMEVEAFTPLETRRHICRLANAVRVLSALGFTLTVELIIQTAEASLSSHVEISDMLGAEFYVQTAEREAKRRADLSRRMNGPR

SEQ ID NO: 20510 - protein, 559 aa, Prunus dulcis
  misc_feature (46)..(46): Xaa can be any naturally occurring amino acid
MGSLEEERSLLEDGLIQDETNGLYTGDGSVDITGKPVLKQSTGNWXACPFILGTECCERLAFYGISTNLVTYLTHKLHEGNVSAARNVTTWSGTCYLTPLIGAVLADAYWGRYWTIAIFSTIYFIGMCTLTISASVPALKPPQCVDSVCPSASPAQYGVFFFGLYLIALRTGGIKPCVSSFGADQFDDTDSRERVKKGSFFNWFYFSINIGALVSSTLIVWVQDNAGWGLGFGIPALFMGIAIVSFFSGTPLYRFQKPGGSPLTRMCQVLVASFRKWNLDVPRDSSLLYETQDKGSAIKGSRKLEHSDELNCLDKAAVISETETKTGDFSNPWRICTVTQVEELKILIRMFPIWATGIVFSAVYAQMATMFVEQGMMMDTSVGSFTIPPASLSSFDVISVIFWVPIYDRFIVPIARKFTGKERGFSELQRMGIGLFLSVLCMSAAAVVEMKRLQLATELGLVDKEVAVPLSIFWQIPQYFLLGAAEIFTFIGQLEFFYDQSSDAMRSLCSALSASDDFIGKLSELFDSDIVTYFTTQGGKAGWIPDNLNDGHLDYFSGS

SEQ ID NO: 20511 - protein, 406 aa, Arabidopsis thaliana
MSSIIHGAGAATTTLSTFNSVDSKKLFVAPSRTNLSVRSQRYIVAGSDASKKSFGSGLRVRHSQKLIPNAVATKEADTSASTGHELLLFEALQEGLEEEMDRDPHVCVMGEDVGHYGGSYKVTKGLADKFGDLRVLDTPICENAFTGMGIGAAMTGLRPVIEGMNMGFLLLAFNQISNNCGMLHYTSGGQFTIPVVIRGPGGVGRQLGAEHSQRLESYFQSIPGIQMVACSTPYNAKGLMKAAIRSENPVILFEHVLLYNLKEKIPDEDYICNLEEAEMVRPGEHITILTYSRMRYHVMQAAKTLVNKGYDPEVIDIRSLKPFDLHTIGNSVKKTHRVLIVEECMRTGGIGASLTAAINENFHDYLDAPVMCLSSQDVPTPYAGTLEEWTVVQPAQIVTAVEQLCQ

SEQ ID NO: 20512 - protein, 406 aa, Escherichia coli
MKRTVITGLGIVSSIGNNQQEVLASLREGRSGITFSQELKDSGMRSHVWGNVKLDTTGLIDRKVVRFMSDASIYAFLSMEQAIADAGLSPEAYQNNPRVGLIAGSGGGSPRFQVFGADAMRGPRGLKAVGPYVVTKAMASGVSACLATPFKIHGVNYSISSACATSAHCIGNAVEQIQLGKQDIVFAGGGEELCWEMACEFDAMGALSTKYNDTPEKASRTYDAHRDGFVIAGGGGMVVVEELEHALARGAHIYAEIVGYGATSDGADMVAPSGEGAVRCMKMAMHGVDTPIDYLNSHSTSTPVGDVKELAAIREVFGDKSPAISATKAMTGHSLGAAGVQEAIYSLLMLEHGFIAPSINIEELDEQAAGLNIVTETTDRELTTVMSNSFGFGGTNATLVMRKLKD

SEQ ID NO: 20513 - protein, 587 aa, Picrophilus torridus DSM 9790
MFHDITMVATNQNIASDVTEDKKLKKALSTWDLLFLSLGGIIGSGWLFAAAASAGTAGPSAIYAWIIGGVLIIFIALVYAELGGMLPRSGAIVRYGHYSHGGLAGLIFGWAYFLSAVSVPAVEAEGVITYAASYTPKYHIILATTSTNPITGVPLLILTPLGILLAAILIVAFFMLNYAGVRLMGKTNTGMTWWKLIIPAATIVILFVVGFHTYEFTDIASGGFLPYGWPAVFAAVSTDGIVFSYLGFRQAVDYGGEAKTPQKSIPIAVIGSVLIGIFVYVLLQVVFIGHLNLGAIGNNWSILTAPPTSNAYATSISSAPFATLATSAGLVALTYILYADAYVSPSGTLNVYAGTSARTLFGLGENGYLPESIKRVNKRTKVPVLSIILSMIIGLVFLAPFPSWYALVSLITSSTAFTYIVGGSALMVFRREAGELKRPFKLAGASILAPIAFIGATLIVYWSGWPTVGILSIAIFLGLLVYFILLLLARYNIVHGIENIFTNKTIKAGIWVPAYILILDLLSYIGEKDYGGIGILKFPIDFLVVIVVGIIFYVISYYSGYRTEEISNIIESGTQYIGEETETAGAK

SEQ ID NO: 20514 - protein, 327 aa, Saccharomyces cerevisiae
MGPETLHIGGRKSKLAVIQSNHVLKLIEEKYPDYDCKVFTLQTLGDQIQFKPLYSFGGKALWTKELEDHLYHDDPSKKLDLIVHSLKDMPTLLPEGFELGGITKRVDPTDCLVMPFYSAYKSLDDLPDGGIVGTSSVRRSAQLKRKYPHLKFESVRGNIQTRLQKLDDPKSPYQCIILASAGLMRMGLENRITQRFHSDTMYHAVGQGALGIEIRKGDTKMMKILDEICDLNATICCLSERALMRTLEGGCSVPIGVESKYNEETKKLLLKAIVVDVEGTEAVEDEIEMLIENVKEDSMACGKILAERMIADGAKKILDEINLDRIK

SEQ ID NO: 20515 - protein, 406 aa, Escherichia coli
MKRAVITGLGIVSSIGNNQQEVLASLREGRSGITFSQELKDSGMRSHVWGNVKLDTTGLIDRKVVRFMSDASIYAFLSMEQAIADAGLSPEAYQNNPRVGLIAGSGGGSPRFQVFGADAMRGPRGLKAVGPYVVTKAMAFGVSACLATPFKIHGVNYSISSACATSAHCIGNAVEQIQLGKQDIVFAGGGEELCWEMACEFDAMGALSTKYNDTPEKASRTYDAHRDGFVIAGGGGMVVVEELEHALARGAHIYAEIVGYGATSDGADMVAPSGEGAVRCMKMAMHGVDTPIDYLNSHGTSTPVGDVKELAAIREVFGDKSPAISATKAMTGHSLGAAGVQEAIYSLLMLEHGFIAPSINIEELDEQAAGLNIVTETTDRELTTVMSNSFGFGGTNATLVMRKLKD

SEQ ID NO: 20516 - protein, 444 aa, Arabidopsis thaliana
MAAETSIRKLPSLSGLRHRRNPLEDNPYFHPSNGFYITPSDVILAQVAYDHSAHSQSRVAYHRAGPRREIMYEPSAVKAAIVTCGGLCPGMNTVIRELVVGLWELYGVREIYGIPAGYRGFYSMKAVKLDPKAVHDWHKKGGTVLATSRGGFHLQKIVDAIHLNGYNQVYIIGGDGTMRGAVEIFKEISLRKLEVGITVIPKTVDNDVGIIDRSFGFQTAVEMAQEAISAAHVEAESAVNGIGLVKLMGRSTGHIALHATLSSRDVDCCLIPEMDFYLEGKGGLFEFLEKRLKERGHAVLVVAEGAGQEMIPRNESQKQERDESGNAVFLDVGVWFKSVLKAWWEREHPDELFTVKYIDPTYMIRAVPANATDNLYCTLLAHSAIHGVMAGYTGFVPGPINGNYAYIPLEEVAQTKNQVNPRAPKWAWVRSVPNQPDFETNVKG

SEQ ID NO: 20517 - protein, 406 aa, Escherichia coli
MKRAVITGLGIVSSIGNNQQEVLASLREGRSGITFSQELKDSGMRSHVWGNVKLDTTGLIDRKVVRFMSDASIYAFLSMEQAIADAGLSPEAYQNNPRVGLIAGSGGGSPRFQVFGADAMRGPRGLKAVGPYVVTKAMASGVSACLATPFKIHGVNYSISSACATSAHCIGNAVEQIQLGKQDIVFAGGGEELCWEMACEFDAMGALSTKYNDTPEKASRTYDAHRDGFVIAGGGGMVVVEELEHALARGAHIYAEIVGYGATSDGADMVAPSGEGAVRCMKMAMHGVDTPIDYLNSHGTSTPVGDVKELAAIREVFGDKSPAISATKVMTGHSLGAAGVQEAIYSLLMLEHGFIAPSINIEELDEQAAGLNIVTETTDRELTTVMSNSFGFGGTNATLVMRKLKD

SEQ ID NO: 20518 - protein, 545 aa, Symbiobacterium thermophilum IAM 14863
MESVFGLVRHPGNDALFRAVEMSLVSTLAGRPLHIHAEGLRGTGKTTIMRRVRKALPRIRRIRGCLYNCDPSAPHCPVHRGLSPEEVAALGEERVPMPFLEISHAAKIGTVVGSIDLSRLVSATHPEAALLPGTIPQAHRGILFVDEINRLAETSPELADVLLDVMGTRPGRVQIEETGLPPVELPVLVSVWAASNPDEEPGPLEEIRRQLSDRFDFAIYTDRPSDPEVVEQILAAAEAGEARPPRIADTKAELWRTRLTLRTADLRQVTIPPGIRRQVAALYSQFDLESLRGVEAIQAGIRLSACLDGRREVQPEDLLRVVPMALRHRVDPELLRRVTSYLAEGLAPAETPAPLAAASGGPATAPGRTRFPGLSFGGVLAEPARPLPAGAEPGTGRPSPGAAAGTGPGPDGRAEGVTGAAPAQTAASAAGTGPAPDPGPAGGPPTGPDAGTRSGDLQAAGSRGPVDPGTGAARLASGAGAQPGEGTHGRAGGSWLHRALARLRVRPSLPDPATLPPQAPPNPARPLSALAPEDWVRTEEELGHP

SEQ ID NO: 20519 - protein, 431 aa, Magnetospirillum magnetotacticum MS-1
MNQHFSTFGASPGLTVTRLDNGLTVATETIPGVATATLGVWVGAGSRHERPDEHGLSHLIEHMAFKGTASRSARQIAEDIENVGGEINAATSTECTSYTARVLGEDTGVALDVLGDILTRSVFDDGELAREKGVILQEYAAVEDTPDDVVYDAFIETAFPDQPIGRPILGRPETITRFDRAAIEAYIAREYVPERMVLAAAGAVEHAEIVEAAQRHFGGLTAAEAPQVVAGRYGGGERRMAKKLEQANLVLGLPGLSFRDDDYYALHLFSQALGGGLTSRLWHEVRETRGLAYDIQAFHWPFSDCGLFGIGAGTSGADLPELVDVTIATTRAAAEQLDAAELARAKAQLKVSLLSALETPGGRIERNARQLLAWGRVIPPQELIAKVDAVEVEHVREAGRTLLQGAPTLAAIGPVKGLPPLARIAGALQDA

SEQ ID NO: 20520 - protein, 376 aa, Dehalococcoides sp. CBDB1
MAKTSFVPNPARIKVFGCGGGGCNAVTRMVREEIQGVEFIAINTDAQALAITEAPIRLQIGERVTRGLGAGGDHNMGQKAAEESRDEIREIVNGADMVFVTAGMGGGTGTGSAPIVAEESKKSGALTIAVVTKPFTFEGAHRASTAKEGINRLLGKVDTLIIIPNDRLLDLCDQKTGVDAAFKMADDVLRHGVQAISEVITVPGLINLDFADVRAVMRDAGPAWMSIGYGSGKNRASDAAKSALASPLLDVSITGSKGVLFNIVGGPDLSLMEVNEAADVIKQAVDPDANIIFGVASDASMGSNVKITLIATGFVSKMGMAEEEGDDAITRQLKGIKTEDELDVPSFLRRPLFNRARPVAPPVDTRSNKPSSRISW

SEQ ID NO: 20521 - protein, 291 aa, Magnetospirillum magnetotacticum MS-1
AYKVSQGLLDEFGAERVIDTPITEMGFAGLACGAGYAGLKPIVEFMTMNFSMQAIDHVINSAAKTLYMSGGQLTCPIVFRGPNGAASRVGAQHSQDYASWYAHCPGLKVVAPWSAADAKGLLKASIRDPNPVVFLENELLYGQSFDVPDDPDFVLPIGKAKIERAGAHVTITAYSRMVQIALDAAEILKGEGIEAEVINLRTIRPLDTATIVASVQKTNRIVSLEEGWAYAGIGSEIAAVMMEQAFDWLDAPVVRVCGADVPMPYAANLEKLALPQIEHVVAAARSVCYRA

SEQ ID NO: 20522 - protein, 235 aa, Parvularcula bermudensis HTCC2503
MPRICLVRHGQSRWNLENRFTGWVDVDLTEKGEAEARRAGELMKAETFKPVRAFTSVQTRAIRTLNIALHALDRLWVPVTKDYRLNERHYGGLTGLDKAETAVKHGEDQVKIWRRSYDTPPPPLDDPSPFPSLTDERYAGIEVPKTESLKLTLDRVAPYWQSTIVPAISEGDLLIAAHGNSLRALVKLLFAVGDDEITSVEIPTGNPLLVELNNQMRASSAKYLDDSRAQALPKI

SEQ ID NO: 20523 - protein, 233 aa, Yarrowia lipolytica CLIB122
MPKSKRNKVIALTKVEKKTREDKEVIVDEIHNYLDEHKYCFVFSVEGMRNTFFKDLRADWKGSRIFFGRTKIMAKALGKSEEDEYKAGLGALSEYMSGDVGLLLTDEEPQVVKDYFESFVREDYARAGQVSTVTFTIPAGVVHTTGGKIPAEDDVPVVHSMEPTLRSLGMPTQLKAGKVELFAPYEVCKTGQTLDSRQTRLLKHFGVTSSFFKVHTVAYYDSEKEEVKPFISA

SEQ ID NO: 20524 - protein, 161 aa, Bacteroides fragilis NCTC 9343
MKKSILIPFLFMGLLAFASCKGTSENKSTTATDTVQAEKPQSGTIHLTRAEFLKKIADYENHSKEWKYLGDKPAIVDFYADWCGPCKMVAPILEELSKEYAGKIYIYKVNVDKEPELARDFGIQSIPTIWFVPMKGEPQVNMGALSKEQLKGYIDKVLLKQ

SEQ ID NO: 20525 - protein, 377 aa, Trifolium pratense
MADAEDIQPLVCDNGTGMVKAGFAGDDAPRAVFPSIVGRPRHTGVMVGMGQKDAYVGDEAQSKRGILTLKYPIEHGIVSNWDDMEKIWHHTFYNELRVAPEEHPVLLTEAPLNPKANREKMTQIMFETFNAPAMYVAIQAVLSLYASGRTTGIVLDSGDGVSHTVPIYEGYALPHAILRLDLAGRDLTESLMKILTERGYMFTTSAEREIVRDIKEKLAYVAVDYEQELETAKSSSSIEKNYELPDGQVITIGAERFRCPEVLFQPSMIGMEAAGIHETTYNSIMKCDVDIRKDLYGNIVLSGGSTMFPGIADRMSKEITALAPSSMKIKVVAPPERKYSVWIGGSILASLSTFQQMWISKGEYDESGPSIVHRKCF

SEQ ID NO: 20526 - protein, 420 aa, Streptococcus agalactiae A909
MSKEAILNFLQAKGEPTWLQELRLKAFEKIEELELPVIERVKFHRWNLGDGTILENDYTANIPDFTELGNNPKLVQIGTQTVLEQVPMELIEKGVVFTDFYSALEEIPEVIERYFGKARPFEEDRLAAYHTAYFNSGAVLYIPDNVEITQPIEGLFYQDSQSKVPFNKHILLIVGKNAKVSYLERFESIGDGTERTSANISVEVIAQAGSQIKFASIDRLGENVTTFISRRGRHSSDATIDWALGVMNEGNVVADFDSDLIGDGSHANLKVVAASSGRQVQGIDTRVTNYGCNSVGHILQHGVILERGTLTFNGIGHVIKGAKGADAQQESRVLMLSDKARSDANPILLIDENDVTAGHAASIGQVDPEDLYYLMSRGLNQKTAEQLVIRGFLGTVIAEIPVKEVRDEMIAVIDTKLEKR

SEQ ID NO: 20527 - protein, 415 aa, Dehalococcoides sp. CBDB1
MGKIFIIDVTNRDGVQTARLGLSKLEKTLINIYLDEMGIFQSEFGFPTTKHERGYVEANLELAKMGVIKNLRLEGWIRAIVADVDLAFRRAPSLKHLNLSISTSEQMINGKFQGRKVFKDIIEDMTIAVNAAYAKGAETVGVNAEDASRTSIVNLIEFGKAAKEVGATRLRYCDTLGYDNPFTIYETARTLAEKVGMPIEIHCHGDLGMAIGNSLAGAKGVIDGGQDVYVNTTVNGIGERAGNADLVAFLLAILKSKGFGEKYQLGHEVDLSKAWKIARFASYAFDVEIPINQPGVGRNCFAHASGIHADGVIKDSQNYELYGYEELGRGEALMVETGREICAGQYSGISGFRHVMGNMSVELPEDKDEANKILELVRYANVEAHKPLVEDELIFIAKYPEISRRLLTLTPLMND

SEQ ID NO: 20528 - protein, 83 aa, Glycine max
  misc_feature (10)..(10): Xaa can be any naturally occurring amino acid
RIAVHNDILXAYAVQKLFKNSSVYVEGDIEIRVYNDSINGEVKSIPEICVRRDGRVHLIKSGESIDKSHETPSDEFSFLLSVL

SEQ ID NO: 20529 - protein, 319 aa, Bacillus cereus ATCC 14579
MKRIGVLTSGGDSPGMNAAIRAVVRKAIFHDIEVYGIYHGYAGLISGHIEKLELGSVGDIIPRGGTKLYTARCLEFKDPEVRLKGIEQLKKHGIEGLVVIGGDGSYQGAKKLTEQGFPCVGVPGTIDNDIPGTDFTIGFDTALNTVIDAIDKIRDTATSHERTYVIEVMGRHAGDIALWAGLADGAETILIPEEEYDMDDVIARLKRGSERGKKHSIIVVAEGVGSAIDIGKHIEEATNFDTRVTVLGHVQRGGSPSAQDRVLASRLGARAVELLIAGKGGRCVGIQDNKLVDHDIIEALAQKHTIDKDMYQLSKELSI

SEQ ID NO: 20530 - protein, 361 aa, Thermosynechococcus elongatus BP-1
MATTYRIAVLAGDGIGPEITAVALDVLRAIAPRFGLDFDFVPALVGGCAIDAVGEPLPAATLATCRQSDAVLLAAIGGTQWDSLPRHLRPETGLLALRSGLGLFANLRPAKIFPQLLHASSLKPEVIAGVDLMVVRELTGGIYFGQPRGIFTTETGEQRGVNTMAYTATEIDRIGRVAFETARKRQGKLCSVDKANVLEVSQLWRDRLTALSAEYPDVELTHLYVDNAAMQLVRAPKQFDTIVTSNLFGDILSDIAAMLTGSIGMLPSASLGESGPALFEPVHGSAPDIAGQDKANPLAMVLSAAMMLRYGLNQPAAAQAIEEAITAVLDQGYRTGDLMSEGCTLVGCREMGNLLIKELSR

SEQ ID NO: 20531 - protein, 954 aa, Thermosynechococcus elongatus BP-1
MMVSSPPQLEINLETDAEFVARHIGITPSDLPKMLSLLGYGSLKELINAVIPPEIRLQRPLALSEGLSETAALQKLRTLAQQNQVWRSYIGMGYYNCITPSVIQRNILENPGWYTQYTPYQAEIAQGRLEALLNFQTLVSDLTGLAIANASLLDEATAAAEAMTLSFNACRQRGANRFLVAQDCHPQTLAVLRTRALPLGIQIVPIDPIAGELPWENAFGLLLQYPASDGAVRSPQALIAAAHERGLLVTVATDLLALTLLRPPGELGADIAVGSSQRFGVPLGYGGPHAAFFATREDFKRQLPGRLVGVSHDALGQRALRLALQTREQHIRREKATSNICTAQVLLAVVASMYAVYHGPDGLRQIAERIHQRTVRLAAGLEAAGYQLYYSEFFDTLRIGLGNLPVPVLKERAAAARINLRYFDDGSAGISLDETTTEKDVADLLALFGARPAEVEGGDRLPAALKRQSPYLQHPVFQDYHSEHALLRYIHRLQAKDLSLTTSMIPLGSCTMKLNATAEMLPISWPEFNQLHPFAPQEQAQGYQALFRELAAMLAEITGFDAISLQPNAGSQGEYAGLLVIRQYHHSRGESQRNVCLIPTSAHGTNPASAVMAGMQVVAVNCDAQGNIDVADLAAKAETYGDRLAALMITYPSTHGVFETGICQICDIIHRYGGQVYMDGANMNAQVGLCRPGDFGADVCHLNLHKTFCIPHGGGGPGVGPIGVKAHLAPFLPTTQVIPQGSETGPVTAAPWGSASILPISWMYITLMGGVGLTRATAIAILNANYIAKRLEPYYPVLYKGAHGLVAHECILDLRPLKKSAGIEVEDIAKRLMDYGFHAPTVSWPVPGTLMIEPTESETKAELDRFCEAMIAIRSEIAEIEAGVSDRQQNPLKNAPHPALMLATEPWPYPYSREVAAYPAPWLREYKFWPAVARIDNAYGDRHLVCTCSMPLTN

SEQ ID NO: 20532 - protein, 760 aa, Corynebacterium glutamicum ATCC 13032
MSLERNTQKSSMGVRSMSARLARSLTGNRVRTNPVLDPLLSIHRQFHPRADVQVLERAYDTAERLHDGVIRKSGDPYITHPLAVATIAAEIGMDTTTLVAALLHDTVEDTDYSLDDLTRDFGEEVARLVDGVTKLDKVALGAAAEAETIRKMIVAMSQDPRVLVIKVADRLHNMRTMRFLPPEKQAKKARQTLEVIAPLAHRLGMASVKWELEDLSFAILYPKKYEEIVRLVADRAPSRDRYLKEIIDQVTGGLRENNIAAGVLGRPKHYWSIYQKMIVRGRDFDDIFDLVGIRILVDNVNNCYAAIGVVHSLFNALPGRFKDYISAPRFGVYQSLHTTVMGPGGKPLEVQARTHDMHYNAEFGIAAHWRYKETKGSHSGEQAEVDQMAWMRQLLDWQKEAADPNEFLDSLRYDLTSKQIFVFTPKGDVVNLPVNSTPVDFAYAVHTEVGHRCIGAKINGKLVALETKLKSGDRVEVFTSKDQNAGPSRGWQEFVVSPRAKAKIRQWFAKERREEYLEAGRDALAAVIQRGGLPMHRLFTASSMKTVATELHYPDVDALYTAIGSGSVSAQHVVNRLMAIFGDEEDAEDALVARTPFSELVNSRATTESSTGILVEGSPDVMAKLAKCCMPVPGDEIFGFVTRGGGVSVHRTDCTNVEKLKEEPERIVSVSWASEGQGSVFSATLQLEALDRAGLLFELTRVINEQKVSVTAMNSHCSEDRVATVRFTFAVSDTKQLGSLMTQLRNAEGVFDVYRVTSGG

SEQ ID NO: 20533 - protein, 314 aa, Oryza sativa (japonica cultivar-group)
MWGLLRRSSSSGFSSSSTAEEVTAGIDGSGLVALITGASSGIGAETCRVLVMRGVYVVMGVRNLSAGARVRDEILKQVPSAKMEILNLDLSSMSSVRRFAEIFKALNLPLNILINNAGVCFVPFKLSEDDIELHFATNHIGHFLLTDLLIEKMKVTAIESGKEGRVVIVASVSYSLSYPGGICFDKINDESGYNRFLAYGQSKLANILHSNLLSSHLKEQDAKVIVNSLHPGAVATNILHHWCPLYGAIRAIGKYFVKGVEQGAATVCYVALHPQVAGVTGKYFSDCNITELKSHALDMDLAKRLWDFSLSQIR

SEQ ID NO: 20534 - protein, 663 aa, Brassica oleracea
MASSDALLPISAREEDPLLSDGSRCDPNAETHRRRRPVKGLLAVSFGLLFIAFYVVLIATHDGSSRSNDVKIESDETATTTSRARLAGVSEKSNGQLWKLSGERNTVSFAWNNSVLSWQRTAFHFQPEQNWMNDPNGPLFYKGWYHFFYQYNPNAAVWGDIVWGHAVSKDLIHWVHLPIAMVADQWYDANGVWTGSATFLDDGSLVMLYTGSTDKSVQVQNLAYPEDLNDPLLLKWVKYSGNPVLVPPPGILPKDFRDPTTAWKTSDGKWRITIGSKINKTGISLVYDTIDFKTYEKHDTLLHKVPNTGMWECVDFYPVSKTAVNGLDTSVNGPNVKHIVKASMDDTRFDHYAVGTYFDSNGTWIPDDPTIDVGMSASLRYDYGKFYASKTFYDQNKGRRILWSWIGESDSEAADVQKGWSSLQGIPRTVVLDTKTGKNLVQWPVEEIKSLRLSSKQFDMEVGPGSVVPVDVDSAAQLDIEAEFEINKESLDKILGDASVVVEAEEFSCQKSGGASVRGALGPFGFSVLADKSLSEQTPVYFYVAKGKDSKLKTFFCTDTSRSTFANDVVKPIYGSSVPVLKGEKLTMRILVDHSIVEGFAQAGRTCISSRVYPTKAIYGAAKLFVFNNAIDATITASFKVWQMNSAFIHPYSEEAVRALSST

SEQ ID NO: 20535 - protein, 219 aa, uncultured bacterium
NSRLCMSSAVAGYTRSLGSDGPPCSYEDLDHCSVAFLIGTNMAECHPVLFQRLLKRKRKNPGSVNIIVVDPRRTDTAKAADIHLPIAPGSDLALLHGIAHLVLRENGQDPAFIDDHTENYDAFFDVAARWTPRRAARFCNIPEKRLREVAALFHRREKVLSLWSMGVNQRREGTAVVQGLINLHLLTGQIGKQGAGPFSLTGQPNAMGGREAGGLAHLL

SEQ ID NO: 20536 - protein, 258 aa, Oryza sativa (japonica cultivar-group)
MRGLHVVMGVRNSSAGARVRDEIVRQLPAAKIEMLDLDLSLMSSVRRFAENFNALNLPLNILVNNAGIAFVPFKLSEEGIELHFSTNHLGHFLLTDLLLEKMKVTAIESGIEGRVVIVASNSYKHPYREGIRFDKINDESGYYFLTQRILLFTFVYLFNRSKEQDAKVTVNSLHPGAVVTNIMRHWYFVNGMLSTLGKFFVKGVEQGAATVCYVALHPQVAGVTGKYFVDCNVTELKSHALDMGLAKRLWDFSLNLIH

SEQ ID NO: 20537 - protein, 435 aa, Solibacter usitatus Ellin6076
MTNRRQLGLFDATMIVMGGIVGSGIFMNPSVVARQVHTPFLILGVWLAGGALAILGAFIWAELATRLPGAGGQYLYLREAYDPAVAFVYGWVLLLVTQTGGMAAVAVTFARYYREISGVAWSDSAIAAAVLLGLTAINCMGARAGSNVQSALMLMKTGAIAVLVIAGIALGGGTIHPLPLLDRPVSLGLLGALGAGMIPVAFAYGGWQTATFVAGEMRNPGRDLSRGLVAGVTGVVVLYLAVNVVCLKVLRPEGLAATRTPASAVMRAAMGDRGAWWIALGIAISTLGFLSQGMLTAPRVYNAMARDGLFFERVGRLSPRTGAPVTAIVLQGIASTVIAFSGKYEQILNYEVSVDFIAFALAGGALFLFRREGRGDQQGGIYRAPGHPYTTALFVAACVAIVASTVITDPLNSARGWGIMLTGVPVYLYWRRKAQ

SEQ ID NO: 20538 - protein, 662 aa, Brassica oleracea
MAKSDALLPISAREEDPLLSDGSRSDPNAETHGRRRPVKGLLAVSFGLFFIAFYVALIATHDGSRSNDVKIESDGTATKASRAHLAGVSEKSNDQLWKLSGDRNTVAFSWNNSMLSWQRTAFHFQPEQNWMNDPNGPLFYKGWYHFFYQYNPNAAVWGDIVWGHAVSKDLIHWVHLPLAMAADQWYDANGVWTGSATFLEDGSIVMLYTGSTDKSVQVQNLAYPEDLNDPLLLKWVKFPGNPVLVPPPGILPKDFRDPTTAWKTSAGKWRITIGSKINRTGISLVYDTTDFKTYEKLETLLHKVPNTGMWECVDFYPVSKTLVKGLDTSVNGPDVKHIVKASMDDTRIDHYAIGTYFDSNGTWTPDDPTIDVGISTSLRYDYGKFYASKTFYDQNKGRRILWGWIGESDSESADVQKGWSSLQGIPRTVVLDTKTGKNLVQWPVEEVKSLRLSSKKFDMEVGPGSLVHIDVGSAAQLDIEAEFEIKKESLEKILGDASAAAEAEEFSCQKSGGSTVRGALGPFGFSVLAHESLSEKTPVYFYVAKGKDSKLITFFCTDSSRSSFANDVVKPIYGSSVPVLKGEKLTMRILVDHSIVEAFGQGGRTCITSRVYPTKAIYGAAKLFLFNNAIDATITASFKVWQMNSAFIQPYSEEAVRALSRT

SEQ ID NO: 20539 - protein, 138 aa, Pyrococcus horikoshii OT3
MGDKTKVQVSKLKPGRYIIIDDEPCRIVNITVSSPGKHGSAKARIEAVGIFDGKVRSIVKPTSAEVDVPIIDKKTAQVIAITPDTVQIMDMETYETFEVPIDTGVADEIRDQLKEGINVEYWETLGRIKIMRIKGEGE

SEQ ID NO: 20540 - protein, 141 aa, Triticum aestivum
  misc_feature (29)..(29): Xaa can be any naturally occurring amino acid
  misc_feature (47)..(47): Xaa can be any naturally occurring amino acid
  misc_feature (130)..(130): Xaa can be any naturally occurring amino acid
MRTQTELERAHARWQASMITSPIVAPTKXPSLSRRGSSFAVVCSGGXKKIKVDKPLGLGGGLTVDIDANGRKVGKKGVYQFVDKYGANVDGYSPIYTPEEWSESGDRYAGGTTGLLIWAVTLAGLLGGGXLLVYNTSALAG

SEQ ID NO: 20541 - protein, 515 aa, Burkholderia thailandensis E264
MTDKLIIFDTTLRDGEQSPGASMTKEEKIRIAKQLERMKVDVIEAGFAASSNGDFDAIQTIASQVKDSTICSLARANDKDIQRAADALKPANSFRIHTFIATSPLHMEKKLRMTPDQVYEQARLAVRFARKFTDNIEFSPEDGSRSDMDFLCRVLEAVIAEGATTINIADTVGYGVPELYGNLVKTLRERIPNSDKAIFSVHCHNDLGMAVANSLAGVKIGGARQVECTINGLGERAGNTSLEEIVMAVRTRKDYFGLDLGIDTTQIVPASKLVSQITGFVVQPNKAVVGANAFAHASGIHQDGVLKARDTYEIMRAEDVGWTANKIVLGKLSGRNAFKQRLQELGVSLDSEAELNAAFARFKDLADRKAEIFDEDIIAIVTEEESALAQEHEHYKFVSLAQRSETGERPQAKVVFAVDGDEVAGEASGNGPVDATFNAIETEVGSGAELLLYSVNAITTGTQAQGEVTVRLSRSGRIVNGVGTDPDIVAASAKAYIAALNKLYSNADKLNPQRA

SEQ ID NO: 20542 - protein, 446 aa, Pyrococcus horikoshii OT3
MSETLTLSDAKSIIENQIEELAKRNKEPEWMTKIRYKALEEFMKAPLNDPVIDEETLLNFIAKPEIEGIPEKVESLDDLPPEMKDLLDRLGINEVEQKYIAGLAVQTDTGVIYNQFLQEWAKKGLIVLPTEEAVRRYPDIMKEHFLKLFKAGESKLTAYHIAIWNGGIFLYVKENLKVPFPLHLFFLIQESSLAQAPHITIIAEKNSEVHLIEGCTAPILVRHSLHLDMTEAYLHENAKVRLTVLQNWPEYVHTRPMTRAKVGRNAEFINTTVSLGAGKSNIANPKYWVGENGYVELNGVILGQKDWYIDLGGEMHLQGEGGRGINASKSVIMDESTVITRGKIVAEAKKTKGHISCDALLLSDKARMETYPGLVSLVDEAELSHEAAIGKIKEEELFYLMSRGLSEEKATQLIVKGFVEPMLKDIPIEFVVEIKKIIELAVSGGF

SEQ ID NO: 20543 - protein, 178 aa, Prunus dulcis
DQGHCGSCWTFSTTGALEAAYVQAFGKQISLSEQQLVDCAGAFNNFGCHGGLPSQAFEYIKYNGGLDTEAAYPYVGTDGACKFSAENVGAQVLDSVNITLGDEQELKHAVAFVRPVSVAFQVVKSFRFYKSGVYTSDTCGSSPMDVNHAVLAVGYGEEGGVPFWLIKNSWGESWGDNG

SEQ ID NO: 20544 - protein, 309 aa, Solibacter usitatus Ellin6076
MIVTLTINPTIDRVISVDRLAFEDRAYINSTSEKAGGRGINASSVIHCFGGETMAVLISGGEAGKRLEEHLKTDGLAFHMVPIEHEIRTNLTITDRHGLTVNLNEKGPEVSKAEVERVERTVKELLDRASWLMICGSIPPGVPSSFYGRLISTARKKKVKTLLHADGESLRLGIEERPTLATPNHQEAERLLGRNLLTRTHYLEAAERIRTMGPESVVLSLGSRGAIGAFRDGVVEALPPRIDAVCPIGAGDALSAAYTWSMDRKNNSLEALRWGVAAGTASARLPGMNFANLQQTQEMVKQVEVRRAE

SEQ ID NO: 20545 - protein, 308 aa, Silicibacter pomeroyi DSS-3
MLLLRIAQKQAVTKRISAFTLVAAEGGPLPDHGAGAHIEVQTAAGPRAYSLIDWPERQPGAWQIAVQREDDGDGGSRAMHALNPGDTIEATEPKNDFELRPGDMPVALLAGGIGVTPLISMATELAASGRPFVFHHAGRSAGDMAYVEQLATIFGDRYSPHFDDTAPLDLGALMAGLSGHALYICGPKGMIEAARAAAEAAGLTDIHVELFTNAAHAAGDSAFEVEIASSGQVITVAPDQTIIEALEAAGLDPLYDCQRGDCGICQTEVIAGTPDHRDVVLSQAERDSGKVMQICVSRARSTRLVLDL

SEQ ID NO: 20546 - protein, 585 aa, Arabidopsis thaliana
MTKEVCSNIGLWLLLTLLIGNYVVNLEASHHVYKRLTQSTNTKSPSVNQPYRTGFHFQPPKNWMNADPNGPMIYKGIYHLFYQWNPKGAVWGNIVWAHSTSTDLINWDPHPPAIFPSAPFDINGCWSGSATILPNGKPVILYTGIDPKNQQVQNIAEPKNLSDPYLREWKKSPLNPLMAPDAVNGINASSFRDPTTAWLGQDKKWRVIIGSKIHRRGLAITYTSKDFLKWEKSPEPLHYDDGSGMWECPDFFPVTRFGSNGVETSSFGEPNEILKHVLKISVDDTKHDYYTIGTYDRVKDKFVPDNGFKMDGTAPRYDYGKYYASKTFFDSAKNRRILWGWTNESSSVEDDVEKGWSGIQTIPRKIWLDRSGKQLIQWPVREVERLRTKQVKNLRNKVLKSGSRLEVYGVTAAQADVEVLFKVRDLEKADVIEPSWTDPQLICSKMNVSVKSGLGPFGLMVLASKNLEEYTSVYFRIFKARQNSNKYVVLMCSDQSRSSLKEDNDKTTYGAFVDINPHQPLSLRALIDHSVVESFGGKGRACITSRVYPKLAIGKSSHLFAFNYGYQSVDVLNLNAWSMNSAQIS

SEQ ID NO: 20547 - protein, 125 aa, Gibberella zeae PH-1
MVSAKKHVPIRFERHQHDRFMRVSPSWRKPKGIDSRVRRRFRGTIAMPSIGYGSNKKTRYMAPSGFKAFIVSNKSDLELLLMHNKTHAAEIAHNVSSRKRVDIIARAKQLGVKVTNPKAKVTTEV

SEQ ID NO: 20548 - protein, 346 aa, Dictyoglomus thermophilum
MSKMRIGVLTGGGDCPGLNPAIRGIVMRALDYGDEVIGLKYGWAGLLKADTMPLSLEMVEDILEIGGTILGSSRTNPFKKEEDVQKCVENFKKLNLDALIAIGGEDTLGVASKFSKLGLPMIGVPKTIDKDLEETDYTLGFDTAVEVVVDAIKRLRDTARSHARVIVVEIMGRHAGWLALYGGLAGGADYILIPEVEPNLEDLYNHIRKLYARGRNHAVVAIAEGVQLPGFTYQKGQEGMVDAFGHIRLGGVGNVLAEEIQKNLGIETRAVILSHLQRGGSPSIRDRIMGLLLGKKAVDLVHEGKSGLFVAVKGNELVPVDITLIEGKTKNVDPAFYESVKTFFNK

SEQ ID NO: 20549 - protein, 307 aa, Staphylococcus epidermidis RP62A
MTKTIGLLVMAYGTPYKESDIEPYYTDIRRGKKPTEEELQDLKDRYEFIGGLSPLAGTTDRQAEALLEALNKEQDDVNFKLYLGLKHISPYIEEAVEQMHNDGIKEAVTVVLAPHYSSFSVGSYDQRAQEKADEYGIQLTHIKHYYQQPKFIKYWTEKINETLEQIPNQEHDETVLVVSAHSLPKGLIERNNDPYPHELHETAEILKQESNIIHVAEGWQSEGNTGTPWLGPDVQDLTRDLYKEHQFKHFIYTPVGFVCEHLEVLYDNDYECKVVCDDIGVNYYRPEMPNTHPLFIGAIVDEIQSHI

SEQ ID NO: 20550 - protein, 541 aa, Hordeum vulgare
LTRSPVITNHLFRHEQGEAFAASGYARASGRVGVCVATSGPGATNLVSALADALLDSIPMVAITGQVPRRMIGTDAFQETPIVEVTRSITKHNYLVLDVEDIPRVIQEAFFLASSGRPGPVLVDIPKDIQQQMAVPVWDTPMSLPGYIARLPKPPSTESLEQVLRLVGEARRPILYVGGGCAASGEELRRFVELTGIPVTTTLMGLGNFPSDDPLSLRMLGMHGTVYANYAVDKADLLLAFGVRFDDRVTGKIEAFASRSKIVHIDIDPAEIGKNKQPHVSICADVKLALQGLNGLLSGSKAQQGLDFGPWHKELDQQKREFPLGYKTFGEAIPPQYAIQVLDELTKGEAIIATGVGQHQMWAAQYYTYKRPRQWLSSSGLGAMGFGLPAAAGASVANPGVTVVDIDGDGSFLMNIQELALIRIENLPVKVMILNNQHLGMVVQWEDRFYKANRAHTYLGNPENESEIYPDFVTIAKGFNVPAVRVTKKSEVSAAIKKMLETPGPYLLDIIVPHQEHVLPMIPSGGAFKDMIMEGDGRTSY

SEQ ID NO: 20551 - protein, 456 aa, Securigera parviflora
MCGILAVLGCSDDSQAKRVRVLELSRRLKHRGPDWSGLHQHGDCFLAHQRLAIVDPASGDQPLFNEDQSIIVTVNGEIYNHEELRKQMPNHKFRTGSDCDVIAHLYEEHGENFVDMLDGIFSFGLLDTRDNSFIVARDAIGVTSLYIGWGLDGSVWIASELKGLNDDCEHFETFPPGHLYSSKEREFRRWYNPPWFSESIPSAPYDPLALRQAFEKAVVKRLMTDVPFGVLLSGGLDSSLVASITARHLADTKAAKQWGAKLHSFCVGLEGSPDLKAGKEVADYLGTVHHEFQYTVQDGIDALEDVIYHIETYDVTTIRASTPMFLMSRKIKSLGVKWVISGEGSDEIFGGYLYFHKAPNKEELHKETCRKIKALHKYDCLRANKSTFAWGLEARVPFLDKEFINVAMNIDPENKMIKLDEGRIEKWILRKAFDDEENPYLPKHILYRQKEQFSDG

SEQ ID NO: 20552 - protein, 888 aa, Vibrio vulnificus YJ016
MDVIFLRGRMTMNEKYAALKSNVSMLGHLLGNTIQEAHGDEILEKVETIRKLSKSARAGNQADRNNLIEEIKSLPDEQLTPVARAFNQFLNLTNIAEQYHTISRHCDAHVCEPDAINTLFAKLGQNGINKLDTAQAIRELNIELVLTAHPTEITRRTMINKLVKINECLSKLELSDLSYKERHKTEKRLEQLIAQSWHSDVIRKQRPTPLDEAKWGFAVVENSLWEAVPDFLRELDEKLKDYLDQGLPIDARPVHFSSWMGGDRDGNPFVTHTVTREVLLLSRWKAADLYLKDINELISELSMTKCNDTVRQLAGEDEHEPYRAILKQLRTLLSDTKEILDAKINGQKLAVKAPLQSVEQLWDPLFACYQSLRECGMSMIAEGSLLDTLRRVKAFGVHLVRLDIRQESTRHADVLSELTRYLGIGDYNHWSEQDKIAFLTNELASKRPLLPRDWQPSEPVKEVLDTCKIIAAQSREAFGAYVISMAKTASDVLAVHLLLQESGCPYRMDVCPLFETLDDLNNAEAVIKQLMSIDLYRGFIQNHQMVMIGYSDSAKDAGVMAAGWAQYHAMEALVNVAEQEGIELTLFHGRGGTIGRGGAPAHAALLSQPPKSLKGGLRVTEQGEMIRFKLGLPDVAVNSFNMYASAILEANLLPPPEPKQEWRDLMEVLSQVSCEAYRSVVRGEPDFVPYFRQATPELELGKLPLGSRPAKRNPNGGVESLRAIPWIFSWSQNRLLLPAWLGAGEAIQYSIDKGHQALLEEMCREWPFFSTRLGMLEMVYLKCNSEISRYYDERLADKSLLPLGDRLRDQLQSDIKAVLNVENNENLMQSDPWGQESIRLRNIYIEPLNMLQAELLYRTRQAGVVSEELEEALMVTIAGIAAGMRNTG

SEQ ID NO: 20553 - protein, 162 aa, Parasponia andersonii
MSSSEVNKVFTEEQEALVVKAWAVMKKNSAELGLQFFLKIFEIAPSAKNLFSYLKDSPVPLEQNPKLKPHATTVFVMTCESAVQLRKAGKVTVKESDLKRIGAIHFKTGVVNEHFEVTRFALLETIKEAVPEMWSPEMKNAWGVAYDQLVAAIKFEMKPSST

SEQ ID NO: 20554 - protein, 355 aa, Halobacterium sp. NRC-1
MTRGEARRPPQEFDRVLSSMCTTPHPAAREAAQAFLATNPGDPETYPAVAERERDAVALLGEIVGLSSPHGYIAAGGTEANLQAVRAARNRADADAVNVVAPASAHFSFQKAADVLGVELRLAPTDGDHRADVAAVADLVDGDTAVVVGVAGTTEYGRVDPIPALADIAAGVDANLHVDAAWGGFVLPFTDHDWSFADAPVNTMAIDPHKMGQAPVPAGGFLARDPETLDALAIETPYLESDTQPTLGGTRSGAGVAGALASLRALWPDGYREQYERTQGNAEYLAAELAARGYDVVDPELPLVAADMPDAEFQALREEGWRISRTASDALRVVCMPHVTREMLAAFLDDVDALA

SEQ ID NO: 20555 - protein, 432 aa, Picrophilus torridus DSM 9790
MSFDVSWLNTGNNAWMLTAATLVGLQSIPGLALYYAGMTKRKYMVNAMMMALYAFSAVLVVWVIAGYSFGFGTVPLLKIDGYYIFSMPVPVGSASFIAGQAIVGPERIALSIPNSTVIFFQFVFAAITPVLLMGGILERMNFKAWMVFVPVWSFLVYSPVAYWLFAGGWLNQLGAVDFSGGYVIHLDAGVGALAAALAIGPRIKEDMNLKANNLGLVMLGLGLIWLGWDGFNGGDPYGSGIDAAIAIINTNVATAVSMITWMLMDMKFFKKASLIGASVGAIAGLVGITPAAGYVNIYGAMVIGIATGIIPWIALYKIEPHFKIDDALGVFSSHAVAGIVGGILTGVLADPFITQYIDPGLRGAIYGDFYQLGIQALAAAVVFAYTFAMTIAILKIIGLFIPLREKEENLKLGDLAIHGEIGFEDSYQAVRK

SEQ ID NO: 20556 - protein, 480 aa, Synechocystis sp. PCC 6803
MSSTTVKNLVNQPYKYGFVTNIEADAIPRGLSEDVVRLISAKKNEPEFMLDFRLRAYRHWLTMAEPTWPAVHYPPIDYQDIIYYSAPKQSKKKLESLDEVDPALLETFEKLGIPLSEQKRLSNVAVDAIFDSVSIGTTFKEKLAEDGVIFCSISEALQEHPDLVQKYLGSVVPTADNFFAALNSAVFSDGSFVFIPKGVKCPMELSTYFRINNGDTGQFERTLIIAEEGASVSYLEGCTAPMYDTNQLHAAVVELVALDNADIKYSTVQNWYAGDENGKGGIYNFVTKRGLCKGVNSKISWTQVETGSAITWKYPSCVLVGDNSVGEFYSIALTNNKQQADTGTKMIHIGKNTRSIIISKGISAGNSANSYRGLVKMGPKAQGARNYSQCDSMLIGDRAAANTFPYIQVDNNTAKVEHEASTSKIGEDQLFYFAQRGISEEDAVSMLVSGFCKDVLNELPMEFAAEADKLLSLKLEGTVG

SEQ ID NO: 20557 - protein, 160 aa, Debaryomyces hansenii CBS767
MSFYDLSPLDTNDKPFPFEELKGKVVLVVNVASKCGFTPQYKELEELNKKYQDKGLQIIGFPCNQFGGQEPGSSEEIASFCSLNYGVSFPVLKKVDVNGDKTDPVYKYLKGEKLGLLGLNRIKWNFEKFLIDKNGKVIERYSSLTKPASLLSTIEELLKK

SEQ ID NO: 20558 - protein, 180 aa, Triticum aestivum
  misc_feature (10)..(10): Xaa can be any naturally occurring amino acid
  misc_feature (15)..(15): Xaa can be any naturally occurring amino acid
  misc_feature (20)..(20): Xaa can be any naturally occurring amino acid
  misc_feature (22)..(22): Xaa can be any naturally occurring amino acid
  misc_feature (32)..(32): Xaa can be any naturally occurring amino acid
  misc_feature (35)..(35): Xaa can be any naturally occurring amino acid
  misc_feature (63)..(63): Xaa can be any naturally occurring amino acid
  misc_feature (100)..(100): Xaa can be any naturally occurring amino acid
  misc_feature (137)..(138): Xaa can be any naturally occurring amino acid
  misc_feature (155)..(155): Xaa can be any naturally occurring amino acid
LVLAGFLGFXILPEXGLKSXIXCHRTLRSFRXVIXQVWGHSRSGKLILVQRKGLALVSNAKLXIADIIRDEAETHFESRESIPGHVQQGGVPSPMDRTRXVRLAIKCMEHLEKYEGCSREKILNDPLGSSVIGIKGXXSVVFSSMKDVEEKETDXWPNRRPRNEHWLGLTKIVDTLSWKI

SEQ ID NO: 20559 - protein, 285 aa, Burkholderia thailandensis E264
MTATLIDGNALSKTLRAQAAKRAAALAARGHRPGLAVILVGDNPASEVYVRNKIKACEDNGFFSLKDRYPATLSEPELLARIGELNRDPKIHGILVQLPLPAHIDSHKVIEAIAPEKDVDGFHVANAGALLTGKPLFRPCTPYGVMKMFEAYKIPLQGANAVVIGRSNIVGKPMALLLLEAGATVTICHSKTRDLAAHTREADIVVAAVGKRNVLTADMVKPGATVIDVGMNRNDEGKLCGDVDFAGVSQVAGHITPVPGGVGPMTITMLLVNTIEAAERAAAAA

SEQ ID NO: 20560 - protein, 268 aa, Triticum aestivum
  misc_feature (205)..(205): Xaa can be any naturally occurring amino acid
  misc_feature (240)..(240): Xaa can be any naturally occurring amino acid
  misc_feature (243)..(243): Xaa can be any naturally occurring amino acid
  misc_feature (245)..(245): Xaa can be any naturally occurring amino acid
MARLSLAACAVAFHLCLLISSSASLRWLSDKSAAVTTPGHGLGHVRTRSAYHFQPAKNWQNDPNGPMYHNGLYHFFYQYNPDGVTWGNGNLSWGHSVSVDLVNWFALDAALQPSRSFDANGCWSGSATILPDGSPVMLYTGIDARGDQVQNVAFPKNASDPLLVEWVKPEYNPVIPVPADIKRDDFRDPSTAWLGADGLGRIAVXARVHDVGGPPLFSRSKDFLRWERNADPLYLAHAAXGMXEXAPDLFPGSDPGMEVGLPASGAGA

SEQ ID NO: 20561 - protein, 405 aa, Bacillus clausii KSM-K16
MKIIIQKFGGTSVKTDESRLQAVRHVQKAVNDGYKVVVVVSAMGRKGDPYATDTLLSLVSKSRITKREQDLLVSCGETISAVVFSDLLNAHGVQATAMNGAKAGFRTNEEFGNAKIKEMKCEHLLKKLETEDVVVVAGFQGQSKSGDVTTLGRGASDTSATALGAALHAEWVDIFTDVEGVMTADPRIVSDARALEAMSYNEICNMAYQGAKVIHPRAVEIAMQAKIPIRIRSTYSDNEGTLVTALGASHSMDVNERMITGIAHVANVTQIKVAAKEGQLDLQENVFKSMAQAKISVDFINISPSGVTYTVSDEAADKAKQVLEHLGYTPELRRGCAKVSAVGAGMSGVPGVAAKIVSALSGENVQILQSADSHTTIWVLVKNEDMKKAVNALHKMFQLSEATTV

SEQ ID NO: 20562 - protein, 318 aa, Oceanospirillum sp. MED92
MSEVQHHELIILGSGPAGYTAAVYAARANLNPVVITGMQAGGQLTTTTEVDNWPGDVDGVQGPELMQRMQQHAERFDTQIIFDHINETDLQNRPFRLKGDMGEYTCDALIICTGASAQYLGLPSEEEFAGKGVSACATCDGFFYRGQKVAVVGGGNTAVEEALYLSNIAEEVTLIHRRDSLRSEKILQDKILERAENGNINIIWNHTLEEVLGDDMGVSGLRLKSTTDGEEQQLDVAGVFIAIGHKPNTDIFQGQLDMTDGYLKIQSGLEGNATQTSVEGVYAAGDVCDHIYRQAITSAGFGCMAALDAERYLDDLKK

SEQ ID NO: 20563 - protein, 375 aa, Picrophilus torridus DSM 9790
MIGLLDSTLREGEQTPGVSFSMDARVEIARALSDAGVSMIEAGHPAVSETVLKSIKSIMELKSSGIIRSTIVAHSRAVRSDIDVAASLNIDMIAIFYGISDLHLKYKTLKTREDAIRIIVDSIDYARSYGLNVRFTAEDATRTDYNYLLDVARAARDAGAKRISIADTVGILNPDTSYKLFKMIIKDVKNVEFDIHAHNDLGMAVANSIAAYRAGATIIHSTVNGLGERSGITPTQIIGPALKYHYNEAVIDLKRLYSLSNLVEKYSGVMVPYNYPVTGKNAFTHKSGVHIAGIINKPETYEFMDPCLFGNKRYYTISSYSGRHAVITRLQELGISLNDEHLKILMKMIKNKNRELNDDELYAMAESIKRSAVSM

SEQ ID NO: 20564 - protein, 414 aa, Bacillus clausii KSM-K16
MIKKETLDNGVRIIAEANEAIRSVAIGIWVKTGSRNESNEENGISHFIEHMLFKGTKTRSAKQIAEAFDRIGGQVNAFTAKEYTCYYAKVLDEHAALALDVLQDMFFDSIFDKTEIEREKKVVLEEIKMVEDTPDDLVHDLLSQAVFGRSSLANPILGTEDTLQTFSRQQISDYMKRFYAGERVVVSVCGHFDDALLEQIRQTFSRVKRAPEPFAVPTATFSPTVKYRQKDSEQAHLCLAYPGLEIGSNRSFGLILLNNALGGSMSSRLFQTIREEQGLCYSVFSYHSSYEQIGTLTIYAGTQMAQLPKLTEALAEVTKAVRAEGLSKKELENGKEQLKGSIMLGLESTSSRMTRNGKNELLLQEHKTLDELIADINAVSLEMVNDLASQLLRDTPAVSLVASSETMPSTIFSN

SEQ ID NO: 20565 - protein, 848 aa, Brassica oleracea
YHHSYTFSFLLVFLVLILFHPALSIYVNTLSSSESLTISSNRTLVSPGGVFELGFFKPLGRSRWYLGIWYKKVSQKTYAWVANRDSPLTNSIGTLKISGNNLVLLGQSNNTVWSTNITRGNARSPVIAELLPNGNFVMRYSNNKDPSGFLWQSFDFPTDTLLPEMKLGYDLKTGRNRFLTSWKGSDDPSSGNFVYKLDIRRGLPEFILINTFLNQRVETQRSGPWNGIEFSGIPEVQGLNYMVYNYTENSEEIAYSFHMTNQSIYSRLTLTEFTLDRFTWIPPSWGWSLFWTLPTDVCDPLYLCGSYSYCDLITSPNCNCIRGFVPKNPQQWDLRDGTQGCVRTTQMSCSGDGFLRLNNMNLPDTKTATVDRTIDVKKCEERCLSDCNCTSFAIADVRNGGLGCVFWTGELIAIRKFAVGGQDLYVRLDAADLDISSGEKRDRTGKIIGWSIGVSVMLILSVIVFCFWRRRQKQAKADATPIVGNKVLMNEVVLPRKKRDFSGEEEVENLELPLMEFEAVVTATEHFSDFNKVGKGGFGVVYKGRLVDGQEIAVKRLSEMSAQGTDEFMNEVRLIAKLQHYNLVRLLGCCVYEGEKILIYEYLENLSLDSHLFDETRSCMLNWQMRFDIINGIARGLLYLHQDSRFRIIHRDLKASNVLLDKDMTPKISDFGMARIFGRDETEADTRKVVGTYGYMSPEYAMNGTFSMKSDVFSFGVLLLEIISGKRNKGLCDSDSSLNLLGCVWRNWKEGQGLEIVDRVIIDSSSPMFRPREISRCLQIGLLCVQERVEDRPMMSSVVLMLGSEAALIPQPKQPGYCVSGSSLETYSRRDDENCTVNQITMSIIDAR

SEQ ID NO: 20566 - protein, 849 aa, Brassica oleracea var. acephala
YHHSYTFSFLLVFLVLILFHPALSIYVNTLSSSESLTISSNRTLVSHGGVFELGFFKPLGRSRWYLGIWYKKVSQKTYAWVANRDSPLSNSIGTLKISGNNLVLLGQSNNTVWSTNLTRENVRSPVIAELLPNGNFVMRYSSNKDSSGFLWQSFDFPTDTLLPEMKLGYDFKTGRNRFLTSWRSYDDPSSGKFTYELDIQRGLPEFILINRFLNQRVVMQRSGPWNGIEFNGIPEVQGLNYMVYNYTENSEEIAYTFHMTNQSIYSRLTVTDYALNRYTRIPPSWGWSMFWSLPTDVCDSLYFCGSYSYCDLNTSPYCNCIRGFVPKNRQRWDLRDGSHGCVRRTQMSCSGDGFLRLNNMKLPDTKTATVDRTTDVKKCEEKCLSDCNCTSFATADVRNGGLGCVFWTGDLVEIRKQAVVGQDLYVRLNAADLASGEKRDRTKKIIGWSIGVTVMLILSVIVFCFWRRRQKQAKADATPIVGNQVLMNEVVLPRKKINFSGEDEVENLELSLEFEAVVTATEHFSDFNKVGKGGFGVVYKGRLVDGQEIAVKRLSEMSAQGTDEFMNEVRLIAKLQHNNLVRLLGCCVYEGEKILIYEYLENLSLDSHLFDETRSCMLNWQMRFDIINGIARGLLYLHQDSRFRIIHRDLKASNVLLDKDMTPKISDFGMARIFGRDETEADTRKVVGTYGYMSPEYAMNGTFSMKSDVFSFGVLLLEIISGKRNKGFCDSDSNLNLLGCVWRNWKEGQGLEIVDRVIIDSSSPTFRPREILRCLQIGLLCVQERVEDRPMMSSVVLMLGSETALIPQPKQPGYCVSQSSLETYSSWSKLRDDENWTVNQITMSIIDAR

SEQ ID NO: 20567 - protein, 555 aa, Wolbachia endosymbiont of Drosophila ananassae
MSKIEEFRSFMHEINVDAFMLHTKDEYLNEYSEELTKLCGFTGTNGLLIVTKDNKCPFFTDGRYITQARNQLDRGNFQVYNIQEEDPREWIKANLTSTASLGYYLQYFTIEDIRKYENICKLIPCLAGKKSDYRKQAVVLHSIEHAGESSKDKCEKVAKSIDKEAEAVLLTDPNSISWLLNLRNENAKYTPCILGRAILYKSGNVDLFIQDKEHSTIEANLGNHINIFDISELENSLHKLNSIVMDPSTTPMSIMAVIKDKQVAEREDPCLIYKAAKNQTEIAGAINAHIRDGVAVTNFLYWLENNVGTELEAEEKILEYRKEQNLFKQLSFPTISAFNENGAIIHYRASSKTNKVIQKDGLYLIDSGGQYLDGTTDVTKTVAIGNPTDEQITHYTIVLKAHIAIASVIFPPGTTGGELDILARTHLWKFGMDYMHGTGHGVGSYLSVHEGPQAISKGNKVKLTPGMILSNEPGYYIPGEYGIRIENLMYVDKHKNGFLGFKQLTSIPYDRRLISVQMLTKDEIEWINGYHQFVYKNLENSVKDKEWLKKVCDPL

SEQ ID NO: 20568 - protein, 278 aa, Triticum aestivum
GNWADLACSRPPLRGISTRRPGQVYQRRAQALLHHLRSLFPHMDPQLLERAPEASGDDLDFAIRSLNDLRLESAEAIFSAAVGEPENGLSTALKLTTEGNGQLDAISGNPPATDNCQTNHHSSEWVELFVREMMSASDINDARARASRALEVIEKSIMERTGAEAVQNLHKENTMLKEQLAIALRENAVLKRGVAIQHERQKEFDDKTQEVHNLKQLILQYQEQLKTLEINNYALRMHLQQAQQNSSMPTSAATTLITSAAACRSTIWESSQRVGCIA

SEQ ID NO: 20569 - protein, 83 aa, Triticum aestivum
SQVLEDSKVSGQLKSQVAEVKLEAAGEGACVAKLRVEYERLDGSGALSAEDQAALVAGYLDLLKMVEAYLVAHPAEYASLNQP

SEQ ID NO: 20570 - protein, 218 aa, Zea mays
LSLAEIEQYLQLWEVIESFQLQNSNDQHVWIFSNDGLYTSKSAYKALFIGAESFEPWKRIWKSWAAPKCKTFVWLAINNKCWTADRLKKRGLQHPEFCVLCDQEDETVQHILSNCVFTRQFWHKILTPIGLSSVSPKRRDSVFAEWWRKASTKIPKSKKKGFNSMIILGAWSIWKQRNRCVFEGARPCLNTLEDGFKDEMRLWVSAGAKNLRSLFDPG

SEQ ID NO: 20571 - protein, 219 aa, uncultured bacterium
NSRLCMSSAVAGYTRSLGSDGPPSCYEDLDHCSVAFLIGTNTAECHPVLFQRLLKRKKRNPGSITIVVVDPRRTDTAKAADIHLPIAPGSDLALLHGIAHLVLRENGQDTAFIDDHTENYHAFFDIAARWTPRRVARFCNIPEKRLRDVAQLFHRRERLLSLWSMGVNQRREGTAVVQGIINLHLLTGQIGKEGAGPFSLTGQPNAMGGREADGLSHLL

SEQ ID NO: 20572 - protein, 426 aa, Caulobacter crescentus CB15
MRRVVVTGIGLLTPLGQGVDITWKNILAGKSGANRISAFDPTDYSCQVACEVPRVDGRGGGGPDVEGSFDPDQTMSPRDQKRVDDFILYGVAAADEAIKDSGWVPETDEDKWRTGVILGSGIGGLSTIADTALELEAKGPRRVSPFFISSALINLISGQVSIKYGFKGPNHAVVTACATGAHAIGDAARLIKYGDADVMVAGGAEAAVCKVGIAGFQACRAVATAFNDTPEKASRPYDKDRDGFVMGEGAGVLVLEEYEHAKARGAKIYAEVAGYGLSGDAYHITAPSEDGEGGARALAAAVRDAGLKPSDINYVNAHGTSTMADGIEAKAVERFLGDHAKNVVMSSTKSMTGHLLGAAGAIEAAFSILAIRDQIAPPTINLDNPDVEVAMNLAPHKAVPMKIDVAVSNSFGFGGTNASVVFKKVS

SEQ ID NO: 20573 - protein, 625 aa, Oryza sativa
MASISGAAAPPSSSAACRLRLRRQLLLRPSHLRLRAPHSIADLSRSSSSSSEQQPSSTPAAPLASRPGQNGSTRGAVEKDPIKLWERYVEWLYQHKELGLFVDVSRMGFTEEFLRRMEPRMQRAFAAMRELEKGAIANPDEGRMVGHYWLRDPGLAPNSFLRTKIETTLDRILAFSQDVVSGKIKPPSSPAGRFTQILSIGIGGSALGPQFVSEALAPDNPPLKIRFIDNTDPAGIDHQIAQLGPELASTLVIVISKSGGTPETRNGLLEVQKAFRDAGLDFSKQGVAVTQENSLLDNTARIEGWLARFPMFDWVGGRTSEMSAVGLLPAALQGIDIKEMLVGAALMDEETRNTVVKENPAALLALCWYWASEGIGNKDMVVLPYKDSLLLLSRYLQQLVMESLGKEFDLDGNRVNQGLTVYGNKGSTDQHAYIQQLREGVHNFFVTFIEVLRDRPPGHDWELEPGVTCGDYLFGMLQGTRSALYSNDRESISVTVQEVTPRAVGALVALYERAVGIYASLVNINAYHQPGVEAGKKAAGEVLALQKRVLTVLNEASCKDPAEPLTLDQIAERCHCPEDIEMIYKIIQHMAANDRALIAEGSCGSPRSIKVYLGECNVDEDMLAA

SEQ ID NO: 20574 - protein, 615 aa, Legionella pneumophila str. Paris
MKSTDPIKIAVLPGDGIGIEVTEATLPVFEVLDVPAILSYGDIGWEFWKKEGTAIPSRTWQLIASSDTVLLGAITSKPQREAKQELSKALRKSNPYYVSPVIQLRQGLDLFANVRPCFSIDDQSKPFNFCIIRENSEGLYCGFDYFPLPKAIHNLLAESQHWQTIPADEASCALRLQSKPGLTRLFDFAFNHAMQTGMPRVTLADKPNVLRESGEFARKIFESTAQKYPKIQADILNVDAVALWLIKSPEKFGVIVAENMFGDILSDVGAGVMGGLGLAPSANIGDKGSYFEPVHGSGPRMKKNCANPSAMFLTISMLLNHFGYPDRAKKIVNAVMQVIKEKRYITYDLGGHSTTTDMANAVIERCARLEASCLSTDFNPVPKENIIESDAMGNLLQQLMHCNSAEISDALDSCGIEGGLLNIKPLSQGMKMVGPAYTIQYLPREKKEAVFHNAANYIDKVPKHSVIVIDNNGQTDCTVWGDLLTHTALRNNIMGTVVHGAVRDVESIRSTNYPVFCTGIYMCSGKNRVYKANEQCPLFINGVTINPGDIVFADDNGVLVIPNVLLHEVVNKAIAIRLTEERIKAAVASGSTLEQAREDYYYEQPWLGINKKREQ

SEQ ID NO: 20575 - protein, 219 aa, uncultured bacterium
NSRLCMSSAVAGYTRSLGSDGPPCSYEDLDHCSVAFLIGTNMAECHPVLFQRLLKRKRKNPGSVNIIVVDPRRTDTAKAADIHLPIAPGSDLALLHGIAHLVLRENGQDPAFIDDHTENYDAFFDVAARWTPRRVARFCNIPEKRLREVAALFHRREKVLSLWSMGVNQRREGTAVVQGLINLHLLTGQIGKQGAGPFSLTGQPNAMGGREAGGLAHLL

SEQ ID NO: 20576 - protein, 219 aa, uncultured bacterium
NSRLCMSSAVAGYTRSLGSDGPPCSYEDLDHCSVAFLIGTNMAECHPVLFQRLLKRKRKNPGSVNIIVVDPRRTDTAKAADIHLPIAPGSDLALLHGIAHLVLRENGQDPAFIDDHTENYDAFFDVAARWTPRRVARFCNIPEKRLREVAALFHRREKVLSLWSMGVNQRREGTAAVQGLINLHLLTGQIGKQGAGPFSLTGQPNAMGGREAGGLAHLL

SEQ ID NO: 20577 - protein, 567 aa, Zymomonas mobilis subsp. mobilis ZM4
MMVETFMSYQSQPAIPVKESRVTLLRNPLLNKGSAFSAEERKAFQLEGLVPAQIESINIQAERCYQQYKEQKTDLDRYIFLRALQDENETLFFHLVADHIADMMPILYTPTVGSACQNYSHLFRKSRGLFIAYPDRDKIGDILKQTEQENIKIIVVTDGERILGLGDLGVGGMGIPIGKLALYTACGGIDPATVLPIVLDVGTNNENLLNDPLYMGWHHKRITGDEYYSFVDRFVQAVMQQWPDVFLHFEDFAQKNALPLLKKYRDQYCCFNDDIQGTSAVALATLYSACKTRKTSIRDQRIIFLGAGSAGCGIAEQIVSAMVAEGLDEATARGQVYMVDRNGLITDDMQDIPDFQKKLAQPLSKLKNWKSQDQGFFLLDVVKQSKATVLIGVSGQKGLFTEEVIKTLASQCEAPFVMPLSNPTSHMEAIPEDILKWTEGKALVATGSPFSPVVINGKSFPIAQCNNAYIFPGIGLGVLAAKATRVTDNMMVAAAYALADTAPAAQNKGNAILPSFDDIEEVSYVIALAVAKAAVKDGVAEQKDETALLALIKGYYWHPEYRAYQLA

SEQ ID NO: 20578 - protein, 982 aa, Bordetella bronchiseptica RB50
MAAYNAPVSNCQFRLTHILPIPQRQGAPTDPFQMNAIRQQSDSAEPLRHDIRLLGRCLGEVIQACEGKRVYDTIETLRRTAVRFRRAGDPADDKLLQARVKQLRGNDPNSVARAFSYFLHLSNIAEDRDQNRRQRDRALAGAGPERGSLRQAIESLKAQGVNNARIRRLLSEACVMPVLTAHPTEVQRKSTLDVHREISSLLVQRERELTADELSELDLALIGQVATLWQTRMLRYTRLTVADEIENALSYYRSTFLNVIPRVYGDLARLLNREPVKPFTPPPPPLEPFLRMGSWIGGDRDGNPNVDAATLERALLRQATVLFEHYLQEVHALGAELSASTLLIEADPALLALADAGGDDSPHRRDEPYRRALIGIYARLAATARHLTGQELARRATVPAAPYDTPDALAADLAVIAASLSAHHGAPIARLRLSGLQQAVTVFGFHLATVDLRQSSDVHERVLAELFARAGDGIDGQAVDYLALDEAARVAVLRRELAHARPLASPWIAYSEETASELAVLRAAAAGRARYGRQAVLQSIVSHTETLSDLLEVLVLQKEAGLIAPPGETIAPGDGLMVVPLFETIPDLQRGPEIMAAWLDLPEVRQRVRLAQGDTQEVMLGYSDSNKDGGFLTSNWSLYQAERALVDVFSARSVRLRMFHGRGGSVGRGGGSSYDAILAQPPGTVAGQLRLTEQGEVIQSKYKDAEVGRWHLELLVAATLESSLAPQAAATSAEDAHMQQHAPAMSFMSELAQRTYRGLVYDTPGFADYFFAATPISEIAGLNIGSRPASRKKGQHIEDLRAIPWGFSWAQCRLMLTGWYGMGSAIEAYLETGAQGAPRSRRARLAQLREMASDWPAFRTLLSNMEMVLAKSDLAIAAGYAQLVPRRGLRERVFGAITAEHGRTLAMLRLLTRRELLADNPGLMASLRERFAYIDPLNYLQIELIKRHRAAQRRAGDDADIRVPRAIHLTINGIAAGLRNSG

SEQ ID NO: 20579 - protein, 296 aa, uncultured bacterium
NSRLCMSSAVSGYLQSFGSDGPPCCYDDLDLTDCAFLIGTNTAECHPIVFNRLRKHHKRNPQVKLIVVDPRFTETAQVADLHLAIRPGTDITLQNGIGHLLLKWGALDQSFIHQSTQGFADYTEVLRHYEPSIVAERCGITEADLETAARTWAESQSVLSLWSMGLNQSSEGTAKVCSLINLHLLTGQIGRPGAGPFSLTGQPNAMGGREAGGLAHILPGYRLVKNPQHRQEIEQFWSLPEGQISPSRGLTIGEMIPALEHNQVGLLWIAATNPAVSLPDLNRTKAALQRSPFTVY

SEQ ID NO: 20580 - protein, 356 aa, Arabidopsis thaliana
MGSTGNPNPWGTTYDSYRDCSQGVCSVYCPQWCYVIFPPPPSFYLDDEDDSSSSDFSPLLIALIGILASAFILVSYYTLISKYCHRRRHNSSSTSAAAINRISSDYTWQGTNNNNNNGATNPNQTIGGGGGDGLDESLIKSITVYKYRKMDGFVESSDCSVCLSEFQENESLRLLPKCNHAFHVPCIDTWLKSHSNCPLCRAFIVTSSAVEIVDLTNQQIVTENNSISTGDDSVVVVNLDLENSRSRNETVNEGSTPKPPEMQDSRDGEERRSASLNSGGGVVSIADILREIEDDEESAGVGTSRWVEEGEGEKTPPPSGSAANQTNGISNFLVRSSMAAMKRSGYDRAKNYRLPK

SEQ ID NO: 20581 - protein, 286 aa, Bacteroides thetaiotaomicron VPI-5482
MRQLKITKSITNRESASLDKYLQEIGREDLITVEEEVELAQRIRKGDRVALEKLTRANLRFVVSVAKQYQNQGLSLPDLINEGNLGLIKAAEKFDETRGFKFISYAVWWIRQSILQALAEQSRIVRLPLNQVGSLNKISKAFSKFEQENERRPSPEELADELEIPVDKISDTLKVSGRHISVDAPFVEGEDNSLLDVLVNDDSPMADRSLVNESLAREIDRALSTLTDREKEIIQMFFGIGQQEMTLEEIGDKFGLTRERVRQIKEKAIRRLRQSNRSKLLKSYLG

SEQ ID NO: 20582 - protein, 568 aa, Gibberella zeae PH-1
MSLAQHSESASPVPIIETDDQGNPIKSSNGYFPSKGKSSTLVDNMAHLSVVGGAHRGDDSDAASVRSTSSRASRRPEMKLASYQDEYTTSVYGSRFAGMDLPRHHMPENEMPRDIAYRMIKDDLSLDNNPMLNLASFVTTYMEDEAEKLMAESFSKNFIDYEEYPQSADIQNRCVNMIGDLFHAPPGSSVGTSTVGSSEAIMLGVLAMKRRWKNRRIAEGKSTEHPNIVMSSAVQVCWEKATRYFEIDEKLVYCTPDRFVMDPEQAVDLCDENTIGMCAILGTTYTGEYEDIKAINDLLVERNLDVPIHVDAASGGFVAPFVVPDLEWDFRCEKVVSINVSGHKYGLVYPGVGWVIWRSPEFLPQELVFNINYLGADQSSFTLNFSKGASQVIGQYYQLIRLGKHGYRAIMSNLTRTADYLTETLENMGFVIMSERSGAGLPLVAFRFKTVDEGGDPERHYDEFALAHHLRSRGWVVPAYTMAPNSGVKMLRVVVREDFTKSRCDQLICDVKLCHGLLKETDQESIKKREEYIKNHIVTMGRGKHSHPVYKDEQHSLQGKHGKTHAIC

SEQ ID NO: 20583 - protein, 156 aa, Brassica napus
  misc_feature (123)..(123): Xaa can be any naturally occurring amino acid
  misc_feature (155)..(155): Xaa can be any naturally occurring amino acid
PLSAALTMISCGEDSSQGLCELPDLDLGSLQSGQQLLDKAFYECEQDLMMKSAMESSFSDVLDIKNISDVLDVKNVSDVLDIKNVSLVTASNEKQDMQKSVSSGNLSSMDWSQAQQEAVVIQXFPDFAQLDFCSDYGMRRAFSEGDIQKLGTGLXP

SEQ ID NO: 20584 - protein, 578 aa, Arabidopsis thaliana
MCGILAVLGCVDNSQAKRSRIIELSRRLRHRGPDWSGLHCYEDCYLAHERLAIVDPTSGDQPLYNEDKTIAVTVNGEIYNHKDLRENLKSHQFRTGSDCEVIAHLYEEHGEEFVDMLDGMFAFVLLDTRDKSFIAARDAIGITPLYIGWGLDGSVWFASEMKALSDDCEQFMCFPPGHIYSSKQGGLRRWYNPPWFSEVVPSTPYDPLVVRNTFEKAVIKRLMTDVPLGVLLSGGLDSSLVASVALRHLEKSEAACQWGSKLHTFCIGLKGSPDLKAGREVADYLGTRHHELHFTVQDGIDAIEEVIYHVETYDVTTIRASTPMFLMSRKIKSLGVKMVLSGEGSDEIFGGYLYFHKAPNKKEFHEETCRKIKALHQYDCLRANKSTSAWGVEARVPFLDKEFINVAMSIDPEWKMIRPDLGRIEKWVLRNAFDDEKNPYLPKHILYRQKEQFSDGVGYSWIDGLKDHANKHVSDTMLMNASFVFPDNTPLTKEAYYYRTIFEKFFPKSAARATVPGGPSVACSTAKAVEWDAAWSQNLDPSGRAALGVHVSAYGEDKTEDSRPEKLQKLAEKTPAIV

SEQ ID NO: 20585 - protein, 396 aa, Glycine max
MAVEYTCCSTAFFVHILVIVLLVLFAGLMSGLTLGLMSLSLVDLEVLAKSGTPQDRKHAEKILPVVKNQHLLLCTLLICNAAAMETLPIFLDGLVTAWGAILISVTLILLFGEIIPQSVCSRYGLAIGASVAPFVRVLVCICFPVAYPISKAGKGGELTHDETTIIAGALELSEKTASDAMTPISETFTVDINSKLDRELMNEILEKGHSRVPVYYEQPTNIIGLVLVKNLLTVHPEDEAPMKSVTIRRIPRVPESMPLYDILNEFQKGHSHMAVVVRRCDKTNQQSSQNNANDSVRDVKVDIDGEKPPKEKALKPKMPLHKWKSFPNTNKSSNRGSRSRKWSKNMYSDILEIDGSPLPKLPEEEEAVGIITMEDVIEELLQEEIFDETDHHFEDS

SEQ ID NO: 20586 - protein, 410 aa, Carboxydothermus hydrogenoformans Z-2901
MAKKFIILKFGGTSLKTAELREKVAQKIINTFESGYQPVVVVSAIGRKGDPYATDTLLNFAYEVNRDLPPREADLLMACGEIISGVIMVNTLAKMGYKAKLFTGAQAGIITDDNFTSASILKVKADKILKAVDEGFIPVVCGFQGVTEDGEVTTLGRGGSDTTAAALGVALKAEFIDIYTDVEGIKTADPRIVEDAKTLEVVTYNEISQLAHEGAKVIHPRAVEIAMQKNIPLRIKSTLTDGEGTLVTSHAEVYGEVIEVIRDRIITGIAHIPGVTQIKILREDTPEIVNLAQKVFKGLALAEISVDFINISPEGLAFTVKGEVTEKAVDVLENMGFTPRIRRNCAKIAAVGAGMTGVPGVMAKIVEALTREQIEILQSTDSYTTIWVLVDGENMEKAVRAIHKAFKLNE

SEQ ID NO: 20587 - protein, 139 aa, Methanosarcina barkeri str. fusaro
MANFKVVVSDPKEGRAYQIDVKDAEANALIGKSIGDVVDGAVFGLSGYKVKITGGCDGSGFVMKPDLLGPRRQRILMAVGVGYTPKHPGQRRRKMVRGKEVAPDIVQINAKVVEYGSKSIKALLGLEAPAEAPAEAPAE

SEQ ID NO: 20588 - protein, 192 aa, Glycine max
MASLLDSVTVTRVFSLPITSSISPASKVPSISARRISPVPEFRGLKASWRSSVTQSASLGTNLGSRFARGGRIVCEAQDTTAAAVEVPNISDSEWQTQVLESDVPVLVEFWAPWCGPCRMIHPIVDQLARDFAGKFKFYKINTDESPNTANRYGIRSVPTVIIFKDGEKKDSIIGAVPKETLEKTIERFVVE

SEQ ID NO: 20589 - protein, 578 aa, Arabidopsis thaliana
MCGILAVLGCIDNSQAKRSRIIELSRRLRHRGPDWSGLHCYEDCYLAHERLAIIDPTSGDQPLYNEDKTVAVTVNGEIYNHKILREKLKSHQFRTGSDCEVIAHLYEEHGEEFIDMLDGMFAFVLLDTRDKSFIAARDAIGITPLYIGWGLDGSVWFASEMKALSDDCEQFMSFPPGHIYSSKQGGLRRWYNPPWYNEQVPSTPYDPLVLRNAFEKAVIKRLMTDVPFGVLLSGGLDSSLVAAVALRHLEKSEAARQWGSQLHTFCIGLQGSPDLKAGREVADYLGTRHHEFQFTVQDGIDAIEEVIYHIETYDVTTIRASTPMFLMSRKIKSLGVKMVLSGEGSDEILGGYLYFHKAPNKKEFHEETCRKIKALHQFDCLRANKSTSAWGVEARVPFLDKEFLNVAMSIDPEWKLIKPDLGRIEKWVLRNAFDDEERPYLPKHILYRQKEQFSDGVGYSWIDGLKDHANKHVSDTMLSNASFFFPDNTPLTKEAYYYRTIFEKFFPKSAARATVPGGPSIACSTAKAVEWDATWSKNLDPSGRAALGVHVAAYEEDKAAAAAKAGSDLVDPLPKNGT

SEQ ID NO: 20590 - protein, 479 aa, Streptomyces coelicolor A3(2)
MTDTPTQLFLGGAWADAADGAVMPVDDPATGEILAHVADAGPKDARLAEEAAVQAQEEWARAAPRARSEILRRAYEIVLERTDALARLMTSEMGKPLAEARGEVAYAAEFFRWFSEEAVRIDGGHGVLPDGRNRMLLSRRPVGPCLLITPWNFPLAMGTRKIGPAVAAGCTMVLKPAPQTPLSSLALAAILKEAGLPDGVLNVVTTSRAGEVCEPLLRGGRIRKLSFTGSTAVGRLLLAQCADTVVRTSMELGGNAPFVVFDDADLDAAVDGAMVAKMRNMGEACTAANRFFVHRSVAGEFADRLARRMGALVVGPGTGDGVDVGPLIDAAGRAKVEELVADAVERGARVLVGGTTPEGPGCFYPPTVLTDVAPESRLMATEIFGPVAAILTFDDEDEVVRRANDTPWGLVGYVFTEGLDRALRVSERLDVGMVGLNTGLVSNPAAPFGGVKQSGLGREGGRVGIEEFLEYQYVALPTG

SEQ ID NO: 20591 - protein, 421 aa, Glycine max
  misc_feature (185)..(185): Xaa can be any naturally occurring amino acid
  misc_feature (187)..(187): Xaa can be any naturally occurring amino acid
  misc_feature (204)..(204): Xaa can be any naturally occurring amino acid
  misc_feature (206)..(206): Xaa can be any naturally occurring amino acid
  misc_feature (210)..(210): Xaa can be any naturally occurring amino acid
  misc_feature (212)..(212): Xaa can be any naturally occurring amino acid
  misc_feature (218)..(218): Xaa can be any naturally occurring amino acid
  misc_feature (234)..(234): Xaa can be any naturally occurring amino acid
  misc_feature (275)..(275): Xaa can be any naturally occurring amino acid
ILEVLQWPCCHSQTPLQFATTHCLPPLSFKENCVSLNPRSRRCAFEPQRRRFASVTCCSFSTVDSAKIKVVGVGGGGNNAVNRMIGCGLHRVEFYAINTDAQALLHSAAENPIKIGELLTRGLGTGGNPLLGEQAAEESKEAIANALQGSDLVFVTAGMGGGTGSGAAPVVARIAKEAGYLTVGXVXTYPFSFEGRKRSLQALXAXEKLXKXVDTLIXIPNDRLLDMADEQTPXQDAFRLANDVLRQGVQGISDIITVPGLVNVDFADVKAVMKXSGTAMLGVGVSSGKNRAEEAAEQATLAPLIGSSIQSATGVVYNITGGKDITLQEVNRVSQVVTSLADPSANIIFGAVVDDRYTGEIHVTIIATGFSQSFQKKLLTDPRAAKLLDKVAEGQESKVVPPPLKSSNKVESRPSPRKLFF

SEQ ID NO: 20592 - protein, 289 aa, Campylobacter jejuni subsp. jejuni NCTC 11168
MSILVNKNTKVIVQGFTGKEATFHAEQCMAYGTNIVGGITPHKGGQTHLGKPVFDTVADAVKATKADVSLIFVPAFAVGDSVIEAADAGIKLAVVITEHTPVKDMMFAKQYANKKGMKIIGPNCPGIITSEECKLGIMPGFIFKKGCVGLISKSGTLTYEAANQVVQGGYGISTAVGIGGDPIIGLAYKELLSEFQKDDETKAIVMIGEIGGSLEVEAAKFIKENISKPVVAFIAGATAPKGKRMGHAGAIVGSADESAAAKKEALKSYGIHVVDSPALIGEEIQKILG

SEQ ID NO: 20593 - protein, 924 aa, Campylobacter upsaliensis RM3195
MNRRDFIKNTAIASAASVAGMSVPSSLMAAPKEEWQWDKSVCRFCGTGCGIMVARKDGKIVAIKGDPAAPVNRGLNCIKGYFNAKIMYGEDRLVMPLLRVNSKGEFDKKGKFQQVSWQRAFDEMEKQFKKAYNELGVTGVGIFGSGQYTIQEGYASVKLAKAGFRTNNIDPNARHCMASAVVGFMQTFGVDEPSGCYDDIELTDTIITWGANMAEMHPILWSRVSDRKLSNLDKVKIVNLSTFSNRTSHIADTEIIFKPNTDLAILNFIAREIVYNHPEAMDKDFIKNHCVFATGYADIGYGMRANANHPKFKKSEKDTVTKENSIILDEEEATALSYLSVKAGDTLKMTHQGVPDKNWEISFEDFKKALEPYTLDYVANVSKGDDDESLEDYKKKLQELANLYIEKNRKVVSFWTMGFNQHTRGTWVNEQAYMIHFLLGKQAKPGNGAFSLTGQPSACGTAREVGTFSHRLPADMVVANPKHRAISEKIWKVPNGTINPKPGSPYLKIMRDLEDGKIKFAWVQVNNPWQNTANANHWIEAARNMDNFIVVSDCYPGISAKVADLILPSAMIYEKWGAYGNAERRTQHWKQQVLPVGAAMSDTWQVMEFAKRFKLKEVWGEKKVDEKLNLPSVLEEAKAMGYSEEDTLYDVLFANAEAKKFKADDKITKGYDNSEVNGDERRIIGSDGKEFKGYGFFVQKYLWEEYRKFGLGHGHDLADFNTYHQVRGLRWPVVNGKETQWRFNTKFDYYAKKAAPKSDFAFYGDFDKNLQKGDLLEPKTEEKFSIKNKAKIFFRPFMKAPERPSEEYPFWLSTGRVLEHWHSGTMTMRVPELYRAVPEALCYMNEEDCKKLKLEQGDLVWVESRRGKVKAKVDMRGRNKPPKGLVYVPWFDENVYINKVTLDATCPLSKQTDFKKCAVKITKA

SEQ ID NO: 20594 - protein, 334 aa, Xylella fastidiosa 9a5c
MAIKVGINGFGRIGRNILRSAVQNFGSNIDIVAINDLLEPDYLAYMLQYDSVHGRFKGEIAIEGTALILNGKKIRLTAERDPGNLQWADAGAEIVIESTGLFLTQESAGKHLAAGAKKVIISAPSKDETPMFVYGVNHNSYNGEPIVSNASCTTNCLAPLAKVINDKWGITRGLMTTVHAATATQKTVDGPSNKDWRGGRGILENIIPSSTGAAKAVGKVIPSLNGKFTGMSFRVPTSDVSVVDLTVQLNTPATYKEICTEVKQQSEGPLRGILGYTEDKVVATDFRGETCTCVFDADAGIALDPTFIKLIAWYDNEWGYSNKCLEIAKVIAAK

SEQ ID NO: 20595 - protein, 577 aa, Fragaria x ananassa
MIFSLWQFCLLSLLLSFGVIELQASHHVYSNLQTTQLASTHPQAKDPYRTGYHFQPRKNWINDPNGPLIYKGIYHLFYQYNPSSVVWGNIVWAHSTSTDLVNWIPHEAAIYPSILSDINGCWSGSVTILPSGKPAILYTGINPDKEQVQNLAFPKNLSDPFLREWVKVPQNPLMAPTQANQINASSFRDPTTAWLGPDKRWRLIIGSKRNHRGLAILYRSKDFMHWTKAKHPLYSTPKNGMWECPDFFPVSKTKLLGLDTSAIGPDVKHVLKVSLDNTRKEYYTIGTYNVSKDIYIPDDGSIESDSGLRYDYGKFYASKTFFDSAKNRRILWGWINESSSVSGDIKKGWSGLQAIPRTIVLDKSRKQLVQWPVVELEKLRTNEVKLPSTLLKGGSLHEVIGVTAAQADVDVAFEISDLKKAEVMDPSWTNAQLLCSKKGTSVKGALGPFGLLAFVSKDLKEKTAIFYRIFKSHNNNNKYVVLMCSDQSRSSLNPDNDMTTYGTFVNVDPLHEKLSLRSLIDHSIVESFGGKGKECITARVYPTLAVDGDTHLYAFNYGSESVKIAGSAWSMKTAKIN

SEQ ID NO: 20596 - protein, 402 aa, Lactobacillus sakei subsp. sakei 23K
MGVVAPLGNDVETFTRRILAGELGIGPITKFDATTTGVSLAAEVLDFDPALRIGKKKAKRMDLFSQYALDSALAALEQAGINDENTVPADMGVIYGSGIGGLTTIQEQVTRMVEKGADHISPLFVPKSIGNMAAANIAIEIGAQNICTTIVTACSSGANAIGEAYRQIKENRATVMVTGGSEASINEIGIGGFAALSTLSTATDPTRASLPFDADRKGFVMGEGGATLILESLEHAQARHATILGEVTGYGTNCDAYHMTSPNPNGEVAARAMQMAIDEAGITAADVDYVNAHGTGTVANELAESAALARVFGDEGTVPVSSTKSMTGHLLGAAGALEAIVTIGALQAGTLPPNVGLQNTDPDCHVNLIKTPLAAPDAQYGMSNSFGFGGHNAVLLLKKWSD

SEQ ID NO: 20597 - protein, 185 aa, Arabidopsis thaliana
  misc_feature (105)..(105): Xaa can be any naturally occurring amino acid
  misc_feature (110)..(110): Xaa can be any naturally occurring amino acid
  misc_feature (123)..(123): Xaa can be any naturally occurring amino acid
  misc_feature (153)..(153): Xaa can be any naturally occurring amino acid
  misc_feature (162)..(162): Xaa can be any naturally occurring amino acid
MASSMLSSAAVVTSPAQATMVAPFTGLKSSAAFPVTRKTNKDITSIASNGGRVSCMKVWPPIGKKKFETLSYLPDLSDVELAKEVDYLLRNKWIPCVEFELEHGXFVYRXEHGNTPGYYDGRXYWTMWEASIGSGCTDFRFQVLKEIGECKKXEVPGRFIRXIGSTTPVSQMISFMAKSPKLHGA

SEQ ID NO: 20598 - protein, 580 aa, Deinococcus radiodurans R1
MPPGEDPMSHKTLPLTDHYDVKRGEDGHRYLRPLVRGFNLTRIPLLNKGTAFTAEEREAHGLDGLLAPQVDSLEVLIERAYREFSKRGAALEKHVYLRNLQDRNEVLFYALLSHHVEEMLPIVYTPTVGDAVKKFSQIYRYPRGLTLSTRTIERAEQALANVPLNDVRIIVATDSSAILGIGDQGFGGMAISIGKLSLYTVAGGVGPDKTLPVELDVGTGRADLREDPHYLGVKHERLTGEEYFAFIDKFVEATIQRYPKAIIQWEDFSKDAAFEVLARYRKVVPSFNDDIQGTGAVVLAGVLNACRIKGEALKDQVVVVHGAGAGGAGVAAAIREGMHREGLSPDEIARRVFVLDSRGLLTDDRSMEAYKQALATPRALVSGWSGTDLLGVVREAKATVLLGLSGVPGTFDEDIVKAALANTPRPLVFPLSNPTAHSEALPEDILRWTDGAAIVATGSPFAPVEHGGQTHEIGQGNNAFIFPGLGFGAILARVREITDEMVTEAAYALADYTQAHHPGRTYPPVNELSQASVQVAVAVIKQAIKDGVATEFSVRRLSDGELRAFVERKFWEPKFLPYHS

SEQ ID NO: 20599 - protein, 47 aa, Glycine max
LVWEGLGLGGVSDVGNWSRENDNKKILLGIGGGHYAPRHVDVVLKDN

SEQ ID NO: 20600 - protein, 405 aa, Dehalococcoides sp. CBDB1
MAVVVHKYGGTSVGDAERIKHVAKRIIAARQKGNDVVAVVSAMGDTTDDLIELAHKLNDCPEPREMDVLLSTGEIVSSTLLAMALKNMGQDAISLSGQQAGIRTDSVHSKARITGIDPKRIHDELDKGRVVIVAGFQGISDCQDVTTLGRGGSDTTAVALAASLGASICERYTDVDGVYTADPRLIPDARRLSEISYEEMLELSSYGAKIMHPRAVEIGQVYNIPILVASSFNENPGTLIHGGEKMEIRNKVSGIAHDFEVAKITILGVPDKPGIAAGLFAPLAKAGVSVDTIVQNSSQDHITDLTFTVTKSDLGKALEVIGPIAKELQAREVLSDSKIGKVSIIGTGMLNAPGYAARMFKALSDAGINILLISTSEIRITCIIEEDKVKDAVRAIHKAFEMEKD

SEQ ID NO: 20601 - protein, 115 aa, Glycine max
MARVALVAVFAVLAALAVADMASGAVTCGDVTSAVAPCMSYASGKASAPSGACCSGVRTLNAKASTPADRKAACNCFKNLAGSGISMGNAASIPGKCGVSVSIPISTKTNCNNLH

SEQ ID NO: 20602 - protein, 130 aa, Zea mays
MAISVTAVAALPAFSAQRSLPQPSRQRVVAFIVVRPVRAHRRFVGVAASSPPTPPDLAKKVSESIKQAQETCADDQKGDAECAAAWDEVEELSATASHARDSLKETNANDPLEKYCKDNPDSEECRIYDN

SEQ ID NO: 20603 - protein, 442 aa, Glycine max
EWFPLSDAEGDPDCPSKGYSSIERALNALRQGKFVIVVDDENGDIEGNLIMAASLTSPKDIAFMIKHGSGIVSVGMKEEDLQRLNLPLMSPETEDEDSSAPTFTITVDVKSGTSTGVSAADRAKTVLALSSPESKSEDFRKPGHVFPLKYRNGGVLRRAGHTEASLDLVALAGLPPISVLSALVDENDGSMQSLLNLRKLASEYTLPIVSITDLIRYRRKREKLVERTSVSRLPTKWGLFQAYCYSSKLDGTEHVAVVKGDMGDGQDVLVRVHSECLTGDIFGSARCDCGNQLDLAMRLIEEAGRGVVVYLRGHEGRGIGLGHKLKAYNLQDQGHDTVQANIELGLAVDAREYGIGAQILRDIGVRTMRLMTNNPAKFVGLKGYGLAVVGRVPVLTPITEENKRYLETKRTKMGHIYGSDLQGSLPGFNGSTVNNGDSLENT

SEQ ID NO: 20604 - protein, 492 aa, Synechocystis sp. PCC 6803
MTNTLTSTFADLGLSEKRCQLLADIGFEAPTQIQTEAIPLLLSGRDMLAQSQTGTGKTAAFALPLMDRIDPEGDLQALILTPTRELAQQVAEAMKDFSHERRLFILNVYGGQSIERQIRSLERGVQIVVGTPGRVIDLIDRKKLKLETIQWVVLDEADEMLSMGFIDDVKTILRKTPPTRQTACFSATMPREIKELVNQFLNDPALVTVKQTQSTPTRIEQQLYHVPRGWSKAKALQPILEMEDPESAIIFVRTKQTAADLTSRLQEAGHSVDEYHGNLSQSQRERLVHRFRDGKIKLVVATDIAARGLDVNNLSHVVNFDLPDNAETYIHRIGRTGRAGKTGKAIALVEPIDRRLLRSIENRLKQQIEVCTIPNRSQVEAKRIEKLQEQLKEALTGERMASFLPLVRELSDEYDAQAIAAAALQMIYDQSCPHWMKSDWEVPEVDFNKPVLRRGRNAGGGQNKSGGGYQGKPGKPRRSSGGRRPAYSDRQQ

SEQ ID NO: 20605 - protein, 967 aa, Pisum sativum
MANKMEKMASIDAQLRQLAPAKVSEDDKLIEYDALLLDRFLDILQDLHGEDLKDSVQEVYELSAEYERKHDPKKLEELGKLITGLDAGDSIVVAKSFSHMLNLANLAEEVQIAHRRRNKLKKGDFRDESNATTESDIEETLKKLVFNMKKSPQEVFDALKNQTVDLVLTAHPTQSVRRSLLQKHARVRNCLSQLYAKDITPDDKQELDESLQREIQAAFRTDEIKRTPPTPQDEMRAGMSYFHETIWKGVPKFLRRVDTALKNIGINERVPYNAPLIQFSSWMGGDRDGNPRVTPEVTRDVCLLARMMAANLYYSQIEDLMFELSMWRCNDELRDRAEELHRNSKKDEVAKHYIEFWKKVPLNEPYRVILGHVRDKLYRTRERSRYLLAHGYSDIPEEDTFTNFDEFLEPLELCYRSLCFCGDRAIADGSLLDFLRQVSTFGLSLVRLDIRQESDRHTDVMDAITKHLEIGSYQEWSEEKRQEWLLSELVGKRPLFGPDLPTTDEIRDVLDTFHVIAELPSDNFGAYIISMATAPSDVLAVELLQRECKIKNPLRVVPLFEKLADLEAAPAALARLFSIDWYRNRIDGKQEVMIGYSDSGKDAGRFSAAWQLYKAQEELINVAQKFSVKLTMFHGRGGTVGRGGGPTHLAILSQPPDTIHGSLRVTVQGEVIEQSFGEEHLCFRTLQRFTAATLEHGMRPPSSPKPEWRALMDQMAIIATEEYRSIVFKEPRFVEYFRLATPEMEYGRMNIGSRPAKRRPSGGIETLRAIPWIFPWTQTRFHLPVWLGFGSAFKQVIEKDVKNLHMLQDMYNQWPFFRVTIDLVEMVFAKGDPGIAALNDRLLVSQNLWPFGEQLRNKYEETKKLLLQVATHKEVLEGDPYLKQRLRLRDSYITTLNVFQAYTLKRIRDPKSSVNASRLPLSRESPEATKPADELVTLNPTSEYAPGLEDTLILTMKGIAAGMQNTG

SEQ ID NO: 20606 - protein, 220 aa, Glycine max
MGVTPKIAPSMLSSDFANLASEAQRMLHMDIMDGHFVPNLTIGAPVIESLRKHTKGYLDCHLMVTNPLDYVEPLAKAGASGFTFHVETSKDNWEELIQRIKSHGMTPGVALKPGTPIEEVYPLVEAGNPVEMVLVMTVEPGFGGQKFMPEMMDKVRILRKKYPSLDIEVDGGLGPSTIDVAASAGANCIVAGSSVFGAPEPVQVISLLRNSVEKAQTLIQ

SEQ ID NO: 20607 - protein, 432 aa, Picrophilus torridus DSM 9790
MKILVIGGGAAGMSAASKARRMDRDADITVFEDGPFVSYAECGMPYYLAGYFNDYNDLLHYKIEEFTEKRGINVITNEKIKDVDVKNRIVYSKNRSYEYDKLVIASGASPRIPDEFKDYALSLRSMEDAIRLNDMLKRSRDITIVGAGVLGTELYSLLKKRHHVRLISKHDHVLPYFDDDMSDILKNICDDNIEYNSLPIEISYNGRYKIKTSLGSHESDLVIFATGIEPNTSFIKDGIKKDGYGRIIVDDYLMACDDVYAAGDAVTTKNIVTGLNDYFPLAQVANKMGRIIGVNLFGNRIKFPGSLGTTIINLNDYQVGYTGINERTARKLNIKYDRILIKGESRSKYLHGSDVYTKIIYSEDGRLIGAQVISRENGAWRLNVLATAIYSKMHIDDLFFNDLGYEPEYGPVWDPIVVAGSLGLDKLQGYGK

SEQ ID NO: 20608 - protein, 394 aa, Legionella pneumophila subsp. pneumophila str. Philadelphia 1
MHLKRTLSLTLLAFYGLGTILGAGIYALVGEVAKEAAQFTPLSFLIASIIALFTAISYAELSSRLPLSAGSALYVRRAFHQKWLSGLIGWIVVLTGVISAATLSHGFVKYFQLFLPLPPSLIITILTVILAGVAVWGIRESATLILYMTLMEVGGLLMIIYYGRYSFASIDIQSFSLPHSFDGVLIGAFIAFYAFIGFEDMVNTAEETINPEKTLPKAIFLALISATILYVAVAWVIVSTIPSNALVKTDMPLIEIIKLQGQSPLLFSIIALISITNGILVQIIMASRLIYGMANQQNAPQIFSFVYSKTQTPVNSTLLVSLIILLFAYALPITTLAKLTSSIILCIFIIIHASLIKIKLTKKKPTNAISFPIVFPMISILLTLAFLIIQFFLK

SEQ ID NO: 20609 - protein, 112 aa, Idiomarina baltica OS145
MKKVEAIIKPFKLDDVREALSEVGIAGMTVSEVKGFGRQKGHTELYRGAEYMVDFLPKVKLEVVVADTDVERCIEAIMETAQTGKIGDGKIFVSDIERVIRIRTGEENEQAV

SEQ ID NO: 20610 - protein, 402 aa, Burkholderia sp. 383
MTHITADQMARVKATAPVLAVHGATITKHFYQRMFARHPELKNLFNQTHQKTGSQPETLAKAVYAYAANIDNLGALGGAVTKIAHKHASLNIRPEHYPIVGENLLASIVEVLGDAVDAETLEAWRVAYGQLAQILIGVEADLYAGAAWSGFRPFKVERKVRESDEITSFYLTPADGGAAPTFEPGQYITVKRFVGDLGVDQPRQYSLSDAPHGKWLRISVKREAGKPEVIPAGKVSTLMHDGVEEGAIVEVTAPMGEFSLKRGVETPVVLISGGVGITPMMSMASTLIAEGSQREVRFVHACRSGAVHAFRDWLNDTVRDHANVKRTVLYELVGPNDRAGIDYDLEGRLTPERVQQYALVPDADYYICGPIGFMKAQRDALVALGVAPERVNTEIFGSGALE

SEQ ID NO: 20611 - protein, 207 aa, Bradyrhizobium sp. BTAi1
MSERLLVLVRHGQSEWNLKNLFTGWKDPDLTEQGVSEAKEAGRKLKAHGLTFDVAFTSELTRAQHTLKLILDELGQPGLPTSRNLALNERDYGDLSGLNKDDARAKWGEEQVHVWRRSYDVPPPGGESLKDTLARALPYYVQEILPGVLRGQRTLVAAHGNSLRALIMVLEKLTPEGILKRELATGVPIIYRLKADSTVESKLDLAG

SEQ ID NO: 20612 - protein, 413 aa, Burkholderia mallei ATCC 23344
MSTADPYLIAGGGHAARRAAETLRERDPAARIVMIGAEPELPYDRPVLSKEALVGGDAGERRAFVRDAAWYRERDIELRLGVRVEAIERGARRVRLSDGARLGYARLLIATGSRVRRFAGPVDAGVHVHYVRTLADTRALRAALAPGKRVAVLGGGFIGLEVAASAVRLGCRATVVDPAPRLLQRRMPEAVGAFALALHARHGVDVRLGALPERIRRAANGAAVVETSAGGIVADVVVAGIGVVPNVELAQAAGLDVDDGVCVDEMCRTADPAIFAAGEVTRHFNPLVGRALRIESWQIAENQPAVAAANMLGAAETYAQWPWLWSDQYDSNLQTLGLFGGEQTLVLRGSPERDRAFCVFALNARRELAAVAAVNAGREIAVCRRLMTAGVALDPARLADPSDALRAMLPRGV

SEQ ID NO: 20613 - protein, 342 aa, Pyrococcus horikoshii OT3
MKAKDIVLKKSEKIEGVEVKGPWLDDAQSLEEVVSYYYRIGFQATHLGRAIEIWRKVEEKRERGEEIRVFLGYTSNIISSGLREIIAWLVKEKKVDVIVTTAGGVEEDFIKSLKPFILGDWEVDDAELRKKGVNRIGNIFVPNDRYIEFEKYMIPFFERVLKIEEKLSRPLTASEFIYEMGRYMDEKLGKEKEKSVIYWAYKNNIPIFCPAITDGSIGDMLYFFKEERRDSRLIIDIANDIVKLNNLAITAKETASIILGGSLPKHAIINANLFRGGTDYAIYISTAVPWDGSLSGAPPREGVSWGKIKAKADYVEVWGDATLIFPILVWMVMKARGQGYAQ

SEQ ID NO: 20614 - protein, 296 aa, uncultured bacterium
NSRLCMSSAVSGYLQSFGSDGPPCCYDDLDLTDCAFLIGTNTAECHPIVFNRLRKHHKRNPQVKLIVVDPRFTETAQVADLHLAIRPGTDITLQNGIGHLLLKWGALDQSFIHQSTQGFADYTEVLRHYEPSIVAERCGITEADLETAARTWAESQSVLSLRSMGLNQSSEGTAKVCSLINLHLLTGQIGRPGAGPFFLTGQPNAMGGREAGGLAHILPGYRLVKNPQHRQEIEQFWSLPEGQISPSRGLTIGEMIPALEHNQVGLLWIAATNPAVSLPDLNRTKAALQRSPFTVY

SEQ ID NO: 20615 - protein, 581 aa, Arabidopsis thaliana
MEKVTNSDLKSSVNGGVVDVYGEDSATIEHNITPWSLSVSSGYSLLRDPRYNKGLAFTEKERDTHYLRGLLPPVVLDQKLQEKRLLNNIRQYQFPLQKYMALTELQERNERLFYKLLIDNVEELLPIVYTPTVGEACQKFGSIFRRPQGLFISLKDKGKILDVLKNWPERNIQVIVVTDGERILGLGDLGCQGMGIPVGKLALYSALGGVRPSACLPVTIDVGTNNEKLLNDEFYIGLRQKRATGQEYSELLNEFMSAVKQNYGENVLIQFEDFANHNAFELLAKYRDTHLVFNDDIQGTASVVLAGLVSAQKLTNSPLAEHTFLFLGAGEAGTGIAELIALYMSKQMNASVEESRKKIWLVDSKGLIVNSRKDSLQDFKKPWAHEHEPVKDLLGAIKAIKPTVLIGSSGVGRSFTKEVIEAMSSINERPLIMALSNPTTQSECTAEEAYTWSKGRAIFASGSPFDPVEYEGKVFVSTQANNAYIFPGFGLGLVISGAIRVHDDMLLAAAEALAGQVSKENYEKGMIYPSFSSIRKISAQIAANVATKAYELGLAGRLPRPKDIVKCAESSMYSPTYRLYR

SEQ ID NO: 20616 - protein, 398 aa, Nakaseomyces delphensis
MTETVDIHPISFPPEVLARISPELSLQRHLSLGIRPSLRKFAEFRDVQIDDDTLSRYSEQCRFDPNETSNGILGSNVLKSGTTMVITTITGGIMEDAFNTALNESNFGEQEMMILEEEPANSISHYSSIYPVVEVERGRVGACTDEEMTISQKLYQSLLHSRIIPKTSLKVTPGIRTINDEGKTIVTYPEDQGSDDEGDDIIQMKKKWSFVLYAKIVVFGRNGPVFDLCWNSLIYALQSTKLPMTFIDERATDLKMTIRTKGRSTTIRETYEIFADPTRHRELVINRDNLVYASNYGIIDIDPEAQLDKKEDSTEDSGVNEEEMVIDMEQPKSVLLADIDTEAEETSIQSVISVLSNHNGVLTNVSVLGGNSTITPEMLKESLGLAKVRSIHLSKKLK

SEQ ID NO: 20617 - protein, 296 aa, uncultured bacterium
NSRLCMSSAVAAYMYSLGSDGPPCCYDDLELTDCAFLIGTNTADCHPIVFNRFRKHHKQQAGVKLIVVDPRRTATAVVADLHLAIRPGSDIDLLHGMAFLLRQWGRIDADFIAHHTHGYKDYGQVIDQYPPDVVAERCGIPVEQLEQAARWWGDSQNVLSLWSMGINQSAQGTAKARSLINLHLLTGQISKPGSGPFSLTGQPNAMGGREAGGLSHLLPGYRLIKNPDHRREVEQAWGLPPGRICPEPGLSAWEMIRGLEAGTVGCFWVVATNPLVSMPDLNRVKAALRRSPFTVC

SEQ ID NO: 20618 - protein, 347 aa, Agrobacterium tumefaciens str. C58
MKTHRIALIPGDGIGQSVTDAAWQVLNAVAKTSGFVLEGTEFPWSCAFYKETGAMMPKDGIETLRGFDAIMLGAVGWPAEVPDSVSLHGLLLPIRKAFVQYANIRPHRLLSGVQGPLKADGFDILCIRENTEGEYSGAGGRVHQGTEDEVAVETSIFTRKGVERILRFGFEQAQKRRGKLASITKSNAQKYSMVFWDEVTHKLAAEYPDVEVSSYHIDAMAARMVMAPESLDVVVASNLFGDILTDLGAAIQGGLGFAASANINPDRSAPSMFEPVHGSAPDIAHLGIANPIAAIWSGAMMFEHLGEKDAAAKIMAALETATGRGIGTVPGKDKTDTITAAVLAALA

SEQ ID NO: 20619 - protein, 224 aa, Helianthus annuus
NDFFDYVLEELKQNDTMLTEATALDLMFALLFANFETTSQAITVAIKFLTHNPRALKELTEEHQKILRKRENPKLDLHGKNIVDEIYLQVINETLRLASIVPVLFRKAKKDIKFKGYTIPSGWAVMVCPPAVHLDPVNYKDPLDFNPWRWEDMDLKSASKTFMAFGGGQRFCVGADFAKLQIAIFLHCLVTKYQWQPIKGGDIVRTPGLQFPNGFHVRIFEKET

SEQ ID NO: 20620 - protein, 486 aa, Agrobacterium tumefaciens str. C58
MMQGLKDKELFRQTGLIGGAWKAAASGKVVDVIDPATQAVIGTVPDMGGAETRAAIEAANAAFGPWKKKTHAERAALLEKWFALMIENIDDLRLILTIEQGKPLDEAKGEIRYGASFVKWFAEEARRIGGGTIPSPTPDRRIVVLKEPVGVCGIITPWNFPNAMITRKVAPALATGCTVVIKPSEFTPYSALALGVLAERAGIPAGVINIVTGMPTEIGNEIMANETVRKISFTGSTRVGSLLMRGAADSVKRLSLELGGNAPFIVFDDADLDLAIEGAIVSKFRNGGQTCVCANRILVQSSVYDAFAKKLADRVDAMRVGPGTEAGVSIGPMINKPAIAKIRAHIDDAVAKGATIITRPRDLPEGPQYTAPVVLTGATTAMQLASEETFGPVAPLFRFETEEEALAIANGTPFGLAAYFYTESLKRAWRVGEALEFGMVGLNTGAISTEVAPFGGVKQSGLGREGAQVGIEEYLETKTFHIGGLA

SEQ ID NO: 20621 - protein, 296 aa, uncultured bacterium
NSRLCMSSAVAAYMYSLGSDGPPCCYDDLELTDCAFLIGTNTADCHPIVFNRLRKHHKQQAGVKLIVVDPRRTATADVADLHLAIRPGSDIDLLHGMAFLLRQWGRIDADFIAHHTHGYKDYGQVIDQYPPAIVAERCGIPVEQLEQAARWWGDSQNVLSLWSMGINQSAQGTAKARSLINLHLLTGQIGKPGSGPFSLTGQPNAMGGREAGGLSHLLPGYRLIKNPDHRREVEQAWGLPPGRICPEPGLSAWEMIRGLEAGTVGCFWVVATNPLVSLPDLNRVKAALRRSPFTVC

SEQ ID NO: 20622 - protein, 444 aa, Bacteroides thetaiotaomicron VPI-5482
MNAAKVLDDLKRRFPNEPEYHQAVEEVLSTIEEEYNKHPEFDKANLIERLCIPDRVFQFRVTWMDDKGNIQTNMGYRVQHNNAIGPYKGGIRFHASVNLSILKFLAFEQTFKNSLTTLPMGGGKGGSDFSPRGKSNAEVMRFVQAFMLELWRHIGPETDVPAGDIGVGGREVGFMFGMYKKLAHEFTGTFTGKGREFGGSLIRPEATGYGNIYFLMEMLKTKGTDLKGKVCLVSGSGNVAQYTIEKVIELGGKVVTCSDSDGYIYDPDGIDREKLDYIMELKNLYRGRIREYAEKYGCKYVEGAKPWGEKCDIALPSATQNELNGDHARQLVANGCIAVSEGANMPSTPEAVRVFQDAKILYAPGKAANAGGVSVSGLEMTQNSIKLSWSAEEVDEKLKSIMKNIHEACVQYGTEADGYVNYVKGANVAGFMKVAKAMMAQGIV

SEQ ID NO: 20623 - protein, 296 aa, uncultured bacterium
NSRLCMSSAVAAYMYSLGSDGPPCCYDDLELTDCAFLIGTNTADCHPIVFNRLRKHHKQQAGVKLIVVDPRRTATADVADLHLAIRPGSDIDLLHGMAFLLRQWGRIDADFIAHHTHGYKDYGQVIDQYPPDVVAERCGIPVEDLAQAARWWGDSQNVLSLWSMGINQSAQGTAKARSLINLHLLTGQIGKPGCGPFSLTGQPNAMGGREAGGLSHLLPGYRLIKNPYHRREVEQAWGLPPGRICPEPGLSAWEMIRGLEAGTAGCFWVVATNPLVSLPDLNRVKAALRRSPFTVC

SEQ ID NO: 20624 - protein, 333 aa, Bordetella bronchiseptica RB50
MLAHPATKYRPFAPFAADHAERAWPARRPAAAPIWMSTDLRDGNQALIEPMDGARKLRLFEQLVAVGLKEIEVAFPSASQTDFDFVRKLIDERRIPDDVTIEALTQSRPDLIARTFEALAGSPRAIVHLYNPIAPQWRRIVFGMSRAEIKEIALAGTRQIRALADANPGTQWIYEYSPETFSLAELDFAREVCDAVSAIWGPTPQRKMIINLPATVESSTANVYADQIEWMHRSLARRDCIVLSVHPHNDRGTAVAAAELAVLAGAERIEGCLFGNGERTGNVDLVALALNLERQGIASGLDFRDMAALRACVSECNQLPIDVFHPYAWLDQD

SEQ ID NO: 20625 - protein, 322 aa, Streptomyces coelicolor A3(2)
MSDVRNVIIIGSGPAGYTAALYTARASLKPLVFEGAVTAGGALMNTTEVENFPGFQDGIMGPELMDNMRAQAERFGAELIPDDVVAVDLSGEIKTVTDTAGTVHRAKAVIVTTGSQHRKLGLPNEDALSGRGVSWCATCDGFFFKDQDIAVIGGGDTAMEEATFLSRFAKSVTIVHRRDTLRASKAMQERAFADPKISFVWDSEVAEVQGDQKLAGLKLRNVKTGELSDLPVTGLFIAIGHDPRTELFKGQLDLDPEGYLKVDAPSTRTNLTGVFGAGDVVDHTYRQAITAAGTGCSAAVDAEPFLAALSDEDKAEPEKTAV

SEQ ID NO: 20626 - protein, 296 aa, uncultured bacterium
NSRLCMSSAVSGYIQSFGSDGPPCCYEDLEQTDCAFLIGTNTAECHPIVFNRLHKHCKKNRKVKMIVVDPRRTSTAEAADLHLAIRPGTDIDLLNGIAHLLMRWGKINTLFIDDCTRDFPLYADIIRHYPPELVARKCGIRLDELEKAARYWGDSERVLSLWSMGMNQSSEGTAKVRTLINLHLMTGTIGRPGSGPFSLTGQPNAMGGREAGGLAHILPGYRLVKNPQHRAELEQLWQLKPGQISPEPGLSAWDMILGLETGAVGFLWIAATNPAVSMPDLERTKAALKQSSFTVY

SEQ ID NO: 20627 - protein, 445 aa, Bacteroides thetaiotaomicron VPI-5482
MNIQKIMSSLEAKHPGELEYLQAVKEVLLSIEDIYNQHPEFEKVKIIERLVEPDRIFTFRVTWVDDKGEVQTNLGYRVQFNNAIGPYKGGIRFHASVNLSILKFLGFEQTFKNALTTLPMGGGKGGSDFSPRGKSDAEIMRFCQAFMLELWRHLGPDMDVPAGDIGVGGREVGYMFGMYKKLTREFTGTFTGKGLEFGGSLIRPEATGFGGLYFVYQMLQAKNIDIKGKTVAISGFGNVAWGAATKATELGAKVITISGPDGYIYDPDGISGEKIDYMLELRASGNDIVAPYAEKYPGATFVEGKRPWEVKADIALPCATQNELNGEDAQNLIKNNVLCIGEISNMGCTPEAIDLFIEKKIMYAPGKAVNAGGVATSGLEMSQNAMHLSWSAAEVDEKLHAIMHGIHAQCVKYGTEPDGYINYVKGANIAGFMKVAHAMMGQGVI

SEQ ID NO: 20628 - protein, 110 aa, Streptomyces coelicolor A3(2)
MAGTLKHVTDDSFEQDVLKNDKPVLVDFWAAWCGPCRQIAPSLEAIAAEYGDKIEIVKLNIDENPGTAAKYGVMSIPTLNVYQGGEVAKTIVGAKPKAAIVRDLEDFIAD

SEQ ID NO: 20629 - protein, 269 aa, Triticum aestivum
  misc_feature (235)..(235): Xaa can be any naturally occurring amino acid
  misc_feature (247)..(247): Xaa can be any naturally occurring amino acid
HSRTSLYKKAGWYRSGIPGISSTHASANSLPWILARHELPWLGVVVDPCAAALVFLVTALLCVGIKESTFVQGIVTVLNCCVMLFVIIAGSYIGFQTGWVGYKVSGGFLPYGVNGMLAGSATVFFAYIGFDSVASTAEEVRNPQRDLPLGIATSLTICCSLYMLVSVVIVGLVPYFAMDPDTPISSAFARHGMQWAMYLVTSGAVLALCSTLMGSLLPQPRILMAMARDGLLPSXFFSDVSEKNTSXPVKSTIITGICAASLGFPHGCF

SEQ ID NO: 20630 - protein, 623 aa, Brassica insularis
MESSILRNPMLSSPTTITTPSLPSFSSKPSPLSFRFPPSHHRSSLRIKSLRLSCSLSDPSPPLCRRRPEYIPNRISDPNYVRVFDTTLRDGEQSPGATLTSKEKLDIARQLAKLGVDVIEAGFPAASKDDFEAVKTIAGTVGNAVDGDGYVPVICGLSRCNKRDIETAWEAVKYAKRPRIHTFIATSDIHLEYKLKKSKDEVIEIARNMVKFARSLGCEDVEFSPEDAGRSEREFLYQILGEVIKAGATTLNIPDTVGITLPSEFGQLIADIKANTPGIENVIISTHCQNDLGLSTANTLSGAHSGARQVEVTINGIGERAGNASLEEVVMAIKCRGDHVLGGLYTGIDTRHIVMTSKMVEDYTGMQTQPHKAIVGANAFAHESGIHQDGMLKHKGTYEIICPEEIGLERSNDAGIVLGKLSGRHALKDRLTELGYVLDDEQLSSIFWRFKSVAERKKRVTDADIIALVSDEVFQPEALWKLLDIQITCGTLGLSTATVKLADADGKEHVACSMGTGPVDSAYKAVDLIVKEPATLLEYSMNAVTEGIDAIATTRVLIRGNNNYSTTNAITGEEVQRTFSGTGAGMDIVVSSVKAYVGALNKMLDFKENSTTKIPSQNNKVPA

SEQ ID NO: 20631 - protein, 316 aa, Geobacter metallireducens GS-15
METTHHRLIILGSGPAGYTAAVYAARANLNPTLITGLQQGGQLMTTTEVDNWPGDPNGVQGPDLMERMRQHAERFNTTMVFDHIGKANLRERPFRLEGDNGIYTCDALIIATGATARYLGLPSEDAFKGKGVSACATCDGFFYRGKPVAVIGGGSTAVEEALYLSNIASHVTVIHRRDKFRSEKILADRLIEKTKGGNVTIEWHHVLDEVLGDATGVTGIRIRHTSGSTKDIPVHGCFIAIGHAPNTQLFEGQLEMDNGYIRTLCGGEGNVTATSIPGVFAAGDVQDQYYKQAITSAGTGCMAALDAEKYLETLLS

SEQ ID NO: 20632 - protein, 336 aa, Gibberella zeae PH-1
MSRYTAAHANLQGPGDARPTALQIVKDEDLVGKLTDKVILVTGGNSGLGLETAKTLHATGATVYITARTSEKLEEAIKDIKAWPEAESSAPVYGIELQLDSLASVRAAAKKFLEKSEKLNILILNAGVMATPEGRTEDGFETQFGTNHLGHFLFFELLKPALIASSTPSFHSRVVSLSSKGHRYGGVRFDDFNFEKEPYIPWIAYAQSKTANIYFASELERRYGSQGLHGLSVHPGFIFTNLARHIDVSQIDVKGDTKNYVKNIEQGSATTVYAALSKDWEGRGGRYLADCDEEPPLKPGIDPASSAPGYASWIYNEEAEGRLWAESLRLVGLKKD

SEQ ID NO: 20633 - protein, 424 aa, Burkholderia vietnamiensis G4
MPSHADSPAVHHAGSLTIFQGAALYIGAVLGTGVIALPALAAEVAGPASLLAWAALVVLSGPLAATFAALGARYPDAGGVSTYARRAFGPKAAAIVGWCFYFAVPAGAPAAAMFGGAYVAAVIGGGHTTVVVTAAALIAAVSAANAFGVTVSGRMQLVLSALLVTLLLAAVLASAPHARPENLQPFAPHGWLAVGQAAALLVWSFAGWEAITHLAAEFRRPAHDMPRSAGIAVVVVGFLYLSVAAASVTVLGPSAGASGAPLAELIARGIGGHAQVLAAAAALLLTLGTMNAYFAGAAKLGAALGRDGALPAWLAQGSQVGGVPRRSLGVIAALAAAALAATAFSDVGPKPLVLVSSGCFVMVYGLGAAAALKLLPRASAAYRCAWVSLIAVAGLFLTTGWYLFFPLLLAGAALLYLRLARRRA

SEQ ID NO: 20634 - protein, 137 aa, Arabidopsis thaliana
  misc_feature (68)..(68): Xaa can be any naturally occurring amino acid
  misc_feature (90)..(90): Xaa can be any naturally occurring amino acid
  misc_feature (106)..(106): Xaa can be any naturally occurring amino acid
  misc_feature (112)..(112): Xaa can be any naturally occurring amino acid
  misc_feature (114)..(116): Xaa can be any naturally occurring amino acid
  misc_feature (119)..(119): Xaa can be any naturally occurring amino acid
  misc_feature (126)..(126): Xaa can be any naturally occurring amino acid
  misc_feature (131)..(132): Xaa can be any naturally occurring amino acid
  misc_feature (134)..(135): Xaa can be any naturally occurring amino acid
MASSMLSSAAVVTSPAQATMVAPFTGLKSSASFPVTRKANNDITSITSNGGRVSCMKVWPPIGKKKFXTLSYLPDLTDVELAKEVDYLLXNKWIPCVEFELEHGFXYREHGXQXXXNTXGRVLWQXWEGSXXFXXTP

SEQ ID NO: 20635 - protein, 419 aa, Streptomyces rochei
MRRVVITGIGVVAPGGVGTADFWALLTEGRTATRRITLFDASSFRSRIAAEADFDPAGHGFAPDEARRLDRVAQFALVAAREAVADSGLVLAAEGERTGVSLGTAVGCSSGLDETYAHVSESGSRWLLDPHGRGRLGDYLVPSSVAAEVARDSALGSVAVVSTGCTSGLDALGHATELIREGSADIMVAGGAEAPITPITLASFDAIRATSARNDEPETASRPYDRTRDGFVLGEGSAVLVLEEHDRAVRRGARIYPEVSGFATRSNAYHMTGLRPDGGEMAEAIRVALDEARLNPADVHYVNAHGSGTKQNDRHETAAFKASLGQHAHRVPVSSVKSMIGHSLGAIGALEIAASALAIAHDTVPPTANLHEADPACDLDYTPLTAREQRTDTVLSVGSGFGGFQSAMVLTSRHTGAAA

SEQ ID NO: 20636 - protein, 830 aa, Streptomyces coelicolor A3(2)
MEDATDRIARPWGARVPYGRHETWPARVDTFLAEGVEPEAVQRWVQSASILHSDGDAMDIAVADGRMVGVRGRDVDRVNRGRLGPKDLFGWQANASRDRLTRPLVRRDGQLVETDWDTAMDLVAARSRELLDSRGPGSIGFYTSGQLFLEEYYTLAVLARAGIGTNHLDGNTRLCTSTAAEALKESFGCDGQPGSYDDFDHADVIALFGHNIAETQPVQWMRLLDRLEGADPPRLLCVDPRPTRVAEHAAVHLAPRSGTNVALLNALLHETIRHERIDRDFIDAHTVGFGELAARVADCTPKWAAEICDVPAARIEEAAELVGTAEALVSTVLQGVYQSHQATAAAVQVNNLHLIRGMLGRPGAGLLQMNGQPTAQNTRECGANGDLPGFRNWQNDAHVADLARVWNVEPETIPHFAPPTHAMQIFRYAEQGSLRMLWISGTNPAVSMPELPRIRSILSQERLFTVVQDLYLTETARLADVVLPAATWGEKTGALTNADRTVHLSRKAVEPPGEARPDLDIFLDYARRMDFRDKDGGPLIPWDGPESAFEAWKRCSAGRPCDYTGLSYAKLRDTSGIQWPCDDRAPEGTARLYTDGFGWAHPDVCESYGKDLETGASQEVVEYRSLNPDGRAMLKAAAYLPPHEEPDEEYPFQLTTGRTLYHFHTRTKTGRAPQLNDAAPDVWVEVSAGDAERLGLGEGDLVEVTSRRGSLRGRLRVTGIRTGLLFVPFHYGYWDTAGGSGPGPDTPGRAANETTVTDWDPASKQPLFKTAAAALTLVERGGGRPSPAPTTTASAPVTAGAAPPTSGGPAARTTEREPTEFPHGREEGAR

SEQ ID NO: 20637 - protein, 330 aa, Gibberella zeae PH-1
MPCHPTEPEFEVRDIPSLRGYVAIVTGETDYSGNSGIGYETTLQLALKGARVYIASRSNDRVNKAIAEMHKNSPDLDLHFLKLDLQDMQSIKDTTADFMSRENRLDILINNAGIMSSPWELTKDGHEIQWQTCFLSHHALTMSLMPLLVTAAQVSGRMDRVRIINVASDMALRMGPEAIHYDDPNLTNETGKLAPWRRYGHCKEASIIAAKAITDRYQSLGVTAYSLHPGLVKSNLQSHNPTMLGAMSRMMFKVGPSSTPLEGAMNSLFCATSHKVYEHAGRYYVPVQKLDDRANKWLDDAQAVNKLWDLATRQCREHGFIIDDIPGYYN

SEQ ID NO: 20638 - protein, 425 aa, Fusobacterium nucleatum subsp. vincentii ATCC 49256
MSKETLNPLASGQQQVKKACDALGLDPAVYELLKEPQRIIEITIPVRMDDGSIKTFKGYRSAHNDAVGPFKGGIRFHQNVNADEVKALSLWMSIKCQVTGIPYGGGKGGITVDPSELSQRELEQLSRGWVRGLWKYLGEKVDVPAPDVNTNGQIMAWMQDEYNKLSGEQTIGVFTGKPLSYGGSQGRNEATGFGVAVTMREIFKALGKELKGATVAVQGFGNVGKYSVKNIMKLGGKVVAVAEFEKSKGAFAVYKEAGFTFEELEAAKAAGSLTKVAGSKEISMDDFWALNVEAIAPCALENAIKEHEANLIKAGIICEGANGPITPEADEILYKKGTVVTPDVLTNAGGVTVSYFEWVQNIYGYYWTEKEVEEKEERAMVDAFNPIWALKKEFDGKGQPISFRQATYMKSIKRIAEAMKIRGWY

SEQ ID NO: 20639 - protein, 573 aa, Pseudomonas syringae pv. syringae B728a
MSRRKRRLEKMTKTSRPLYISYAGPSLLEMPLLNKGSAFTPQERVEFNLIGLLPQNVETIEEQVTRVYSQYKQCASDLDKHIYLRSIQDNNETLFFRLLDSHLDEMLPIIYTPTVGQACQEFSKIYRTHRGLFISYPERDRIDDILRSATKDRIKIIVVTDSERILGLGDQGIGGMGIPIGKLSLYTACGGISPAYTLPIVLDVGTNNRELLDDPMYMGWRHERVSGKEYEDFIALFIDAVQRRWPDVLLQFEDFAQSNAMPLLEKYRDELCCFNDDIQGTASVAVGTLLAACKAKNETLGQQKVVFVGAGSAGCGIAEHIIAAMRIEGLSESEARKRIFMVDRFGLLTESMDNLLDFQKRLAQKTADVSGWTAGSEAFPQLLDVVTHAGATVMIGVSGQRGLFTEQVIRELHKHCAKPLVMPLSNPTSKVEATPEEILRWTDGNALVATGSPFAPVEINGRTVHIAQCNNSYIFPGIGLGVVACKASRITDRMLMAASNALAECSPMVTGKGDAVLPPLKEIQQVSRKIALAVAREAQAEGLALETTEEALLEAIERNFWLPGYRAYRRRSV

SEQ ID NO: 20640 - protein, 319 aa, Saccharomyces cerevisiae
MVHNKVTIIGSGPAAHTAAIYLARAEIKPILYEGMMANGIAAGGQLTTTTEIENFPGFPDGLTGSELMDRMREQSTKFGTEIITETVSKVDLSSKPFKLWTEFNEDAEPVTTDAIILATGASAKRMHLPGEETYWQKGISACAVCDGAVPIFRNKPLAVIGGGDSACEEAQFLTKYGSKVFMLVRKDHLRASTIMQKRAEKNEKIEILYNTVALEAKGDGKLLNALRIKNTKKNEETDLPVSGLFYAIGHTPATKIVAGQVDTDEAGYIKTVPGSSLTSVPGFFAAGDVQDSKYRQAITSAGSGCMAALDAEKYLTSLE

SEQ ID NO: 20641 - protein, 325 aa, Staphylococcus epidermidis RP62A
MKLMNKIIVPVTASALLLGACGSNATESKDNTLISSKAGDVKVADVMKKMGKEQIANTSFSIVLNKVLADKYKDKVDTKDIDKDIKKEEKQYGGKDQFESMLKQQGMSLDDYKEQKKLSAYQKQLLLDKVNVSDKEIKENSKKTSHILIKVKSKSSDKEGLSDKKAKEKAEKIQKEVEKNPNKFGEIAKKESMDSSSAKKDGSLGYVIKGQMVDSFEKALFKLKEGEVSKVVKTDYGYHIIKADKETDFNSEKSNIKQKLIEEKVQKKPKLLTDAYKELLKEYKVDYKDRDIKKAIEDSILDPDKIKQQQQQQSQGGSGLTNSGS

SEQ ID NO: 20642 - protein, 300 aa, Pseudomonas syringae pv. syringae B728a
MSAHIIDGKAAAARVLQQVRHDVNILKAEGIEPALAVILVGNDAASEVYVRNKILRAGEAGIRSLEHRLPADSSQARLLALIAELNADNTVNGILLQLPLPAHIDENRVLQAIDPDKDVDGFHSENVGGLSQGRNVLTPCTPSGCLHLLEETCGDLSGKHAVVIGRSNIVGKPMAALLLQAHCSVTVVHSRSTDARALCQLADIVVAAVGRPRLIDASWLKRGAVVIDVGINRIEDHGRSRLVGDVDFASATEVASAITPVPGGVGPMTIAFLMKNTVTAARQQAHAQRSQPEAVCLSTY

SEQ ID NO: 20643 - protein, 307 aa, Campylobacter jejuni subsp. jejuni NCTC 11168
MKLIIATRKSQLALWQSEHVAQILKNTHQIEVLLEGFKTKGDVLLDSPLAKIGGKGLFTKELEESMLRKEAHLAVHSLKDVPSFFPQGLVLAAVSKREQSNDAMLSQNYKDFLSLPKGAKIGTTSLRRKMQLLLLRPDLEIISLRGNVNSRIEKLKNNDFDAIILAMAGIKRLNLDKQVNFVYEFSKDELIPAASQGALGIESINDEKILELLKCLNDENALIETSIEREFIATLEGGCQVPIGINAELLGDEICVRAVLGLPDGSEILKDKRMIKKNDFKGFGESLAKEFIAKGAKELLKKAESMI

SEQ ID NO: 20644 - protein, 333 aa, Xanthomonas axonopodis pv. citri str. 306
MAIKVGINGFGRIGRNVLRSAVQNFANDIEIVAINDLLEPDYLAYMLQYDSVHGRFKADVSVDGNTLIVNGKKIRLTQERDPANLKWDAVGADVVIESTGLFLTKETAQKHIDAGAKKVILSAPSKDDTPMFVYGVNDKTYKGEAIISNASCTTNCLAPLAKVINDKWGIKRGLMTTVHAATATQKTVDGPSNKDWRGGRGILENIIPSSTGAAKAVGVVIPELNKKLTGMSFRVPTSDVSVVDLTVELEKPATYAEICAEVKAQSEGALKGVLGYTEDKVVATDFRGETCTSVFDADAGIALDSTFVKLVSWYDNEWGYSNKCLEMVRVVAK

SEQ ID NO: 20645 - protein, 899 aa, Zea mays
  misc_feature (26)..(26): Xaa can be any naturally occurring amino acid
SWGHSAVGNVNSQLGLAREVLHRLEXAQDSRPLSSDELWLLQKLKQHCLVLASLERTVARLRSRLHYLRDGDANTKKFHLQARFRKKRNFISHLENEGRTVTSHEQMQEVLDDFFSNLLGSNIQRPYSLNLAACHRDAIDLSSLEAPFSEKEVRDTIGALPSDKAPGPDGFTGKFYKCCWHIIKSDLLAAINSLHQGNTHKLGMLNSAYLTLLPKKVDALSARDFRPISLIHSFAKLVTKMLANRLGPYLQELVASNQSAFVRGRSIHDNFMLVQHSIKSLHKKRVSSLLLKLDISKAFYSVSWAFLIEVLSYLGFGPVWRNMISNILASSSTQVLLNGSPGIPIRHRRGLRQGDPLSPMLFVLVMDVLNSLFNLAENRGLLHSLEGANIRNRLSIYADDVVLFVQPFEEDFQCVKTFLDCFGSATGLVSNLQKSFVIPIRCNDQAVQMGCNILRCTSSSFPCTYLGLPISDKKLRKSDLMVWVEKVADRLPNWKARLLSLAGRTAMVRFVLSAIPIYLLIAMKIPKWVINSIHKIQRGFIWKGRKEVNGGNCLVSWDIVTRPLDLGGLGISNLLYQSWALQAKWLWLEKTDPTKSWSGLDLPIQQLVKRFFTASIVSLVGNGHNTLFWTDRWLDGSCIQDFAPAVVANVGKRAISSRTVAHALQHWQWISDIETPLNLPGLQQYLNLWDALRGVVLTQEADRHVWIHSSSGQFSSKSCYRAFFMGSITFEPWKRLWKTWAPPKCKFFLWLAIRNKCWTADRLQKRGLAYPEVCPLCDQDSENIQHLLCTCIFARQFWFYILSSLGLANLSPASNESTFADWWEKVCKQVHKSKRRGFNSIIILGAWCLWLHRNKAVFDGVRPSIHGIKSVFLDEFECWRLAGARHLEALGPGAAIFRS

SEQ ID NO: 20646 - protein, 676 aa, Oryza sativa
MPAAESCHSRSLSWLVKSCIPADPARHIAVPVLCPTPQPPPPSSPPAPPISALPDDLLLECLARVPRASLPPLPAVSRRFATLLASDAFLHLRRAHAHLRPSLLALSVSDNGCIAQALLRFESSVPVLEVAALPLPPTLLHCGGSVFAHARAVVLGRDVFLIGRGATLRVDALTGAARACAPTLFPRKKFAAAAVGDRIYVAGGSARTAAVEEYDPEVDAWRVVGEAPRRRYGCAGASAGGVFYVAGGVAVSGEGARALEAHVCAGSVDALHVASGAWARPRALPGGGCVVGACGVGDHLYMVASHAVELSFWRWCGATGRAGDGRGWGGWVALEAPPMPRGSVGLGMAVRVAMAGLGTNRVAAVVSAAAVRGHNAGGGALEGMVLVYDIAGGKWSRAPDLPPGFRRAALQFAMWSSSCFINHDEREPRDCTNRFGSASTNSALNFVTPFRLIRRSHRSSFVPLSSRKPHFPAAAVSISSILFAHTEMHARLLLRMHAPISFAPASSPDAASFAPAAADVGGAVCLGYGIAIAVGVLVFISTVMLASYICVRAKAGAAAVLLADDDDDGGAPAASAVVVLGLDGPAIDALYPKFLHVGVGDDDNACAGAQCAICLGEFVAGDALRRGPGCGHRFHAECVERWLRVSATCPVCRDSPLPSPMATPLAEAVPLAAHAR

SEQ ID NO: 20647 - protein, 421 aa, Mycobacterium leprae
MALVVQKYGGSSVADADRIRRVAERIVQTKKQGNDIVVVVSAMGDTTDDLLDLAQQVCPEPPARELDMLLTAGERISNALVAMAIESFGAQARSFTGSQAGVITTGTHGNAKIIDVTPTRLQFALDEGRIVLVAGFQGVSQDTRDITTLGRGGSDTTAIAMAAALGADVCEIYTDVDGIFSADPRVVHNARKLDTVTFEEMLEMAACGAKVLMLRCVEYARRHNIPVHVRSSYADKPGTVIVGSIKDVPMEDPILTGVAHDRSEAKVTIVGIPDIPGYAAKVFRAVADADVNIDMVLQNVSKVEDGKTDITFTCSRDSGPIAVAKLGSLRDEIGFTQLLYDDHIGKVSLIGAGMRSHPGVTATFCEALAAVGVNIELISTSEIRISVLCRDTELDKAVFALHEAFGLGGEDEVTVYAGTGR

SEQ ID NO: 20648 - protein, 607 aa, Mycobacterium leprae
MASFSESLSQDPADAYKSAPSITKPMGPPSPGQPQWNPQRATSMPVFRYRPFAKEVEPIRLVDRTWPDRVIDCAPLWCAVDLRDGNQALIDPMSPICKRRMFDLLVRMGYKEIEVGFPSASQTDFDFVREIITDGTIPDDVTIQVLTQCRPELIERTFEACENASRVIVHFYNSTSILQRRVVFRADQATVKAIATDGARKCVEEAFKYPGTHWRFEYSPESYTGTELEYAKQVCDAVGEVIQPTPDNPIIFNLPATVEMATPNVYADSIEWMSRNLANRESVILSLHPHNDRGTAVAAAELGYHAGADRIEGCLFGNGERTGNVCLVTLGLNLFSRGVDPQIDFSNIDEIRRTVEYCNKLRVHERHPYGGDLVYTAFSGSHQDAINKGLDQMKIDADAADSDVDDILWQVPYLPIDPRDVGRTYEAVIRVNSQSGKGGVAYIMKADHGLELPRRLQIEFSRAIQKISEGEGGEITPTEMWDVFFEEYLSPVQPLERIKQRVNAAEEDGGSTSIAATVKINGEETEISGVGNGPLAAFIDALGHVGLQVAVLDYSEHAMNAGDDAQAAAYVEASVHGHTAWGVGIAPSITTASLRAVVSAVNRAMPR

SEQ ID NO: 20649 - protein, 589 aa, Zea mays
  misc_feature (559)..(559): Xaa can be any naturally occurring amino acid
  misc_feature (572)..(572): Xaa can be any naturally occurring amino acid
MCGILAVLGCSDWSQAKRARILACSRRLKHRGPDWSGLYQHEGNFLAQQRLAVVSPLSGDQPLFNEDRTVVVVANGEIYNHKNVRKQFTGTHNFSTGSDCEVIMPLYEKYGENFVDMLDGVFAFVLYDTRDRTYVAARDAIGVNPLYIGWGSDGSVWIASEMKALNEDCVRFEIFPPGHLYSSAGGGFRRWYTPHWFQEQVPRTPYQPLVLREAFEKAVIKRLMTDVPFGVLLSGGLDSSLVASVTKRHLVETEAAEKFGTELHSFVVGLEGSPDLKAAREVADYLGTIHHEFHFTVQDGIDAIEEVIYHDETYDVTTIRASTPMFLMARKIKSLGVKMVLSGEGSDELLGGYLYFHFAPNKEEFHRETCRKVKALHQYDCLRANKATSAWGLEVRVPFLDKEFINVAMGMDPEWKMYDKNLGRIEKWVMRKAFDDDEHPYLPKHILYRQKEQFSDGVGYNWIDGLKSFTEQQVTDEMMNNAAQMFPYNTPVNKEAYYYRMIFERLFPQDSARETVPWGPSIACSTPAAIEWVEQWKASNDPSGRFISSHDSAATDHTXAVSRRWPTAAATXAANGTVNGKDVAVAIAV

SEQ ID NO: 20650 - protein, 231 aa, Aspergillus nidulans FGSC A4
MSQSHALSDDQVAGELRKMTAFIRQEALEKAREIQLKADEEFAIEKSKLVRQETAAIDTQYEKKFKQAAMSQQITRSTLANRTRLRVLSARQELLDDLFQEARGQISGIAAKDAKKYQEVLKALILEGAYALNEPTVDVRARKKDKDAVKKAIGEAEKDFKVAVGKEVKINLDEEEPLPDDNAGGIVITGGGGKIEINNTFEERLRLLEIDALPVVRETLFGKNANRRFHD

SEQ ID NO: 20651 - protein, 256 aa, Azoarcus sp. T
MPVTLEVKNHVAYVTLNRPEAMNSLDPESTCDLAEIWARVRTDPDIRVAVLSGAGEKAFCTGTDMKKAPPPTECMAATYLREGQPILPHMKMWKPIIAAINGYAVGGGLEMALACDMRIASSNAKFGLTEVKVASLAGLNGTQALPRAIPQAVAMKMLLTGEMISAEEALRYGLVSDVVEPSALADLARTYAEKIASAAPLSVQATKQAAVLGKDMPLEHGILYSHLLWGVLRDTEDRKEGFKAFGERRAPEFRGA

SEQ ID NO: 20652 - protein, 332 aa, Synechocystis sp. PCC 6803
MASTDFKDYYQILGVTKTASEAEIKKQFRKLALKYHPDKNPGDKAAEEKFKEISEAYEVLSDPEKRQKYDQFGRYWQQAGTAGQPSGSYGPGVGVDFGGFDFSQYGNFDEFINELLGRFNTPGGGGQRTSYSYSTGGPGFNDFGGFGNAQAPAGDREATLQLTLAEAFRGVEKRLNLGEEMVTVRIPAGAKNGSRVRVRGKGMASPYGQRGDLYLNLQLTPHPFFQFEGDNLVCELAIAPDEAVLGADISVPTPDGMVRMKVPAGVKSGQSLRLKGKGWPNPKQGRGDQLVRLIITAPKNPSAIERECYEKIQAQRTENPRQAVEKYANLLA

SEQ ID NO: 20653 - protein, 226 aa, Lotus japonicus
MAPAKGSSLTPIQVENLQFPASVTSPATAKSYFLGGAGERGLTIEGKFIKFTGIGVYLEDTAVDSLATKWKGKSSQELQDSLDFFRDIISSPSEKLIRGSKLRPLSGVEYSRKVMENCVAHMKSAGTYGEAEATAIEKFAEAFRKVDFPPGSSVFYRQSTDGKLGLSFSLDDTIPEEEAVVIENKALSEAVLETMIGEHAVSPDLKRCLAERLPIVMNQGLLLTGN

SEQ ID NO: 20654 - protein, 214 aa, Wolbachia endosymbiont of Drosophila ananassae
MVQATYASMSLPGISSVEDVLEDARSGKLFILVDDENRENEGDLIVLAEKIKPEHMAFMVRYGTGVVCLAMTKFHMKRLGLNFMEKKNIGENHTAFTTSIDARYGITTGVSAEDRTKTIHAAINKDGTQDDIITPGHVFPVIAHKGGVAQRAGHTEASVEMAKLVGFDHSAVICELVNDDGSMMRLPQLLKFAEQHKIKLTTIDKLISYVKNLN

SEQ ID NO: 20655 - protein, 354 aa, Burkholderia sp. 383
MRFDLEPPSSTAAAHRIGVLLINLGTPDAPTPRAVRRYLAEFLSDPRVVEIPQAVWQVLLRTLILPLRGRASAKKYAAVWMPEGSPLRVYTERQTDSVRHLLTSNGYHVMVDYAMRYGSPNISHALAQFKRAGVERVLLMPMYPQYSASTTATAFDAAFDALARMRNQPEVRTVRHYADHPAYIHALAEQVRQYWAQHGRPDFAAGDKLVLSFHGVPKRTLDLGDPYHDQCQQTGALLTAALGLSTTECRVTFQSRFGKAEWLQPYTAPTLREFGEAGVRRADVFCPGFTADCLETIEEIGMEVRDEFLAGGGKAFHRIPCLNGAPAWIGALGEIVAENLQGWPVRAAQPETVS

SEQ ID NO: 20656 - protein, 221 aa, Lotus japonicus
MALPSVTALQVENVAFPPTLIKPPASANTLFLGGAGERGLHIQDKFVKFTAIGIYLQDTAVPSLAVKWKGKPVDELTESVQFFRDIVTGPFEKFMQVTMILPLTGQQYSEKVSENCVAIWKHLGIYTDEEGKAIDKFVSVFKDQTFPPGSSILFTVLPKGSLAISFSKDGSIPEVESAVIDNKLLSEAVLESMIGAHGVSPAAKQSLASRLSELFKHHAEV

SEQ ID NO: 20657 - protein, 365 aa, Pichia pastoris
MLPFQAVAKAGLKPQLTRMSVNSLRAASSSAGPTKLSVRDALNSAMAEELDRDPEVFLIGEEVAQYNGAYKVSRGLLDKYGPKRIVDTPITEMGFTGLAVGASLAGLKPICEFMTFNFAMQSIDHIINSAAKTLYMSGGKQPCNITFRGPNGAAAGVAAQHSQDYSAWYGSIPGLKVISPYSAEDYKGLFKSAIRDPNPTIFLENELLYNEEFEVSPEVLSPDFTVPIGKAKIEREGTDITIVSHSRNLQFCLEAATILKEKYGVSSEVLNLRSIKPLDVPAIVESVKKTNHLITVEAGFPAFGVGSEICAQVMESEAFDYLDAPVERVTGCEVPTPYAKELEDFAFPDTPTIIRAVEKVLSLKE

SEQ ID NO: 20658 - protein, 473 aa, Pichia pastoris
MSALTALRVTRPLLRFPAARVSLNLFARGYASKSWPEHTVIDMPALSPTMTQGNIVKWHKAVGDQLEPGESIAEVETDKASMDFEFQEDGYLAKILLGDGTQEIPVGKPIAVYVEDKADVEAFESFTIEDAGAPAAAAALAKEEPKEEPKEAATPAPSSEESKSEAKPSSSKQPRPAGSRIIASPLAKTIALEKGISLKEITGTGPNGRIVAKDVESYKPKSTAAPAAPVSSPAPSTATAAYQDIPLTNMRKVISKRLTESKQSAPNYIISSSISVSKLLKLRASLNASSNDRYKISVNDLLIKAIAVACKRVPEANAYYLEQEGVIRQFENVDVSVAVATPTGLITPIVFNADSKGLETISKTVKDLGKRAKENKLKPEEFQGGTITISNLGMNPSVSFFTSILNPPQSAIIAIGTTEKKAVPDKGSPHGFVFDDVIQITGTFDHRTVDGAKGGEWVRALKQIVENPLELLL

SEQ ID NO: 20659 - protein, 296 aa, uncultured bacterium
NSRLCMSSAVAGYMQSLGSDGPPACYDDLEQTDLAFLIGTNTAECHPIVFNRLQKQHKKNRNMKLVVVDPRRTPTAEAADIHLPIRPGTNIDLLHGIANLLMKWGYIDSLFIDECTRGFPEYAEVFQQYEPEQVARRCGIKLSDLEQVARLWGKSDRILSLWSMGFNQYAEGTAKVRTLINLHLITGTIGKPGCGPFSLTGQPNAMGGREAGGLSHILPGYRVVKNPDHRAEVERAWGLPPGSISPQAGRDAWAMIRGLEQDEVGVLWVAATNPAVSMPDLERTKKALDKSPFTIL

SEQ ID NO: 20660 - protein, 388 aa, Arabidopsis thaliana
MTTISDLPYDLVKEIFSWVPFTSLRAVRSTCKTWNALSKNQIFGKKSVARNQFLELMILDSRVCSLRFDLQKIRNEDEEDLVDPSMKQISIPNNDDQVEISRVYHCDGLLLCIPKDNSSLMLWNPYLGQTKRIRPKNTFHRDDSFALGYNNRNHKILRLNEENESHIDVYDFSSDSWRTVPDDNPYRDELIYQSGVSLKGNAYFFDREVTTEAEVGTEDLLITGIEDYLRCFDFTTERFGPRLPLPFILPSPSFEYLALSWARDDKLAVLYSHYDTFDIIEIWISTKIEPNAVSWSTFLKVDMSLINGLTDDFLIRFEPKSFFIDEEKKVAVLFDTKVTETCRYQMAYIVGDDGYFKSVNIGVISNSHWIGGELVRSSYVPSLLQLQV

SEQ ID NO: 20661 - protein, 352 aa, Lactococcus lactis subsp. lactis Il1403
MRIEKLKAKMLTENIDSLLITDMKNIFYLTGFSGTAGTVFLTAKRNIFMTDSRYSEMARGLISDFEIIETRDPISLLTDLSASESIKNIAFEETVDYAFFKRLSDATPGLELLATSNFVLELRQFKDDTEIDLIKKACAIADEAFMSALKFIEPGRTEIEVANFLDFKMRDLEASGISFETIVASGKRSSLPHGVATSKMIQFGDPVTIDFGCYYEHYASDMTRTIFVGSVDDKMRTIYETVRKANEALIKEVKAGMTYAEYDKVPRTVIEEANFGQYFTHGIGHGLGLDVHEIPYFNQSMTENHLEAGMVITDEPGIYIPEFGGVRIEDDLLVTENGCEVLTKAPKELIVI

SEQ ID NO: 20662 - protein, 290 aa, uncultured bacterium
NSRLCMPSAVSGYIQSFGSDGPPCCYEDLEQTDCAFLIGTNTAECHPIVFNRLHKHCKKNRKVKMIVVDPRRTPTAEAADLHLAIRPGTDIDLLNGIAHLLMRWGKINTLFIDDCTRDFPLYADIIRHYPPELVARKCGIRLDELEKAARYWGDAERVLSLWSMGMNQSSEGTAKVRTLINLHLMTGTLGRPGSGPFSLTGQPNAMGGREAGGLAHILPGYRLVKNPQHRAELEQLWGLKSGQISPEPGLSAWDMILGLETGAVGFLWIAATNPAVSMPDLERTKAALMQ

SEQ ID NO: 20663 - protein, 697 aa, Aspergillus nidulans FGSC A4
MMPLRPSKSALRTLHYQRYIASGRRAFASAVSTPHRFSTQKRDQSTATATASTSRPRPSPAFNQEPSRNEVSPLQNRQLPELDDSYGILILFVQIFVGLSGGEIFHEMMLRLGVKHVFGYPGGAILPVFDAIYNSKHFDFILPRHEQGAGHMAEGYARASGKPGVVLVTSGPGATNVITPMQDAFSDGTPMVVFCGQVVTTSIGTDSFQEADVVGISRACTKWNVMVKSVAELPRRIQEAFEIATSGRPGPVLVDLPKDITAGILRKPIPMQSTLPSRPSAATLAAKELSEKQLHSTINRVARLVNVAKKPVLYVGQGILENPDGPKLLKELADKACIPVTTTLQGLGGFDELDPKSLHMLGMHGSAYANLAMQEADLIIALGARFDDRVTGSIAKFAPQAKLAASENRGGIVHFEIMPKNINKVVQANEAVEGDCAENIRHLLPLVEPVSERPEWFAQINDWKTRFPLSLYEKQTPDGPIKPQALIEKLSDLTAHMKDRTIITTGVGQHQMWAAQHFRWRRPRSMITSGGLGTMGYGLPAAIGAKVARPDCLVIDIDGDASFNMTLTELTTAAQFNIGIKVLLLNNEEQGMVTQWQNLFYEDRYSHTHQKNPDFVRLAEAMGVAAERCTKPSEVESKLKWLIESDGPALLEVFTDRKVPVLPMVPGGSGLHEFLVFDEAKDRERRALMKKRNPNGV

SEQ ID NO: 20664 - protein, 405 aa, Pseudomonas aeruginosa
MRRVVITGLGIVSCLGNDKDTVSANLRAGRPGIRFNPSYAEMGLRSHVSGSVDLNLEELIDRKVFRFMGDAAAYAYLAMEQAIKDSGLTPEQISNPRTGLIAGSGGASTLNQMEAIDTLREKGVKRIGPYRVTRTMGSTVSACLATPFQIKGVNYSISSACATSAHCIGQAMEQIQLGKQDVVFAGGGEEEHWSQSCLFDAMGALSTQYNETAEKASRAYDAKRDGFVIAGGGGIVVVEGLEHALKRGAKIYAEIVGYGATSDGYDMVAPSGEGAIPCMQQALATVDAPIDYLNTHGTSTPVGDVGEIRGVREVFGDKAPAISSTKSLSGHSLGAAGVHEAIYCLLMMEGGFIAGSANIDELDPEVADLPILRETRENAKLDTVMSNSFGFGGTNATLVLKRWQG

SEQ ID NO: 20665 - protein, 295 aa, uncultured bacterium
NSRLCMSSAVSGYIQSFGSDGPPCCYEDLEQTDYAFLIGTNTAECHPIVFNRLHKHCKKNRKVKMIVVDPRRTSTAEAADLHLAIRPGMDIDLLNGIAHLLMRWGKINTLFIDDCTRDFPLYADIIRHYPPELVARKCGIRLDELEKAARYWGDSERVLSLWSMGMNQSSEGTAKVRTLINLHLMTGTLGRPGSGPFSLTGQPNAMGGREAGGLAHILPGYRLVKNPQHRAELEQLWGLKSGQISPEPGLSAWDMILGLETGAVGFLWIAATNPAVSMPDLERTKAALNSPHLRY

SEQ ID NO: 20666 - protein, 403 aa, Photobacterium profundum SS9
MSELYDVIIIGGGAGGMSAGVYAARGKMKTLIIEEKRKAGGQAATTDEMENYPGILSATGPELMDAFRAHCDKFGVEFTKGIVNKIDVADDGYLKTLTTTKGEVFQAKSIIIGTGASPLILGVPGENEFRGKGVSYCATCDADFFEELDIVVVGSGNTAVEESLFLTKFVNKITMIVRRDHGILAADRTAQEQAFANDKINFVWNSVLDEITGDELVNGVNVKNIKTGEISHIESDGVFMFVGTVPKTDFIKGLIDLNSHGYIVTNDKQETNIPGIYAVGDVTEKFLRQVVTAAGDGAVAAVAADRYIEEEDNWRKSVVDFDGTALVAFWAPQNQDSIDVINQLEAQNKGQAGKNVVTIDIFKNQKIAKQFNVSEIPVVIRFDAGQEAKRVNVKDLNELETLY

SEQ ID NO: 20667 - protein, 219 aa, uncultured bacterium
NSRLCMSSAVAGYTRSLGSDGPPCCYEDLDDCSVAFLIGTNTAECHPVLFQRLLKRKKRNPKDVTVVVVDPRATDTTKAADHHLAIKPGSDLALLHGIAHLVLEAGGLDADFIEEATEGLADFAQLIAGATPARTAELCGISEAQLRQVAALWAQRDRVLSLWSMGVNQRREGTAVVCGLINLHLLTGQIGKPGAGPFSLTGQPNAMGGREAGGLAQLL

SEQ ID NO: 20668 - protein, 104 aa, Glycine max
  misc_feature (32)..(32): Xaa can be any naturally occurring amino acid
  misc_feature (51)..(51): Xaa can be any naturally occurring amino acid
MAVEIVPLVHAFMAFGHVTKFLINCVGYLQNXGTPPSGCSIGVKSLNAIVXIDVDRLTECCCLKSVASHISVLRANYVVSLTGICMFYIPCKISPSIYCATVCV

SEQ ID NO: 20669 - protein, 219 aa, uncultured bacterium
NSRLCMSSAVAGYTRSLGSDGPPCCYEDLDQCSVAILIGTNTAECHPALFQRLLKRKKRDPKGLTIVVVDPRATDTSRIADHHLAIAPGTDLALLHGLARLIVQNNGFDSDFIDEATEGFAAYAKTIRTWTSAKVAALCGISEKELRQVARLWSRSQGVLSLWSMGVNQRREGTAVVSGIINLHLLTGQIGKPGAGPFSLTGQPNAMGGREAGGLAHLL

SEQ ID NO: 20670 - protein, 200 aa, Glycine max
  misc_feature (39)..(39): Xaa can be any naturally occurring amino acid
  misc_feature (107)..(107): Xaa can be any naturally occurring amino acid
LPLTSSAQDEEKLVVEPSHTKTSLPQLPAKDINNKISLXSTLAALGLFLSTRLDFGVSLKDLSAIAMPYEEALSNGKPTVVEFYADWCEVCREFAPDVYKVEQQFKXDQVNFVMLNVDNTKWEQELDEFGMEGIPHFAFLDKVGNEEGNVVGRLPRQYLLENVDALARGEASVPHARVVGQYSSAEARKVHQVADPRRHG

SEQ ID NO: 20671 - protein, 395 aa, Shewanella oneidensis MR-1
MSIEIKVPVLPESVADATIATWHVKVGQQVSRDQNLVDIETDKVVLEVVAPEDGHIGEFLFHEGDTVLGEQVIAKFIAGAVSGQEVTKAQAEAAAPAVASDESNDALSPSVRRLLAEHNVDASKVKGTGVGGRITKEDVEAFIKSAPKAAASAAPVVQPLAAGRSEKRVPMTRLRKTIANRLLEAKNSTAMLTTFNEVNMKPIMDIRKQYQDIFEKRHGIRLGFMSFYVKAVTEALKRFPEVNASIDGDDIVYHNYFDVSIAVSTPRGLVTPVLRDTDTMSLADIEKAVRDLAIKGRDGKLTVADMTGGNFTVTNGGVFGSLMSTPILNLPQSAILGMHAIKDRPMAVNGQVEILPMMYLALSYDHRIIDGRESVGFLVAIKDFLEDPTRLLLDL

SEQ ID NO: 20672 - protein, 290 aa, Shewanella oneidensis MR-1
MSVLINKDTKVICQGFTGGQGTFHSQQAIDYGTQMVGGVSPGKGGSEHLGLPVFNTVKDAVAATGATASVIYVPAPFCKDAILEAIDGGIELIVCITEGIPTLDMLQVKVKLEETGVRMIGPNCPGVITPGECKIGIMPGHIHLKGKVGIVSRSGTLTYEAVKQTTDEGFGQSTCVGIGGDPIPGTNFIDVLEMFQNDPQTEAIVMIGEIGGTAEEEAAAYIKAHVTKPVVSYIAGVTAPAGKRMGHAGAIIAGGKGTAADKFAALEAAGVTTVRSLADIGKALRAKTGW

SEQ ID NO: 20673 - protein, 466 aa, Lactococcus lactis subsp. lactis Il1403
MLYGKENRDEAEFLEPIFGSESEQVDLPKYKLAQQSIEPRVAYQLVQDEMLDEGNARLNLATFCQTYMEPEAVKLMSQTLEKNAIDKSEYPRTTEIENRCVNMIADLWNASEKEKFMGTSTIGSSEACMLGGMAMKFSWRKRAEKLGLDINAKKPNLVISSGYQVCWEKFCIYWDIEMREVPMDKEHMSINLDKVMDYVDEYTIGVVGIMGITYTGRYDDIKALDNLIEEYNKQTDYKVYIHVDAASGGLYAPFVEPELEWDFRLKNVISINTSGHKYGLVYPGVGWVLWRDKKYLPEELIFKVSYLGGELPTMAINFSHSASQLIGQYYNFVRYGFDGYKAIHERTHKVAMFLAKEIEKTGMFEIMNDGSQLPIVCYKLKEDSNRGWNLYDLADRLLMKGWQVPAYPLPKNLENEIIQRLVIRADFGMNMAFNYVQDMQEAIEALNKAHILYHEEPENKTYGFTH

SEQ ID NO: 20674 - protein, 501 aa, Brachypodium sylvaticum
EITDDRSSEQITEAISEKSDAMLISSNTSYSTTPDSMILVIKDQLKRAKKYIRFLPSRGNHGFIKDLRRRMRDIQQALGGATIDRQLPKKYFLFHCTTNVRGKIRAMELILRKIRQVHDNCVAAIDKLQTTLHSAENQLEAHKQQANYVAQIAVKALPKRLHCLALLLTNEYYSSSSSNKLFPYEDKLEDPKLQHYALFSDNVLAAAVVVNSTLVHAKKPADHVFHIVTDKLNYAAMRMWFLANPLGKAAVQVQNIEDFTWLNSSYSPVMKQLGSHFMIDYYFSTPQNRPDRNPKFRNPKYLSILNHLRFYLPEIFPRLNKVLFLDDDIVVQQDLSALWLIDLKGKVNGAVQTCGEVFHRFDRYLNFSNPLIAKNFDRRACGWAYGMNMFDLSEWRRQNITDVYHYWQEQNEHRLLWKLGTLPAGLVTFWNRTFPLDRSWHLLGLGYKQNVNPEDIERAAVIHYNGNLKPWLEVGLSKYRKYWTKYVNSDQAFIRGCNIHP

SEQ ID NO: 20675 - protein, 331 aa, Frankia sp. EAN1pec
MTMREALNLALDQALERDERVFLIGEDIADPGASGPTAGLSSRYGTERVLDTPISEAAIVGAAIGAAMEGFRPVAEIMIMDFIGIAADQIINHAAKMRFMTGGRTTAPITVRTQIYGGLGTGATHSQSLEAWFMHIPGLKVIVPSTPRDGKGLLTSAIFDDDPCIFLETIRLQGQRGMVPVDPGFSIPLGQADVKRAGTDVTLISYGRGVVESLGAADALARQEISAEVLDLRTLVPLDTAAIVESVRRTTRAVVVHDAVRFAGPGAEIVAILQGELFDQLAAPVERVGARFVPNPAPPALESQVYPDSEKIIAAVHRTLRWKTTREGARG

SEQ ID NO: 20676 - protein, 365 aa, Bradyrhizobium japonicum USDA 110
MIAPALQFWGNVMQLIVLPGDGIGPEITTATSGVLRAASERFQLNLRLEEHAVGHASLKQFGTTVRPELLDIVRGADGLILGPTATFDFKDEAHGEINPSRHFRKNLDLYANVRPARTYAGRPGRLGDFDLVVVRENTEGFYADRNMEQGNGEMLVTPDVAISLRRITRACCERIAHAACRLAMKRRRHLTIVHKANVLKIGDGMFLDICRAAAKGYAGLEVDDILVDAMMAHVVRNPDRFDVIVATNMFGDILSDLTAELSGSLGLGGSLNVGDRYAMAQAAHGSAPDIAGQDVANPVSLILSTALLLAWHGERSGAVRYEEAARAIEAAVAKAIGEGRATRDVGGRLGTIAAGAAIAEILQGA

SEQ ID NO: 20677 - protein, 626 aa, Shigella flexneri 2a str. 301
MAIEIKVPDIGADEVEITEILVKVGDKVEAEQSLITVEGDKASMEVPSPQAGIVKEIKVSVGDKTQTGALIMIFDSADGAADAAPAQAEEKKEAAPAAAPAAAAAKDVNVPDIGSDEVEVTEILVKVGDKVEAEQSLITVEGDKASMEVPAPFAGTVKEIKVNVGDKVSTGSLIMVFEVAGEAGAAAPAAKQEATPAATPAPAAGVKEVNVPDIGGDEVEVTEVMVKVGDKVAAEQSLITVEGDKASMEVPAPFAGVVKELKVNVGDKVKTGSLIMIFEVEGAAPAAAPAKQEAAAPAPAAKAEAPAAKAEGKSEFAENDSYVHATPLIRRLAREFGVNLAKVKGTGRKGRILREDVQAYVKEAIKRAEAAPAATGGGIPGMLPWPKVDFSKFGEIEEVELGRIQKISGANLSRNWVMIPHVTHFDKTDITELEAFRKQQNEEAAKRKLDVKITPVVFIMKAVAAALEQMPRFNSSLSEDGQRLTLKKYINIGVAVDTPNGLVVPVFKDVNKKGIIELSRELMTISKKARDGKLTAGEMQGGCFTISSIGGLGTTHFAPIVNAPEVAILGVSKSAMEPVWNGKEFVPRLMLPISLSFDHRVIDGADGARFITIINNTLSDIRRLVM

SEQ ID NO: 20678 - protein, 552 aa, Synechococcus sp. WH 8102
MTTSAPAEPTLRLVRLDAPFTDQKPGTSGLRKSSQQFEQANYLESFVEAVFRTLPGVQGGTLVLGGDGRYGNRRAIDVILRMGAAHGLSKVIVTTGGILSTPAASNLIRQRQAIGGIILSASHNPGGPNGDFGVKVNGANGGPTPASFTDAVFECTKTLEQYTIVDAAAIAIDTPGSYSIGAMQVEVIDGVDDFVALMQQLFDFDRIRELIRSDFPLAFDAMHAVTGPYATRLLEEILGAPAGSVRNGVPLEDFGGGHPDPNLTYAHELAELLLDGEEFRFGAACDGDGDRNMILGQHCFVNPSDSLAVLTANATVAPAYADGLAGVARSMPTSSAVDVVAKELGIDCYETPTGWKFFGNLLDAGKITLCGEESFGTGSNHVREKDGLWAVLFWLQILAERRCSVAEIMAEHWKRFGRHYYSRHDYEAVASDAAHGLFHRLEGMLPGLVGQSFAGRSVSAADNFSYTDPVDGSVTKGQGLRILLEDGSRVMVRLSGTGTKGATIRVYLESYVPSSGDLNQDPQVALADMISAINELAEIKQRTGMDRPTVIT

SEQ ID NO: 20679 - protein, 355 aa, Trichoderma asperellum
MSRSNAPNASASRKISFNVSEQYDIQDVVGEGAYGVVCSAIHKPSGQKVAIKKITPFDHSMFCLRTLREMKLLRYFNHENIISILDIQKPRSYDSFNEVYLIQELMETDMHRVIRTQDLSDDHCQYFIYQTLRALKAMHSANVLHRDLKPSNLLLNANCDLKVCDFGLARSAASQEDNSGFMTEYVATRWYRAPEIMLTFKEYTKAIDVWSVGCILAEMLSGKPLFPGKDYHHQLTLILDVLGTPTMEDYYGIKSRRAREYIRSLPFKKKVPFRTLFPKTSDLALDLLEKLLAFNPVKRITVEDALKHPYLEPYHDPDDEPTAPPIPEEFFDFDKHKDTLSKEQLKQLIYQEIMR

SEQ ID NO: 20680 - protein, 122 aa, Bacteroides fragilis NCTC 9343
MNIFIAGISYNLSNADLGELFEEFGEVISAKIVMDRETGRSKGFGFVEMPNDEEGNAAIAALNEKEIDGKTLAVSVARPREEGPRRNSNYGGGNRGGYGNNRGGGYGGGNRGGGYGGGRDRY

SEQ ID NO: 20681 - protein, 661 aa, Desulfovibrio vulgaris subsp. vulgaris str. Hildenborough
MLVYAPRGPAPRPAPLHRKGRMFMAYAPQTGRGTVAALPPLCRHRRRKASTKRIRPFTRCARCLLHAMGMAMSSHRSTGVFTMSGLFKKKETAAQAADTQTQTPTPEAHEWLIPEEGRDQLQKVFAGLPGDVTIEVYTGGDPKNLFDDYARRFVADLALLAPRIKPAFHGLDSDMARKRGVTLSPTLLFNPEEYRIRFTGAPLGEEARAFIEAIFLVSARTSGLSQAAKTILAQLDGARSPRVFSSPGCPYCPAQCANAIKCAIERPDLVSAECVNADEFPDLSARYGVGSVPHTQFDESYKGIGLMPEERFVVELVALKDAERWLNEHAAKGGAHGAGTGQGAGSDAGVEVTETDLLVLGAGPAGLSAAIYAERSGLATVVLDKGIVGGQVTVTPVVENYPGFADIAGIKLVEVLSSHARQYATIRENEGVDDIKLGRRIEVHTPRNVFLARAVLFATGAQWRKLDVPGEDRFYGKGVSYCASCDGFVYRGRKVAVVGGGNTALTDALHLRNLGVEVTVIHRRDTFRAEKALQDSLTREGIPVIWNAVVEEVMGDTEVRGVRLRDTKTGETRDVPFDGVFVAIGHVPNSEQAADLGVDLEPDGSIKVDRHMRTNIPRVYAAGDVIGGVRQIVTAVGSGATAALSAFEDLQQPRWKKDKSA

SEQ ID NO: 20682 - protein, 222 aa, Ashbya gossypii ATCC 10895
MSDLIIGLSDGLTVPFALTAGLSSLGDSKLVITGGFAELISGAISMGLGGFLGAKSESDYYHSEVKQEKRKFYNNTQLVTHEIEDILLEINPDFSDATIVSFIKDLQRDPELMVDFIIKYGRGLEEPAENRQVVSAATIGGGYFIGGFIPLLPYFFVDQVGTGLILSIAIMAITLFWFGFFKTQISMRDNCTTQKKCMEGIQMMAVGGIAAASAWFFVRILG

SEQ ID NO: 20683 - protein, 356 aa, Aspergillus oryzae
MNSVDIGRCRKRIVQYIWDPEPRNDEEPDASIWCLGVEYAPQPQKITANTTPDNDEANHPMTLTVRIRTQLMDPQGFTSDTGWGCMIRSGQSLLANAMLTLCLGRDWRRGDKAEEEARLLSLFADHPDAPLSIHRFVKYGAESCGKHPGEWFGPSATARCIEALSAQCGNIAPRVYVTNDTSDVYEDSFLRVARSGSGSIQPTLILLGTRLGIDNVTPVYWDGLKAVLQLPQSVGIAGGRPSASHYFIGTQGPHFFYLDPHTTRPAVPYSIDGRLLSKTEISTYHTRRLRRIHIQDMDPSMLIGFLVRNEDDWEDWKGRVGSVVGKQIIHVFKGEEATYNQGRRGALDEVEALDDA

SEQ ID NO: 20684 - protein, 175 aa, Ashbya gossypii ATCC 10895
MVPVFSQRLRNAWHRGTGARAAERYIKAPWEDTGRLGRAASNKNMSGKGGKAGSAAKASQSRSAKAGLTFPVGRVHRLLRKGNYAQRIGSGAPVYMTAVLEYLAAEILELAGNAARDNKKTRIIPRHLQLAIRNDDELNKLLGNVTIAQGGVLPNIHANLLPKKSAKATKASQEL

SEQ ID NO: 20685 - protein, 462 aa, Erwinia carotovora subsp. atroseptica SCRI1043
MRSIKRLPMPPTRGVLGHVDYLKRSDIHLQMLRWKAQYGCFFRLRLGLSSAVVIADTEWIRTIMKSRPDEFRRISSIESVFQEAGLNGVFSSEGERWELQRKLTEPMFQPAHLKYFYSSLRKVTSRLSERFTMLAETGEAIALVDEFKRYTVDITSLLAFGEDVNTLEQGDNPLSQSLRHLFPIINERCESPIPVWRYIRRARDKQFDASLNLIREYVDGFISRQRQRIQLNPQLLEAPENMLQVMLAEQQKDGTLKDDDIVANAITLLIAGEDTTANTLTWMSFLLCSAPSVEECVFQECKEAAEGVGAILPWPLPRMAWLTAVMYESMRLKPVAPLLYLEPTRDTVIDDFLIKKGTPLLLMLNASGFNDELFQQPYDFMPERWLERGKAAFSDLQPFGGGPRMCPGRSLALMEIKLGFHALCSGFHVEALQVASAVTESFAFTVTPSGFRVKLHKRELQQ

SEQ ID NO: 20686 - protein, 227 aa, uncultured archaeon GZfos10C7
MQTKGYKTRRIARSLRYASFKGCNDRLEATTIRYIYIHTPKKVKFNIFKLKTNLTNTVEKIFKMEEREENRVSYADTGEERGTDTDINVDIEIERIKERKMREMEEEIKVMRESGKEGLGAIDQPLTLDDNSFVETVGKYPVVVVDCWAPWCGPCKMIAPVIEELAREYAGKVVFGKLNVDDNPRTATEFAIMAIPTLFIFKHGEPVDVIQGAVPKQYLEAKVKEWL

SEQ ID NO: 20687 - protein, 429 aa, Bacillus cereus ATCC 14579
MAFEFKLPDIGEGIHESEIVKWFIKPGDEVNEDDVLLEVQNDKAVVEIPSPVKGKVLEVLVEEGTVAIVGDTLIKFDAPGYENLKFKGDDHDEAPKAEEAAVEAPAAEATPAATAEVVNERVIAMPSVRKYAREKGVDIHKVAGTGKNGRIVKADIDAFANGGQTVAATEAPAAVEATPAAAKEEAPKAQPIPAGEYPETREKMSGIRKAIAKAMVNSKHTAPHVTLMDEVDVTELVAHRKKFKAVAADKGIKLTYLPYVVKALTSALREYPMLNTSLDDASQEVVHKHYFNIGIAADTDKGLLVPVVKDTDRKSIFTISNEINDLAGKAREGRLAPAEMKGASCTITNIGSAGGQWFTPVINHPEVAILGIGRIAEKPVVKNGEIVAAPVLALSLSFDHRLIDGATAQKALNQIKRLLNDPQLLVMEA

SEQ ID NO: 20688 - protein, 340 aa, Lotus japonicus
MGSAAKTVCVTGSTGFIGSWLVMRLMERGYMVRATVQRDPDNMKKVKHLLELPGAKTNLTIWNADLTEEGSFDEAIKGCSGVFHVASPMDFNSKDPENEVIKPAINGVLDIMKACLKAKTVRRLVFTSSAGILSVSERHKHMLDETCWGDLEFCKKVKMTGWMYFVSKELAEQEALKFAKENNIDFVSIIPSLVVGPFLMPTMPPSLYTALCPITGNEAHYMIMKQSQFVHVDDLCLAHIFLFEHPESEGRYMCSACDANIHDIAKLINTKYPEYNVPTKFKNIPDELELVRFSSKKIKDMGFQFKYTLEDMYTGAIDACREKGLLPKAAETPSNGIMEK

SEQ ID NO: 20689 - protein, 989 aa, Prochlorococcus marinus str. MIT 9312
MESFQQIKNNKVDLISTNDPLDKNRLLIEDLWESVLREECPDDQAERLIQLKELSYSKQIEGDSSKTFKKEIVDIVNSMDLAESIAAARAFSLYFQLVNILEQRVEEDRYIQSFTNKNVQKSPDNLDPFAPALARQNAPVTFRELFYRLRKLNVPPGKLEELLQEMDIRLVFTAHPTEIVRHTIRHKQTRVANLLKKIQVEQFLTKEEKNFLKIQLKEEVRLWWRTDELHQFKPSVLDEVDYALHYFQQVLFNAMPQLRGRIAEALTENYPDVQLPSQSFCNFGSWVGSDRDGNPSVTPEITWRTACYQRQLMLERYITATSHLRDQLSVSMQWSQVSSSLLESLETDRVKFPAIYEARATRYRSEPYRLKLSYILEKLRLTQERNNLLADNGWKFDLEGELNTKNIDKVENLYYKSVNEFTYDLELIKNSLISTDLTCEAVNTLLTQVHIFGFSLASLDIRQESTRHSDAIQELTKYLDLSVQYDQMSEDEKIKWLVDELNTKRPLIPSDVKWTNTTEETFSVFKMVKRLQQEFGSRICHAYVISMSHSASDLLEVLLLAKEMGLLDQNSKNSNLLVVPLFETVEDLKRAPEVMEKLFKLDFYKSLLPKVGESFKPLQELMLGYSDSNKDSGFVSSNWEIHRAQIALQNLASRNNILLRLFHGRGGSVGRGGGPAYQAILAQPSGTLKGRIKITEQGEVLASKYSLPELALYNLETVTTAVIQNSLVNNRLDATPEWNQLMSRLAETSRSHYRKLVYENPDLLNFFQEVTPIEEISKLQISSRPARRKKGAKDLSSLRAIPWVFGWTQSRFLLPSWFGVGTALSSELNSDPQQIELLRVLHQRWPFFRMLISKVEMTLSKVDLEVAKYYVDTLGSEENKDSFDDIFEVISKEYSLTKSLVLEITGKNKLLESDRDLKSSVSLRNKTIIPLGFLQVSLLRRLRDQTRQPPISEFLIDKDESRRAYSRSELLRGALLTINGIAAGMRNTG

SEQ ID NO: 20690 - protein, 157 aa, Triticum aestivum
LRHAIYCDTIEYSSYASNALGALPYGRPAGGRTSDKGGPGGGHTIPEPWAAGNAYASNLEELSEKDPQAFICHFYNVYFAHTAGGRMIGKKVAEKILNKKELEFYKWEGTLSQLLQNVRTTLNQVASSWSREEKDHCLEETEKSFAYSGDLLRQIFT

SEQ ID NO: 20691 - protein, 373 aa, Clostridium acetobutylicum ATCC 824
MLDFDVDVQQFAQIKVIGCGGGGNNAVNRMILEGLKNVEFIAINTDKQALALSQASQKIQIGDKLTKGLGAGANPEIGQKAAEESKDEISQAIKGADMVFITAGMGGGTGTGAAPVVAEIAKSMGILTVGVVTKPFPFEGRKRMLHAESGIKTLKERVDTLVTIPNERLLAIVDKKTTLVEAFKSADDVLRQGVQGISDLITIPGLVNLDFADVRTVMINKGLAHMGTGRGAGDTRASDAAKQAISSPLLETSIVGATGVLLNVTGGEDLGLLEINEAARVVQEAADPDANIIFGAVIDENLKDEIRITVIATGFESEGENGEIIRREVRPEVSEPKSEQEAASALDNTGSFDAPEKDLNIPAFLRRQNKNKY

SEQ ID NO: 20692 - protein, 396 aa, Corynebacterium efficiens YS-314
MAKAKFERTKPHVNIGTIGHVDHGKTTTTAAITKVLADAYPELNEAFAFDAIDKAPEEKERGITINISHVEYQTEKRHYAHVDAPGHADYIKNMITGAAQMDGAILVVAATDGPMPQTREHVLLARQVGVPYILVALNKCDMVDDEEIIELVEMEVRELLAEQDYDEDAPIVHISALKALEGDEKWAGQILELMQACDDNIPDPVRETDKPFLMPIEDIFTITGRGTVVTGRVERGTLNVNDDVEIIGIKEKATQTTVTGIEMFRKLLDSAEAGDNCGLLLRGIKREDVERGQVVVKPGAYTPHTEFEGSVYVLSKDEGGRHTPFFDNYRPQFYFRTTDVTGVVKLPEGVEMVMPGDNVDMSVTLIQPVAMDEGLRFAIREGSRTVGAGRVTKIIK

SEQ ID NO: 20693 - protein, 219 aa, uncultured bacterium
NSRLCMSSTVAGYTRSLGSDGPPCCYEDLDQCSVAVLIGTNTAECHPVLFQRLLKRKKRDPKSLTIVVVDPRATDTSRIADHHLAIAPGTDLALLHGLARLIVQDNGFDSDFIDEATEGFAAYAKTIRTWTSAKVAALCGISEKELRQVARLWSRSQGVLSLWSMGVNQRREGTAVVSGIINLHLLTGQIGKPGAGPFSLTGQPNAMGGREAGGLAHLL

SEQ ID NO: 20694 - protein, 503 aa, Kluyveromyces lactis NRRL Y-1140
MSFTSIKLADGTEYQQPLGLFINNEYVEAHGSETLTSYNPSSGEEICKVQCADPKIDVDLAVKAARDAFPGWKATPAIEKRDLFYKLAGLLERDIDILSKIESLDTGKPIANNAKYDILEVVEVLKYYAGWIDKAGGQSFAPSSEKLAYTLHQPLGVVGCIIPFNYPLAMMSWKWTAIATGNTTVFKSADQTPLSILYFAKLVKEAGFPAGVFNVLSGTGASVGSAIVKHTGVDKIAFTGSTAVGQIIQQQSAVNLKPITLECGGKSANMIFEDCDLEQAVKWSAWGIFNNMGQICSGTSRVFVQESIYEEFVAQLADHVKKTYIVGAPSDDAVIVGPQVSKKQQERVLEYIKIGIEEGCKVPLGGLGAPEPIANDPALANGYYVKPTILADVKASYRIAKEEIFGPVIVVGSFKDYKEALDIANDSDYGLGSAIFSKDIVTCHKFAQDVEAGMVWINSSNDVDINVPFGGVKMSGHGRELGEYGLANFTNVKSVHVNLGRKL

SEQ ID NO: 20695 - protein, 392 aa, Pseudomonas stutzeri
MLCAEQIALIKATVPLLESGGEALTTHFYKLWLDEHPEVQPLFNQAHQASGEQPRALANGVLMYAKHIDRLEALGPLVGQIINKHVALQVLPEHYPLVGSCLLRAIREVLGEEIATEAVIDAWGAAYQQLADILIGQEESLYRAKAAAEGGWRGARPFRIIRKVAESEEITSFHLQPEDGGPLMDFLPGQYIGLRLEVDGQEVRRNYSLSAASNGSEYRISVKREPGGVASNALHAMPEGAVLELFGPAGEFTLEPGNKPLVLISGGVGITPTLAMLEQALASTRPVHFIHCARNAGVHAFRCSVDTLAERHAQLKRFYCYEEHDGAGAAPDAVGRLTEQQLGEWLPEDRNVDAYFLGPKPFMAAVRRQLKSLGVPEQQTRYEFFGPASALD

SEQ ID NO: 20696 - protein, 219 aa, uncultured bacterium
NSRLCMSSAVAGYTRSLGSDGPPACYDDLDHCSVAVLIGTNTAECHPVLFQRLIKRKKRHPGSVTIVVIDPRRTDTAKAADIHLPIAPGTDLALLHGIAHLVMRENGQDVAFIDDHTENYKPFFDVVARWTPRKVARFCGIPEKRLREVAELFHRKEKVLSLWSMGVNQRREGTAVVQGLINLHLLTGQISKEGAGPFSLTGQPNAMGGREAGGLAHLL

SEQ ID NO: 20697 - protein, 281 aa, Pisum sativum
MASATSSLCSSTLQSQINGLSLRKTSLLHSPSLTFSRRKFSTVVKASSRVDKFSKSDIIVSPSILSANFAKLGEQVKAVELAGCDWIHIDVMDGRFVPNITIGPLVVDALRPVTDLPLDVHLMIVEPDQRVPDFIKAGADIISVHCEQSSTIHLHRAVNQVKSLGAKAGVVLNPGTPLSAIEYVLDVVDLVLIMSVNPGFGGQSFIESHVKKIAELRRLCVEKGVNPWIEVDGGVTPANAYKVIEAGANALVAGSAVFGAKDYAEAIKGIKASKRPEPVAV

SEQ ID NO: 20698 - protein, 219 aa, uncultured bacterium
YSRLCMSSAVAGYTRSLGSDGPPACYDDLDHCSVAILIGTNTAECHPVLFQRLIKRKKRHPGSVTIVVIGPRRTDTAKAADIHLPIAPGTDLALLHGIAHLVMRENGQDVAFIDDHTENYKPFFDVVARWTPRKVARFCGIPEKRLREVAELFHRNEKVLSLWSMGVNQRREGTAVVQGLINLHLLTGQIGKPGAGPFSLTGQPNAMGGREAGGLAHLL

SEQ ID NO: 20699 - protein, 219 aa, uncultured bacterium
NSRLCMSSAVAGYTRSLGSDGPPACYEDLDHCSVAFLIGTNTAECHPVLFQRLLKRKKRNPGSVTIVVVDPRSTDTAKAADIHLPIAPGTDLALLHGLAHLVLRENGQDPAFIDDRTENYDAFFDVAARWTPRKVARFCNIPEKRLREVAELFHRRERVLSLWSMGVNQRREGTAVVGGLINLHLLTGQIGKEGAGPFSLTGQPNAMGGREAGGLSHLL

SEQ ID NO: 20700 - protein, 435 aa, Ralstonia eutropha JMP134
MSSAAPTHTAGQKHALPSYLNADNLGPWGIYLQQVDRVTPYLGSLARWVETLKRPKRAMIVDVPIELDNGTIAHYEGYRVQHNLSRGPGKGGVRFHQDVTLSEVMALSAWMSVKNAAVNVPYGGAKGGIRVDPRTLSHAELERLTRRYTSEINIIIGPSKDIPAPDVNTNAQVMAWMMDTYSMNSGSTATGVVTGKPISLGGSLGRHEATGRGVFVVGSEAARNIGLEIKGARVAVQGFGNVGAVAAKLFQEAGAKVVAVQDHRVSLYNPAGLDVPAMMEYASHSGTVDGFQAETISSEQFWQVDCDILIPAALEGQITAKNAPQIKARLVIEGANGPTTPEADDILRERNILVAPDVIANAGGVTVSYFEWVQDFSSFFWTEEEINERLVRIMQEAFRAIWQVAQDNKVTLRTAAFIVACTRILQAREMRGLYP

SEQ ID NO: 20701 - protein, 580 aa, Mesorhizobium sp. BNC1
MKGRSTASISPPRCGSRLPPALMLPSTSCEACNDPCSAPGRIDPPICAPRSSQRRPWCRCRSGPDHAASTRSGGCRRIGYRRAGGPGGTDHRFITSERHSDMTTLHQNLIDGAWVGGEGKENINPSNIKDVVGIYAQASAEETKQAIAAAKAAFPAWSRSGILERHAILRKTADEILARKDELGELLSREEGKTLPEGIGEVTRAGQIFDFFAGAVLRLAGEVLPSVRPGIGVEITREPIGVIGIITPWNFPIAIPSWKIAPALAYGNTVVVKPADLVPGSTWAIVDILVRAGLPKGVLNLVMGKGSVVGQTMLESRDVTAITFTGSVGTGKRVAAASVELGRKFQLEMGGKNPTVVLDDADLKVAVESVTQSAFFSTGQRCTASSRVIVTEGIHDRFVEALAERIRGLKVGNALEPGIDIGPVVDANQLKQDTDYIEIGKQEGAKLVAGGERVQKETEGYFLQPALFTEATNSMRISREEIFGPVASVIRVKDYEEALATSNDTEFGLSAGIVTTSLKYATHFKRNAEAGMVMVNVPTAGVDFHVPFGGRKGSSYGPREQGTYAAEFFTVVKTAYTAAG

SEQ ID NO: 20702 - protein, 219 aa, uncultured bacterium
NSRLCMSSAVAGYTRSLGSDGPPCSYEDLDHCTVAFLIGTNTAECHPVLFQRLLKRKRKNPSSVTIVVVDPRRTDTAKAADIHLPIAPGSDLALLHGIAHLVLRDNGQDPAFIDDHTENYDAFFDVAARWTPRRVALFCNIPEKRLREVAALFHRREKVLSLWSMGVNQRREGTAVVQGLINLHLLTGQIGKEGAGPFSLTGQPNAMGGREAGGLAHLL

SEQ ID NO: 20703 - protein, 258 aa, Arabidopsis thaliana
MSAASDGNHVAPPELMGQSPPHSPRATQSPLMFAPQVPVLPLQRPDEIHIPNPSWMQSPSSLYEEASNEQGIPTMITWCHGGKEIAVEGSWDNWKTSRLQRSGKDFTIMKVLPSGVYEYRFIVDGQWRHAPELPLARDDAGNTFNILDLQDYVPEDIQSISGFDPPQSPENSYSNLLLGAEDYSKEPPVVPPHLQMTLLNLPAANPDIPSPLPRPQHVILNHLYMQKGKSGPSVVALGSTHRFLAKYVTVVLYKSLQR

SEQ ID NO: 20704 - protein, 336 aa, Pyrococcus horikoshii OT3
MEVKEMFSLGGGLGRSKVDESKVWDVIIIGAGPAGYTAAIYAARFGLDTIIITKDLGGNMAITDLIENYPGFPEGISGSELSKKMYDQVKKYGVEVIIDEVIRIDPAECAYYEGPCNFVVKTANGKEYKAKTIIIAVGAEPRKLNVPGEKEFTGRGVSYCATCDGPLFVGKEVIVVGGGNTALQEALYLHSIGVKVTLVHRRDKFRADKILQDRFKQAGIPAILNTVVTEIKGTNKVESVVLKNVKTGETVEKKVDGVFIFIGYEPKTDFVKHLGITDEYGYIPVDMYMRTKVPGIFAAGDITNVFKQIAVAVGQGAIAANSAKEFIESWNGKTIE

SEQ ID NO: 20705 - protein, 495 aa, Erythrobacter sp. NAP1
MTEQIDTQEMDAEAKAAAANAAEYEHGWSSDIETEYAEKGLSEETVRFISAKKGEPEWMLDWRLKAFRLWQEMKEPDWAKVGYPAIDYQDAYYYAAPKKKPTLKSLDELDPEIKAVYDKLGIPVAEQEVLAGVEGARKVAVDAVFDSVSVATTFREELKKAGVIFLSISEAIKEYPDLVKKWLGRVVPQRDNYFACLNSAVFSDGTFVYVPEGVRCPMELSTYFRINAENTGQFERTLIVAEKGSYVSYLEGCTAPMRDENQLHAAVVELVAMEDAEIKYSTVQNWYPGNSEGVGGIYNFVTKRGLCQGDRSKISWTQVETGSAVTWKYPSCVLNGKDSVGEFYSVAVTNNHQQADTGTKMIHNGAGSRSTIISKGISAGKSNNTYRGLVRVGPKAEGVRNFTQCDSLLLGNECGAHTVPYIEVKNPGAQIEHEATTSKISDEQLFYAMQRGLDEEDAVALIVNGFAKDVLKELPMEFAVEAQKLLAISLEGSVG

SEQ ID NO: 20706 - protein, 183 aa, Arabidopsis thaliana
  misc_feature (109)..(109): Xaa can be any naturally occurring amino acid
  misc_feature (112)..(112): Xaa can be any naturally occurring amino acid
  misc_feature (115)..(115): Xaa can be any naturally occurring amino acid
  misc_feature (121)..(122): Xaa can be any naturally occurring amino acid
  misc_feature (132)..(133): Xaa can be any naturally occurring amino acid
  misc_feature (135)..(135): Xaa can be any naturally occurring amino acid
  misc_feature (140)..(140): Xaa can be any naturally occurring amino acid
  misc_feature (149)..(149): Xaa can be any naturally occurring amino acid
  misc_feature (155)..(157): Xaa can be any naturally occurring amino acid
  misc_feature (159)..(161): Xaa can be any naturally occurring amino acid
  misc_feature (164)..(164): Xaa can be any naturally occurring amino acid
  misc_feature (166)..(166): Xaa can be any naturally occurring amino acid
  misc_feature (170)..(170): Xaa can be any naturally occurring amino acid
  misc_feature (175)..(176): Xaa can be any naturally occurring amino acid
MASSMLSSTAVVTSPAQATMVAPFTGLKSSASFPVTRKANNDITSITSNGGRVSCMKVWPPIGKKKFETLSYLPDLSDVELAKGVDYLLRNKWIPCVEFELEHGFVYRXEHXNTXPGYYDXXYWAMWELPLXXCXGSGQXLKEFKIQEXVPGALXXXRXXXPVXQXISLXAKTPXXVNPFWEI

SEQ ID NO: 20707 - protein, 376 aa, Musa acuminata
MEGGAAGGQRDRETLDAVRSVVFKPSVSLEEKRFPRVQGYDFNRGCDLIGLLDSISSTGFQASNLGDAIDVINQMIDWRLSHDAPTEDCSEEERNLAYRQSVTCKIFLGFTSNLVSSGIREIIRFLVQHRMVEVLVTTAGGIEEDLIKCLAPTYKGDFSLPGSYLRSKGLNRIGNLLVPNDNYCKFEDWIMPILDQMLLEQTTENVVWTPSKVIARLGKEINDESSYLYWAYKNNVSVYCPALTDGSLGDMLYCHSVRNPGLLIDIVQDIRAMNGEAVHVGLRKTGVIILGGGLPKHHICNANMFRNGADYAVYVNTAQEFDGSDSGAEPDEAISWGKIKGSAKTIKVHCDATIAFPLLVAATFARKFQERNNKLA

SEQ ID NO: 20708 - protein, 549 aa, Escherichia coli O6
MKNINPTQTAAWQALQKHFDEMKDVTIADLFAKDGDRFSKFSATFDDQMLVDYSKNRITEETLAKLQDLAKECDLAGAIKSMFSGEKINRTENRAVLHVALRNRSNTPILVDGKDVMPEVNAVLEKMKTFSEAIISGEWKGYTGKAITDVVNIGIGGSDLGPYMVTEALRPYKNHLNMHFVSNVDGTHIAEVLKKVNPETTLFLVASKTFTTQETMTNAHSARDWFLKAAGDEKHVAKHFAALSTNAKAVGEFGIDTANMFEFWDWVGGRYSLWSAIGLSIVLSIGFDNFVELLSGAHAMDKHFSTTPAEKNLPVLLALIGIWYNNFFGAETEAILPYDQYMHRFAAYFQQGNMESNGKYVDRNGKVVDYQTGPIIWGEPGTNGQHAFYQLIHQGTKMVPCDFIAPAITHNPLSDHHQKLLSNFFAQTEALAFGKSREVVEQEYRDQGKDPATLDYVVPFKVFEGNRPTNSILLREITPFSLGALIALYEHKIFTQGVILNIFTFDQWGVELGKQLANRILPELKDDKEISSHDSSTNGLINRYKAWRG

SEQ ID NO: 20709 - protein, 133 aa, Aspergillus oryzae
MTGGKSGGKASGSKNAQSRSSKAGLAFPVGRVHRLLRKGNYAQRVGAGAPVYLAAVLEYLAAEILELAGNAARDNKKTRIIPRHLQLAIRNDEELNKLLGHVTIAQGGVLPNIHQNLLPKKTPKSGKGPSQEL

SEQ ID NO: 20710 - protein, 118 aa, Glycine max
MATFMLKLVLPLLFLFMIPPKTAYAEFEQWCVADEQTTESELQAALDWACGKGGADCSKIQVNQPCYLPNTLKDHASYAFNSYYQKFKHSGGSCYSRGAAITTEVDPSHGSCHYDFIP

SEQ ID NO: 20711 - protein, 463 aa, Aspergillus oryzae
MAFRLPFHRLPEQNLRVIPRYAQSPRNISLGTRRNLTSAALRSCVRNTKRPASCIPQVLGANVFRSSFAPLGGYQVRTYADTIVKVPQMAESITEGTLKQFSKQVGDYVERDEEIATIETDKIDVSVNAPEAGTIKELLVNEEDTVTVGQELAKLELGGAPETKTEEATEKPKEPASTEEPKAPEPEQPKSAKDSEKPAASEPGSSKQPQPAASKPDIPDDAKPSPGNREERRVKMNRMRLRIAERLKQSQNTAASLTTFNEVDMSSLMEFRKLYKDDVLKKTGVKLGFMSAFSRACVLAMKDIPAVNASIEGPNGGDTIVYRDYVDISVAVATEKGLVTPVVRNAETMDLVGIEKAIADLGKKARDNKLTIEDMAGGSFTISNGGVFGSLMGTPIINLPQTAVLGLHAIKEKPVAVNGKIEIRPMMYLALTYDHRLLDGREAVTFLVKVKEYIEDPRRMLLG

SEQ ID NO: 20712 - protein, 396 aa, Halobacterium sp. NRC-1
MDSIVQDAIDEAEESEDSASEPADVAGGGGDTVPTGTMTDNELEDVLQELQTNITVVGCGGAGSNTVDRMATEGIHGADLVAANTDVQHLVDIEADTKILMGQQKTKGRGAGSLPQVGEEAAIESQGEIRDSIAGSDMVFVTAGLGGGTGTGSAPVVAKAAREQGALTIAIVTTPFTAEGEVRRTNAEAGLERLRDVADTVIVVPNDRLLDSVGKLPVREAFKVSDEVLMRSVKGITELITKPGLVNLDFADVRTVMEKGGVAMIGLGEADSDAKAADSVQSALRSPLLDVDISSANSALVNVTGGPGMSIEEAEGVVEQLYDRIDPDARIIWGTSIDEQIQEEMRTMVVVTGVDSPQIYGRNEAAEGDGPAQESTPEPEPEPQAGSEIEDIDYVE

SEQ ID NO: 20713 - protein, 322 aa, Synechocystis sp. PCC 6803
MEQPMKPTVIITGASSGVGLYGAKALIDKGWHVIMACRNLDKTQKVADELGFPKDSYTIIKLDLGYLDSVRRFVAQFRELGRPLKALVCNAAVYFPLLDEPLWSADDYELSVATNHLGHFLLCNLLLEDLKACPDADKRLIILGTVTANSKELGGKIPIPAPPDLGNFEGFEAGFKKPIAMINNKKFKSGKAYKDSKLCNMLTTRELHRRFHQETGIVFNSLYPGCVADTPLFRNHYSLFRTIFPWFQKNVTKGYVSQELAGERVAMVVADDKFKDSGVHWSWGNRQQAGREAFVQELSEQGSDAQKAQRMWDLSEKLVGLV

SEQ ID NO: 20714 - protein, 184 aa, Zea mays
  misc_feature (37)..(37): Xaa can be any naturally occurring amino acid
  misc_feature (56)..(56): Xaa can be any naturally occurring amino acid
MAGLMKLACLVLACMIVAGPITSNAALSCGTVSGYVXPCIGYLAQGAPAPPRACCXGVTSLSNLARTTPDRHHPCRCLVGAANALPYSQRWPVQLDFPKACGVNIPYKISKTTQLQPVGNEPPGRMNLYANLPRILGWGGAKTKKKKGPRGGWFLKGFSQSPALLGGGAPFKFWGPGTISTTPG

SEQ ID NO: 20715 - protein, 214 aa, Picrophilus torridus DSM 9790
MVEVSPSIISSDLSHLYDEIKRCEDAGAGSFHLDVMDGHFVNNITMGPDLIKAIRKSTGLRLDAHLMIERPDKYYKSFLDAGADVLLIHYESPVNTMELLKKFHRENIRYGIVINPETNFERVKPLIENAEILLIMSVNPGFSGQKFIDDSLIKVSQAKEFIRANNLKTRIEIDGGINDETGRLAANAGADILVSASFIFKNGVINPIKTLKNF

SEQ ID NO: 20716 - protein, 340 aa, Lotus japonicus
MGSAAKTVCVTGSTGFIGSWLVMRLMEGGYTVRATVQRDPDNMKKVKHLLELPGAKTNLTIWNADLTEEGSFDEAINGCSGVFHVASPMDFNSKDPENEVIKPSINGVLDIMKACQKAKTVRRLVFTSSAGTLNAVEHQKQMCDESCWSDVEFCRRVKMTGWMYFVSKTLAEQEAWKFAQEHDIDFITIIPSLVVGSFLMPTLPPSLTTALSPITGNEAHYSIIKQGQYVHLDDLCLAHIFLFEHPKSEGRYICSASEATIHDIAKLINSKYPEYNVPTKFKNIPDELELVRFSSKKIKDMGFEFKYSLEDMYTGAIDTCKEKGLLPKAAENPSNGITEK

SEQ ID NO: 20717 - protein, 284 aa, Streptococcus agalactiae A909
MTELIDGKALSQKMQAELGRKVERLKEQHGIIPGLAVILVGDNPASQVYVRNKERSALEAGFKSETLRLSESISQEELIDIIHQYNEDKSIHGILVQLPLPQHINDKKIILAIDPKKDVDGFHPMNTGHLWSGRPMMVPCTPAGIMEMFREYHVDLEGKHAVIIGRSNIVGKPMAQLLLDKNATVTLTHSRTRNLSEVTKEADILIVAIGQGHFVTKDFVKEGAVVIDVGMNRDENGKLIGDVVFEQVAEVASMITPVPGGVGPMTITMLLEQTYQAALRSVSL

SEQ ID NO: 20718 - protein, 228 aa, Picrophilus torridus DSM 9790
MADYIYNKSEQADDYNERGISYFNVMQYEDAVKEFTKAIKLISDDPDLYHNRALAYYSLKMYNEAIKDCEKAISLDSSKGDYYNILGSIYDDIKKFDRALEAFTNAIRIESDVPDYYYNRGNVYLELKMFDRALEDYNMAVKLNSMETIFLYKRAMLLDDLKRYDEAINDLNSCIKISPNPEYFKYMAGIYEKQGRFKEALNTLKEAEKYSNDIGIKSMIKDIESKIN

SEQ ID NO: 20719 - protein, 306 aa, Lotus japonicus
MGSAAKTVCVTGSTGFIGSWLVMRLMERGYMVRATVQRDPENMKKVKHLLELPGAKTNLTIWNADLTEEGSFDEAINGCSGVFHLATPMDFNSKDPENEVIKPTINGVLDIMKACQKAKTVRRLVFTSSAGTLDAVEHQKQMFDESCWSDVEFCRRVKMTGWMYFVSKTLAEQEAWKFAKEHDIDFITTIPSLVVGSFLMPTMPPSLITALSPITGNEAHYSIIKQGQFVHLDDLCLAHIFLFEHPESEGRYILSASEATIHDIAKLINSKYPEYNVPTKIFQMNWSLSDFHQRRSKKWGSNLNTA

SEQ ID NO: 20720 - protein, 388 aa, Nostoc sp. PCC 7120
MGRVGVLLLNLGGPDKLEDVAPFLFNLFSDPEIIRLPFRWLQKPLAWFIASRRTKTSQENYKQIGGGSPLRRITEAQGEALKEQLHYLGQEANIYVGMRYWHPYTEEAIALLTQDNLDNLVILPLYPQFSISTSGSSFRLLERLWQEDPKLQRLEYTVIPSWYKEPGYLQAMAELIRQEIEQFPHPDQVHVFFSAHGVPKSYVEEAGDPYQQEIEECTALIMQTLNRPNPHTLAYQSRVGPVEWLQPYTEDALKELGAQGVKDLVVVPISFVSEHIETLQEIDIEYREIAEEAGIHNFRRVPAPNTHPVFIRALADLVIDALNKPSFKLSQAAQIKKMVKMYPPESWEWGMTSSAEVWNGRIAMLGFIALIIELVTGQGLLHMIGLLQ

SEQ ID NO: 20721 - protein, 320 aa, Thermosynechococcus elongatus BP-1
MIATSSRPVRIGSRKSQLALVQTEWVQAQLQTHHRDRAFEVVTMTTQGDNILDVALAKIGDKGLFTKELELSMLRGETDLAVHSLKDLPTQLPDGLVLAAITEREDPADALVLGAKWTGHTIDTLPEGTVIGTSSLRRLAQLRHYYPHLTFKDVRGNLNTRLAKLDAGEYDALILAVAGLRRLGFGDRISQVLPATVSLYAVGQGALGIECRAEDADILALVKTLEHPETTARCLAERAFLRQLEGGCQVPIGVHTVIENGQLTLTGLVASLDGQRLVKDSLTGDVATAEELGTRLALKLREQGASEILEEIFATVRPER

SEQ ID NO: 20722 - protein, 347 aa, Idiomarina baltica OS145
MSSSRLIERIAVITSGGDAPGMNAALRAVVLAAEHDGIDVVGFRHGYEGLLNNDYMKLGRDEVEHILQYSGTIIKSARSERFKTDEGGIEAAHNLDAQNVDAFIVIGGDGSFRGANHLAKFWQGPIIGIPGTIDNDLFGTDNTIGYDTAVETAMDALDKIRDTAEAMDRVFIVEVMGRNAGYIAISSAMASGAERMILPELQKDKPLTIDALVKHVEGVNRVRGDSSYVMVLCENQWPGGAVRLAEQLEDRLNFPCRPCLLGHVQRGGRPTAMDRILATRLGVYAVQLVQEGITGVMAGIEKNELVTTPLEDTWVKRKVLSQELIDIQTKCFNPIKKDRHKATVDKA

SEQ ID NO: 20723 - protein, 280 aa, Lotus japonicus
MGSAAKTVCVTGSTGFIGSWLVMRLMERGYMVRATVQRDPENMKKVKHLLELPGAKTNLTIWNADLTEEGSFDEAINGCSGVFHLATPMDFNSKDPENEVIKPTINGVLDIMKACQKAKTVRRLVFTSSAGTLDAVEHQKQMFDESCWSDVEFCRRVKMTGWMYFVSKTLAEQEAWKFAKEHDIDFITTIPSLVVGSFLMPTMPPSLITALSPITGNEAHYSIIKQGQFVHLDDLCLAHIFLFEHPESEGRYILSASEATIHDIAKLINSKYPEYNVPTK

SEQ ID NO: 20724 - protein, 428 aa, Pfiesteria piscicida
MKWGDVGGSGSKDVPIAKDAARGAEIGGRGAAVAPSIGQSESSGSFQKLCGEVLLDLPKHLVAVKQVGKGAYGEVFLCKDERTQGQVAVKVIRDFTKDLLFGKRIFREVKILMALQHENLMRLIDLPAVPSPDFNVVYMVMPYMLADLHRMIYSSLKLVESHCQAFTCQILRGLKYLHSAGIVHRDLKPANIMVNKNCTLRITDFGLARGRCDDEEVLTDYVVTRWYRAPELMLVPSSYFEAIDLWSVGCIHFECVARTVLFPGEHHFDMLKKIADTLGMFTPEGVAWCPQDQKGEVDTMLNKLEDLRSKELNSLASRLPEASEVCLDLLLKLLDKVPSTRISAAEALEHPYLQHLRDPAGETVAKRPFAWDFDVFEPSERALKDRIYAECARIHPEIITRDAKYLMDRGFKVPAQRPSPADEKPDGS

SEQ ID NO: 20725 - protein, 410 aa, Ustilago maydis 521
MVAARSAFASLARVHVASRSGLRSVSTTAAAKQPSRLLEKATSSSSSLSPIASSSRLTTNPAALTAFIPSSTRNASTDGKPQEITVRDALNSAMEEEMLRDDKVFILGEEVARYNGAYKITRGLLDKFGEKRVIDTPITESGFAGLAVGAALSGLRPICEFMTFNFAMQAIDQIINSGAKTYYMSGGNVPCPVVFRGPNGAAAGVGAQHSQDYAAWYGQIPGLKTISPWSAEDCRGLLKSAIRDPNAVVFLENEILYGQSFPISQEALSDDFTIPIGKAKIERAGKDITIVSHSIGMNYAMEAAEILKKEEGVEAEVINLRTIAPMDVDTIIDSVKKTNRIVTVESGFPQFSVGAEIAATVNDFAFDHLDAPVERVTGAAVPTPYAQNLEKLSFPDTAIVVRAAKRALYK

SEQ ID NO: 20726 - protein, 340 aa, Lotus japonicus
MSSESETVCVTGAAGFIGSWLVMRLIERGYTVRATIRDPANMKKVKHLLELPDAKTKLSLWKADLAEEGSFDEAIRGCTGVFHVATPMDFESKDPENEVIKPTINGLLDILKACEKAKTVRRLVFTSSAGTVDVTEHPKPVIDETCWSDIEFCLRVKMTGWMYFVSKTRAEQEAWKYAKEHNIDFVSVIPPLVVGPFLMPTMPPSLITALSLITGNEAHYSIIKQGQYVHLDDLCLAHIFLFENPKAQGRYMCSAYEATIHEVARMINKKYPEFNVPTKFKDIPDELDIIKFSSKKITDLGFKFKYSLEDMYTGAVETCREKGLLPKTAETPATNGTTQK

SEQ ID NO: 20727 - protein, 583 aa, Securigera parviflora
MCGILAVLCAENSQAKRVRVLELSRRLKHRGPDWSGLHQHGDCYLAHQRLAIVDPASGDQPLFNEDKSLIVTVNGEIYNHEELRKQLPNHKFRTGSDCDVIAHLYEEHGENFVDMLDGIFSFVLLDTRDNTFIVARDAIGVTSLYIGWGLDGSVWISSEMKGLNDDCEHFECFPPGHLYSSKDRAFRRWYNPPWFSETIPSAPYDPLALRHAFEKAVIKRLMTDVPFGVLLSGGLDSSLVASITSRYLATTKAAEQWGSKLHSFCVGLEGSPDLKAAKEVADYLGTVHHEFTFTVQDGIDAIEDVIYHVETYDVTTIRASTPMFLMSRKIKSLGVKWVISGEGSDEIFGGYLYFHKAPNKEEFHRETCRKIKALYQYDCLRANKSTFAWGLEARVPFLDKEFINVAMNIDPENKMIKRDEGRMEKYILRRAFDDEEHPYLPKHILYRQKEQFSDGVGYSWIDGLKEHAAKHVTDKMIFNAANIFPHNTPTTKEAYYYRMIFERFFPQNSARLTVPGGASVACSTAKAVEWDAAWSNNLDPSGRAALGVHLSAYDNQNNLANKPVEFEKIIPMEAPSLGVAIQS

SEQ ID NO: 20728 - protein, 366 aa, Wolbachia endosymbiont of Drosophila ananassae
MIQSNLQGVNFVVANTDAQALEKSLCDKKIQLGINLTKGLGAGALPDVGKGAAEESIDEIMEHIKDSHMLFITAGMGGGTGTGAAPVIAKAAREARAAVKDRAPKEKKILTVGVVTKPFGFEGVRRMRIAELGLEELQKYVDTLIVIPNQNLFRIANEKTTFSDAFKLADNVLHIGIRGVTDLMVMPGLINLDFADIETVMSEMGKAMIGTGEAEGEDRAISAAEAAISNPLLDNVSMKGAQGILINITGGGDMTLFEVDAAANRVREEVDENANIIFGATFDQAMEGRVRVSVLATGIDGRNNKSETSPISQSEDSEKEKFKWPYSQSESTQDKTLETKPAEQVSEGAKWGSNIYDIPAYLRRKK

SEQ ID NO: 20729 - protein, 553 aa, Salinibacter ruber DSM 13855
MYTLLTNRVCVPSRPWAAHRGGAARTNATEPPKKFRSERTWKRLRFGVVPAFISTPRPFLQAVSSFPMEGSNATPQANGQAESSDGFFGEVNQMFDEAAARTDHPRGVLHQIRACDNIIRFEFPIERDDGSIQVIRGYRGEHSHHMQPTKGGIRYAPSVNVDEVMALSALMSYKCAIVDVPFGGAKGGVCIDARNYSTTELERITRRYTFELERKDFIGPGTDVPAPDYGTGPQEMAWIMDTYNQIGDEDLNALACVTGKPVGQGGVRGRTEATGRGVYYGIREACAYPKDMKRLGLEMGLEGKSVVIQGLGNVGYHAARFLEDGGAKIVGIAEIEGAIHDPDGLDVDDVVAHREETGSILGFADAENIETSAAALELPCDILIPAALEGVITTENAPDIQASIIAEAANGPVTSEADEILQEKNAMIIPDVYLNAGGVTVSYFEWLRNLSHVRHGRMSRRFEERNAERILRAVDELTAEDFSEDLLESLIEQVGFGAGERDLVHSGLEDTMSHAYDEIRAIREKKGVDMRTAAFVSAIDKIAGSYDQMGIFP

SEQ ID NO: 20730 - protein, 219 aa, uncultured bacterium
NSRLCMSSAVAGYTRSLGSDGPPCCYEDLDHCSLAFLIGTNTAECHPVLFQRLLKRKRKNPGSVTIVVVDPRRTDTAKAADIHLPIAPGSDLALLHGIAHLVLRENGQDPAFIDDHTENYDGFFDVAARWTPRRVALFCNIPEKRLREVAALFHRREKVLSLWSMGVNQRREGTAVVQGLINLHLLTGQIGKEGAGPFSLTGQPNAMGGREAGGLSHLL

SEQ ID NO: 20731 - protein, 87 aa, Zea mays
  misc_feature (6)..(6): Xaa can be any naturally occurring amino acid
  misc_feature (20)..(20): Xaa can be any naturally occurring amino acid
  misc_feature (25)..(25): Xaa can be any naturally occurring amino acid
  misc_feature (27)..(27): Xaa can be any naturally occurring amino acid
  misc_feature (33)..(33): Xaa can be any naturally occurring amino acid
  misc_feature (35)..(35): Xaa can be any naturally occurring amino acid
  misc_feature (40)..(42): Xaa can be any naturally occurring amino acid
  misc_feature (47)..(47): Xaa can be any naturally occurring amino acid
  misc_feature (54)..(54): Xaa can be any naturally occurring amino acid
  misc_feature (57)..(57): Xaa can be any naturally occurring amino acid
  misc_feature (64)..(66): Xaa can be any naturally occurring amino acid
  misc_feature (72)..(75): Xaa can be any naturally occurring amino acid
MESDLXDLFEGAQKAADAGXLGGVXSXGPEVSXCXDGLKXXXKVPGXYDTLVAXSGXKKLRALXXXPGGDIXXXXTGPALRYGKAAL

SEQ ID NO: 20732 - protein, 219 aa, uncultured bacterium
NSRLCMSSAVAGYTRSLGSDGPPCSYEDLDHCTVAFLIGTNTAECHPVLFQRLLKRKRKNPSSVMIVVVDPRRTDTAKAADIHLPIAPGSDLALLHGIAHLVLRENGQDPAFIDDHTENYDAFFDVAARWTPRRVALFCNIPEKRLREVAALFHRRQKVLSLWSMGVNQRREGTAVVQGLINLHLLTGQIGKQGAGPFSLTGQPNAMGGREAGGLAHLL

SEQ ID NO: 20733 - protein, 357 aa, Ralstonia eutropha JMP134
MSQYRIAVIPGDGIGTEVMPEGIRVMDAAARKFGIDFQWDHFDFSSCDYYARHGKMLPDDWFDTLVKYDAIYFGAVGWPDAVPDHVSLWGSLLQFRRSFDQYVNLRPVRLMPGIKSPLADRKPGDIDFYVVRENTEGEYSSIGGRMFPNTEREIVMQETVMSRVGVDRILKFAFELAKKRPKQHLTSATKSNGISITMPYWDERVEAMAANYPGIKVDKYHIDILTAHFVQHPDWFDVVVASNLFGDILSDLGPACTGTIGIAPSGNINPDRTYPSLFEPVHGSAPDIAGRGVANPIGQIWCGAMMLEHLGHDAAGAAVLGAIEKVLSEGPDHAPLTRDIGGKAGTEDLGRAIAEAL

SEQ ID NO: 20734 - protein, 338 aa, Anthoceros agrestis
SDSGKDAGRFTAAWELYKAQEDVVAVCKEYNIKITLFHGRGGSVGRGGGPMYLAIQSQPPGSVMGTLRVTEQGEMIQAKFGLNQTAIRQLEIYTTAVLLATVHPQCHHALLHGEVVMDEISDAGRKYYRQIVFETKEFLQYFHEATPEAELGNLNIGSRPTRRKSSGGITQLRAIPWIFAWTQTRSVLPAWLGVGKGLQAAMEKGHRDELRAMYKEWPFFQSTVDLIEMVLAKADMPITKHYEDVLVSQNVRELGKELRDEFHVTEKHVRDITGHHKLSENNKTLRRLIESRLPYLNPINMLQVEVLRRLRQDETNPKLRDALLITMKGIAAGMQNTG

SEQ ID NO: 20735 - protein, 219 aa, uncultured bacterium
NSRLCMSSAVAGYTRSLGSDGPPCSYEDLDHCTVASLIGTNTAECHPVLFQRLLKRKRKNPGSVKIVVVDPRRTDTAKAADIHLPIAPGSDLALLHGIAHLVLRENGQDPAFIDDHTENYDAFFDVAARWTPRRVALFCNIPEKRLREVAALFHRREKVLSLWSMGVNQRREGTAVVQGLINLHLLTGQIGKQGAGPFSLTGQPNAMGGREAGGLAHLL

SEQ ID NO: 20736 - protein, 78 aa, Glycine max
  misc_feature (21)..(21): Xaa can be any naturally occurring amino acid
YLRRGGEPSRACCTGVKSFTXAAKATAGSQGAVRCLKNLAVNLGPSLNAAMAALVPGQCGVNIPYKISPSTICATVKP

SEQ ID NO: 20737 - protein, 346 aa, Chlamydomonas reinhardtii
MTRGLDYYEVMGLTRSANDIDIRRAYRRLALKYHPDINKDGAAGDEFLRICEAYEVLCDPKTKGFYDLYGEDALKDGISDGNGGLKGPMYRFNPEESPKAVFERFFGTANPYEALEALSNQFESMTSEEAPARGKNKVYPLELTLEEIFHGCLKKVAHKRKVLLFSGEYVEEERQLTVDVKPGLPTGTRFVFEGEGNKTPKKEPGPVVFVLKPKPHPRFVRRGSDLVHKVTLPLHHALIGTTLDIRTLDDRDLKVPISDIMRPGSSLTVPGEGMPLPATPSARGNLVIEIDLLFPTHLTETQKMLLRSAFFLPPPTEQNEETKKALRDYEAAFKHDLKGWAPVFKR

SEQ ID NO: 20738 - protein, 219 aa, uncultured bacterium
NSRLCMSSAVAGYTRSLGSDGPPSCYEDLDHCSVAFLIGTNTAECHPVLFQRLLKRKKRNPGSITIVVVDPRRTDTAKAADIHLPIAPGSDLALLHGIAHLVLRENGQDSAFIDDHTENYDAFFDIAARWTPRRVARFCNIPEKRLRDVAQLFHRRERVLSLWSMGVNQRREGTAVVQGIINLHLLTGQIGKEGTGPFSLTGQPNAMGGREAGGLSHLL

SEQ ID NO: 20739 - protein, 482 aa, Shewanella oneidensis MR-1
MLLNDPSLLRQQCYINGQWCDANSKETVAITNPATGAVIACVPVMGQAETQAAIAAAEAALPAWRALTAKERGAKLRRWFELLNENSDDLALLMTSEQGKPLTEAKGEVTYAASFIEWFAEEAKRIYGDTIPGHQGDKRIMVIKQPVGVTAAITPWNFPAAMITRKAAPALAAGCTMVVKPAPQTPFTALALAVLAERAGIPAGVFSVITGDAIAIGNEMCTNPIVRKLSFTGSTNVGIKLMAQCAPTLKKLSLELGGNAPFIVFDDANIDAAVEGAMIAKYRNAGQTCVCANRIYVQAGVYDEFAEKLSMAVAKLKVGEGIIAGVTTGPLINAAAVEKVQSHLEDAIKKGATVLAGGKVHELGGNFFEPTVLTNADKSMRVAREETFGPLAPLFKFNDVDDVIKQANDTEFGLAAYFYGRDISLVWKVAESLEYGMVGVNTGLISTEVAPFGGMKSSGLGREGSKYGIEEYLEIKYICMSV

SEQ ID NO: 20740 - protein, 194 aa, Triticum aestivum
AWSRPKVKQGVLTSGRVRLLLHRGTPCFRGFGRRNGERRRKSVRGCIVSQDLSVINLVIVKKGENDLPGLTDTEKPRMRGPKRASKIKKLFNLGKDDDVRSYVNTYRRTFLNKKGKKVSKAPKIQRLVTPLTLQRKRARIADKKKRIAKKKSEAAEYQKLLAQRLKEQRDRRSESMAKRRSKLSAATKAPAASA

SEQ ID NO: 20741 - protein, 258 aa, Silicibacter pomeroyi DSS-3
MAFETIIVEVEDHVALIRLNRPDALNALNTQLLGELCTALEEADGNDKVRCIVITGSDKAFAAGADIREMSQKTYVEVYSENLFAAANDRVSAIRKPIIAAVAGYALGGGCELAMLCDFIIAADTAKFGQPEINLGVIAGIGGTQRLTRLVGKSKSMDLNLTGRFMDAEEAERAGLVSRVVPAKKLVEEALSAAQKIAEKSMISAYAVKEAVNRSYETTLSEGLLFERRVFHSMFATEDQKEGMAAFLEKRAAQFRDK

SEQ ID NO: 20742 - protein, 217 aa, Triticum aestivum
  misc_feature (156)..(156): Xaa can be any naturally occurring amino acid
  misc_feature (158)..(158): Xaa can be any naturally occurring amino acid
  misc_feature (162)..(162): Xaa can be any naturally occurring amino acid
  misc_feature (171)..(171): Xaa can be any naturally occurring amino acid
  misc_feature (186)..(186): Xaa can be any naturally occurring amino acid
  misc_feature (199)..(199): Xaa can be any naturally occurring amino acid
  misc_feature (207)..(207): Xaa can be any naturally occurring amino acid
MCGILAVLGCADDTQGKRVRVLELSRRLKHRGPDWSGMHQVGDCYLSHQRLAIIDPASGDQPLYNEDKSIVVTVNGEIYNHEQLRAQLSSHTFRTGSDCEVIAHLYEEHGENFIDMLDGVFSFVLLDTRDNSFIAARDALASPPLFGGNDVVGFEXSXMTMXGALNDDCEXLWEIFPPGHLYSSKXQGGFMRWYNPPWXFSEVIPSXAYDPLCSQGG

SEQ ID NO: 20743 - protein, 160 aa, Dianthus caryophyllus
MSDDDHHFESSADAGASKTYPQQAGTIRKSGHIVIKNRPCKVVEVSTSKTGKHGHAKCHFVAIDIFNGKKLEDIVPSSHNCDVPHVNRVDYQLLDITEDGFVSLLTDSGDTKDDLKLPADEALVKQMKEGFEAGKDLILSVMCAMGEEQICAVKDVSGGK

SEQ ID NO: 20744 - protein, 238 aa, Cryptococcus neoformans var. neoformans JEC21
MSTSWDNARRHARALETALDSKLSTYSKLAASIARGSSLGGSSSRDELSMEEEGIGGYKLVEEEIEELLSKLEQAIEDLTSLINSPSQPPSTSMQHSAQTHRDNLDDYRRDFVRTRNNVEQTIRRSNLLGSVRKDISDYKSGRSGTTDALLQDRSRIDSSHRMIDDTLNQAYATREDFAQQRTFLASIDSRMGGVLNQMPGINSLITMIRTRRRRDTVIMGCVIGLCVVLLLGYMFGF

SEQ ID NO: 20745 - protein, 566 aa, Campylobacter jejuni subsp. jejuni NCTC 11168
MKELSGSAMICEALKEENVKIVFGYPGGAALNIYDEIYNQKYFKHILVRHEQAALHAADAYARMSGEVGVAIVTSGPGFTNTITGLATAYSDSIPLVLISGQVANSLIGTDAFQEIDAVGISRPCVKHNYLVTCIEEFPRILKEAFYIARSGRPGPVHIDVPKDVSATLGLWEYSKEISMKTYKPVYKGNSKQIKKFAELLKEAKRPLFYLGGGCISSNASEQIRELIKFTKIPAVETLMALGTLRSDDVFNLKMAGMHGSYAANMALSECDLLVSVGARFDDRITGKTSEFAKHATIVHVDIDPSSISKIINAHYPIVGDIKEVLKELLEELKKENFNTTFKEWHETLKRYNELYPLSYEDSNEILKPQWVIEECAKMAPDARIITDVGQHQMWVAQFYPFNYPRQLATSGGQGTMGYSLPAALGAKLAVGEEVVINFVGDGSVLMNIQELMTAYEYGIKAINIILNNAFLGMVRQWQSMFYKEHFSQTDLSTQPDFIKIAQGFGCEGYEISNKEEFIQAFSQALKSDKTSLLNVKIDRFEDVLPMVPAGGAIYNMILPKAKDRQ

SEQ ID NO: 20746 - protein, 364 aa, Candidatus Kuenenia stuttgartiensis
MSDKTKRTNQCQLQRKYLCKPQILPQFLKKGMSVSDLVDVFSHSGAFNAGRLAEACKLYCHMLSKDVTVGVTLSGAMTPTGMGGTLISLMEKGFVDFIISTGANLYHDLHFALNLPIHQGDFRVDDTELYHAGIERIYDIFITDELLLKTDKFIQDVTKGFSNTEPISTADFHYQLGKAVLSETSSPQLSFVAQAAKYNVPVFVSSPGDSSIGMNLSYLKLQGNNLVIDTDIDVIQSTAIVFNSKLNGVVSIGGGSPKNFYMQTQPTLAQILDINKGGHDYFIQITTDAPQWGGLSGATPSEAISWGKMRIEEIKNHVVVYCDATIATPILASYALSKAKARKKKHLYKQLPQYVNELKKHVKK

SEQ ID NO: 20747 - protein, 124 aa, Triticum aestivum
  misc_feature (102)..(102): Xaa can be any naturally occurring amino acid
  misc_feature (110)..(110): Xaa can be any naturally occurring amino acid
MSEPEFEQARKEGGSTLEASSLFSKNPEYKKALEVVSVPERIIQFRVVWENDKGECQVQKGYRVQFNSALGPYKGGLRFHPTVNLSILKFLDFEQIFKNAVXTALNMGRXGKGGMRTSDPKGKS

SEQ ID NO: 20748 - protein, 425 aa, Prosthecochloris aestuarii DSM 271
MNNRDIIHDDIASGTFHNDTMQNGIRVITNRVSHVQSVTLGIWINAGSREDPDTTPGLAHFVEHAIFKGTSSRDYETIARCIEDVGGYIDAWTTKENTCIYIRCLKEHIALAFSLLSDLCCNPSFPDEEIEKEKEVVIEEIHSINDAPEELIFDEFDLHAFPRHRLGSTILGTEESIESITGDDLRQFMQNNYTPDNLLVTAVGNVTHTEIMELAVRSFASLQEGTPAKRSTREFELRDYTPFNLQLQKPVYQAQLLFGTAATRKNEHFYSLLLLNTILGSGMSSRMNLELREKNALAYNVYSSLTLFDDATMFNVYAGTDNSNIVKALAIIDQILSPESLCSIDQSELETAKSRLLGAMIMGMEKMTRRMSRAARDLFYFGRIIPLEEKINAIRQVTQNDIRHAVMHLLQSAPASTLIYEAEEE

SEQ ID NO: 20749 - protein, 476 aa, Bacillus cereus ATCC 10987
MQNKIIVMFQKDFRLYDNPALFKATQSGEVVPVYVHDETFSMGSASKWWLHHAIIDVKKQLEALGSTLIIRKGSTEEEILSLIEQLGITAVYWNICYDPDRLQFNQNMKMMLEDKGITCKEFNSHLLLEPWMIKKKDNTEYKVFTPFYNAFQKQVISKPISKVQSIKWGSSLPESLSVTELHLLPTIPWTSHIESIWDPTEEGAYKTCKKFFSSKLASYSEGRDFPNQNAHSMLAPYLSFGQISVRWMYHYLINKSTERQCSLFEKQVNSFIRQLIWREFSYYLLYHYPFTVYKPLNKNFEHFPWNNEEELLTVWQKGETGYPFIDAGMRELWQTGFMHNRARMAVASFLVKHLLIPWQEGAKWFMDTLLDADIANNTMGWQWVAGSGADASPYFRIFNPITQGEKFDKDGEYIRKWVPELKDMPNKYIHKPWEAPEHILQKANIKLGDTYPLPVVDHKAARERALCAYKSMKEFV

SEQ ID NO: 20750 - protein, 534 aa, Candidatus Kuenenia stuttgartiensis
MSIKIVTTTLIMDRIFIYDTTLRDGSQAEGVSFSLQDKLAITVKLDELGIDFIEGGFPIANPKDESYFKEVKSLSLKHSKIASFGSTRKVGVRTEEDKNVNALLFAETPVVTIVGKSWDFQVTDVLKTTLDENVKMVTDTILFLKSRNREVFFDAEHFFDGFKSNRGYALKVINEACSAGADVIVLCDTNGGSLPDEIATIVEEVRKNNKCILGIHAHNDGDLAIANTIMAVNKGVRQVQGTINGIGERCGNADLCSVIPNLVLKMGYHCLHNDGLRKLTEISRYVYETANLLFRTNQPFVGSSAFAHKGGLHINAIQKNKVTYEHINPESVGNKRKILISELSGSATILSKTEKFNLTHDTALLRSILEEVQNLENEGYQLESAEASFELLVRKKTGKYKPFFELEGFRVIVEKRENGLPITEATVKINVNNTQELTASEGSGPVNALDTALRKALERFYPVLKDMKLLDYKVRVINPRSATAAKVRVIIESKDKENVWSTVGVSGNLIEASWQALVDSIEYKLIKEYEAKQL

SEQ ID NO: 20751 - protein, 182 aa, Cryptococcus neoformans var. neoformans JEC21
MSASKVYVGNLSWNSTDDTLLQVFSAYGTVTDCIVMKDRETGRSRGFGFVTYGSPQEAEAAIAAMNEQELDGRRVRVNMANSRGSGGGGYGGGYNSGYGGGYQQQQGGYQQGGGFNQGYGGGYGGSGYGGGAQGGYGGGYGGQQGGYEQGGYGGNQGFDAQQGYGGAAGGYGQQQGGYNGGY

SEQ ID NO: 20752 - protein, 289 aa, Campylobacter upsaliensis RM3195
MSILVNKNTKVIVQGFTGKEATFHAEQCMAYGTQIVGGVTPFKGGTEHLGKPVFNTVSEAIKATGADMSLIFVPAFAVGDSVIEAADAGIKLAVVITEHTPVKDMMFAKQYANKKGMKIIGPNCPGIITSQECKLGIMPGFIFKKGCVGLISKSGTLTYEAANQVAQSGYGISTAVGIGGDPIIGLAYKELLSEFEKDAETKAIVMIGEIGGSLEVEAAKFIKENITKPVVAFIAGATAPKGKRMGHAGAIVGSSDESAAAKKEALKSYGIHVVDSPALIGEEIKKILV

SEQ ID NO: 20753 - protein, 304 aa, Candida albicans SC5314
MSKLLTSFKSSKTQLRQQFCELTGTSNTTATKYLESVRYDLARAIDNYYNKHPNKAQVTKKPVKVKIDDRLIQIFDKYKDSEDPNKIDIEGTLTYLGDLGISPDQIESLSLALLLKSPKTGVFTRENFLHIWQYYQCFDIGAMSEFITRFNKDLVNNIGGFKDISTVSDDENKSVPLKFQDLYNFTFKFSLETESQKFLDLDTAIEYWKLLLPIITETYSKDNKLDEEFKNHVNERVEQWFKFLTDTEYMTKKSISYDSWSMFYLFFKEIVLIDPIKFKDYDEMAAWPSVVDEFLEYLHDFELL

SEQ ID NO: 20754 - protein, 413 aa, Candidatus Kuenenia stuttgartiensis
MGLIVQKFGGTSVADAERIKAAARRVTETYDAGNKVIVVVSARGQTTDELIELANEIIDKPSTREMDMLLSTGEQVSIALMAMAIHALGYPAISFTGGQVGIVTDSFHTKARIRNINADRIRKELDNGSIVIVAGFQGIDVNENITTLGRGGSDTTAVALASILHADRCDIFTDVDGIYTADPRKVPNARKLNKISYDEILELASLGAQVMHSRSIEFAKKYNVPLYVRSSFNNSEGTLICKEIDDMENIVVSGATVSKNDAKITIRSIPDVPGQAAKIFHEIAKKNINVDMIIQNASVEGRADVTFTVPRSDLKNALETAEKIKKDLWAMEVLYDDKIAKLSVVGIGMRSHCGVAEKMFSILAEEKINIQMISTSEIKISCIIDEAHAERALNAVHKIFGLNLVKNEVAAKV

SEQ ID NO: 20755 - protein, 464 aa, Triticum aestivum
  misc_feature (280)..(280): Xaa can be any naturally occurring amino acid
  misc_feature (341)..(341): Xaa can be any naturally occurring amino acid
IRHEHQYTPGRPVSVSALQPSDTFPRRHNSSTPAEQAVMASECGFNTLDALIDATVPAAIRAPPMQFTGKFDAGFTESQMLEHMAHLASMNKTYKSFIGMGYYNTHIPAVILRNLMENPAWYTQYTPYQAEIAQGRLESLLNYQTMVADLTGLPMSNASLLDEATAAAEAMAMCLGIVKSKKKTFLIASNCHPQTIDICQTRATGFDINVVVSAAKDFDYSSGDVCGVLVQYPGTEGEVLDYAEFVKDAHAHGVKVVMATDLLALTTLRPPGEIGADIAXVGSAQRFGVPMGYGGPHAAFLATSQEYKRLMPGRIIGVSVDSSGKPVLRMAMQTREQAHPXETRPPANICTAHALLANMAAMYAVYHGPAGLKAIADRVHGLAGTFAHGLKKLGTVTVQELPYFDTVKITCADANANAEEARKSEMNLRVVDANTITVAFDETTTWRMLTAVQGFSGGKQWTHS

SEQ ID NO: 20756 - protein, 420 aa, Thermus thermophilus HB8
MGPLLVWHRGDLRLHDHPALLEALARGPVVGLVVLDPNNLKTTPRRRAWFLENVRALREAYRARGGALWVLEGLPWEKVPEAARRLKAKAVYALTSHTPYGRYRDGRVREALPVPLHLLPAPHLLPPDLPRAYRVYTPFSRLYRGAAPPLPPPEALPKGPEEGEIPREDPGLPLPEPGEEAALAGLRAFLEAKLPRYAEERDRLDGEGGSRLSPYFALGVLSPRLAAWEAERRGGEGARKWVAELLWRDFSYHLLYHFPWMAERPLDPRFQAFPWQEDEALFQAWYEGKTGVPLVDAAMRELHATGFLSNRARMNAAQFAVKHLLLPWKRCEEAFRHLLLDGDRAVNLQGWQWAGGLGVDAAPYFRVFNPVLQGERHDPEGRWLKRWAPEYPSYAPKDPVVDLEEARRRYLRLARDLARG

SEQ ID NO: 20757 - protein, 400 aa, Campylobacter jejuni subsp. jejuni NCTC 11168
MLIVQKYGGTSVGTLERIEAVANRVIQSAQQGNQLVVVVSAMSGVTNTLIEQAEYFSKTPNGKDMDMLLSSGERVTSALLSIALNEKGCPAISFSGRKAGIITDSVFTKARIHHIDTKAIKSELQNGKIVVIAGFQGVDEEGNVTTLGRGGSDLSAVAVAGALNADLCEIYTDVDGVYTTDPRIEPKAKKLDKISYEEMLELASLGAKVLQNRSVELAKKLNVNLVTRSSFNNNEGTMITKEDGMEQALVSGIALDKNQARVTLRNIEDKPGIAAEIFSVLANENINVDMIIQNVGVDGATNLGFTVPQNELELAKNAMQKILSSKTTIESDSAVLKVSIVGVGMKSHSGVASKAFKALADEGINIGMISTSEIKISMIVHEKYGELAVRALHECYGLDK

SEQ ID NO: 20758 - protein, 286 aa, Bacteroides fragilis NCTC 9343
MRQLKITKSITNRESASLDKYLQEIGREDLITVEEEVELAQRIRKGDRVALEKLTRANLRFVVSVAKQYQNQGLSLPDLINEGNLGLIKAAEKFDETRGFKFISYAVWWIRQSILQALAEQSRIVRLPLNQVGSLNKISKAFSKFEQENERRPSPEELAGELDIPVDKISDTLKVSGRHISVDAPFVEGEDNSLLDVLVNDDSPMADRSLVNESLAREIDRALSTLTDREKEIIQMFFGIGQQEMTLEEIGDKFGLTRERVRQIKEKAIRRLRQSNRSKLLKSYLG

SEQ ID NO: 20759 - protein, 229 aa, Lactobacillus sakei subsp. sakei 23K
MAKLVFIRHGQSEWNLSNQFTGWVDVNLSEEGVRQAQNAGALLKKEGILFDQAYTSVLTRAIKTLHYALEGSDQLWIPETKSWRLNERHYGALQGQNKAEAAEKWGDEQVHIWRRSYDTLPPLLDASDEGSAANDRRYAHLDPKAIPGGENLKVTLERVIPFWEDEIAPKLIDGQNIIVAAHGNSLRALTKYIENISDEDIMDVEMATGEPVVYDLDENLNVVSKKKLN

SEQ ID NO: 20760 - protein, 1550 aa, Nostoc sp. PCC 7120
MKAQLPDNEVQRIAALLEYKILDTPPEAAFDDITRLASYICGTPIALISLIDQNRQWFKATFGLERRETPRDEAFCAHTILESEAFIVPDATADERFATNPLVISDPKIRFYAGVPLTNPEGYSLGTLCVIDYIPRNLSFEQIEALQILGRQVIKQLELRRNLANLVLVNNQHKQAQKIRHPFFKKIAGGFGLASVFLVLLGLASYQAEIELIHNGNQVQTTQESINNLEQLLSQMKDAETGQRGYILTGKDPYLQTYQTALANIDQKFDELRNATVDPVRQQRLVILKPLITAKITELNQTIKLRQNLGFQAALQVIQSDQGQTLMDDIRKVMREMETENKVRLQQQLQAVKASEQKVIFILAIAIVSGFIILAVVYYLIYCEVIARQSMENILNEERNFISAVLDTVSALVIVLDSQGRIVRFNQACEVITGYSFDEVRGRHFWNLFLLPEDVESSKEFFAKFPADPTVPSVQESENYWVTKDGSRRLIAWSRTILQNHEGSVEYIIGTGIDITERKRADKHLTIQYAITRVLAESTTITEATPQILQAICETLGWNVCEIWMVNQQANFLSFFDLWHHTSLEMQEFRTQSQPITFASGIGLPGRIWASGQPIWLTDIVNDGSFLRNQLAAQVGLRGAFGFPIRSGQKILGVITCFSHQVQPHDPDLAKIMDSIGEQVGQFIHRKQAEEELQRQNLRSQLFTEITLKIRQSLQIEEILQITVKEVQKILQTDRVLIYQLLPDGSGSLIIEAVVAGWAAIKGQNITDFYLQTEYQQQYCLQQYRLRHLEAIANLDLGEIQQSHLELLRKFGVKANLVIPILVKDELCGLLIVHQCATSRQWTSFETHLLRQIADQVGIAVAQAQLLEVETRQRQELEVARSQAELASHAKSAFLANMSHEIRTPMNAVLGMTGLMLETLLNQEQRDFMETIRISGDALLTLINEILDLSKLEAGEMALENLNFNLSTCVEEVLDLLAPQAHSKGLEIAALIYRHVPIQLQGDASRLRQILMNLIGNAIKFTSFGEVVMRVELRSETPTTAIIHFAVTDSGLGITLEDQHKLFTPFTQVDASTTRKYGGTGLGLAICKQLVTLMGGEIGVESQLGKGSKFWFEIPFAKQLQPVSFVEDCGLLNNRRLLVVDDHATNRKIIYHQVSRWGMQVDQADRAVAALSMIVEACQQNKPYDVILIDMQMPEMDGMALGKQIKANSAIPPTPLIMLTSTNQRDEVQQAIKIGFAAYLVKPVKSSRLLDTIMSVLKTPSQLEAEKLEVKSQELEKNNLDHSRNHNFTATQAQNSVSTKTRILLAEDNLVNQKVALKQLQSLGYTADVAANGKEVLQLLKQIPYDLILMDCQMPILDGLEATKEIHRWAESSFASCRRPVIIAMTANAMKEDKQMCLDAGMDDYLSKPVMKEQLATALEYWCQLILNSRQAVEFDLNSLPLDWEHLHQLSENDTEFELHLLQIFVEDVRARLELAKEAIANTDFQQMAQQVHQLKGASTNIGATAMYLAAEKLEQLAQNQERRGSMELITEIEEGVNQIQAFLTRSQIV

SEQ ID NO: 20761 - protein, 355 aa, Thermoanaerobacter tengcongensis MB4
MYRIAVLPGDGIGPEVIEEGLKVLKAVEEKYGLRFDIKKYPFGGEAIDKYGEPYPEETRNGCLSSDAVLLGAVGGPKWDGLEGDKRPEAGLLALRKSLGVYANLRPAVLYPSLKDASPLKNELLEKGLDILVVRELTGGIYFGPRGKEAIGYGFRAYDTEVYETQEIERIAVIAFEAALRRRKKITSVDKANVLESSRLWRKTVEEVAKRYPEVELNHMYVDNCAMQLVKNPFQFDVILTNNMFGDILSDEAAQIVGSIGILPSASLRGDRVGLYEPIHGSAPDIAGKKIANPLATILSVAMMLQYSFGEEEAAQDIRKAVERALEEGFRTADLGKGIVLSTEEMGDKVVEYIKG

SEQ ID NO: 20762 - protein, 240 aa, Saccharomyces cerevisiae
PKLVLVRHGQSEWNEKNLFTGWVDVKLSAKGQQEAARAGELLKEKKVYPDVLYTSKLSRAIQTANIALEKADRLWIPVNRSWRLNERHYGDLQGKDKAETLKKFGEEKFNTYRRSFDVPPPPIDASSPFSQKGDERYKYVDPNVLPETESLALVIDRLLPYWQDVIAKDLLSGKTVMIAAHGNSLRGLVKHLEGISDADIAKLNIPTGIPLVFELDENLKPSKPSYYLDPEAAAAGAAAV

SEQ ID NO: 20763 - protein, 327 aa, Chlamydophila pneumoniae CWL029
MTTPAYLLANFGGPRHAKDLQEFLISLLTDRDVTGTFLPRVLHRHLFTFIAKKRVPKVLPQYQSLQNWSPIYFDTETLAKTLSEILRAPVIPFHRYLPSTHEKTLLALRTLHTRHVIGIPLFPHFTYSVTGSIVRFFMKHVPEIPISWIPQFGSDSKFVSLITCHIRDFLQKLGILEKECCFLFSVHGLPVRYISQGDPYSKQCYESFSAITTNFKQSENFLCFQSKFGPGKWLSPSTAQLCQNIDTDKPNVIVVPFGFISDHLETLYEIERDYLPLLRSRGYRALRIPAIYSSPLWVSTLVDIVKENSTVVAEELIKSGKKHTGIR

SEQ ID NO: 20764 - protein, 1247 aa, Oceanospirillum sp. MED92
MKHRLVIIGNGMATGRLLQLIADSAADRFDISVFGEEPGGSYNRVLLSPLLGEEISLEQVMTLDLDWYKNNNVTLYSGDPVVHIDASLKQVISHKNLRVSYDSLIIATGSNPSAVPVEGSSLPGVMNFRTLQDVETMQQVAATKKNAVVIGGGFLGLEAAEGLRLQGMNVTLLHRSDYLLNKQLDKPAAQMLLNNLQKRGIDFRLNANTQAFLGDTQVEAVELDSGEVIPADLVITAIGVSPNSQLAEASGLTVKRGILVDKQMRTSDLNIYAFGECCQFEEYTYGLVAPIWQQAEVVLSSLIGETSNYREEPVATQLKISGVELFSCGELIDADDRDTLIYQDFKKNEYRKLWLKENRLVGAVLYGDVREGQWYFEQLKENNDLSACRQQLLFGSPLCAQDTQTENMGITSMTTESNKRQLVVIGNGMVGHHFVENFVNSNVAGDYEIHILAEESRAAYDRVHLSEYFSGSSYEDLCLVEENLYEKHGVHLHLSEGATQIDRDAKQVITEQAVYSYDTLVMATGSYPFVPPIPGNDGEACFVYRTLEDLDKIQACAEDAKVGVVVGGGLLGLEAANALKSLGLKSHVVEFAPRLMPVQLDEDGGELLKKKIEALDVDVHCEKATTEIVAGEEHTYRMNFSDGSFLETDLILFSAGIRPQDTLARSSELEIGERGGILVNDQCLTSDENIYAIGECALWNNQIFGLVAPGYTMAKTAVAAIAGDEAAFTGADMSTKLKLLGVDVGSIGDAHGKTPGSISYRYLDEDEQTYYRIIVSEDKKKLLGAVLVGDNSKYDTLLQYALNGIDLPEKPQGLILPSMDGSAAPALGPDALPDEATICSCLNVTKGQICCSIDEGATSVADVKDATKAASGCGGCAAMLKSVVDNELSKRGVEVNTDLCEHFAYTREELYHIIRVEGIRSFSELLEKHGKGLGCEICKPAAGSILASCWNEHIQEKPLVSLQDTNDTFMANMQKNGTYSIVPRVPGGEITPDKLIVIGQVAKKYNLYTKITGGQRVDLFGAQLHELPLIWEELVNAGFETGHAYGKSLRTVKSCVGSTWCRFGVNDSVGMAINLENRYKGLRAPHKIKFAVSGCTRECAEAQCKDIGVIATENGWNLYVCGNGGMKPRHADLFATDLDDETLVKYIDRVLMFYIKTADRLQRTSVWMENLEGGLDYLKEVVIDDKLEIGEELEAQMAHIVSTYECEWKATLEDEEKLKRFRTFVNTEDQVDPQIVHILERDQVRPV

SEQ ID NO: 20765 - protein, 670 aa, Arabidopsis thaliana
MSDLPLDLVEEILSRVSATSLKRLRSTCKQWNTLFKKRSFSQKHFHIAPKESMVLMLKEYRVCSMNINLNVSPPSVEFQGTLGIKDDSHSNLGQVEIVEVYHCDGLLLCATRDNRLVVWNPCLGETRWIQLKDECRRYSTFALGYENNKFCRRNYKILRYWGWFHDHIPDDGGRFRFEIYDFRSDSWKVLDDVPDDRFPPVSVVSLKGNTYWFGSNKKDFLRSFDFTTERFNHIGLPPSRDHGFMALSVVGEEQLSVLQEIETSKMEIFVTNKVGTEEAALLWSKSFIVDLPIGGHCSEVFASLLINEEKKVALCCNLDFETDGNLIFTIGEDNKYYSEIPYATNKPWCRRYGAKLMETAVTHSHLLNPRVPLVTENIRVPAMGVVRVFSKMTFEKKKTTEEKGSSGGKADQGNKGEQLIVSYWGVKPMKITKEDGTEWKWSCFRPWETYKSDLTIDLKKHHVPSTLPDKLAYWTVKSLRWPTDLFFQRRYGCRAMMLETVAAVPGMVGGMLVHCKSLRRFEQSGGWIKALLEEAENERMHLMTFMEVAKPNWYERALVIAVQGIFFNAYFLGYLISPKFAHRMVGYLEEEAIHSYTEFLKELDNGNIENVPAPAIAIDYWRLEADATLRDVVMVVRADEAHHRDVNHYASDIHYQGRELKEAPAPIGYH

SEQ ID NO: 20766 - protein, 110 aa, Thermus thermophilus HB27
MAKPIEVTDQNFDETLGQHPLVLVDFWAEWCAPCRMIAPILEEIAKEYEGKLLVAKLDVDENPKTAMRYRVMSIPTVILFKDGQPVEVLVGAQPKRNYQAKIEKHLPATA

SEQ ID NO: 20767 - protein, 294 aa, Brassica napus
MAASASSLALSTFTPKSLPFSISRPASSSLLPPSLSFNLHSLSASLSLSISASSASRFVRNVAVTDDFSVEEDGIFADDDAAPPPPREQSFSSDLKLFVGNLPFNVDSAQLAQLFESAGNVEMVEVIYDKVTGRSRGFGFVTMSSVSEVEAAEQQFNGYELDGRPLRVTAGPPPPKREDSFSRGPRSSFGSSGGRYGGGGGGGGAGSGNRVYVGNLSWGVDDMALESLFGEQGKVVEARVIYDRDSGRSKGFGFVTYNSAQEVQNAIRTLDGADLDGRQIRVSEAEARPPRRQF

SEQ ID NO: 20768 - protein, 638 aa, Medicago truncatula
MDKELQLCSVDAADEEEMVSQQKPQRSKGGLVTMPFIIGNEALAKMASVGLLPNMILYLMGSYRLHLGISTQILLLSSAASNFTPVIGAFIADSYLGRFLGVGIGSSISFLGMSLLWLTAMIPAARPSACNHPSEGCESATPGQLAMLFSALILIAIGNGGITCSLAFGADQVNRKDNPNNYRVLEIFFSWYYAFITIAVIIALTGIVYIQDHLGWRIGFGVPAALMLISTVLFFLASPLYVKITQRTSLLTGFAQVSVAAYKNRKLSLPPKTSPEFYHHKKDSDLVIPTDKLRFLNKACVIKDHEQDIASDGSAINRWSLCTVDQVEELKAIIKVIPLWSTAITMSINIGGSFGLLQAKSLDRHIISSSNFEVPAGSFSVILIVAILIWIIIYDRVLIPLASKIRGKPVIISPKKRMGIGLFFNFLHLITAAIFETVRRKEAIKEGYLNDTHGVLKMSAMWLAPQLCLAGIAEMFNVIGQNEFYYKEFPKSMSSVAASLSGLAMGVGNLVSSLVLSIIESTTPSGGNEGWVSDNINKGHFDKYYWVIVGINALNLLYYLVCSWAYGPTVDEVSNVSKENGSKVEESTEFKHMNPHFDDKVSGETSSKEKELTEFKNGAQVEKVFKNSEQRDLKEEDL

SEQ ID NO: 20769 - protein, 157 aa, Nostoc punctiforme PCC 73102
MTKKLHEPLLVVEDSNEDFRMLQRLMRLMSVQNPIHRCTNGDEVLEFLYQQGSDAHSKGENLPNSKVALRPSVILLDLNLPGIDGRDILDRLKQDKSFKEIPIVVFTTSSNPKDIELCYQKGANGYLVKPMDAQELKKTIQAFVDYWLDANMPPVLD

SEQ ID NO: 20770 - protein, 219 aa, uncultured bacterium
NSRLCMSSAVAGYSRSLGSDGPPCSYDDLDHCSVAFLIGTNTAECHPVLFQRLLKRRKRNAGSVKIVVVDPRCTDTAKAADIHLAIAPGSDLALLHGLAHLVLLNGGQDQAFIWDHTDNFDDFSNVVSRWTPTLTAQFCGIPERDLREVADLFHRQERVLSLWSMGVNQRREGTAVVGGLINLHLLTGQIGRQGSGPFSLTGQPNAMGGREAGGLSHLL

SEQ ID NO: 20771 - protein, 219 aa, uncultured bacterium
NSRLCMSSAVAGYTRSLGSDGPPCSYEDLDHCSVAFLIGTNTAECHPVLFQRLLKRKRKNPGSVKIIVVDPRRTDTAKAADIHLPIAPGSDLALLHGIAHLVLRENGQDPAFVDDRTENYDAFFDVAARWTPRRVARFRNIPEKRLREVATLFHRREKVLSLWSMGVNQRREGTAVVQGLINLHLLTGQIGNEGAGPFSLTGQPNAMGGREAGGLAHLL

SEQ ID NO: 20772 - protein, 117 aa, Craterostigma plantagineum
MAHSLGEQYDLGKPTEEHHESHPPAHQAPHAGGELGAGQKTSQLARSNSSSSSSSEDDGQGGRRKKPIKEKVKEKLPGGAGGKQTGECGTTTTTAAGGHEEKKGVMEKIKEKLPGQH

SEQ ID NO: 20773 - protein, 219 aa, uncultured bacterium
NSRLCMSSAVAGYTRSLGSDGPPCSYEDLDHCTVAFLIGTNTAECHPVLFQRLLKRKRKNPGSLKIVVVDPRRTDTAKAADIHLPIAPGSDLALLHGIAHLVLRENGQDPAFIDDHTENYDAFFDVAARWTPRRVALFCNIPEKRLREVAALFHRREKVLSLWSMGVNQRREGTAVVQGLINLHLLTGQIGKQGAGPFSLTGQPNAMGGREAGGLAHLL

SEQ ID NO: 20774 - protein, 159 aa, Brassica napus
  misc_feature (148)..(148): Xaa can be any naturally occurring amino acid
MMISDLPRDMVEEVLCKLPMTSLRRARFTCKRWNNTLSKDWRFTRKYNGEAAKRKEFQVVMILEYKVYLMSVNLHNPSPSIEPIGKLHDAGVDIINVFHCQGLLLCVTKDGTRLVVWNPFTGQTRWIKPRDSYHRCDRYALGYENRNXYPLKVLRFVDD

SEQ ID NO: 20775 - protein, 1123 aa, Bordetella bronchiseptica RB50
MEQVTGYCTLCRSRCGSVNHVENGRLVAVTPLAGHPTGGALCAKGRAAPEMMAESHRLLRPLRRTNPRGAADPGWREIEWSEALDEVAARLAVARRRDGAESVAFAVTTPSGTPMVDSFEWVERFVRVFGSPNLIYAVEVCGWHKDYAHALTFGRGIGVPDLEHTDTMLLWGHNPARTWLAQAARIAAARQRGARVVVVDPNREGSSQQADLWLRVRPGADGALALGAIRHLLHTGRFDHGFVARWSNGPYLVDGASGALLRAADLWPDADPAARVVMLDGRPAASGRGADTARAELFGSWTLRLHDGRACEAVTVMHALRVAVERYTPDEVARLAWLDEAELAQFNAIFENAPRLSYHSWTGVGQHTNATQTDRAIATLYALTGACDRKGGNLWTVAPPYRAVNGYRELLSPVQRAKALGLDELPLGPPSLGWITARDFCRAVLQQDPYPVRTLVSFGTNLLVSQAETARNLEALQALDFHVHVDMSMNPTAMNADIVLPANMPWEREALKLGFEITQAAVEHVQLRPRMVEPAGESRADYEIVLELARRLGLRDAFFGADMDACWNHQLAPLGIDVQALRRQPEGIRFPQPFAHEKYKTLRDGQPVGFPTHDGRVQIHCAALHDIGQPALPSHVEPADTPARHAGAYPLVLSTAKSGWFVHSSHRYVASLRRKSPDPQVYLSTEAARDRGIASGDWVRVRTPYGEVALRAKINADLHANVAIAEFGWWQGCEGLGRADGAIVGPASSNINAIMTDRHRDPVSGSVPLRATVCDIVRDDARNRGSWSGAREFVLARKRGIAHDVAEFRLLACDAQALPDFLPGQHVIVSMPGGAVRRAYSLTGPNRAPAHLSIAVRRVRDGDGPAGLMSNALHALDEGARVLLSAPAGVFTPPLRTARPVILMASGIGITPFHGYLEALAQDAGPAPSVLLVHACRDGSSHPYGAELKRLAQRIGSVRTLTVYAEPASHDVPGRDYQQRGRLDFAWLSPETVAARPLVYLCGSPGFLALCTDALAARGIPRFDIFSETFTSEKRVPDTLAPQPIEIEAEQGGFTWDPAAGTLLDAAERAGLSLPSGCRVGQCESCAMHIVSGQVAHLIDFDGSADTCLTCQAVPITPLTLRR

SEQ ID NO: 20776 - protein, 559 aa, Rhodopseudomonas sp.
  misc_feature (55)..(62): Xaa can be any naturally occurring amino acid
  misc_feature (254)..(258): Xaa can be any naturally occurring amino acid
  misc_feature (270)..(270): Xaa can be any naturally occurring amino acid
  misc_feature (284)..(284): Xaa can be any naturally occurring amino acid
  misc_feature (289)..(289): Xaa can be any naturally occurring amino acid
  misc_feature (299)..(301): Xaa can be any naturally occurring amino acid
  misc_feature (308)..(309): Xaa can be any naturally occurring amino acid
  misc_feature (316)..(335): Xaa can be any naturally occurring amino acid
  misc_feature (417)..(417): Xaa can be any naturally occurring amino acid
MTTPKLDRRQVLKLEAAAMAALAGGVAMPAGAANLVTERAVSELKWDKAACRFCXXXXXXXXRTKENRVVATHGDTKSEVNRGLNCVKGYFLSKIMYGHDRLTQPMLRKTDGRYDKNGEFEPVSWDEAFDIMAEKFKAALKKRGPSGVGMFGSGQWTVWEGYAASKLFKAGFRSNNIDPNARHCMASAVAGFMRTFGIDEPMGCYDDIEAADVFVLWGSNMAEMHPLLWTRVTDRRLSAPHVKVAVLSTLEHRXXXXXAIRLVFKPQSDXAILTAIANHIIKTXRVNKXFVAKHTTFKXXXTDIGYGXXPEHPLQXXXXXXXXXXXXXXXXXXXXAAFVADYTIEKASQISGVPAAKIEALAELYADPNTKVTSFWTMGFNQDTRGVWANNLAYNLHLLTGKISEPGNSPFSLTGAXFACGTAREVGTFSHRLPADMVVTNKKHRDIAEKIWKLPEGTIPDKPGYHAVLQSRMLKDGLLNAYWVQVNNNLQAGANANEETYPGFRNPDNFIVVSDAYPSVTALAADLILPTAMWVEKEGAYGNAERRTQFWHQLVAAPG

SEQ ID NO: 20777 - protein, 286 aa, Symbiobacterium thermophilum IAM 14863
MTAGVIDGKQVAAQVQEEVAREVAALKAEGLTPGLAVVLVGDDPASKVYTANKERTAKELGMHSVLYHLPATTTQQELADLVMQLNRDPAIHGILVQSPLPEGLDMDAVIRLIDPRKDVDGFHPENVGRLWIGQDGLVPCTPAGVMRLLDAYGVDPKGKHAVVVGRSNIVGKPMAALLLQRHATVTICHSRTPDLAETCRRADILVAAVGRLQMITAEHVKPGAVVIDVGINPVPGFKKRIRGDVDFDSVQEVAGLITPVPGGVGPMTIAMLMANTVKAARMQTGR

SEQ ID NO: 20778 - protein, 219 aa, uncultured bacterium
NSRLCMSSAVAGYTQSLGSDGPPCCYDDLDHCKVAFLIGTNTAECHPVLFQRLLKRKKRNPGSLKIVVVDPRQTDTAKAADIHLAVAPGSDLALLHGIAHLVMRENGQDPTFIDNCTDNYDSFFDVVARWTPRRVALFCGIPEKRLREVAQLFHRREKVLSLWSMGVNQRREGTAVVGGIINLHLLTGQIGKEGAGPFSLTGQPNAMGGREAGGLSHLL

SEQ ID NO: 20779 - protein, 394 aa, Chlamydophila caviae
MSKETFQRNKPHINIGTIGHVDHGKTTLTAAITRALSAEGLANFCDYSSIDNTPEEKARGITINASHVEYETPNRHYAHVDCPGHADYVKNMITGAAQMDGAILVVSATDGAMPQTKEHILLARQVGVPYIVVFLNKIDMISQEDAELVDLVEMELSELLEEKGYKGCPIIRGSALKALEGDASYVEKIRELMQAVDDNIPTPEREVDKPFLMPIEDVFSISGRGTVVTGRIERGIVKVGDKVQIVGLRDTRETIVTGVEMFRKELPEGQAGENVGLLLRGIGKNDVERGMVICQPNSVKSHTQFKGAVYILQKEEGGRHKPFFTGYRPQFFFRTTDVTGVVTLPEGTEMVMPGDNVEFEVQLISPVALEEGMRFAIREGGRTIGAGTISKIIA

SEQ ID NO: 20780 - protein, 605 aa, Shewanella sp. MR-4
MSLSSSSQSLQPNKIANRLAAIRSELASANLDAFIIPRADEYLGEYVPEHNERLYWATDFTGSAGMAIVLKDKAAIFTDGRYTVQVRLQVDANLFSYESLTDTPQIEWLCDTLAAGSRVGFDARLHTLAWFENAKAMLAKAQIELVAVEQNPIDKHWQNRPAPSSAAITLFSNESAGKTSLQKRTEIGALVKKAGADVALIAALDSFCWLLNIRGNDVPRLPVVLGCGLLHANGDMQLFTDLNKLPEGIEEHVGAGVSFKSEASLADTLASLQGVKLLADPNSANAWAQNIARDAGAKLIAGIDPVSLPKAQKNAAELAGMRASHIRDGVAVSRFLAWLDAEVAANRLHDEATLADKLESFRLEDPQYREPSFDTISAAGANAAMCHYNHNNGTPAMMTMNSIYLVDSGAQYLDGTTDVTRTIAIGNVTDEQKKMVTLVLKGHIALDQARYPKGTTGQQLDAFARQYLWQHGFDYDHGTGHGVGHFLSVHEGPQRIGKNLNAIALMPGMVLSNEPGYYRADSFGIRLENLVVVQHCEALKGAEREMYEFDALTLIPMDARLIDKSLLTQGEIDWFNAYHQKVFNTLSPLMSGSELKWLTQATKAI

SEQ ID NO: 20781 - protein, 131 aa, Vibrio vulnificus YJ016
MTKMIHSMIRVSDLDRSIAFYRDALELEIKDQFVFDTFTLTYLANKTTGFELELTYNHGMSDPYTHGTGYGHLAVCIEDIELAHKRLRDLGIAPSDVKAMDHNQKHLATFFFITDPDGYKIEFLQRQGRYQ

SEQ ID NO: 20782 - protein, 155 aa, Oryza sativa
MAASVMASLALKPSASPLLERSKLRGKGTMARPSLIIVAKKAKKIQTSQPYGPAGGVVFKEGVDASGRVAKGKGLYQFSNKYGANVDGYSPIYTPEEWSSTGDVYVGGKAGLLLWAITLAGILVGGAILVYNTSALGLAKCSRPSCACFHVYNLH

SEQ ID NO: 20783 - protein, 473 aa, Streptomyces coelicolor A3(2)
MTLPTETAHPELEGLGKYEYGWADSDTAGASAKRGINEDVVRDISAKKNEPEWMTKLRLKGLRLFEKKPMPNWGSDLSGIDFDNIKYFVRSTEKQAESWEDLPEDIKNTYDKLGIPEAEKQRLVAGVAAQYESEVVYHQIREDLEEQGVIFLDTDTALKEHPELFKEYFGTVIPVGDNKFASLNSAVWSGGSFIYVPKGVHVEIPLQAYFRINTENMGQFERTLIIVDEGAYVHYVEGCTAPIYKSDSLHSAVVEIIVKKNARCRYTTIQNWSNNVYNLVTKRAVAYEGATMEWIDGNIGSKVTMKYPAVYLMGEHAKGETLSIAFAGEGQHQDAGSKMVHMAPNTSSNIVSKSVARGGGRTSYRGLVEIGEGAHGSKSNVLCDALLVDTISRSDTYPYVDVREDDVSMGHEATVSKVSEDQLFYLMSRGLSEFEAMAMIVRGFVEPIAKELPMEYALELNRLIELQMEGAVG

SEQ ID NO: 20784 - protein, 365 aa, Methanocaldococcus jannaschii
MMIMQYIYPFTAIVGQEKMKKALILNAINPKIGGVLIRGEKGTAKSTAVRALADLLPEIEIVEGCPFNCDPNGNLCDICKEKKKRGELKTTKKKMKVVNLPIGATEDRVIGTLDIEKAIKEGIKALEPGILAEANRNILYIDEVNLLDDHIIDVLLDAAAMGWNIIEREGVKIKHPSRFILVGTMNPEEGELRPQILDRFGLMVDVEGLNDVKDRVEVIKRVEEFNENPEAFYKKFEEEQNKLRERIIKARELLNKVEISDDLLEFISKVCIELGIQTNRADITVVRTAKALAAYNGRTYVTIDDVKEAMELALPHRMRRKPFEPPQLNKEKLEQMINEFKQQNNKDNEEKEEHKDDDVKKNMMK

SEQ ID NO: 20785 - protein, 1163 aa, Gibberella zeae PH-1
MSAKVYVGNLGWNTTDDSLRNAFQDYGQILDSIVMRDRDTGRSRGFGFVTFGSSQEAETAIISLNEQELDGRRIKVNLANARPGGGGGGGGYSGGGGYMGGGGYNGGGGYNGAMMNSHMLLIDTYILSIIDFQVICSYMEDILYTHKLRLPYIESHLISRLPPKYCLNVTQENPLVTSVEYSTKANTCSYPMKLYPAIEKLTLNDIESVKSAIMNGLDPNTLWTEEVLVLPVPKSGCVMWSQPFDFDTWPHWNTPLHRAIKFSDFETAAFLLQHGANVDLYNAVGKTPLHEAVWNRKYDAIRFLLGHNAEMNNFTLGACIRYEGENQDIHGIGGQLNIQKALSSSDLTSVQLLVHAGADLCPPSQHPWTTLDLALLYGDRTIVELLRKLGHKLPTTGPTSSRDVYQDSSRDLLRFSRDGNIVPSKDLYEVYCFVLGKVDQVAIIDADILIKRFFEALHETANDTDGNKHIIICTSCQNFQSEARVIFEVENYFTFDFDENREHLGFTFDLHPSRRQLIDSASNGCAICAIIADALDDHERNPRTAFQPFDTEFGPESDSVKLQPARYWSLNCIKVSCSELGTEIPLFDVYDSLTSSFEDGHQMDNSTGSSSAMIMAKNWIRICQENHTECQELEKKRHRKSILPRRLIRVGTSEIQPRIVHVQDTVPYCALSYCWGSKDFFTTTRDNLVQNMRGISMESFPAIMRDAISVVRSLEFEYIWIDALCIVQDDERDWAHEAGIMGDIYSNAELTISTLVSSDCHTGLFQPRSVRISHPVPLGIWQPKTKRKANASSALTPQWLERDVKTSGPVHSRGWTLQEQLLSKRILYFGHEMLHFECLHDYVVEANPGGEYRRSANQHDQELQIRRHTKKALQGARTRESVSSETGCDRQPFELWKQQVKDFTQRNLTRASDRPPAFDAISKSLATAIGCKPLCGIWDGGKLFESLCWQTGNCADAPLNLPNIPSWTWLARTGAISFALASRDGREEVQTSSGATVVSINSEATGLSITLRGTLHRKQRIDDTLLEHWKKLESDKRYNPSVYLDYNMGDDRDVYTFDTLRFPQGHPHKGYGYPVCPNGRNPETLGLLLQKVDNKLNTFQRIGIAKIPPRYEGYEGYEGFKTIPELDPHDGIIPAPCISHEITQIKWLSTDEETFTDQQFTLV

SEQ ID NO: 20786 - protein, 159 aa, Burkholderia xenovorans LB400
MTSIYSFSARTLGGEEVSLEQYSGKVLLIVNTASECGFTPQYAGLQKLYETYAARGLAVLGFPCNQFGKQEPGDAAQIGSFCEKNYGVTFPMFDKVDVNGANAHPLFRYLTGEAPGVLGLEAIKWNFTKFLIDREGNVVKRYAPLTKPEAITEDIEKLL

SEQ ID NO: 20787 - protein, 822 aa, Caulobacter crescentus CB15
MTQATPKLRLVVIGNGMAGCRAVEEVLKRDPDRYAVTIFGAEPRVNYNRIMLSPVLAGEKAFEDIVINDEAWYRDNGITLHAGRAVTAIDLAARKVFAEGGLEIGYDKLILATGSDPFRLPLPGGDLKGVVTFRDLDDVNAMLAASAEPDARAVVIGGGLLGLEAAYGLARRGMAATVVHLMDVLMERQLDESAGYLLREALADRGVETVLGAHSEEIVGADGQVTGLKLKDGRVLPCDLLVMAVGIRPNTTLAKAAGLTVNRGVAVDDAMRTSDPDVFAVGECVEHRGQCYGLVAPIWEMCRALAQALTDGEGAYQGSVLSTRLKVSGVDVFSAGKFAGGEGCEDIVFRDAARGVYKRVVIEDGKVAGAVLFGDAADGGWYFDLMKAGADVAGIRETLIFGQAITEGLSGLDPSAAVAAMPDTQEICGCNGVCKGAITSAITAQGLTTLDDVRAVTKASASCGSCTPLVEQVLKLTLGDGFQAQTGPKPICKCSPKTHGDVRRAIVDQGLKSMPAVMQALEWSTPDGCASCRPALNYYLLCAWPGEYRDDKQSRYINERVHANIQKDGTYSVVPRMWGGMTSPAELRAIADVAEKFAIPAVKVTGGQRIDLLGVKKDDLPAVWADLNAAGMVSGHAYAKGLRTVKTCVGSDWCRFGTQDSTGLGMRLEKFLWGSWAPAKVKLAVSGCPRNCAEATCKDFGVVCVDSGYEIHIGGAAGLHIQGTQVLTRVATEDEAVWVIAAAMQLYREEGWYLERVYKWMDRVGLESIRAQVTDPDQRRALYDRFVYSQRFARIDPWAERVAGRHNEEFTPMSRRMEFVPA

SEQ ID NO: 20788 - protein, 533 aa, Desulfitobacterium hafniense Y51
MVTITSWKRFKEYLYYDQELGLLLDISRMNFSAEFLRSMAEPMREAYHQLQLLEKGALANPDEGRMVGHYWLRNPDLAPTEEIVQDIKETLKEILDFAEQIHSGRLQGEKGNPFRNILLVGVGGSILGPRFVADALASSRDKMKAFFIDNGDPDGIDRVLSRIGEELPATLCLIISKSGGTIETRNGMLEVRRAYKEAGLSFPDHAVAITQRGSQLDKLSQKEGWLRAFPMWDWVGGRTSLLSAVGLLSLALQGIDVAGLLQGAKDCDGRTRRPDTLDNPGALLALMWYYSTQGQGGKQMVVLPYKDRLELFTKYLQQLIMESLGKEKNLQGETVHQGITVYGNKGSSDQHSYLQQLLEGPDNFFVTFIEVLKDRQGPSTYMEENSTSGEYLQAFLLGTREALTQKGRESLTITVKEVNAYTIGVLIALFERAVSIYALLVGINAYHQPAVEMGKKAAGQAIQLKNNIVEFLKSHPGKKFSVSELALAIQEEEHQEMVFKLLLHLTTNPEHGVNMEPGEPWPESRFFVGGPIS

SEQ ID NO: 20789 - protein, 109 aa, Glycine max
  misc_feature (43)..(43): Xaa can be any naturally occurring amino acid
  misc_feature (45)..(46): Xaa can be any naturally occurring amino acid
  misc_feature (54)..(54): Xaa can be any naturally occurring amino acid
  misc_feature (64)..(64): Xaa can be any naturally occurring amino acid
GDVPPQGGRPGWAALPNPRMGPWLRLLKNLAQAHNLVPEFEIXFXXGHSTIGNXFGPNKPTMFXLENGSTGDYWRDRMLPSYGTVIWEGLGSGRGAPKLGKKPLRPPKE

SEQ ID NO: 20790 - protein, 637 aa, Medicago truncatula
MDKELQLCSVDAANEEEMVSQQPQRRKGGLITMPFIIGNEALARMASLGLLPNMILYLMGSYRLHLGISTQILLLSSAASNFTPVIGAFIADSFLGRFLGVGIGSSISFLGMSLLWLTAMIPSARPPACNHPSEGCESATPGQLAMLFSALILIAIGNGGISCSLAFGADQVNRKDNPNNRRVLEIFFSWYYAFTTIAVIIALTGIVYIQDHLGWKVGFGVPAILMLISTVLFFLASPLYVKIKQKTSLFTGFAQVSVAAYKNRKLPLPPKTSPEFYHQQKDSELVVPTDKLRFLNKACVIKDHEQDIASDGSAINRWSLCTVDQVEELKAIIKVIPLWSTAITMSINIGGSFGLLQAKSLDRHIISSSNFEVPAGSFSVILIVAILIWIIIYDRVLIPLASKIRGKPVIISPKKRMGIGLFFNFLHLITAAIFETVRRKEAIKEGYLNDTHGVLKMSAMWLAPQLCLAGIAEMFNVIGQNEFYYKEFPKSMSSVAASLSGLAMGVGNLVSSLVLSIIESTTPSGGNEGWVSDNINKGHFDKYYWVIVGINALNLLYYLVCSWAYGPTVDEVSNVSKENGSKVEESTEFKHMNPHFDDKVSGETSSKEKELTEFKNGAQVEKVFKNSEQRDLKEEDL

SEQ ID NO: 20791 - protein, 387 aa, Oryza sativa
MLPAVKLSPGPVAFAGTNLRSRSASVSSVSSLKPSKFVVSPLRPLYLAPLDGPRAAGQKAQRQPLEFRCAASAADDKESKTEVVPVRSEAAQKLKISIYFATWWALNVIFNIYNKKVLNAFPYPWLTSTLSLACGSAMMLVSWATRLVEAPKTDLDFWKVLFPVAVAHTIGHVAATVSMSKVAVSFTHIIKSAEPAFSVLVSRFLLGETFPVPVYLSLLPIIGGCGLAAVTELNFNMVGFMGAMISNLAFVFRNIFSKRGMKGKSVSGMNYYACLSIMSLVILTPFAIAMEGPQMWAAGWQKALAEVGPDVVWWVAAQSVFYHLYNQVSYMSLDEISPLTFSIGNTMKRISVIVSSIIIFHTPVRPVNALGAAIAILGTFLYSQAKQ

SEQ ID NO: 20792 - protein, 637 aa, Medicago truncatula
MDKELQLCSVDAADEEEMVSQQKPERSKGGLVTMPFIIANEALARMASTGLGPNMILYLMGSYNLHLATATQILLISSAAGNFTPLVAAFIADSYIGRFLGVGIGSIISFLGMAMLWLTAMVPAAQPPACSNPPEGCISAKPGQMAMLLSALILIGIGNGGISCSLAFGADQVKRKENSNNNRALEIFFTWYYASTTIAVIAALFGIVYIQDHLGWRIGFGVPAALMLISTVLFFLASPLYVKITQRTSLLTGFAQVSVAAFKNRKLSLPPKTSPEFYHHKKDSVLVVPTDKLRFLNKACVIKDHEQDIASDGSIINRWSLCTVDQVEELKAIIKVIPLWSTGITMSINIGGSFGLLQALSLDRHIISNSNFEVPAGSFTIILIFVILIWIIIYDRVLIPLASKIRGKPASISPMIRMGLGLFFNFLHIVVAAIFESIRRKKAIQAGFLNNTHGVLKMSAMWLAPQLCLAGIAEAFNVIGQNEFYYKEFPKTMSSVSSALSGLAMAAGNLVSSFVFSTIENTTSSGGNEGWISDNINKGHFDKYLWVIAGINVLNLLYYLVCSWAYGPTADQVSKVSEEENGSKEENSTEFKNVNPQIDDKVSDETSSKEKELTEFKNGGQVEKVSKVSEENGSKEE

SEQ ID NO: 20793 - protein, 515 aa, Kluyveromyces lactis NRRL Y-1140
MCGILAYFGKSFGSTLTDEFQELYEKDLTGPIQSCNSNTLFNELIPYIVRRGPNYASLRSLSEINAMLFSSVLSLRTPFTKQSVMVQDRYLLQYNGELYNDDTVENCEHSDTEYISSLLEKHSVEEVVRKCYGEFAYAITDLQERKVYFGRDSIGKRSLSYILLDDELYITSVSGRCDGFQNCLAGVIYIFDINTKQLTGSVKIHDEPYIVSDQIDNDFQLLEEYKIKLYECLRRSVYQRIVTIHPMHLENGNISILFSGGLDCSVITALLCEQLIKINRNSETIIELLNVGFENPRTGKMPSDSPDRILAIKSAQLLSELYPQVNIKLIEVDVPYTDYLSHKDTVIDLMYPKNTEMDLSIAIAFYFASRGRGKVTENGESKPYNRSGIVMFSGLGADELYGGYHKFSNKSNEELVIELQKQIAQIHDRNLNRDDKVISNHGIEVRYPFLDERVVQFSVDLPLNYKVNKHILRVMAKDILRLDFISEEPKRAIQFGARSAKMTKDSNKRGTDLLK

SEQ ID NO: 20794 - protein, 442 aa, Gibberella zeae PH-1
MASLLRMKAVTGLSGLSRVAASRVALSHSATLCQRGAIDPQRRLFSNSGFLNGSYIVSVPPMAESITEGTLSSLSKKVGEAVEQDEEIASIETDKIDVLVNASEPGAIAEYFAEEGDTVVVGQDLARIVTGEDAGSAKKSEGGEQKPAKEEPKKEESKPSEQPAKTEEKKSSPAQDAPKPSKPAESKPASKESKSAAPAQSSGAPNRGERVNLQEKMSRMRRTIAGRLKQSQNTCASLTTIQEVDMSNLIAWRAKYKEEVAEEHGVRLGYMGAFTKATTIAAQKVPQINAQIDTEKEIITYHDYVDVSIAVSAPKGLVTPVLRNTESLSIVELERAVAAAAKKARDGKLTMEDMEGGSFSISNPGIFGSMFGTPVINYPQAAVFNMNGIRQEVVAINGEAVIRPMMYISLTYDHRLIDGREASMFLNTVKKYIEDPSRMLLA

SEQ ID NO: 20795 - protein, 105 aa, Lactobacillus sakei subsp. sakei 23K
MTAQILNEANFNDEIKEGVTLVDFWATWCPPCKMQGPIVEQLADDYAGKAKIAKVDVDQNQNLAAQFGIQAIPTLLIMKDGQLQEQLVGLQRKEALATKLDATLA

SEQ ID NO: 20796 - protein, 304 aa, Bacillus clausii KSM-K16
MSILINKDTKVIVQGITGATGLFHTKQALEYGTNIVGGVTPGKGGTDIEGVPVFNTVQEAVEATGANASVIYVPPAFAADAIMEATDAELELVICITEGIPVLDMVKVKRYMAGKQTRLVGPNCPGVITPEECKIGIMPGYIHKKGHIGVVSRSGTLTYEAVHQLSTAGIGQSTAVGIGGDPVNGTDFIDVLSLFNEDPDTYAVIMIGEIGGTAEEEAAEWVKANMTKPVVGFIGGQTAPPGKRMGHAGAIISGGKGTAAEKIKTMEACGIRVAATPSDMGETLIEALKANGLYEKSLTHETAK

SEQ ID NO: 20797 - protein, 349 aa, Triticum aestivum
  misc_feature (48)..(48): Xaa can be any naturally occurring amino acid
  misc_feature (72)..(72): Xaa can be any naturally occurring amino acid
  misc_feature (104)..(104): Xaa can be any naturally occurring amino acid
  misc_feature (129)..(129): Xaa can be any naturally occurring amino acid
SAPPCPLKGPLSRPWDFRPILVQGDNKGLYNNFKPPATRAVEPPEGLXGVERGQGIPQPCCLPTVFNSFGGXLKVVFPGILGGHSRGPEKSSPRSFFAEIRPAXADPGGKVTIEALEKMDLTKSAVWEXLRLDPPVKFQYGRAKADMNIESHDAVFAVKKGEILFGYQPCATRDPRVFGSTAREFVGDRFVGEEGRKLLQYVYWSNGRETESPSVDNKQCPGKNLVVLVGRLLVVELFLRYDTFTADVGVDLLGTKVEFTGVTKATSGPESAVFKLKPAPLIADNGLTYGSSSLIAAVNRPRQHARTYVPRYIVLLERVSHACTLFGCFAAWCPCVRVCVFYFSQSRPL

SEQ ID NO: 20798 - protein, 85 aa, Arabidopsis thaliana
  misc_feature (12)..(12): Xaa can be any naturally occurring amino acid
  misc_feature (27)..(27): Xaa can be any naturally occurring amino acid
WLPPPLSYAAEXTWAGYDTMVAPFTGXKSYAEFPVTPKTNKDITSIASNGGRVSCLKAWPPIGKKKTETPIYLPDLSDPKTAKEA

SEQ ID NO: 20799 - protein, 154 aa, Haloarcula marismortui
GISYSVEADPDTTAKAMLRERQMSFKHSKAIAREIKGKTAGEAVDYLEAVIEGDQPVPFKQHNSGVGHKSKVDGWDAGRYPEKASKAFLDLLENAVGNADHQGFDGEAMTIKHVAAHKVGEQQGRKPRAMGRASAWNSPQVDVELILEEPEVED

SEQ ID NO: 20800 - protein, 461 aa, Crocosphaera watsonii WH 8501
MKTIPTPKTPTLVQQLQWVLNPTGYLQTNHHRYPDLFKAKIIGLGNDIILISNPEIMQYILTHDRQEFTAPSSLNTLLKPLLGDYSVVMLDGDGHRQRRQLVMPSFHGERLKVYGDLTCRITREAMEKLPENQPFLAREVMQDISLKVIMEAVFGVTEGERYEELQYRLKELLDLFDSPITSGFLFFPSLQKDLGNWSPWGYFLRQRQALDKLIYAEISDRRANPDPERTDILSLLMFAKDEQGESMKDQELRDELITLLMAGHETTASAMAWALYWLHHIPEIKDKLIEELNTLSPDAEGMDIFRLPYLTAVCNETLRLSPSAMLTFTRLAQQTVEVGGYTFKPGDIVAGCLYLTHLREDIYANPKQFNPQRFLDHKYSAYEFIPFGGGSRRCMGEALAKFEMKLVIAIIISEYCLKLADTQPEKQQRRGLTLSPKRGVKMILEGKRQPQKARELELSTR

SEQ ID NO: 20801 - protein, 489 aa, Bordetella parapertussis
MTQLTQPLSRAELLRDACYIDGKWVGAGNGPSIPVDNPSTGKTIISVPKLGRKEAEQAIDAAEAALPAWSARTGKERAAILLKWAQLTMENQQDLAVIMTSEQGKPVAEAAGEIAYAASFLEWFAEEAKRIDGDILQSPKGGQRLMVLKQPIGVTAAITPWNFPAAMITRKVGPALAAGCTMVVKPAQQTPLTALALAVLAEQAGVPAGVFQVVTGSSREIGAALCESEVVRKLSFTGSTEVGRTLMEQCAPTIKKLSLELGGNAPFIVFDDADLDRAIDGILASKYRNAGQTCVCANRIYVQAGVYEEVAKRLVEKVNAMKVGDGFEQGVTQGPLIDTAAVAKVQEHIADATAHGAKVIAGGQPHALGGSFFQPTVVRDVTQSMRFAVEETFGPVAPLFKFESEDEVIGMANNTIFGLAAYFYTRDYARIWRVSEALEYGIVGINTGIISNEVGPFGGVKQSGLGREGSKYGIEDYLELKYLCVDLGA

SEQ ID NO: 20802 - protein, 112 aa, Synechococcus elongatus PCC 7942
MKKIEAIIRPFKLDEVKIALVNAGIVGMTVSEVRGFGRQKGQTERYRGSEYTVEFLQKLKLEIVVEDAQVDTVIDKIVAAARTGEIGDGKIFVSPVDQTIRIRTGEKNADAI

SEQ ID NO: 20803 - protein, 823 aa, Silicibacter pomeroyi DSS-3
MKTGFWIALVLVLIGYSALLGREAMVRLDTLSTAASDDIRWNMSQLEVELLRLQSAALKARDGGQGDIQQLRTRFDIFYSRTQIVLRGALYDQAREIPEVQERLQSLRAFLAESVPIIDAPEPILADRLPELAHLVEQVSPEVRDLALTIVNTSARAADTQRLKVSETLRRLALSVLGLLVALTIVALLLLRLYRSSQVVSAEKEAVKSRFEAAVKSALDAVLVVDTEGHIIEFNGGAEAMFGYSRSEALGQPMSDLIIPPHYRARHEEGMRRFREHGTSRVVGRGHLRLEGMRKSGEVFPIELSISLAETSDQLVFISFLRDITNRLKTEDDLREARDTAQAGAQAKAQLLTVMSHEMRTPLNGILGSLDLMERDELSPKQVRLVRAIRVSGELLLTQVNRVLDLSRLESGMIEFPKEPFALLPMVRRLTESLTAAAEERGNRLQTTLVGDDPGVVLGNRIALQQALVNLLGNAIKFTRNGEISLEVERLNDDRMIEFRISDTGLGIPAKDIERIFDEFVTIDTAYARENPGTGLGLSITRRLVWAMGGEIEVESIEHEGSLFLIRLPLEPGEAVELASEKERGQPEPGPLKGKRVLVIEDNDINRMLLLDMLEEFGCQVVLARDGFEGVAAAKSARYDLLLVDISMPGKDGLETLREIRAQEGPNGPVRAIAITANVRDEDKERFAAAGFDGFLAKPISMLQLQEMLSGLLLRPEAEAERSTAREFIRRFGMAEYQRHLLGMVDALHAVCDDLANTELSETLKARVHEQAGSAAILGRADLHSLLQEIEATDAADWPARRGGMLDRLKTELARTRAVSLGG

SEQ ID NO: 20804 - protein, 480 aa, Lycopersicon esculentum
MKEDIEHSENRVNEEITTPLIIQTNKRVKEENGCYEKKQDRCMVYLSTLVAVRGSYSLGSCAGYSSPTQSAIREDLNLSIAQISLFGSIWTFGAMIGAITSGPIADYIGRKGAMRMSSGFCVAGWLAIFFAQGALALDIGRLATGYGMGVFSYVVPVFIAEIAPKDLRGALTTINQLMICCGVSVSFIIGTMMTWRTLALTGLIPCAILLFGLFIIPESPRWLAKIGHQKEFELALRKLRGKDADISEEAAEIKDYIETLEKLPKVNLFDLFQRRYSSSLIVGVGLMVFQQFGGINGICFYTGSIFESSGFSSDIGTIIYAIIQVPITALGAALIDRTGRKPLLLVSGTGLVIGCILTGISFYMKGHEMAIKAAPILAVTGILVYIGSFSVGMGAVPWVVMSEIYPINIKGAAGSLATLVNWFGAWACSYTFNFLMTWNSFGTFVLYAAVNALSILFVIKIVPETKGRTLEQIQAAINAS

SEQ ID NO: 20805 - protein, 219 aa, uncultured bacterium
NSRLCVSSAVAGYTRSLGSDGPPCCYDDLDHCSVAFLIGTNTAECHPVLFQRLLKRKKRNPGSVTIVVVDPRRTDTAKAADIHLPIAPGSDLALLHGIAHLVLRENGQDPTFIDDHTENYEAFFDVVARWTPRRVARFCNLPEKRLREVAQLFHRRENVLSLWSMGVNQRQEGTAVVCGLINLHLLTGQIGKEGAGPFSLTGQPNAMGGREAGGLSHLL

SEQ ID NO: 20806 - protein, 92 aa, Pseudotsuga menziesii
MTKRTKKAGIVGKYGTRYGASLRKQIKKMEVSQHSKFFCEFCGKFAVKRKAVGIWGCKDCGKVKAGGAYTLNTPSAVTVRSTIRRLREQTEG

SEQ ID NO: 20807 - protein, 219 aa, uncultured bacterium
NSRLCMSSAVAGYTRSLGSDGPPCSYEDLDHCAVAFLIGTNTAECHPVLFQRLLKRKKRHPGSVTIVVVDPRQTDTAKAADIHLAVAPGSDLALLHGIAHLVMRENGQDPTFVDNCTDNYDSFFDVVARWTPRRVALFCGIPEKRLREVAQLFHRREKVLSLWSMGVNQRREGTAVVGGIINLHLLTGQIGKEGAGPFSLTGQPNAMGGREAGGLSHLL

SEQ ID NO: 20808 - protein, 591 aa, Helianthus annuus
MCGILAVLGCSDDSQAKRVRVLELSRRLKHRGPDWSGLYQHGDNYLSHQRLAIIDPASGDQPLFNEDQTIVVTVNGEIYNHEELRKRLTAAGHKFRTGSDCDVIAHLYEEHGEDFVDMLDGMFSFVLLDTRNNTYIAARDAIGITSLYIGWGLDGSVWISSELKGLNDDCEHFEVFPPGHLYSSKTGGFKRWYNPLWFAETIPSTPYDPLVLRCAFENAVIKRLMTDVPFGVLLSGGLDSSLVASITARYLAGTKAAKQWGAQLHSFCVGLEGSPDLKAAREVADYLGTVHHEFHFTVQDGIDAIEDVIYHIETYDVTTIRASTPMFLMSRKIKSLGVKMVISGEGSDEIFGGYLYFHKALNREEFHQETCRKIKALHQYDCLRANKSTSAWGLEARVPFLDKEFINVAMSIDPEAKMINMDQKRIEKWVLRRAFEDEEHPYLPKHILYRQKEQFSDGVGYSWIDGLKAHAELHVTDKMMLHAEHIFPHNTPVTKEAYYYRMIFERLFPQNSAKLTVPGGASIACSTAKAIEWDASWSNNLDPSGRAALGAHNAAYKKNMGPVGQVKLGPNIIDNVPRMMDISASELVIQG

SEQ ID NO: 20809 - protein, 961 aa, Streptomyces coelicolor A3(2)
MTAHRTPLSELEQAMPFEQRHIGPDHEARAKMLAQVGYGSLDELTAAAVPDVIKNADRLDLPGARSEAEVLAELRSLADRNQVLDSMIGLGYYGTFTPPVILRNVMENPAWYTAYTPYQPEISQGRLEALLNFQTMVAELTGLPTSGASLLDEGTAAAEAMALSRRMGKNKKGLFLVDADALPQTVAVIRTRAEPTGVEVVVADLSEGIPAEVAEREINGVLLQYPGASGAVRDIKPVIDRAHELGALVTVAADLLALTLLTSPGELGADIAVGTTQRFGVPMGFGGPHAGYMAVHEKFARSLPGRLVGVSVDADGNKAYRLALQTREQHIRREKATSNICTAQVLLAVMAGMYAVYHGPEGLRAIARRTHRYATITAAGLAAGGVEIVHGSYFDTVTARVPGRAAGIVHAARENGINLRLVDADHVSFACDETTTRAQVGGVWHAFGVEGDIESLDAEAGETLPEALLRTDDFLTHPVFHQHRSETAMLRYLRRLADRDYALDRGMIPLGSCTMKLNATTEMEPVTWPEFGALHPFAPAEQAQGYLTLIRELEERLAEVTGYDKVSLQPNAGSQGEFAGLLAVRGYHRANGDEQRTVCLIPSSAHGTNAASAVMAGMKVVVVKTAEDGEIDVEDLRAKIDKHRDELAVLMITYPSTHGVFEEHVADICAQVHDAGGQVYVDGANLNALVGLAKPGHFGGDVSHLNLHKTFCIPHGGGGPGVGPVGVRSHLAPYLPNHPLQPAAGPQTGVGPISAAPWGSAGILPISWSYVRLMGGEGLKRATQVAVLSANYIAKRLEPHFPVLYNGPGGLVAHECIIDLRPLTKATGVSVDDVAKRLIDYGFHAPTMSFPVAGTLMIEPTESEDLAELDRFCEAMIAIRAEIEKVGSGAWPADDNPLRGAPHTADALGGEWDHAYTREEAVFPAGVSAADKYWPPVRRIDQAYGDRNLVCSCPPLDAYED

SEQ ID NO: 20810 - protein, 558 aa, Helianthus annuus
MCGILAVFGCVDCSQAKRARILELSSRLRHRGPDWSGLHSEEDCYLAHQRLAIVDPASGDQPLYNEDKSIIVTVNGEIYNHKEFREQLKSHKFNTGSDCEVIAHLYEEHGEDFVHMLDGMFSFVLLDTRNKSYIAARDAIGITPLYIGWGLDGSVWFASEMKALSDDCEQFMSFLPGHIYSSKNGGLRRWYNPPWWSELVPSTPYDPLVLRNAFEKAVIKRLMTDVPFGVLLSGGLDSSLVAAVASRHLVDSEAYCQWGSQLHTFCIGLKGSPDLVAAREVADYLGTRHHEFYFTVQEGIDALEEVIYHIETYDVTTIRASTPMFLMSRKIKSLGVKMVLSGEGSDEIFGGYLYFHKAPNKEEFHEETCRKIKALHLYDCLRANKSTSAWGLEARVPFLDKEFINVAMSIDPKWKMIDRDNGRIEKWVLRNAFDDDEKPYLPKHILYRQKEQFSDGVGYSWIDGLRDHANKQVTDSMLANANFVYPENTPATKEAYYYRKIFEKFFPKNAARLTVPGGPSVACSTAKAVEWDASWSKNLDPSGRAALGVHAAAYEDAK

SEQ ID NO: 20811 - protein, 219 aa, uncultured bacterium
NSRLCMSSAVAGYTRSLGSDGPPCSYEDLDHCTVAFLIGTNTAECHPVLFQRLLRRKKRHPGSVTIVVIDPRQTDTAKAADIHLAVAPGSDLALLHGIAHLVMRENGQDPTFIDNCTDNYDSFFDVVARWTPRRVALFCGIPEKRLREVAQLFHRREKVLSLWSMGVNQRREGTAVVGGIINLHLLTGQIGKEGAGPFSLTGQPNAMGGREAGGFSHLL

SEQ ID NO: 20812 - protein, 945 aa, Flavobacteria bacterium BBFL7
MNTDRFALRHIGPRKADLAPMLEKIGVESIDQLVYETIPENIRLQQDLQLDTAMSEYEFLSHIKKLGDKNKQFRSYIGLGYNAPITPAVIQRNILENPGWYTAYTPYQAEIAQGRLEALLNFQTMITDLTGMELANASLLDESTAAAEAMTLLFSVRERAQKKENVVKFFVDHDTLPQTKELLKTRATPLGIELVEGNPQDMDMSDGYYAILLQYPGASGNVVDYTAFAQKCHDNNIRIAVAADILSLVLLEAPGHWNADVVVGTTQRFGIPLGYGGPHAAYFATREEYKRQIPGRIIGVTKDTDGKRALRMALQTREQHIKRDKATSNICTAQVLLAVMAGMYGVYHGPRGLKFIANKLHAQTATLADAVEKLGIYQTNENFFDTLCFKVNAEAVKKEALALEINFYYPDADTVQVSLNETTSLTDLNDIVSAFAKAVNKDFSPITALLDSTHLGTGRQTEFMTYDVFNSYHSETELMRYIKKLERKDLALNHSMIALGSCTMKLNAAAEMLPLSNPQWGNIHPFVPVDQAQGYQEMLQKLELQLNEATGFAGTSLQPNSGAQGEFAGLMAIRAYHQSRGDHHRNICLIPSSAHGTNPASAVMAGMKVIVTKALENGNIDVDDLREKAEKHKDNLSALMVTYPSTHGVYESAIKEITGIIHENGGQVYMDGANMNAQVGLTNPGNIGADVCHLNLHKTFAIPHGGGGPGVGPICVAPQLVPFLPSNPIIKTGGDQAITPISAAPYGSASVCLISYGYICMLGAEGLKRSTEYAIINANYIKERLKGSYECLYTGEKGRAAHEMIIDCRPFKQHGIEVVDIAKRLMDYGFHAPTVSFPVNGTMMIEPTESESKEEMDRFCDAMISIRKEIADCSSDDPNNVLKNSPHTLEMITNDEWELPYTRKQAAYPLEYIADNKFWPTVRRADDAYGDRNLMCTCAPMEEYM

SEQ ID NO: 20813 - protein, 289 aa, Arabidopsis thaliana
MAQTMLLTSGVKNTSLILLSSSERMAQTMLLTSGVTAGHFLRNKSPLAQPKVHHLFLSGNSPVALPSRRQSFVPLALFKPKTKAAPKKVEKPKSKVEDGIFGTSGGIGFTKANELFVGRVAMIGFAASLLGEALTGKGILAQLNLETGIPIYEAEPLLLFFILFTLLGAIGALGDRGKFVDDPPTGLEKAVIPPGKNVRSALGLKEQGPLFGFTKANELFVGRLAQLGIAFSLIGEIITGKGALAQLNIETGIPIQDIEPLVLLNVAFFFFAAINPGNGKFITDDGEES

SEQ ID NO: 20814 - protein, 628 aa, Tulipa gesneriana
MGGRDLESSTPLLHHEPYSPRKTITTIVSSIVAAALLLSLITLLNTKHEADHHPPDVAFPMSRGVFEGVSEKSTASLIGSAARFPWTDAMLEWQRTGFHFQPEKNWMNDPDGPMFYKGWYHIFYQYNPVSAVWGNITWGHAVSRNLIHWFHLPIAFVPDQWYDANGALTGSATFLPDGRIAMLYTGITTEFVQVQCQVYPEDVDDPLLLKWFKSDANPILVPPPGIGSKDFRDPTTAWYDVAEASWKLAIGSKDEQHNGISLIYRTYDFVSYELLPILLHAVEGTGMWECVDFYPVLTNSTVGLDTSVPPGPGVRHVLKASLDDDKHDYYAIGTYDVVSGTWIPDDVEADVGIGWRYDYGKFYASKTFFDWAKGRRVLFGFTGETDSEQNNRLKGWASVLPIPRTILFDQKTGSNLLLWPVEEVERLRFNRQDFENIDIGIGAVVPLDIGRAIQLDIVAEFEIDGATLEASVEADLGYNCSTSGGTFGRGVLGPFGFLVLSDEDLSEQTAIYFYVGRKVDGALQTFFCQDELRSSKADDLVKRVFGSIVPVLHGEILTMRILLDHSIVESFAQGGRTCITSRIYPTKAFDGAARVFVFNNATGAKVTAKSIKIWQMKSASISPYPFKA

SEQ ID NO: 20815 - protein, 370 aa, Pseudomonas aeruginosa PAO1
MKHFKLPDLGEGLQEAEIVEWHVKAGDSVRADQRLVSVETAKALVDIPAPYDGVVGKLFGAEGDILHVGEPLVGFEGEEADAGTVVGRLEGGGSALEDRFFIGAAPSTREHLAPRATPAVRQFARQQGVELAGLSGSGPDGLITRADVEAAAQGTRERFGGERLRGVRRSMALNMARSHAEVVPVTIYGDADLHRWKTARDPLIRLAQALAEACRAEPTLNAWFDGASLSLKLHERLDLGIAVDTPDGLFVPVLRDVGARSAEDLRAGMRRLREDVQARSIPPAEMLGATLTLSNFGTLFGRYANPVVVPPQVAILGAGGIRDEVVAWRGEMAIHPILPLSLSFDHRAATGGEAARFLKVLVNALEQPDG

SEQ ID NO: 20816 - protein, 1218 aa, Oryza sativa
MDDDGETPMPSLELHKLPTLAGAAIPNPIARHPLYHPSPSFFISPTDVVLRDILFDASPASAAGERRRRHVAAYHRAGPRREVAFDPATVRAAIFTCGGLCPGTNTVVRELVVGLSELYGVRGGVFGVRNGYRGFYSDEVVPLDPAAVEHWHKAGGAALGTSRGGFDLARIVDAIERHGFNQVYAVGGDGTMRGAARIHREVRRRGRLAVAVAGIPKTVDNDVGVVDRSFGFHTAVEAAQQAIAAGHVEAESAANGVGLVKLMGRSAGHIALHATLSSRDVDCCLIPEEDFYLRGAGGLFDFLYRRIKDNGHAVVVVAEGAGQRLIPRTTTTSASGACAGADESGNETFLDVGAWLKAEMRAWWEEEHAGEVFTVKYIDPTYMIRAVPANAGDNLYCTLLAHAAIHGAMAGYTGFVSGTINGNYAYIPMDEVAEAKNPVDTKDHKWAWSFVVYLGGHSHGRGGAALASSQERAKNSHHEFLGSFLGSKEKARDAIFYSYTKYINGFAATLEEEEAMEISKHPSVISVFPNRGHRLHTTRSWEFLGMEKDGRIRANSIWAKARFGEGVIIGNLDTGVWPEAGSFSDDGMGPAPVRWRGICQDQASDDAQVPCNRKLIGARYFNKGYLSTVGQAANPASTRDTDGHGTHTLSTAAGRFVPGANLFGYGNGTAKGGAPGAHVAAYKVCWRPVNGSECFDADIIAAFDAAIHDGVDVLSVSLGGAPAGYLRDGVAIGSFHAVRRGVTVVCSAGNSGPGAGTVSNTAPWLVTVGASTMDREFPAYLVLGNNKKIKGQSLSPVRLAGGKNYPLISSEQARAANATASQARLCMEGSLERGKVEGRIVVCMRGKNARVEKGEAVRRAGGAGLVLANDEATGNEMIADAHVLPATHVTYSDGVALLAYLNSTRSPSGFITVPDTALDTKPAPFMAAFSSQGPNTVTTQILKPDITAPGVSILAAFTGQAGPTGLAFDSRRVLFNAESGTSMSCPHVAGVAGLLKALHPDWSPAAIKSAIMTTARVKDNMRRPMSNSSFLRATPFSYGAGHVQPGRAADPGLVYDMNDTDYLGFLCALGYNSSVIATFMASGSGAQPPYACPPARRPEDLNYPSFALPHLSPSGAARTVTRRVRNVGAAPAAYVASVAEPRGVSVAVRPSRLEFTAAGEELEFAVTFRAKKGSFLAGEYEFGRLVWSDAAAGGRHRVRSPLVVRVVDKKGKNGLPIS

SEQ ID NO: 20817 - protein, 378 aa, Moorella thermoacetica ATCC 39073
MQYDVLICGAGPAGSTCGRLLARQGLKVAIFDRARFPRYKPCGGGLTGKAQGELEAGWEDLIEDTTREVIFYHRQERPLKITCEQPVIKMVSREKFDSWLLTEAARAGAEVRDGYRVTGVTETAGGVKVQGQDGCTWEGRFLVGADGALSLVRRSLPFKPGGTAGITLECEVPVDAGLLTSYRGQVHLSYGGIPYGYGWVFPKGDHLSVGIGSFTRRVKGLRRYFDTFCRGLGLAVPANLRCRGAVIPAADGQAGVFHTGRALLVGDAAGLVDPFSGEGIYYALRSGRLAAETIMATLAGTGEPGAYSRRLYDELLQPLHYARRIARVVYALTPVVHRLVTANPGIARRLVEVLFGRDTYPDLWQYLTRRYAIFRLAR

SEQ ID NO: 20818 - protein, 368 aa, Bradyrhizobium japonicum USDA 110
MTPENAGTPMSANNAFHIAVLAGDGIGPEVMAPAIEVLRKIEQKSDLRFRFTEAPAGANNYLATGKSMPERTIKLCEEADAILLGACGLPSVRYPDNTEIAPQIELRFIFDLYAGVRPARLIPGVPSPIVGADTRGIDLVVIRESTEGLFASMGKGVVTHEDARETMVITRRTSERLFEFSFRLAARRKARGKPGMLTCVDKANVFKAFAFFRGIFDEIAKKHPEVRTDRLYVDACSAMLVKRPWDFDVMVMENMFGDIVSDITASLIGGLGMAPSADIGDKYAVFQPCHGTAPDIMGQGKANPTGMILSAAMMLDWIADKHGVESAAEAGETIERAVDQVYAGGIKPMEFGGSNGTADITKAVLGAL

SEQ ID NO: 20819 - protein, 271 aa, Thermus thermophilus HB8
MEHEHEHEFVLEIPEFEHLSYEVEEGIALVTLKRPEALNALSQSLLEELAEIPELVQQDPEVRAVIFTGEGKAFAAGADLKEIAAIKDPFMGREYALFGQRVFAEIAALPVPTIAAINGYALGGGLELALACDLRVAAKTAKLGLPEVGLGLIPGFGGTQRLPRLIGRGRALDLIFTGRHVDAEEALFLGLVNRVAEDALEEAKKLAQKILKNAPIALALAKESVVRGEGLDLAEALEIEADLFGYAAATEDMKEGVRAFLEKRPPSFKGE

SEQ ID NO: 20820 - protein, 271 aa, Bradyrhizobium japonicum USDA 110
MPDISNETSYADGKILKHATDGVGVITFNNPDKRNAMSLEMWEGFGEALTALRDDDAVRVVILRGAGGKAFVSGADISQFEKTRHNAAASEDYARRSAAQRALLADYPKPTIACIQGFCLGGGMQVAMLADIRIAALGSQFGIPAARLGIAYGYDGLRHLVSLVGPSWARLLMYTGMRIDSAEALRIGLVERVVPDDQLWGETMAIAATISQNAPLAIKAAKITIAQVLKDESGRDMEAIKAIGHACMDSADFREGRQAFMEKRKPQFSGR

SEQ ID NO: 20821 - protein, 271 aa, Prosthecochloris aestuarii DSM 271
MNSRSSMRTLKHAWKAPETNPNYTTAIIRISLSTCLSIMSSSSSFNAKEHQKMLRSYFNGNGFSRWASIYGNDKLSTVRSTVRQGHAVMMDEAFAWIEKLNLPKGATILDAGCGTGLFSIRLAENGYRVKAVDIASQMVGKAKEDATAKGVANMIDFEVNTIEEVKGQYDAVVCFDVLIHYPAEGFVNAFQNLSSLTKSPIIFTYAPYNRILAFQHWLGGYFPKKERRTTIQMIRDEQMQEAMQSTKMAVKTKKKISFGFYHTMLMHAERR

SEQ ID NO: 20822 - protein, 361 aa, Streptococcus agalactiae A909
MSKLNRIRHHLHSVQAELAVFSDPVTVNYLTGFFCDPHERQMFLFVYEDRDPILFVPALEVSRAKQSVPFPVFGYIDSENPWQKIASNLPSFSVSKVLAEFDNLNVTKFQGLQTVFDGHFENLTPYIQNMRLIKSRDEIEKMLVAGEFADKAVQVGFDNISLNNTETDIIAQIEFEMKKQGINKMSFDTMVLTGNNAANPHGIPGTNKIENNALLLFDLGVETLGYTSDMTRTVAVGKPDQFKKDIYHLCLEAHQAAIDFIKPGVLASEVDAAARNVIEKAGYGQYFNHRLGHGLGMDVHEFPSIMAGNDMEIQEGMCFSVEPGIYIPDKVGVRIEDCGYVTKTGFEVFTKTPKELLYFEG

SEQ ID NO: 20823 - protein, 131 aa, Ashbya gossypii ATCC 10895
MAASLPHPKIVKKHTKKFKRHHSDRYHRVAENWRKQKGIDSVVRRRFRGQISEPTIGYGSNKKTRFMTPSGHKTYLVSNIKDLEVLMMHTKTYAAEIASNVSSKNRVSILARAKALGIKVTNPKGRLALEA

SEQ ID NO: 20824 - protein, 551 aa, Streptomyces coelicolor A3(2)
MNADGRTRLHQTPEWAALVKHREQLGEVRLREMFAADPGRGTGWTLRVGDLHVDYSKHLVTDETLALLQELAAATGVSGLRDAMFRGERINITEDRAVLHTALRAPRDAVIEVDGENVVPQVHAVLDKMAGFADRVRTGEWTGHTGRRIRNVVNIGIGGSDLGPAMAYEALRAFTDRSLTLRFVSNVDGADLHEAVRDLDPAETLFIIASKTFTTIETITNATSARSWLLAGLGGDEKAVAKHFVALSTNAEKVADFGIDTANMFEFWDWVGGRYSFDSAIGLSLMIAIGPDRFREMLDGFHLVDEHFRTAPAESNVPLLMGLLGVWYGSFLGAQSHAVLPYSHYLSKFTAYLQQLDMESNGKSVDREGKPVQWQTGPVVWGTPGTNGQHAYYQLIHQGTKLIPADFIGFARPVDELSEELKSQHDLLMANFFAQTQALAFGKTPDEVRAEGVPEELVPHKTFPGDHPTTTILARELTPSVLGQLVALYEHKVFVQGAIWNIDSFDQWGVELGKVLAKRVEPALTEGADVPGLDPSTGALVAAYRELRGRR

SEQ ID NO: 20825 - protein, 286 aa, Desulfovibrio vulgaris subsp. vulgaris str. Hildenborough
MQLLDGKATAATIREELRAEIAALTPRARRAPGLAVILVGEDPASQVYVRNKERACHDTGIVSEAFRLAPTTTQEELERLIADLNVRPDIDGILLQLPLPRGLDAQRCLEAIDPAKDVDGFHPQNMGRLALGLPGFRPCTPAGVMTLLERYDLSPSGRKAVVVGRSNIVGKPLALMLGAPGKYANATVTVCHSGTPDLAAECRTADFLFLAIGRPRFVTADMVREGAVVVDVGINRTETGLAGDCDFEGVSRVASAITPVPGGVGPMTIAQLLVNTVQSWKVRCGL

SEQ ID NO: 20826 - protein, 489 aa, Idiomarina loihiensis L2TR
MIKNGPYLALDTSYQKLSVDELLETAGKRLPEHFDDYRQQLCRGEYRNISEDRPVTHVLSRSVHAVAKQSNRKTRFVDTVQKLRSGRRLGSTGKPITDVVNIGVGGSDLGPQMGAFALREFANDAALHNLQVHFVSSMDGGQLYAVLPIVDPETTLFIISSKSFGTVDTFANVDTVRKWIEPELTQEQWLENHVIGVSANAQGMTDYGIPPAQQFTFGDGVGGRFSLWSALGLSIALTTGIRPFERMLEGAKAMDEHFLDAPLNENLPVLLALYGVYNREQLGINNLAILPYDGRLRMLPNYLQQLDMESNGKQYTAENEAIDYPTGPIIWGGFGPNGQHAFFQHLHQGYDQFTADFVTVLKREAPGFSDATRSGLAEQQRLAVANCLAHRRLMSDGSENADSPSDHYPGGHPSNLLIMDELTPESFGALIAAYEHKVFTQGVIWGLNSFDQPGVEKGKKIAMDVLRVLDGESDESFDESTDAVIQRMR

SEQ ID NO: 20827 - protein, 470 aa, Listeria monocytogenes str. 1/2a F6854
MHNLKLSEEIKRAINELGYTEATPVQKAVIPVALTGEDIVAKSQTGSGKTAAFAIPIAEQVEWEENKPQALIIVPTRELAMQVKTECTNIGRFKRVKAAAIYGQSPFAKQKLELSQKNHIVVGTPGRLLDHIEKGSLNVDKVAHLVLDEVDEMLSMGFIDQVEDILSRLPKQRQNLFFSATMPEEMQGLIKRYQDDPMVIEMASEKTNPILHVEIQTDNKEKTLKDVLITENPDSAIIFCNTKNQVDELTDLLDVKASKIHGGLRQEDRFRAMDDFKSGKSRFLIATDVAGRGIDVDNVSLVINYDLPIEKENYVHRIGRTGRAGKSGKAISFVKTNENPLLRDIEEMLDVTIEKKRKPTVIEVKANEDAFRKKQQKRPTIKKARGEKLNKNIMKLYFNGGKKKKIRAVDFVGTISKLEGITAEDIGIITIEDHVSFVEILNGKGPAVLEMMRSRKVKGRRLKVNEARKR

SEQ ID NO: 20828 - protein, 783 aa, Neurospora crassa
MAHGDAAPEAHSEAAQQQAQDDSRSTSSSSTPPPVDNEESDFFLAANDSQSSLGVPNIENMQVADEECRVAPINRLPNELLIAIFVKLTTSSDILHVMLTCKSWARNAVEILWHRPACSSWERHTIICQTLSAPRPYFAYRHFIRRLNLSALAPELNDGSVESLEMCSRVERLTMTGCKRITDAGLLKLLRNNTGLLALDISGMEDITETSINAVAEKCSRLQGLNISNCTKISIASLVQLAQSCRFIKRLKLNECAQVTDEAVIAFAENCPNILEIDLHQCRLIGNDPVTALMSKGKALRELRLASCDLIDDSAFLSLPPNKTYEQLRILDLTSCSRLTDRAVEKIIDVAPRLRNLVLAKCRNITDAAVFAIARLGKNLHYVHLGHCGNITDEAVKRLVQCCNRIRYIDLGCCVHLTDDSVVRLATLPKLKRIGLVKCSNITDESVYALARANQRRPRRDADGNLVPGDCYNNMHHSSLERVHLSYCTNLTLRSVLRLLNACPRLTHLSVTGVQAFLREDLESFCREAPAEFTEHQRAVFCVFSGQGVTNLRRYLNSEHNLTEIARGARPIDEGVPNRVGPVFPGTAVNPMQVTPPGHHGAAAAFIDDGEPDAVDDDDGLEDGSEMVIDTQPMLHNHHAVMGGTAFPIQGVASTEQLLPPPPPAIQPQQHLVTNPFHFVPGQPFAIPPHGLQFYEAVRATESGAVSGTPTHVPLVGQATGLESTIAEGSHHSGVARNSPGTATSQNPDASQAVPPNPMGNIELAILTGNRNPDLGGSGGASV

SEQ ID NO: 20829 - protein, 871 aa, Thermosynechococcus elongatus BP-1
MTLDAADLDAITQEARHCFLYEDAPEYLLLLEQWAEQVVTDPERHYTAEDYNTLMRAAHSLKGGAGIAQLSELQALSHRLEDILEALKEGRLGDRPRAHHLLVQGIEQAQELLAAAKQNHSLTPTPPYQALLAALTELLSTVSDPSSPPTVAPPDLRTALTQTLEESLQLLEASATDAERETALAQLIATAHTLGKQYPLPWLQQLAAELPKLAADLPLGELVPAIVAECRQLQQAELVKLLPPEPTPPPPAETAPPQDSYLRIPVSRLDRLGNTVSELLIGQERLTLYQQQFLRANRELKQRLDQFRPIRDQVQTFYDRLATPLGGPGRPTNGHNDFDALEFDRYTELHTALQDFQELLVRIQETGADIDLLSRDLQEALDLNRQHLNSLYAELTNSRLVPFRQLAQMFVTAVQALGDRHHKPVQLVIEGGDTLVDQVILQQLKAPLTHLVRNAFDHGLEPPKQRQQLGKSPTGTIWLRARLRGNAVEIQVADDGRGIDLQRVSQKAVELRLCSAEQVPHLSREQILEFLFVPGFSTAKQVSDLSGRGVGLDVVREQVQRSRGHLQITTEPQRGTTFTLTLPLTLSLLPMVLCQVGELTLAIPDLSIREVIALKEYTDIRHPSATIDWQGQSIPLYPLHQLLPYQRPLSGPTRPLGVGVVVDVAGQAVALAVNYLIAERELVVKPFDQTVPVPPYVMGCTVLGSGEVVPVLAPDNFTVLLRPVEVRASPMESPQQPITPQVLIVDDSITVRRLLDRVLRQAGYNVVQCRDGKEALDFLLAAGDQVSLVITDIEMPRLDGYDLLEAIRLSARLRHLPVAMLTSRGGDTHRQKALQLGANGYITKPFQPQGILQTVTQLLTGRHGGVATLSQ

SEQ ID NO: 20830 - protein, 318 aa, Mycobacterium leprae
MAHVIRIGTRGSLLATTQAALVRDALIANGHPAELVIVNTAGDQSSASIDSLGVGVFTTALRAAIEEGCVDAAVHSYKDLPTADDPRFTVAAIPPRNDPRDAVVTRDELVLAELPAGSLVGTSSPRRAAQLRALGLGLEIRPLRGNLDTRLNRVSSGDLDAIVVARAGLARLGRLDEVTETLDPVQMVPAPAQGAIAVECRAGDSRLVAVLAALDDADTRAAVTAERVLLAELEAGCSAPVGAIAQVVESIDGEGRVFEELSLRGCVAALDGSDVIRASGISTSGRASELGLAVAVELFELGARELMWGARSDRARGS

SEQ ID NO: 20831 - protein, 269 aa, Circinella umbellata
HTFYNELRVAPEEHPVLLTEAPLNPKSNREKMTQIMFETFNAPAFYVAIQAVLSLYASGRTTGIVLDSGDGVTHTVPIYEGYALPHAILRLDMAGRDLTDYLMRILAERGHSFTTTAEREIVRDIKEKLCYVALDFDQEMQTAAQSSALEKSYELPDGQVITVGNERFPAPEALFQPALLGLESSGIHETAYNSIMKCDVDIRKDLYSNIVMSGGTTMYPGIADRMQKEITALAPSSMKIKIVAPPERKYSVWIGGSILASLSTFQQMW

SEQ ID NO: 20832 - protein, 335 aa, Chlamydophila pneumoniae CWL029
MKVVINGFGRIGRLVLRQILKRNSSVEVLAINDLVPGDALTYLFKFDSTHGRFPEDVRCEADHLIVGKRKIQFLSERNVQNLPWKDLGVDLVIECTGLFTKKEDAEKHIQAGAKRVLISAPGKGDIPTFVMGVNHKTFNPEKDFVISNASCTTNCLAPIAKVLLDNFGITEGLMTTVHAATATQLVVDGPSKKDWRGGRGCLQNIIPASTGAAKAVTLCLPELKGKLTGMAFRVPIEDVSVVDLTVRLDKSTTYDDICKAMKQASETDLKGILDYTDEQVVSSDFIGSEYSSIFDALAGIALNDRFFKLVAWYDNETGYATRIVDLLEYVEKNSK

SEQ ID NO: 20833 - protein, 403 aa, Nocardioides sp. JS614
MSDPTVVIIGGGQAGAVATRALRRKGHAGRIVLVGEEPLRPYQRPPLSKEYLATGDASGLDLLPETWTEENDVEVRTGARALKISAADAGVLLDDGTTLPADRVLIATGGRPRRLADADGDRVRYLRTRADADALDDLMTPGGRLVVVGGGFVGAEVASTALARGLHVTVLEAAPVPMGRALGAELGARCGRLQVAAGVDLRLDAAVGRVRQEGDEVVVETSTGTVAGDCVLVGIGMVPNDEVARDSGIETGNGILVDEHCRTSLPNVFAAGDVANHHHPLFGTRMRVEHFDNASRQAAVAADNLLGRSTVFDDPHWFWSDQYGANLQFVGHAEGADQVVTRGDPESESWSAFFLREGRVRAAFALNQGEDVAVARELIALGIAVPPGTLADPDADLMEAFDE

SEQ ID NO: 20834 - protein, 269 aa, Cokeromyces recurvatus
HTFYNELRVAPEEHPVLLTEAPLNPKSNREKMTQIMFETFNAPAFYVAIQAVLSLYASGRTTGIVLDSGDGVTHTVPIYEGYAVPHAILRLDMAGRDLTDYLMRILAERGHSFSTTAEREIVRDIKEKLCYVALDFEQEMQTAAQSSALEKSYELPDGQVITVGNERFRAPEALFQPSLLGLESAGIHETTYNSIMKCDVDIRKDLYSNIVMSGGTTMYPGIADRMQKEITALAPSSMKIKIVAPPERKYSVWIGGSILASLSTFQQMW

SEQ ID NO: 20835 - protein, 269 aa, Dichotomocladium elegans
HTFYNELRVAPEEHPVLLTEAPLNPKSNREKMTQIMFETFNAPAFYVSIQAVLSLYVSGRTTGIVLDSGDGVSHTVPIYEGYSLPHAILRLDMAGRDLTDYLMRILAERGHSFTTTAEREIVRDIKEKLCYVALDFEQEMQTAAQSSALEKSYELPDGQVITVGNERFRTPEALFQPSLLGLESPGIHETTYNSIMKCDVDIRKDLYSNIVMSGGTTMYPGIADRMQKEITALAPSSMKIKIVAPPERKYSVWIGGSILASLSTFQQMW

SEQ ID NO: 20836 - protein, 269 aa, Dicranophora fulva
HTFYNELRVAPEEHPVLLTEAPLDPKSNREKMTQIMFETFNAPAFYVAIQAVLSLYASGRTTGIVLDSGDGVTHTVPIYEGYSLPHAILRLDMAGRDLTDYLMRILAERGHSFTTTAEREIVRDIKEKLCYVALDFEQEMQTAAQSSALEKSYELPDGQVITVGNETFRAPEALFQPSLLGLESAGIHETTYNSIMKCDVDIRKDLYSNIVMSGGTTMYPGIADRMQKEITALAPSSMKIKIVAPPERKYSVWIGGSILASLSTFQQMW

SEQ ID NO: 20837 - protein, 490 aa, Kineococcus radiotolerans SRS30216
MSTTPGRSAAPGGGVHDALPPLTDGPHRRRLGVVALIATFGGLLFGYDTSVINGALEPMVRELGLTTLTEGVVTSSLLFGAAVGAISGGRLSDAWGRRRSILLMSLFFFGGALVCVFTPNFEVMVVGRVVLGLAVGAASTVVPVYLAEMAPYEIRGSLSGRNEMMIVVGQLAAFVVNAIVGNVWGEHAGVWRIMLAFVTLPAVALFVGMLRVPESPRWLIDHGHYDEALAVLRTLRSEERAEAEARQIAGLTHEDSKRVPMDWRSVLSHRWLRRILLIGTGLGVAQQLTGINSIMYYGQSILGEAGFSSSAALIANVAPGVIAVVGAFIALRIMDTFSRRRTFVLGYSLTTACHLLIGIGSVLLPVGNPLRPWVILFLVVAFVGSMQTFLNVATWVTLSEIFPQRMRAFGMGTSVFVLWITNALLGLWFPTLVSALGITGCFFGFAVVNLLALVFVKTQVPETRGRSLEQLEEAVTSGAIHDRAVRDGLA

SEQ ID NO: 20838 - protein, 457 aa, Staphylococcus aureus subsp. aureus Mu50
MAIAVLLNRMFRMEHNPLFEYIYQQKEDIDACYFIIPEEDMSSASDLKAQFYRGTLQRFYQSLHAEKLTPYVMSYDDIISFCKENNISEVVIAGDIMSYHLEEYDILHQRSLFNEARIAVTLIRGNHYFKASKTMNQQGEPYKVFTSFYRKWRPYLRHRDVYHYDLKSFEDFVIASPDDLVFDDIAFGSSQVIEQNKWQHFLDQDIQNYESGRDYLPEVLTSQLSVALAYGLLDIIEIFNDLLARYDEDEANHEAFIRELIFREFYYVLMTQYPETSYQAFKPKYRQIKWSQNEANFNAWCEGQTGFPIIDAAIMELTQTGFMHNRMRMVVSQFLTKDLFIDWTWGEKFFRKHLIDYDAASNIHGWQWSASTGTDAVPYFRMFNPIRQSERFDAKALYIKTYLPIFNQIDAKYLHDTQRNESNLFEQGIELGSHYPRQMVDHQEKRTQVLATFKALD

SEQ ID NO: 20839 - protein, 439 aa, Bacteroides thetaiotaomicron VPI-5482
MKVLKFGGTSVGSAQRMKEVAKLITDGEQKIVVLSAMSGTTNTLVEISDYLYKKNPEGANEIINKLESKYKQHVDELFATQEYKQKGLEVIKSHFDYIRSYTKDLFTLFEEKVVLAQGELISTAMVNFYLQECGVKSVLLPALEFMRTDKNAEPDPVYIKEKLQTQLELYPDMEIYITQGFICRNAYGEIDNLQRGGSDYTASLIGAAVKASEIQIWTDIDGMHNNDPRIVDKTAPVRQLHFEEAAELAYFGAKILHPTCIQPAKYANIPVRLLNTMDPDAPGTLISNDTEKGKIKAVAAKNNITAIKIKSSRMLLAHGFLRKVFEIFESYQTSIDMICTSEVGVSVTIDNTKHLNEILDDLKKYGTVTVDKDMCIICVVGDLEWENVGFEAKALDAMRDIPVRMISFGGSNYNISFLIRDCDKKTALQSLSDMLFNNK

SEQ ID NO: 20840 - protein, 349 aa, Torenia hybrid cultivar
MSMEVVVPKAQPITVCVTGASGFIGSWLVMKLLNRGYTVHATVRDPENMKKVKHLLELPRADDASLRLFKADMNVEGSFDEAVGSCECVFHMATPMDFESDDPENEVIKPTVDGMLSIIRSCAKAQTVKRLIFTNSAGTLNVEEHQKPVYDESNWSDLDFIYSTKMTGWMYFVSKVLAEKAAIKACKENNIDFISIIPPVVVGPFIIDNWPPSLITALSPITGNEAHYSIIKQGQFVHVDDLCEAHIFLSEHPKTEERYICSSHDATIYDIANMIREKWPEYDVPTEFEGIDKDIPVVRFSSKKLMGMGFTFKYTLEDMFREAIETCRDKGLLPYSSTRDHIHGEHKIE

SEQ ID NO: 20841 - protein, 529 aa, Geobacter metallireducens GS-15
MDNTLLWNRYQSHLFHDPESGLMLDISRMNFADGFLASMESATQKAFAEMGELEGGAIANPDEGRMVGHYWLRSPDLSPTDEIAAEIGETVQRIREFAAAVHGGSIAAPDGRPFRKLLVVGIGGSALGPQFVADALGDVDNPLTPHFFDNTDPDGMDRVLAQIGPDLAGTLTVVISKSGGTKETRNGMLEAEIAYRRAGLHFPRYAVAVTGEGSELDRTATSAGWLARFPMWDWVGGRTSVTSAVGLLPAALQGLDIAGMLEGARLCDQLTRRPDTARNPAALLALMWHHATGGKGARDMVVLPYKDRLLLFSRYLQQLIMESIGKELDREGNVVCQGISVYGNKGSTDQHAYVQQLREGVNNFFVTFIEVLRDRRGASLPVEPGVTSGDYLSGFLQGTRTALGEKGRESLTITIPEVSPRTVGMLIALFERAVGLYASLVNINAYHQPGVEAGKKAAGTVLAHQADIIAHLRGTGSSLTADEIAAALGRPDAAETVFRTLLHAAANPDHGIRMEPAESLTASRFSVRD

SEQ ID NO: 20842 - protein, 357 aa, Symbiobacterium thermophilum IAM 14863
MSQARLARLRARLEERGLDAVLIAKPHNRAYLSGFTGSAGLLLITADRAALVTDFRYVEQAAAQAPEFEVIKAESANQAVLTRLVEEWGVKRIGFEGDFLTVDEHQTYQQFLAGCQWTSVSGLVEELRMIKDETEIALMRRAAEIADEAFAQILPLIKPGVIERDLATELEYRMKKLGAEGVAFETIVASGARSSLPHGVASDKAIEVGDLITFDFGAVYQGYCSDMTRTVMLGEPTDKQREIYGIVLEAQKRGVAACRPGITGRELDDVCRSYIAEKGYREYFGHGTGHGVGRYIHEGPRVSQRGGDVVLRPGMVVTVEPGIYLPGWGGVRIEDMLLVTESGAESFTHSPKELLIL

SEQ ID NO: 20843 - protein, 450 aa, Lactococcus lactis subsp. lactis Il1403
MKVAKFGGSSLASASQIKKVFDIVQADKQRKFIVVSAPGKRSGADTKVTDALIAYYKAYKSADEKGIHYYQNWIIERFREIYDELGLKSPVINQIAENINHLAQLDLDNVFTYDTFLAAGENNNAKLVADFFNHSGLPSRYVHPSDAGIMVSSDPGNARLLGGAYEHIKYLNELEETLIIPGFFGITKEGEVCTFSRGGSDITGSIIAAGVRAELYENFTDVNGIFAAHPGIVKNPAYISELTYREMRELAYSGFSVLHDEALVPAYRAHVPLVIKNTNNPDHPGTKIVVQRETKGSPVVGIASSSAFSSLYVSKYLMNREVGFGRKVLSVLENLGVRFEHMPTGIDDMSIIIRSRYLTQPISKALISNLTESLHPDEVYIDRDFSIITIVGEDMKEHVGVTARATAALSKQGISIAMLSQGSSEVSVMFIVKEKYEKEALKAIYSAFFD

SEQ ID NO: 20844 - protein, 152 aa, Zea mays
PTRPRTRGLKSWAVMKKDAANLGLRFFLKVFEIAPSAKQMFSFLRDSDVPLEKNPKLKTHAMSVFVMTCEAAAQLRKAGKVTVRETTLKRLGATHLRYGVADGHFEVTGFALLETIKEALPADMWSLEMKKAWAEAYSQLVAAIKREMKPDA

SEQ ID NO: 20845 - protein, 306 aa, Staphylococcus aureus subsp. aureus Mu50
MIYTVTFNPSIDYVIFTNDFKIDGLNRATATYKFAGGKGINVSRVLKTLDVESTALGFAGGFPGKFIIDTLNNSAIQSNFIEVDEDTRINVKLKTGQETEINAPGPHITSTQFEQLLQQIKNTTSEDIVIVAGSVPSSIPSDAYAQIAQITAQTGAKLVVDAEKELAESVLPFHPLFIKPNKDELEVMFNTTVNSDTDVIKYGRLLVDKGAQSVIVSLGGDGAIYIDKEISIKAVNPQGKVVNTVGSGDSTVAGMVAGIASGLTIEKAFQQAVACGTATAFDEDLATRDAIEKIKSQVTISVLDGE

SEQ ID NO: 20846 - protein, 168 aa, Glycine max
  misc_feature (156)..(156): Xaa can be any naturally occurring amino acid
  misc_feature (162)..(162): Xaa can be any naturally occurring amino acid
MGKGSFQDSVKALEADIQYANTLALGYPRDKDGGCFQMRISYSPAAPLFLFLVQWTDYRLAGALGLLRILIYVTYGNGKNTMSIYERKASIRQFYSIIFPALLQLEKGITDLEERKQKEVYALRYQRKSEFNERRQSEIDIEREEECGVCLEVKAXVVLPNXCHYMCL

SEQ ID NO: 20847 - protein, 112 aa, Azotobacter vinelandii
MKLVTAIIKPFKLDDVRESLSEIGVQGITVTEVKGFGRQKGHTELYRGAEYVVDFLPKVKIDVAIEDSQLDHVIEAITKAANTGKIGDGKIFVVNLEQAIRIRTGETGTDAI

SEQ ID NO: 20848 - protein, 266 aa, Pseudomonas syringae pv. syringae B728a
MNSALYSGWISHRRFAPRAHEFTYRIGLLYLDLDEQDSVLGLSPLAGRGRFAPFSFRERDYLPELTGQGLTLIEAVRERVGKALGRIPSGRVCLLTQARSWGLSFNPVSFFYCHEADGTLAGILCEVTNTPWGERYSYVLPATGEGHQHFAVAKAFHVSPFLPRDLEYRMSFSQPAERIGVHMADWQGELKMFDATLNLTRQSLNRKTLHRYLIAYPWMTAKTCLAIYWQAMRLLVKRIPIFSHQAADGEYRAAAAQSKDSLHEKQ

SEQ ID NO: 20849 - protein, 336 aa, Streptomyces coelicolor A3(2)
MTIRVGINGFGRIGRNYFRALLEQGADIEIVAVNDLGDTATTAHLLKYDTILGRLKAEVSHTEDTITVDGKTIKVLSERNPADIPWGELGVDIVIESTGIFTKKADAEKHIAGGAKKVLISAPAKDEDITIVMGVNQDKYDPANHHVISNASCTTNCVAPMAKVLDENFGIVKGLMTTVHAYTNDQRILDFPHKDLRRARAAAENIIPTTTGAAKATALVLPQLKGKLDGIAMRVPVPTGSATDLVVELQREVTKDEVNAAFKKAADDGDLKGILFYTEDAIVSSDITGDPASCTFDSSLTMVQEGKSVKILGWYDNEWGYSNRLVDLTVFVGNQL

SEQ ID NO: 20850 - protein, 403 aa, Neisseria meningitidis Z2491
MIIDVKVPMLSESVSEGTLLEWKKKVGEAVARDEILIDIETDKVVLEVPSPQAGVLVEIVAQDGETVVADQVLARIDTAATAAAEAPAAATAAAEAPAAAPAEAAPAAAPAAAQNNAAMPAAAKLAAESGVDVNALQGSGRDGRVLKEDVQNAAAKPAAAAAPAVALPAGARPEERVPMSRLRARVAERLLASQQENAILTTFNEVNMKPIMDLRAKYKEKFEKEHGVKLGFMSFFVKAAVAALKKYPVVNASVDGKDIVYHGYFDIGIAIGSPRGLVVPILRDADQMSIADIEQAIVDYAKKAKDGKIAIEDLTGGTFSITNGGTFGSMMSTPIINPPQSAILGMHATKERAVVENGQVVVRPMMYLALSYDHRIIDGREAVLTLVAIKDALEDPARLLLDL

SEQ ID NO: 20851 - protein, 400 aa, Polaromonas sp. JS666
MEALKQGSDALFILLGGIMVLAMHAGFAFLELGTVRKKNQVNALVKILVDFSVSTVVYFVVGYAVAYGTHFFVGAEQLAAKNGYELVKFFFLLTFAAAIPAIISGGIAERARFYPQLIATAVIVGLVYPFFEGIAWNQHFGVQAWIKSLTGAEFHDFAGSIVVHAVGGWLALPAVILLGARSNRYRKDGAVSAHPPSNIPFLALGAWILTVGWFGFNVMSAQTIDKISGLVAVNSLMAMVGGTLAALVFGKNDPGFVHNGPLAGLVAVCAGSDLMHPLGALVVGGVAGGVFVVMFTLTQNKWKIDDVLGVWPLHGLCGAWGGIAAGIFGSRALGGLGGVSLGAQLIGSAMGVAWALLAGFVVYGTLKATLGLRLSQEEEFEGADLSIHRIGATPDREVNW

SEQ ID NO: 20852 - protein, 415 aa, Oryza sativa
MASAFSPATAAPAASPALFSASTSRPLSLTAAAAAVSARIPSRRGFRRGRFTVCNVAAPSATQQEAKAAGAKESQRPVYPFAAIVGQDEMKLCLLLNVIDPKIGGVMIMGDRGTGKSTTVRSLVDLLPDIRVVVGDPFNSDPDDPEVMGPEVRERVLEGEKLPVVTAKITMVDLPLGATEDRVCGTIDIEKALTDGVKAFEPGLLAKANRGILYVDEVNLLDDHLVDVLLDSAASGWNTVEREGISISHPARFILIGSGNPEEGELRPQLLDRFGMHAQVGTVRDAELRVKIVEERARFDRDPKAFRESYLEEQDKLQQQISSARSNLGAVQIDHDLRVKISKVCAELNVDGLRGDIVTNRAAKALAALKGRDTVTVEDIATVIPNCLRHRLRKDPLESIDSGLLVVEKFYEVFT

SEQ ID NO: 20853 - protein, 151 aa, Polaromonas sp. JS666
MGNKLYVGNLPYSVRDEDLQQSFGQFGSVTSAKVMMERDTGRSKGFGFVEMGSDAEAQAAINGMNGQPLGGRSVVVNEARPMEARPPRSGGFGGGSGGGGYGGGGGGGGYGGGGGGRSGGGGSDGGFRSPYGGGGSGGGRSGGGGGGRGGY

SEQ ID NO: 20854 - protein, 392 aa, Aspergillus oryzae
MAITILPPVVDHVDICPSDSDMDSMSVDSDGGVDLATGRTSRPSKRPRLVEGTDITSGVVTPGEIVTDDPQWMRGHGTYINPLSTSIIATVAGTVQKTNKLLSVQPLRARYTPEIGDLVVGRIVEVQSRRWKVDVAAPLLAQLPLSAINLPGGILRRRTSADELQIRTFFSEGDLVVAEVQTVHSDGAASLHTRSLKYGKLRNGVFLAVTGTGGSGASSSMVKGGVGSGPIPAGAMGASGTGGVVRSRRQVWTVNTANGGGDVDVILGVNGYIWISKHADDTAAACSTTDSVSITRMEEMVSSSIYSSQNDDIPPQTRREIARLAQCIRVLVQGGVRVDEENVMSAYEASLQVDLEVGDDDDDDDDDRRREGREYLEGNKARRILELVLERN

SEQ ID NO: 20855 - protein, 164 aa, Burkholderia xenovorans LB400
MSFATADLCDAHEDQLALGTLRVLEPVFHLFSRAGCFSGEAVTLKVFEDNALVRATLEEKGAGRVLVVDGGGSQRCALVGGNLAQIAQQNGWAGIVLNGCVRDTLELNEVNVGIAALATCPRRGQKLGTGERGVAVQLPGALVRPGEWIYADSDGVLVASAALK

SEQ ID NO: 20856 - protein, 360 aa, Streptococcus pneumoniae R6
MSKLQQILTYLESEKLDVAVVSDPVTINYLTGFYSDPHERQMFLFVLADQEPLLFVPALEVERASSTVSFPVVGYVDSENPWQKIKHALPQLDFKRVAVEFDNLILTKYHGLKTVFETAEFDNLTPRIQRMRLIKSADEVQKMMIAGLYADKAVHVGFDNISLDKTETDIIAQIDFAMKREGYEMSFDTMVLTGDNAANPHGIPAANKVENDALLLFDLGVLVNGYASDMTRTVAVGKPDQFKKDIYNLTLEAQQAALDFIKPGVTAHEVDRAAREVIEKAGYGEYFNHRLGHGIGMDVHEFPSIMEGNDMVIEEGMCFSAEPGIYIPGKVGVRIEDCGVVTKDGFDLFTSTSKDLLYFD

SEQ ID NO: 20857 - protein, 159 aa, Brassica napus
MAQRTEKEETEFKVLESLTTPATATTTLCSNNCGVTANPATNNMCQKCFNASIAAAGVDSGSTLKRASRSVNLRPTPAKVVIRPREIDPVKRDQQTVNRCSGCRKKVGLTGFRCRCGDLFCSEHRYSDRHECSYDYKTAGREAIARENPVVKAAKTVKV

SEQ ID NO: 20858 - protein, 296 aa, Neisseria meningitidis Z2491
MSVLINKDTKVLVQGFTGKNGTFHSEQALAYGTKVVGGVTPGKGGQTHLDLPVFNTMKEAVKETGADASVIYVPAPFVLDSIVEAVDSGVGLVVVITEGVPTLDMLKAKRYLETNGNGTRLVGPNCPGVITPGECKIGIMPGHIHTPGRIGIISRSGTLTYEAVAQTTKLGLGQSTCIGIGGDPIPGMNQIDALKLFQEDPDTDAIIMIGEIGGTAEEEAAEYIQSNVSKPVVGYIAGVTAPKGKRMGHAGAIISGGKGTAEEKFAAFEKAGIAYTRSPAELGTTMLEVLKTKGLA

SEQ ID NO: 20859 - protein, 227 aa, Brassica napus
  misc_feature (15)..(15): Xaa can be any naturally occurring amino acid
  misc_feature (209)..(209): Xaa can be any naturally occurring amino acid
STTRPLGLSTANTLXGAHAGARQVEVTINGIGERAGNASLEEVVMAIKCRGDHVLGGLYTGIDTRHIVMTSKMVEDYTGMQTQPHKAIVGANAFAHESGIHQDGMLKHKGTYEIICPEEIGLERSNDAGIVLGKLSGRHALKDRLTELGYVLDDEQLSSIFWRFKSVAEQKKRVTDADIIALVSDEVFQPEAVWKLLDIQITCGTLGLXTATVKLADADGKEHCACS

SEQ ID NO: 20860 - protein, 136 aa, Shewanella sp. ANA-3
MSQLLHTMLRVGNLERSIAFYTQVLGMKLLRTSENPEYKYSLAFVGFGEESTGQAVIELTYNWGTEKYDLGTAFGHIAIGDEDIYARCEAIAAAGGKVTRAPGPVAGGTTEIAFVEDPDGYKIEFIQMKSATQGLG

SEQ ID NO: 20861 - protein, 677 aa, Saccharomyces cerevisiae
MHHHHHHSSGLVPRGSGMKETAAAKFERQHMDSPDLGTDDDDKAMGSAPSFNVDPLEQPAEPSKLAKKLRAEPDMDTSFVGLTGGQIFNEMMSRQNVDTVFGYPGGAILPVYDAIHNSDKFNFVLPKHEQGAGHMAEGYARASGKPGVVLVTSGPGATNVVTPMADAFADGIPMVVFTGQVPTSAIGTDAFQEADVVGISRSCTKWNVMVKSVEELPLRINEAFEIATSGRPGPVLVDLPKDVTAAILRNPIPTKTTLPSNALNQLTSRAQDEFVMQSINKAADLINLAKKPVLYVGAGILNHADGPRLLKELSDRAQIPVTTTLQGLGSFDQEDPKSLDMLGMHGCATANLAVQNADLIIAVGARFDDRVTGNISKFAPEARRAAAEGRGGIIHFEVSPKNINKVVQTQIAVEGDATTNLGKMMSKIFPVKERSEWFAQINKWKKEYPYAYMEETPGSKIKPQTVIKKLSKVANDTGRHVIVTTGVGQHQMWAAQHWTWRNPHTFITSGGLGTMGYGLPAAIGAQVAKPESLVIDIDGDASFNMTLTELSSAVQAGTPVKILILNNEEQGMVTQWQSLFYEHRYSHTHQLNPDFIKLAEAMGLKGLRVKKQEELDAKLKEFVSTKGPVLLEVEVDKKVPVLPMVAGGSGLDEFINFDPEVERQQTELRHKRTGGKH

SEQ ID NO: 20862 - protein, 364 aa, Saccharomyces cerevisiae
MSAPKKIVVLPGDHVGQEITAEAIKVLKAISDVRSNVKFDFENHLIGGAAIDATGVPLPDEALEASKKVDAVLLGAVGGPKWGTGSVRPEQGLLKIRKELQLYANLRPCNFASDSLLDLSPIKPQFAKGTDFVVVRELVGGIYFGKRKEDDGDGVAWDSEQYTVPEVQRITRMAAFMALQHEPPLPIWSLDKANVLASSRLWRKTVEETIKNEFPTLKVQHQLIDSAAMILVKNPTHLNGIIITSNMFGDIISDEASVIPGSLGLLPSASLASLPDKNTAFGLYEPCHGSAPDLPKNKVNPIATILSAAMMLKLSLNLPEEGKAIEDAVKKVLDAGIRTGDLGGSNSTTEVGDAVAEEVKKILA

SEQ ID NO: 20863 - protein, 540 aa, Yarrowia lipolytica CLIB122
MSLDKNRQITTSESSSGSSADEGTHIMRGLTSTSTQDETTGSISEGNLEAEKISPFVFVLVALASISGFLFGYDTGYVSGALVVIKEDLGRALSNGDKELITASTSLGALLGGVIAGAMCDFFGRKWVITFANILFLVGAAIQCGAHAVWTMIGGRFVMGWGVGIASLCAPLYISELAPTRIRGRLVVLNVLAITGGQLVAYGIGAGMAHVHQGWRILVGLSMVPAFVQMVIFVFMPETPRYLVRKNKIAEAKKVLAKTYATDDDNLLDRKLHELMLHNAYKESGLSTMARARNTMKELYCVPSNLRALIIACGLQGIQQFCGFNSLMYFSATIFEVVGFDNATAVSIIVAGTNFVFTIVAFMVIDRIGRRRILLGTIWGMSLGLVVNAIAFHFLDKQKEKNPNHELDKEHISGWAYVVLVAQLVYVAFYATGIGNVPWQQSELFPISVRGVGTGMATATNWAGSLIVSSTFLTMLENITPTGTFSFYAGLCALGEVFVFFLYPETSGMDLEQIQQLLTGGFNIKESMRLSDEAKRGYKK

SEQ ID NO: 20864 - protein, 622 aa, Bacteroides fragilis
MKTTFMNVSRGVIGALAFSLGISSCQSSQSKMTFEQEGDSLTVIHITNPTQYLLLPVEEKTPEAQVCIASDSVPVDMDVRLSREKVDYFVPFALPKGEKEVAVRIRHLPKEALCWKELKLSDTFDTTNTDQYRPLYHHTPLYGWMNDANGLVYKDGEYHLFYQYNPYGSMWGNMHWGHSVSKDLVHWEHLEPALARDTLGHIFSGSSVVDDANTAGYGAGAIVAFYTSASDKNGQIQCMAYSTDNGRTFTKYEKNPVLTPFDGLKDFRDPKVFWYAPDQKWVMVVSADKEMRFYSSENLKEWTYMSGWGEGYGVQPSQFECPDMVELPVDGNPDHKKWALIVNVNPGCYFGGSATQYFIGDFDGEKFVCDNKPETVKWLDWGKDHYATVCFSNTGDRTIAVPWMSNWQYANIVPTRQFRSANALPRELSLYTQDGDIYMAAAPVEETKSLRKESREIPAFEVGDAYHVDSLLSDNKGAYEIELELAAGSAEIMGLKLFNEKGENVDIYISLPEKKLVMDRTKSGIVDFGKDSAPHAIEAHDRRKQNSINYVDDFALGTWAPVQKAGNYKLDIFVDKCSVEIFLNGGKIAMTNLIFPTTPYNQMSFYSRGGAFKVDRCKIYRL

SEQ ID NO: 20865 - protein, 399 aa, Candida glabrata CBS 138
MSFNREHDLKLKFKSSKKLKISATFESMDLKEGLLRGIYSYGFEAPSAIQSRAITQIISGKDVIAQAQSGTGKTATFTIGMLQAIDLKKHDLQALVLSPTRELAAQIGKVVTNLGDYMNVKAYAMTGGKTMKDDLKKIQKHGCQVISGTPGRVLDMIKRRLIETRHVQILVLDEADELLSDTLGFKHQIYDIFTKLPRTSQVVVVSATMSPEILEITKKFMNDPVKILVKRDEITLEGIKQYYVNVEKEEWKFDTLCDIYDSLTITQCVIFCNSKKKVDWLAHKLKQSNFAVISMHGDMKQDERDRVMNEFRTGQSRVLISTDVWARGIDVQQVSLVINYDLPEITENYVHRIGRSGRFGRKGVAINFLTKIDASRMKEIEKYYKIKVKPMPADLSELS

SEQ ID NO: 20866 - protein, 168 aa, Oryza sativa
EGGAFSRVSEETRKDDREEVRNIIEEVKACDPFRIAVMVECALFQKLGNFNGPNKQRYRSLMFNLKDDHNTDFRRRVLLGQVQPERIADLTPTEMASDTRKLENKKIEEKALFECERGGAPKATTDQFKCGRCGQRKTTYYQLQTRSADEPMTTFVTCVNCNNHWKFC

SEQ ID NO: 20867 - protein, 294 aa, Bradyrhizobium sp. BTAi1
MTARIIDGKVIAADLRGQVAREVERVKRDHGLTPGLAVVLVGNDPASEVYVRSKHTQTQAAGMASFEHKLPADVAQSELLALIDKLNHDPSVHGILVQLPLPKGLETEIVINAIDPAKDVDGLHPHNAGRLSGGQPALAPCTPLGCIILSKTVHPSLEGLNAIVIGRSNLVGRPLVQLLLNENATVTIAHSRSRDLAALTARADLVYAAVGRPEMVKRDWIKPGATVIDVGINRIPTAEGKTRLVGDVAYAEVAEVAGAITPVPGGVGQMTVACLLVNTLRAACAIAGLPKPAV

SEQ ID NO: 20868 - protein, 419 aa, Arabidopsis thaliana
MGSLRRSTSNRSRKKGTAVKMNRMPSSLSPPTPPCSAIVGGTGKSKKRRGGVCLWTRFDRTGFMEVAGCDKSTIIERSSVSAKDLRTAFSHSSKILDNNKSMSCYDAAREKAIVLNLEVIKAVITSEQVMLLDSLRPEVLTLTDRLKHHFPRKDGPENILQASSHGHQEGGEEGLKSKLPFEFRVLEIAFEVFCSFVDSNVVDLETQAWSILDELTKKVSNENLKDLRSLKTSLTHLLARVQKVRDEIEHFLDDKEDMEDLYLTRKWIQNQQTEAASNSIVSQPNLQRHTSNRISTSMVTEEDDIDDMEMLLEAYFMQLEGMRNKILLMKEHIDSTEAYVKILQNSRRNGLIHLMMLVNIGNYAITAGTVVVNLFGMNIPIGLYSTPDIFGYVVWAVVALCIVLFIVTVGYAKWKKLLD

SEQ ID NO: 20869 - protein, 566 aa, Rubrivivax gelatinosus PM1
MAADLPTDGAPNRRHQMFPVLSDTEIARISRFGSVCRYARGERLFTSGEVGPGMFVLLSGVVSVTHRDGLGHVLPLVRQGPGEFLAEVGQLSGRPALVDGTAEEAVEALLVPPGQLRALLVAEAELGERITRALILRRVSLIESGASGPVLIGPSTAPDMLRLQAFLRRNGQPYQMVCARKDADAAALIAQYGAAADEVVVVCPDGSVLLNPGEDALARCIGMVDTAERDELFDVVVVGAGPAGLATAVYAASEGLSVVVLDCRAYGGQAGASARIENYLGFPTGISGQALAGRAFVQAQKFGAEMLIPAQAVGLDCSRAKDGPAAELHVKLADGRRLRGRSVVVASGARYRRPAVPRLAEFEGRGVWYWASAVEARLCAQAEVALIGGGNSAGQAAVFLAQHAVAVHMLVRSAGLAASMSRYLIDRIEATPNIHLRSHTELSRLDGCTAEGLEGLAWRDHRSGAEEARRIRHLFLFVGADPEAAWLQGCGVAVDAHGFVRTGQAIEGAAGDGYRPAALESNVPGVFAVGDVRSGSVKRVGGAIGEGAAAVAMIHQFLAARAPVAV

SEQ ID NO: 20870 - protein, 554 aa, Shigella flexneri 2a str. 2457T
MCSIFGVFDIKTDAVELRKKALELSRLMRHRGPDWSGIYASDNAILAHERLSIVDVNAGAQPLYNQQKNHVLAVNGEIYNHQALRAEYGDRYQFQTGSDCEVILALYQEKGPEFLDDLQGMFAFALYDSEKDAYLIGRDHLGIIPLYMGYDEHGQLYVASEMKSLVPVCRTIKEFPAGSYLWSQDGEIRSYYHRDWFDFDAVKDNVTDKNELRQALEDSVKSHLMSDVPYGVLLSGGLDSSIISAITKKYAARRVEDQERSEAWWPQLHSFAVGLPGSPDLKAAQEVANHLGTVHHEIHFTVQEGLDAIRDVIYHIETYDVTTIRASTPMYLMSRKIKAMGIKMVLSGEGSDEVFGGYLYFHKAPNVKELHEETVRKLLALHMYDCARANKAMSAWGVEARVPFLDKKFLDVAMRINPQDKMCGNGKMEKHILRECFESYLPASVAWRQKEQFSDGVGYSWIDTLKEVAAQQVSDQQLETARFRFPYNTPTSKEAYLYREIFEELFPLPSAAECVPGGPSVACSSAKAIEWDEAFKKMDDPSGRAVGVHQSAYK

SEQ ID NO: 20871 - protein, 546 aa, Bradyrhizobium sp. BTAi1
MAKIDPAAGKPLANAALANIPRLITAYYALKPDPHEPTQRVAFGTSGHRGSSLKTGFNENHILATTQALCDYRRQHGLDGPLFVGIDTHALAEPALASALEVFGANGVDVMVDKDGGYTPTPVISHAIIAYNKGRTEHLADGVVITPSHNPPEDGGYKYNPPHGGPADTDATGEIERQANIYLANELDGVSRISYTKARQRGSVHPYDYITPYVADLANTVDLDAIKAAGVKIGIDPLGGAAIAYGAPLIERYGLNATIVNDLVDPTFRFMTADWDGKIRMDCSSPYAMASLIGMRERFDVAFANDTDADRHGIVTRSGGLMNPNHYLATAISYLFAHRPDWRSDAAIGKTIVSSSLIDRVARKLGRKLVETPVGFKWFVEGLHSGSFGFAGEESAGASFLKRDGTVWTTDKDGLILGLLAAEIMARRGRDPSELYKELTSELGAPVYERIDVPASPPQKAALKALTPEQLNLTELAGDPVRVVHTKAPGNGQSFGGIKVETDYGWFAARPSGTEDVNKLYAESFRDAEHLKRIQSEAQAALAKVA

SEQ ID NO: 20872 - protein, 94 aa, Arabidopsis thaliana
  misc_feature (10)..(10): Xaa can be any naturally occurring amino acid
  misc_feature (14)..(15): Xaa can be any naturally occurring amino acid
  misc_feature (31)..(31): Xaa can be any naturally occurring amino acid
  misc_feature (37)..(37): Xaa can be any naturally occurring amino acid
  misc_feature (40)..(40): Xaa can be any naturally occurring amino acid
  misc_feature (75)..(75): Xaa can be any naturally occurring amino acid
AKEEKQEVVXASPXXSSAAVVTSPAQATMVXPFTGLXSSXAFPVTRKTNKDITSIASNGGRVSCMKVWPPIGKKXKFETLSLSLTLGDGILREG

SEQ ID NO: 20873 - protein, 168 aa, Setaria italica
  misc_feature (159)..(159): Xaa can be any naturally occurring amino acid
MAAASSTTSVHDFTVKDASGKDVDLSTYKGKVLLIVNVASQCGLTNSNYTELAQLYEKYKDQGFEILAFPCNQFGGQEPGTNEEIVQFACTRFKAEYPIFDKVDVNGNNAAPIYKFLKSSKGGLFGDSIKWNFSKFLVDKEGRVVDRYAPTTSPLSIEXDIKKLLGSS

SEQ ID NO: 20874 - protein, 258 aa, Vibrio sp. Ex25
MTAQIKLEREAHIAKLTISNPPANTWTLESLNQLKELAIELSNDRSIYALVLTGEGEKFFSAGADLNNFASGDKSQAADMAFAFGEAFEALSAFDGVSIAAINGYAMGGGLEVAMACDIRIAEEQVQMALPEASVGLLPCAGGTQNLTALVGEGWAKRMILCGERVTAERAEKIGLVEEVVAKGQALEAAMELAQRVAGQSPKSISACKALIQGRRSQTHAAGLVLERELFLQLFNTQDQTEGVNAFLQKRKPQWTNS

SEQ ID NO: 20875 - protein, 269 aa, Ellisomyces anomalus
HTFYNELRVAPEEHPVLLTEAPLNPKSNREKMTQIMFETFNAPAFYVSIQAVLSLYASGRTTGIVLDSGDGVTHTVPIYEGYSLPHAILRLDMAGRDLTDYLMRILAERGHSFTTTAEREIVRDIKEKLCYVALDFEQEMQTAAQSSALEKSYELPDGQVITVGNERFRAPEALFQPNLLGLESAGIHETTYNSIMKCDVDIRKDLYSNIVMSGGTTMYPGIADRMQKEITALAPSSMKIKIVAPPERKYSVWIGGSILASLSTFQQMW

SEQ ID NO: 20876 - protein, 206 aa, Chlamydomonas reinhardtii
MSTKKRRLLKVIILGDSGVGKTSLMNQYVQKKFTKEYKATIGADFLTKEIEVDDKKVTMQIWDTAGQERFQSLGSAFYRGADCCVLVFDVNNAKSFDDLDNWRDEFIIQAGPPDPDNFPFMVLGNKIDENGGSSRQVSEKKAKAWCASKGSIPYFETSAKEDINVEAAFTCITRNALRNEKEEELFMPDAVDMNTTATQRKRAGCC

SEQ ID NO: 20877 - protein, 384 aa, Arabidopsis thaliana
MTLPELPKDLVEEILCFVPATSLKRLRSSCKEWNRLFKDDKRFARKHIEKAAKQFQPLTLTKNYRICPINVNLHGTTPSLEVKNEVSLVDPHSKNSAAQFNIDRVFHCDGLLLCTSQKDSRFVVWNPLTGVTKWIELGDRYNEGMAFILGYDNKSCNKSYKAMSFNYLDKDSEIYEFSSDSWRVIDDIIKPPHYMDYFRECFSLKGNTYWLGIDRRRRPPDLRITLIKFDFGTERFGYVSLPPPCQVHGFEASNLSVVGDEKLSVLVQGGSTSKTEVWVTSKIGEANVVSWSKVLSLYPKPDVGFWHGLSFLLDEEKKVVLCCKSKGWMEEEDEENVYSVGEDTKFILLNFGVQTIGGYSPIIVNYVPSLGQIELAGSKRKRDY

SEQ ID NO: 20878 - protein, 497 aa, Vibrio sp. Ex25
MTEQVKQYIGGEFAISDSKQWLDVTNPATNEVIAQVPCATESEMNAAIASATETFKRWKEVAAPERARLMLRYQHLLKEQHDELAILLSSETGKTLADAKGDIWRGIEVVEQAANICSSMMGETVENVATNIDGYSYIQPLGVCAGITPFNFPAMIPLWMFPMAIACGNTFVLKPSEQVPLTAMKLAELFEQAGAPKGVLQVVHGTKEQVDRILTDPVVRAISFVGSVPVGEYIYKTGTDNLKRVQSFAGAKNHMVIMPDANKQQVINNLVGASVGAAGQRCMAISVAVFVGESKEWIPELKEALAQVQPGAWDDETAGYGPLISPQAKQRVVNLINEGKASGANCVLDGTDCQVPGFPNGNWVGPTLFTNVTTDMSIYQEEIFGPVLLTMEVDDLDEAIELINANRFGNGTSIFTANGAAARKYQHNIEVGNVGINVPIPVPLPFFSFTGWKGSFYGDLHAYGKQAVRFYTETKTVTARWFEDDIPSGPNMTIQLS

SEQ ID NO: 20879 - protein, 201 aa, Phytophthora infestans
MNPEYDYLFKLLLIGDSGVGKSCLLLRFADDTYTESYISTIGVDFKIRTIELDGKTIKLQIWDTAGQERFRTITSSYYRGAHGIIVVYDVTDQESFNNVKQWLHEIDRYACENVNKLLVGNKSDLTAKRVVSTDAAKEFAESLGIEFLETSAKNAANVEKAFMMMAAQIKKRMANAPVAPKAGVKLTPGQQVPSNGGSKCC

SEQ ID NO: 20880 - protein, 269 aa, Fennellomyces linderi
HTFYNELRVAPEEHPVLLTEAPLNPKSNREKMTQIMFETFNAPAFYVAIQAVLSLYASGRTTGIVLDSGDGVTHTVPIYEGYSLPHAILRLDMAGRDLTDYLMRILAERGHSFTTSAEREIVRDIKEKLCYVALDFEQEMQTAAQSSALEKSYELPDGQVITVGNERFRAPEALFQPALLGLESAGIHETAYNSIMKCDVDIRKDLYSNIVMSGGTTMYPGIADRMQKEITALAPSSMKIKIVAPPERKYSVWIGGSILASLSTFQQMW

SEQ ID NO: 20881 - protein, 269 aa, Gilbertella persicaria
HTFYNELRVAPEEHPVLLTEAPLNPKSNREKMTQIMFETFNAPAFYVAIQAVLSLYASGRTTGIVLDSGDGVTHTVPIYEGYALPHAILRLDMAGRDLTDYLMRILAERGHSFTTTAEREIVRDIKEKLCYVALDFEQEMQTAAQSSALEKSYELPDGQVITVGNERFRAPEALFQPALLGLESAGIHESTYNSIMKCDVDIRKDLYSNIVMSGGTTMYPGIADRMQKEITALAPSSMKIKIVAPPERKYSVWIGGSILASLSTFQQMW

SEQ ID NO: 20882 - protein, 134 aa, Glycine max
MASLKFACVVAVICMVVVITAPMTNAITCGEVARSLSPCINYLRSRRGGSPEAECCRGVTSLNRAASNTADRRTACNCLKSVAASISGLNANNAASLPGRCRVRVPYRISTSTNCNSVHSIAGSGNESCMDPGR

SEQ ID NO: 20883 - protein, 376 aa, Shewanella sp. MR-4
MDTKTMNISTMPNISLASAPAGLVGFSQLVCVERWNETTDVVSFRFQAGEPMKFDYKPGQFMTLVLEINGEQACRSYTLSSTPSRPYSLMLTIKRVDGGLVSNYLIDHLQPGQTVRVLPPTGQFNLFDIPAKKYLFLSAGCGITPMYSMSRYLTDSQMNADIAFVHSARTQADIIFKTSLETMATRHRDFKLRYLVEDVTADTAWHPEAVLHDIGRLSADNLRDLVPDFSERTVFLCGPEPYMQAVKTILAELNFDMTQLYHESFATAVKEAHSRVKQAEMQTEDPVSGSNSFMLSIGDKKRALTAEQTLLEGIEAEGLPIIAACRSGVCGACKCKVLEGETESTSSMTLTPAEIEAGYVLACSTKLKSDVTLSLT

SEQ ID NO: 20884 - protein, 469 aa, Zymomonas mobilis subsp. mobilis ZM4
MPEKSPKLSKTLSSFHLWGIAVGLVISGEYFGWSYGWATAGTMGFLIATVIVAAIYTSFIFSFTELTCSIPQAGGPFAYSFRALGKWGGAIAGMATLVEFLFAPPAIALAIGSYLNVQFPSLSPKMAAACAYIVFMALNIVGVRIAATFELFITVAAIFELLVFMGVVAPAFSWEQFLHDGWGVASHFDIQAIGGIFAAVPFAIWFFLAIEGVAMAAEEAKNPRRSIPIAYTAGILTLVSLAFGVMVFAGGSMDWHQLANLNDPLPQAMKHVVGAHSGWLHMLVFLGLFGLVSSLHGIIMGYGRQIFALARAGFLPATLGKLHIKLQTPYAATIAGGLVGIAAIFADDVLSFGGHSLTAILVTMSVLGSLTMYVLSMVSLFRLRQTMPDLPRPYKAPLYPFLPALALIGAFFLLAAVIYYNAGISFIYALLMCIACPLCLYSYKRSQNKKTEENDITTSAILAAEGAEE

SEQ ID NO: 20885 - protein, 352 aa, Carboxydothermus hydrogenoformans Z-2901
MLEFDLEFQNNATIKVIGVGGGGSNAVNRMIMSGLKGVEFIAVNTDAQALKLSKAPTRIQIGVKLTKGLGAGANPEIGEKAAEENREDLYAALKGADMVFVTAGMGGGTGTGAAPIVAEIAKELGALTVGVVTKPFTFEGKKRAMQAEKGIENLKSKVDTLITIPNDRLLQVIDKNTPMLEAFRIADDVLRQGVQGISDLIAVPALINLDFADVKTIMKDAGSALMGIGVASGDNRAVEAARQAISSPLLETSIEGARGVLLNITGGTSLSLFEVQEAADIIAQAADPDANIIFGAGIDETMQDEVRVTVIATGFDHRPVARKEVKPELNFKEFSSLDSDTGIEIPAFLRRR

SEQ ID NO: 20886 - protein, 161 aa, Pseudomonas aeruginosa PAO1
MSDSLLSIPCTTIKGEQKTLADFGGKALLVVNTASKCGFTPQYQGLEALWEKYRERGLVVLGFPCNQFGKQEPGDEGEISQFCELNYGVSFPLFRKIEVNGAGAHPLFVSLKKRAPGLLGSQGIKWNFTKFLIGRDGQVVKRYAPTTKPEELSSAIEALLE

SEQ ID NO: 20887 - protein, 173 aa, Triticum aestivum
MATVMAMSSFAGVAVLPRGSAGQRFGARSLPALGRRALVVRAQAEGPSAPPPTKPKASTSIWDAMAFSGPAPERINGRLAMVGFVTALAVEAGRGDGLLSQLGSGTGQAWFAYTVAVLSMASLVPLLQGDSAEGRAGAIMNANAELWNGRFAMLGLVALAATEIITGSPFINV

SEQ ID NO: 20888 - protein, 482 aa, Pseudomonas syringae pv. syringae B728a
MQLIWLRSDLRAQDNTALTAAMERGPTLAVYLLSPAQWRSHDDADCKVDFWLRNLVELEKALGELNVPLLIREADTWDQAPEVLATLCTQFKVEGLHLNQEYGINETRRDQAVQKAMGKAGVHFNSYLDQLLFKPGSILTKTGNYFQVFTQFKKVCYTRLHEAMPHPVRTPQAQAAQSIKSDAVPKQVKGFATPSKALRDLWPAGEAEARRRMDAFAAEQISYYKTERDFPAKPGTSQLSAYLAAGVISPRQCLHAALASNQGEFETGDVGTVTWINELLWREFYKHTLVGYPRVSRHRAFRPETEALKWRDAPEELRAWQEARTGLPIIDAAMRQLLETGWMHNRLRMVVAMFLTKNLLIDWREGERFFMRHLIDGDLASNNGGWQWSSSTGTDSAPYFRIFNPLSQSERFDPEGVFIKRWLPELADMNKKQIHDPSLIGDLFGAADYPKPIVDLSKSRARALAAFKALPARQPAAGVEHG

SEQ ID NO: 20889 - protein, 142 aa, Arabidopsis thaliana
MATKSTGGTEKTKSIEVKKKLINVLIVDDDPLNRRLHEMIIKTIGGISQTAKNGEEAVILHRDGEASFDLILMDKEMPERDGVSTTKKLREMKVTSMIVGVTSLADQEEERKAFMEAGLNHCLEKPLTKAKIFPLISHLFDA

SEQ ID NO: 20890 - protein, 235 aa, Arabidopsis thaliana
MSSYSIASAISRISPLIRFVKPYSTGFSFITCACNSTRRPKRFDQLCVFSMASEARESPANNPGLSTNRDEATKGYIMQQTMFRIKDPKASLDFYSRVLGMSLLKRLDFSEMKFSLYFLGYEDTTTAPTDPTERTVWTFGQPATIELTHNWGTESDPEFKGYHNGNSEPRGFGHIGVTVDDVHKACERFEELGVEFAKKPNDGKMKNIAFIKDPDGYWIEIFDLKTIGTTTVNAA

SEQ ID NO: 20891 - protein, 262 aa, Bacillus cereus ATCC 10987
MLQLQNISVDYVTPHVVKISLNRERQANSLSLALLEELQNILTQINEEANTRVVILTGAGEKAFCAGADLKERAGMNEEQVRHAVSMIRTTMEMVEQLPQPVIAAINGIALGGGTELSLACDFRIAAESASLGLTETTLAIIPGAGGTQRLPRLIGVGRAKELIYTGRRISAKEAKEYGLVEFVVPAHLLEEKAIEIAEKIASNGPIAVRLAKEAISNGIQVDLHTGLQMEKQAYEGVIHTKDRLEGLQAFKEKRTPMYKGE

SEQ ID NO: 20892 - protein, 187 aa, Triticum aestivum
  misc_feature (173)..(173): Xaa can be any naturally occurring amino acid
KKVLANKLNTWSKLQEHYDAEGKNLVIKELFEKDPQRFEKYHRVFKGSDKTKSSILFDFSKNRVTDETLKLLLELAKEAKVEEMRSKMFTGEHINFTEDRAVLHIALRNLSDRPIYDNGADVMPEVREVLAHMKQFSEAVRSGEWKGYTGKTITDIVNIGIGGSDLGPVMVTXEALKPYAQEGLKGS

SEQ ID NO: 20893 - protein, 314 aa, Bordetella parapertussis
MAAVERLTIATRASRLALWQAEHVRDLLRARYPACSVELLTLTTRGDQILDRTLSKVGGKGLFVKELETALLDGRADLAVHSLKDVPVDLHAPFELSCVLERADPRDAFVSNDYGSLADLPPGAAVGTSSLRRESQIRARYPHLVVKPLRGNLDTRLGKLDNGDYAAIVLAAAGLERLGLAARIRALLEPADSLPAAGQGALGIEILQGRADVRAMLAPLGDAATLACVTAERAVSRMLGGSCQVPLAAYARIDGDELALRALVAAPDGRRIVRAERRGPRDQAQAIGESAARDLLADGADAILAELLPTSPAP

SEQ ID NO: 20894 - protein, 448 aa, Streptomyces peucetius ATCC 27952
MQPAASRSVPVAPGAVPLLGHALKLWRDPLGFLKSLRENGDLVRVNLGTMPMYVATSAELIHEVTVRQARSFEKGRFFDRLRPLAGDGLATANGEVHRKHRRLIQPMFHPGRITMYAETMSSNALALADSWTAGQEVEMEQAMAQFAIETLATTLFSTDIGQPAVVAIRENLPVVLQNLLIRAASPKFLDRFPIRPNRDFDAAAAKLRSVIDEVVATTRRAGTSEHNDLLSVLLGARDSETGEYLSDTEVRDELSTILFAGAETTASTLSWTFYQLAEHPEVEAELVAEIKDVVGDRPVSIEDVPKLEAVRRVLDEVIRLHGVTMLMRRTTAPVELGGHLLPVGTEVGFSLYAMHRDPTLYDDPDRFDPDRWLPERRGDITRQAYIPFGAGNRKCIGDAFVWTEATIALATVLARWQLRPLPGHTPKEVASAVAHPDRMPMTVLPRDA

SEQ ID NO: 20895 - protein, 340 aa, Pseudomonas syringae pv. syringae B728a
MTDHALLLVNLGSPASTQVADVRSYLNQFLMDPYVIDLPWPVRRLLVSLILIKRPEQSAHAYASIWWDEGSPLVVLSKRLQQAMKKEWSHGPVELAMRYGEPSIETVLTRLAEQGFKKVTLAPLYPQFADSTVTTVIEEAKRVVRAKSLKMQFSVLQPFYDQPEYLSALVESVRPHLEQPYDHLLLSFHGLPERHLHKLDPTGKHCLKDDCCMTAPAEVLATCYRAQCIQSAAAFAKRMGIADGKWSVSFQSRLGRAKWIEPYTEAHLDELAAKGVKKLLVMCPAFVADCIETLEEIGDRGAEQFKEAGGEELILIPCLNDDPNWAKELNRLCERAPLML

SEQ ID NO: 20896 - protein, 133 aa, Oryza sativa
  misc_feature (21)..(21): Xaa can be any naturally occurring amino acid
QCKSSWARKMIRVLLVEDEEXNRVVARAALKAAGGGDVVDEAENGEVAVQRVRDAAAPYDLVLMDKQMPVMDGHERATRRIRGMGVTTPIVAVSSDGLPADVDAFITAGADDFTSKPLSKEKLGVILAKFRLA

SEQ ID NO: 20897 - protein, 464 aa, Cryptococcus neoformans var. neoformans JEC21
MLRNALQSRLSSTLRTAELRAARPVAGPSVLAARTFVSKPLPSPRFRAAVLTPRRLPTRSYAAEAGGKFTRSKPHFNIGTIGHVDHGKTTLTAAITKHLAEQGGGKFMDYSQIDKAPEEKARGITISTAHVEYETPNRHYAHIDCPGHADYIKNMITGAAQLDGAIIVVSATDGQMPQTREHLLLARQVGIKKLVVFINKVDQVDDPEMLELVEMEMRELLGQYGFDGEETPIVMGSALAALEGRDPERGAQKIQELMEKADEWLDVPSRDLDKPFLMYVEDVFSISGRGTVVTGKVERGTITKGSEVEIVGLGAPVKTILTGIEMFHKELERGEAGDNMGALLRGIKREQVRRGQVLVQPGSIKSVKKFKAQIYILTKEEGGRYTPFMANYRPQLFIRTTDVTCALTFPEGTEGAHEKLVMPGDNVEMIGDLVHDIALEPGSRFTLREGGKTIGTGIVSEIYE

SEQ ID NO: 20898 - protein, 301 aa, Triticum aestivum
SSGESSIPEEDTYTRVEEFLEPLELCYRSLCDCGDKLIADGSLLDFMRQVSTFGLCLLKLDIRQESDRHIDAVDAITTHLGIGSYRDWPEEQRQDWLVNELRGNRPLFGPDLPQSDEVADVLGTFRVIAELPADSFGAYVISMATAPSDVLAVELLQRECGVKTPLRVVPLFEKLADLQQARATMELLFSIDWYKERINGKQEIMIGYSDSGKDAGRLSAAWYLYKAPGGDPWTWPEHPRRESSPSSHGPGPAPGGARWAGPNPPCPSLSEAGPKTVKGFGSGGTGPGARGIHKFPSGEEN

SEQ ID NO: 20899 - protein, 285 aa, Ralstonia metallidurans CH34
MSAHLIDGNALAKQIRAEAAQRAARLTAAGHQPGLAVVLVGEDPASQVYVRNKVKACEDNGFYSSLNRYPADLSEADLLARIDELNNDPKIHGILVQLPLPKHIDSHKVLEAIAPEKDVDGFHVANAGALMTGAPLFRPCTPYGCMKMLESIQYPLRGARAVVVGASNIVGKPMAMMLLQAGATVTICNSKTRDLAAHTRDADVIVAAVGRRNIITADIVKPGAVVIDVGMNRDDAGKLCGDVDFAGVREVAGHITPVPGGVGPMTITMLLINTLEAAEREAGIA

SEQ ID NO: 20900 - protein, 482 aa, Gibberella zeae PH-1
MDSRIAMRPTRPQTVKELVAQAENFSFNMNIPFKHWMRAAETLYQEASFAVSDGDFGRAYMMLYRHSLLILKYLPTHPQFKEPDNKKAYIVLSKRIQRVIQDLEQLKPEIENAVKEWERMALSPKAAIESPDPPSRYEQFAARDPTLSGNARILDASDHQDLAVDLAQRELTRRDTVRRTTRHSGIADEDIMSRRRGGKWDQWDGVRIGDDEDLRRQMEATRHALDSAHERRNDDDFRPTSHTYNYPSISRPRPVEYERSTTPTTPSIQPSRPPKEPVALPPKEPLHPSLSQPLPPSLPQKVPLSGYAPLIPSPSPQTAGDRPEVPRKEALSPTGDAGPPAIPQKERLTFKPGAYLENGDPIRSLFLPKNLRQKFLDIAADNTRRGLEMCGMLCGTPINNALFVRCLLIPDQKCTSDTCETENEEVMFDYCMSEDLLLLGWIHTHPTQTCFMSSRDLHTHAGYQVMMPESVAIVCAPKFQPS

SEQ ID NO: 20901 - protein, 474 aa, Synechococcus elongatus PCC 6301
AAPILFWHRRDLRLSDNIGLAAARAQSAQLIGLFCLDPQILQSADMAPARVAYLQGCLQELQQRYQQAGSRLLLLQGDPQHLIPQLAQQLQAEAVYWNQDIEPYGRDRDGQVAAALKTAGIRAVQLWDQLLHSPDQILSGSGNPYSVYGPFWKNWQAQPKPTPVATPTELVDLSPEQLTAIAPLLLSELPTLKQLGFDWDGGFPVEPGETAAIARLQEFCDRAIADYDPQRNFPAEAGTSGLSPALKFGAIGIRQAWQAASAAHALSRSDEARNSIRVWQQELAWREFYQHALYHFPSLADGPYRSLWQQFPWENREALFTAWTQAQTGYPIVDAAMRQLTETGWMHNRCRMIVASFLTKDLIIDWRRGEQFFMQHLVDGDLAANNGGWQWSASSGMDPKPLRIFNPASQAKKFDATATYIKRWLPELRHVHPKDLISGEITPIERRGYPAPIVNHNLRQKQFKALYNQLKAAI

SEQ ID NO: 20902 - protein, 128 aa, Zea mays
  misc_feature (41)..(41): Xaa can be any naturally occurring amino acid
  misc_feature (97)..(97): Xaa can be any naturally occurring amino acid
  misc_feature (105)..(105): Xaa can be any naturally occurring amino acid
MAASMISSSALAVAPQVLPPLGRRASSFAVGCSKKKIKTDXPYGIGGGLTVDVDGNGRKVKGKDVYQFVDKYGANGDGYCPIYNEDDWTPTGDVYVXGTTVILIXADTLAGILSGGARLCYDNRALSG

SEQ ID NO: 20903 - protein, 397 aa, Ustilago maydis 521
MSGGINAGDSKLAFESSEHVKVATTFDAMGLKEDLLRGIYAYNFEKPSAIQQRAILPIIRGRDVIAQAQSGTGKTATFSISMLQSIDTTLRETQALVLSPTRELAIQIQSVVLALGDYLNVQCHACIGGTSVGEDIRKLDYGQHIVSGTPGRVYDMIRRRHLRTKNIKMLILDESDELLNMGFKDQIYDVYRYLPPSTQVVLLSATLPQDVLEMTSKFMTDPVRILVKRDELTLEGIKQFFVAVEKEEWKFDTLCDLYDTLTITQAVIFCNTRRKVDWLSAKMKENNFQVSSMHGEMQQKERDEVMAEFRQGSSRVLITTDVWARGIDIANISLVINYDLPTNRENYIHRIGRSGRFGRKGVAINFVTVDDVRTLRDIEQFYSTQIDEMPVKLEDML

SEQ ID NO: 20904 - protein, 337 aa, marine gamma proteobacterium HTCC2207
MKYQGQTDYDHKGPSPRRGVLLCNLGTPDAPKTAELRRYLKEFLSDPRVVEVPRLLWWMILNLIILRIRPSRSAKLYASVWSEGGSPLMVHCKAQTAGVKKILDEKFNDDVPVALGMSYGNPSIESAIAELTAQNVRNITVLPLYPQYSGATIGSAFDAVAKVFTKTRWVPELHFIGGYQQSETYIDALCETIRKQFDEHGEPDKLVFSYHGTPQSYLNKGDPYHCLCHQTTRLVRERMGLDEDKIMTTFQSRFGREPWLQPYTDETMEALPEQGIKHLAVICPGFSSDCLETIEEINIEARELFIEAGGETFHYIPCLNDNPKHIEALAEVVSQYL

SEQ ID NO: 20905 - protein, 269 aa, Gongronella butleri
HTFYNELRVAPEEHPVLLTEAPLNPKSNRERMTQIMFETFNAPAFYVAIQAVLSLYASGRTTGIVLDSGDGVTHTVPIYEGYALPHAILRLDMAGRDLTDYLMRILSERGHAFTTTAEREIVRDIKEKLCYVALDFEQELETARNSSALEKSYELPDGQVITIGNERFRAPEALFQPSFLGLESVGIHETTYNSIMKCDVDIRKDLYSNIVMSGGTTMYPGIADRMQKEITALAPSSMKIKIVAPPERKYSVWIGGSILASLSTFQQMW

SEQ ID NO: 20906 - protein, 463 aa, Arabidopsis thaliana
  misc_feature (99)..(99): Xaa can be any naturally occurring amino acid
MSKASDAVREPLVDKNMAGSKPDQPWMVYLSTFVAVCGSFAFGSCAGYSSPAQAAIRNDLSLTIAEFSLFGSLLTFGAMIGAITSGPIADLVGRKGAMXVSSAFCVVGWLAIIFAKGVVALDLGRLATGYGMGAFSYVVPIFIAEIAPKTFRGALTTLNQILICTGVSVSFIIGTLVTWRVLALIGIIPCAASFLGLFFIPESPRWLAKVGRDTEFEAALRKLRGKKADISEEAAEIQDYIETLERLPKAKMLDLFQRRYIRSVLIAFGLMVFQQFGGINGICFYTSSIFEQAGFPTRLGMIIYAVLQVVITALNAPIVDRAGRKPLLLVSATGLVIGCLIAAVSFYLKVHDMAHEAVPVLAVVGIMVYIGSFSAGMGAMPWVVMSEIFPINIKGVAGGMATLVNWFGAWAVSYTFNFLMSWSSYGTFLIYAAINALAIVFVIAIVPETKGKTLEQIQAIVNP

SEQ ID NO: 20907 - protein, 112 aa, Dehalococcoides sp. CBDB1
MKKIEAIIREERLEPVRKALELVGFAGLTVSEVSGRGKQKGVPLQWRVGEYRVEFLPKLKLEVICHDDDCQIAVDAIIKAARTGRIGDGKIFILPVEQVIRIRTGETGNDAV

SEQ ID NO: 20908 - protein, 107 aa, Prochlorococcus marinus str. MIT 9312
MSSAPAVTDSSFDKDVLQSDLPVLVDFWAPWCGPCRMVAPVVEEISKDFEGKIKVFKLNTDENPNVASQYGIRSIPTLMIFKGGQKVDTVVGAVPKATLSSTLTKHL

SEQ ID NO: 20909 - protein, 290 aa, Epulopiscium sp.
GGGNNAVDRMITEGLSGVEFITVNTDHQALERSKADTRIQIGEKITRGLGAGANPEVGYQAAEESHEAIYEAIKDTDMLFITAGMGGGTGTGAAPVIAQIAKQEGILTVGVVTKPFTFEGRKRMATAERGIEELIKAVDTLVIIPNDRILDVIEKNTTIEDAFKKADSVLQQGVGGITNLITKPGIINLDFADVRTIMCDKGIAHMGIGQASGENRVDEAIKQATSSPLLDTTIKGAGGVLINITGDSTLAMSELNAGASLVQNDADVDAEIILGTSVNEELKDDIIVTV

SEQ ID NO: 20910 - protein, 422 aa, Streptomyces aureofaciens
MTRRVVITGIGVLAPGGIGTTAFWNLLSSGRTATRGITLFDPAPFRSRVAAEVDFHPERHGLTSLEVRRMDRAAQFGVVATREALADSGLDLAAFDPYRIGIAMGTGVGAISGLDTAYRVASDEGRIAQVDHMYAPGHLYDHFVPSSFATEVAWAVGAEGPSTVVSTGCTSGIDSVAHAVDLIREGSADIMITGATDAPISPLTLACFDAIKATTALNEEPETASRPFDATRKGFVLGEGAAAFVLEELGAARRRGAHVYAEIAGYASRSSAFHMTGLRPDGREMAEAITVALDEARLDPGDLDYVNAHGSGTRQNDLHETAAYKLALGPHAHRTPVSSVKSMIGHSLGSVGSMEIAASVLAMEHHVVPPTANLRTPDPECDLDYVPLVARDHRTDAVLTVSSGFGGFQSAMVLARPDRRTA

SEQ ID NO: 20911 - protein, 370 aa, Clostridium lentocellum
MLEIWENELQGAQIKVIGVGGGGNNAVDRMIEKGLEGVEFITVNTDHQALARSGAPAKIQIGEKMTRGLGAGANPEIGTKSAEESREEILTAIKGADMLFITAGMGGGTGTGAAPVIASIAKEEGILTVGVVTKPFSFEGRKRMINAEKGIAELKQNVDTLVVIPNDKILQVIDKKTTMVDAFSKADDVLQQGVQGITDLISNPGIINLDFADVRTIMNNKGVAHMGIGRATGENRAEEAVKYAISSPLLDTSIDGARCVLVNMCGGESLGLMEANVGMGLIREAVDPDAEIIFGTSINENLGEEIIITVIATDFQNHDVSLNTFKPVQATKEETPVQTQKATTAHVEETKFTPIKDIQVEIPQFLRRNR

SEQ ID NO: 20912 - protein, 269 aa, Helicostylum elegans
HTFYNELRVAPEEHPVLLTEAPLNPKSNREKMTQIMFETFNAPAFYVAIQAVLSLYASGRTTGIVLDSGDGVTHTAPIYEGYSLPHAILRLDMAGRDLTDYLMRILAERGHSFTTTAEREIVRDIKEKLCYVALDFEQEMQTAAQSSALEKSYELPDGQVITVGNERFRAPEALFQPALLGLESAGIHETTYNSIMKCDVDIRKDLYSNIVMSGGTTMYPGIADRMQKEITALAPSSMKIKIVAPPERKYSVWIGGSILASLSTFQQMW

SEQ ID NO: 20913 - protein, 269 aa, Hesseltinella vesiculosa
HTFYNELRVAPEEHPVLLTEAPLNPKSNREKMTQIMFETFNAPAFYVAIQAVLSLYASGRTTGIVLDSGDGVTHTVPIYEGYALPHAILRLDMAGRDLTDYLMRILSERGHAFTTTAEREIVRDIKEKLCYVALDFEQEIQTAAQSSALEKSYEMPDGQVITIGNERFRAPEALFQPSFLGLESAGIHETTYNSIMKCDVDIRKDLYSNIVMSGGTTMYPGVADRMQKEITALAPSSMKIKIVAPPERKYSVWIGGSILASLSTFQQMW

SEQ ID NO: 20914 - protein, 546 aa, Prochlorococcus marinus str. MIT 9312
MSKDPGRILIFDTTLRDGEQSPGASLNLEEKLAIAHQLARLGVDVIEAGFPFASPGDFKAVNKISNDVGKENGPIICGLARASKGDIKACYEAVSPAPKKRIHTFIATSDIHLKHKLKKSRKDVLQIVPEMVNYAKTLVEDIEFSCEDASRSDPDFLYEVIQLAISAGATTINIPDTVGFTTPSEFGKLISDINKNVPNIDEAVISVHGHNDLGLAVANFLEAVKNGARQLECTINGIGERAGNASLEELVMALHVRKSFFNSFFKRNPDSPTPLTAIRTEEITKTSRLVSNLTGMTVQPNKAIVGANAFAHESGIHQDGVLKNRLTYEIIDAKTVGLSDNKISLGKLSGRSAVRARLEEMGYDLSREDLNDAFARFKDLADRKREITDRDLEAIVSEQVQLPEAKFQLCLVQVSCGNASKPTATITLLNTADNTEDTAVSVGTGPVDAVCEALNKLAKVPNELIEFSVKSVTEGIDALGEVTIRIRRDNKIYSGHSADTDVVVAAANAYVNALNRLVFSEKKNSIHPQFDNLENSNKTFLSNPAN

SEQ ID NO: 20915 - protein, 252 aa, Oryza sativa
MAAATPNGIPASRPLASSVPIEAVLFDIDGTLCDSDPLHHVAFQEMLLEIGYNNGVPIDEEFFINNIAGRSDVEAAQNLFPDWPLEKGLKFLEDKEAKYRSLAKERLEPVKGLAKVVQWVKDHGYKRAAVTNAPRINSELMISLLGLTDFFQAVIVGGECEKPKPAPFPYLKALKELQVSADHTFIFEDSASGTRAGVAAGIPVVAVATRNPEKSLLDAGATLIIKDYEDPKLWSALEEIDREEAKLKKADA

SEQ ID NO: 20916 - protein, 373 aa, Medicago truncatula
MVVENSNQLKESSDFTYDREAEVKAFDDSKVGVKGLVDSGVSKIPRMFYTRKLEISESTASDSKLSIPIVDLKDIHINPAQRVEVIDQIRSACHEWGFFQVINHEIPIIVLDEMIDGICRFHEQDADVRKEFYTRDLKKKVSYYSNVRLFNGQGANWRDTFGFAIAPDPFNPDEVPQICRDIVIEYSQKIKNLGFTIFELLSEALGLNPSYLKEFGCAEGLFTLGHFYPTCPEPELTMGSTAHTDSTFMTLLLQDQLGGLQVLHEDKWVNVPPVHGALVVNIGDLLQLISNDKFVSVLHRVLSQNIGPRISVASFFLNSRDPIEGTSKIYGPIKELISEENPAIYKDITIKDFLAHFHTEGRNVKFLLEPFKL

SEQ ID NO: 20917 - protein, 190 aa, Brassica napus
DPIIIAIALGRKISCVTYSVSRLSRMLSPIPAVALTRDRAADAARMRKLLEKGDLVICPEGTTCREPYLLRFSALFAELSDRIVPVAMNCKQGMFASATVRGVKFWDPYFFFMNPRPSYEATFLDRLPEEMTVNGGGKTPIEVANYVQKVIGGVLGFECTELTRKDKYLLLGGNDGKVESIKKTKDDKSS

SEQ ID NO: 20918 - protein, 588 aa, Bordetella parapertussis
METVSDFVLERLAQWGIRRIFGYPGDGINGLMGAFGRTRQPLEFVQARHEEMAAFMACAHAKFTGQVGVCMATSGPGAIHLLNGLYDAKLDHQPVLALVGQQARRALGGDFQQEVDLVSLFKDVAHDFVQQAASAEQARHLIDRALRIALERRCVTCVILPNDVQDLPAVRELPREHGSVPTGIGVTSHAAVPPDTALRNAADILNRGERIAILAGAGALEAAEPLQAVAERLGAGVAKALLGKAALPDALPYVTGAIGLLGTQPSWEMMNECDTLLMVGTAFPYSEFLPSEGQARAVQIDRDGRNLNLRYPVEVGLAGDSRQTLQALLPLLEPKPQVRWRERIEASVARWWRTVEARAMVDASPVNPQRVFWELSQRLPDRSIVTADSGSAANWYARDVKLREGMMASLSGGLATMGCAVPYALAAKLAYPERPVVALAGDGAMQMNGINELITIADRWRAWADPTLVVLVLNNGDLNLVTWEQRVMGGDPRFEDSQRLPPFAYADYTRMLGLHGLRVERAQDLGAAWGEALTAGRPAVLEVLTDPEMPPLPPHIRARQVRAYVQALRADPAGGAALRATLKQWWAG

SEQ ID NO: 20919 - protein, 481 aa, Geobacter metallireducens GS-15
MQLIYEKSVPGRRGVRLPASDVPAAPELPAALRRKEPAALPEASELDVVRHFTGLSRRNFSVDTNFYPLGSCTMKYNAKVLEEAARLFAPYHPMVPLLPHGSSFSQGCLGLAYELGAALAEITGMDEVTTQPLAGAHGEMTGIMLIAAYHEAKGNKKKYVVVPDSSHGTNPASATMVGYEIITVPTAPYGDMDLDRFREVMTDEVAAVMMTCPNTLGLFNPHIQEICDIAHDHDALMYYDGANLNAILGKVRPGDVGFDVIHLNLHKTFGTPHGGGGPGSGPVGVKKQLVPFLPSPRIVKYDDGCYGVDAPAHGSIGRTSGFFGNFGVMAKAFAYITMVGREGLIQVSEQAVLNANYVMHRLKDVYDLPYDQTCMHECVFSAARQVKSGVHAIDIAKFLIDRGYHPPTVYFPLIVKEAIMIEPTETESKETLDAFIAVMREAAELAESDPAAFAEMPRTMPVTRLDETKAAREQNVCYFGC

SEQ ID NO: 20920 - protein, 545 aa, Aspergillus oryzae
MAQDKDAKSQSPTSIMNDPKKASLPENAHIEVAAGSLTTETGIDDLPISMFVWLVAFTASIAGMLFGYDTGIISAVLVYIHDGLDNRTLTSNEKELITSLCSGGAFFGSILAGLTADKLGRKAAIYFGCALFTIGAVLQGAAYTIAQMAVGRVVVGFGVGSAAMVVPLYIAEVAPAKARGRLIGLNNMSITGGQVTSYAIGAAFANVNHGWRYMVGLGALPALILAALMPFCPESPRHLVYNHRQEEARGVLRRIYGHPSDVQLASVLASISAACDEAREINEGATRWTKMKQLHAVPSNLRALISACGLMVISQLSGFNTLMYYSSTLFALVGFDNPTAVGIVVAGTNFIMTWVNMMVIDKMGRRRLLLSTAWGMSVGLIAIAVAFSFIPVDLDTLDLKSNSVSPPAIVVLVFIIWFVLFYGVSVGNTAWMSTDFFPLEVRAMGTMWITCSSWGSNVIVSSTFLSMMKSMTPSGAFGFYAGICGVGYVLIYFFYPEVSGLSLEEIKEVFKHGFGVRYARNLRKERRDIIQERLRIQGKTAVVGH

SEQ ID NO: 20921 - protein, 394 aa, Carboxydothermus hydrogenoformans Z-2901
MKYLIIGNSAAGIFAAESLRKLDPAGEITVLTDEPYEVYGRCLTSYFIAGDIVEEQIFIRPKDFYEKNRINLKKGEKVVRIDFNEKKVITFKNSYQYDRLLIASGARAKKLSLPGSNLPGVFTLRTLDDAKNILDYSRKAEQAVIVGGGLVSLKGAYGLLKRGVKVTVVVASRQILSQVLDYEAAGLVQQNLEKQGMKFLLGEDVLEFLGEDKIFEVKLTNGQVIKADLVLIGKGVTPNVDFLPEPEKFLEGIPVDQYLRTPWEGVWAAGDVAKTFDVAHGKYRVNALWPIAAEQGRVAAMNMVGQNYVYQGSIGMNSLEFFGYNTIAAGITRQEEGYTVIKRRQGANYLKLVLEGEKLKGYILSGEVRGAGKLTQLIRSGSKIKQFPSFLKIF

SEQ ID NO: 20922 - protein, 448 aa, Geobacter metallireducens GS-15
MSTASYCPNTPEEVREMLAAMGAASIDDLFQPIPPGLRARSFDLPAGMSEFEMLRRFEHLAGKNAQHLAHFVGGGYYDHLIPAVVDHLSGRAEFYTAYTPYQPECSQGTLQALFEYQTAICRLTGMEVSNASLYDGGTALAEAAMMALRITGRNRLVIDGAVNPFHREVVRTYLANLDVELVEIGPKLGMEDDLRLRAAIDDATAAVLVQNPNFFGSVSDFRKLAADAHAAGALLVVSAYPVALGLIESPGAMGADVVVGDGQSLGNPLSFGGPSFGFIASRKEYIRNLPGRIIGETVDKKGQRGFVLTLQAREQHIKRHKATSNICSNQSLCALRGLIFLSSLGAQGFAELARLNYDKAEYAKKVLGSLSGVEVMNGGATFNEFTVCLPTIAEEVVTALLRKGVAAGVPLSPYYPEMERCMVVTVTEKRTREEIDTLARHLEGILCS

SEQ ID NO: 20923 - protein, 301 aa, Methanocaldococcus jannaschii
MIHDTIIIGAGPGGLTAGIYAMRGKLNALCIEKENAGGRIAEAGIVENYPGFEEIRGYELAEKFKNHAEKFKLPIIYDEVIKIETKERPFKVITKNSEYLTKTIVIATGTKPKKLGLNEDKFIGRGISYCTMCDAFFYLNKEVIVIGRDTPAIMSAINLKDIAKKVIVITDKSELKAAESIMLDKLKEANNVEIIYNAKPLEIVGEERAEGVKISVNGKEEIIKADGIFISLGHVPNTEFLKDSGIELDKKGFIKTDENCRTNIDGIYAVGDVRGGVMQVAKAVGDGCVAMANIIKYLQKL

SEQ ID NO: 20924 - protein, 416 aa, Burkholderia xenovorans LB400
MALIVHKYGGTSMGSVERIKNVARRVAKWHKAGHKMVVVPSAMSGETNRLLGLAKEITAQPSPRELDMIAATGEQVSSGLLAIALQEAGVDAVSYAGWQVPVKTDSAFTKARISEIDGERVLRDLDAGKVVVITGFQGIDPDGNITTLGRGGSDTSAVAVAAALKADECLIYTDVDGVYTTDPRVVEEARRLDRVTFEEMLEMASLGSKVLQIRSVEFAGKYQVKTRVLSSLTDPLIPLDAEMKSGTLITFEEDETMEKAVISGIAFQRDEARIAVMGVPDKPGIAYQILGPVADANIDVDMIIQNQSVDGKTAFTFTVGRGDYQRAMDILTGQVKGHVQAEQVLGDPKVSKVSVVGVGMRSHVGIASTMFRTLSEEGINIQMISTSEIKISVLIDEKYMELAVRALHKAFELDQA

SEQ ID NO: 20925 - protein, 405 aa, Erwinia carotovora subsp. atroseptica SCRI1043
MKRAVITGLGIVSSIGNNQQEVLASLREGRSGITFSQELKDSGMRSHVWGNVKLDTTGLIDRKVVRFMSDASIYAYLSMEQAIKDSGLSDEVYQNNPRVGLIAGSGGSARYQVFGADAMRSPRGLKAVGPYVVTKSMGSAVSACLATPFKIHGVNYSISSACATSAHCIGNAVEQIQMGKQDIVFAGGAEELCWELSCEFDAMGALSTKYNETPEKASRTYDTGRDGFVIAGGGGMVVVEELEHALARGAHIYAEVVGYGATSDGADMVAPSGEGAVRCMRMAMNGVDTPIDYLNSHGTSTPVGDVKELGAIREVFGDNSPAISATKAMTGHSLGAAGVQEAIYSLLMLEHSFVAPSINIENLDEQAAGLNIVTEPMERKLTTVMSNSFGFGGTNATLVMRKLDK

SEQ ID NO: 20926 - protein, 263 aa, Mycobacterium avium subsp. paratuberculosis K-10
MTDSTDRTFETILVEREERVGIITLNRPKALNALNTQVMNEVTAAATDFDADPGIGAIIITGSAKAFAAGADIKEMAELTFADAYGADFFAPWGKLAAVRTPTIAAVAGHALGGGCELAMMCDVLIAADTAKFGQPEIKLGVLPGMGGSQRLTRAIGKAKAMDLILTGRTIDAAEAERSGLVSRVVPADDLLTEAKKVATTISQMSRSAARMAKEAVNRAFETTLAEGLLYERRLFHSTFATADQTEGMAAFVEKRAPNFTHR

SEQ ID NO: 20927 - protein, 447 aa, Prosthecochloris aestuarii DSM 271
MDSDIFELFILLCLILANGFFSMAEFAIISSRETKLHELHEAGVSRAGLVLELLDNPGKFLSAIQVGITLIATLAGAFSGITLSAPIAEMIERADALKPYSNELALGLVVIGVTYFTLIIGELAPKKIALQHPEKIALSVAKIIDIICRVIAPIVHLINGSTNIVLKIMGIKPTEKPTVSDEEVMLLLKQGAKKGVFESVEYDMVSRIFRMSDKRANSMMTPKSEIEWLDLYATEEELISKMQASGRSRFPVSEGSLDNLKGVVRSLDLVNKQLLSQGNLKDAIRNAMKAPLFVPESIPAFQVLELFKENRAHLALVVDEQGSVQGGITITDVLESIVGDIPADDIEGNRKIVRRSQRTWIIDGLLPVDDFIQEFHLENFLDEDNPLYDTMGGFMMTKLEKVPSVMDILEWQGILFKVIKMNKQRVDKILAVFNNDAHDKASKYDTK

SEQ ID NO: 20928 - protein, 373 aa, Desulfitobacterium hafniense Y51
MEPIKGEQRDGQSEIRKLAILTGGGDCPGLNAVIRAAVKTACHRGIAVVGIQDGFRGAVEGDFRPLELKDVSGILPRGGTILGTTNRDNPFAYPTQVGEERQVQDRSAEVMDRFKAEGIDALIAIGGDGSLSIAWEFAKQGLKVVGVPKTIDNDLMCTDLTFGFQTAVATAQDALDRLHTTAESHHRIMILEVMGRYAGWIALYAGVAGGADVILIPEIPYQLESIAEAVQRRARLGKHFSIIVVAEGAKPLGGDMVVERTMSGRTDPIKLGGIGAKLAADLEKVTDMETRVTVLGHLQRGGSPIAVDRVLSTRYGVAAVEAALAGDFGMMVALQGQDIVRVPMAEAVHKLKQVEPDDPVLNAARSMGIEFGD

SEQ ID NO: 20929 - protein, 587 aa, Cryptococcus neoformans var. neoformans JEC21
MLSADQRQRAPFAHKSSCANLTATQPSALRSPFPPQSHWPTPPSAEGHQLQLTSDRSKWAQYPSPRKISNETCQAGFSDHPYAFGGIGATYSLDTPTSRRHSLPSLFNPNTHRRAFTFPSMSLPNPATVRFISLCFLWYACSAISNNTGKVILNHFKYPVTLTIVQFFFVAFYCAISSQKMLGWTGRLRQPTKNILKGTLPLAAFQVGGHIFGSMAISRVPVSTVHTIKALSPLFTVMAYALLFGVSYSPATYLSLLPLTLGVMLACSFDISFSNIFGLVCALGSTIVFVSQNIFFKKIMPTTSTNEVNSSSKLDKINLLYFSSSMAFILMIPLWIYSDARRLIDLWINPAASESGTSVLFYFFLNGTVHFAQSIIAFALLASTSPVTYSIASLVKRIAVICLAIIWFKQPVHTVQALGIVLTGAGLWMYNNAKRDVDRGEIKMRHVEALREGVLPSTKMDQCILEGSGIELSYKSAHNSPKPTYPNNYIDLPSSTTTAVNKTTFQVPPILDHTSHIEAPYPSPPASISSSTPADITYLGISKGRQHWLSGEGERFRPPVLNSIRSSVMEEARETGVNEGMAAVVTT

SEQ ID NO: 20930 - protein, 82 aa, Arabidopsis thaliana
MASSRLSSADVVTSPAQATMVAPFTGLKSSAAFPVTRKTNRDITSIAGNGGRVTCMNVWPSVGQKKFETLSHVPDLSDGRIG

SEQ ID NO: 20931 - protein, 554 aa, Ralstonia metallidurans CH34
MSQAIEIKVPDIGDYDAVPVIEVHVKPGDTINAEDALVTLESDKATMDVPSPQAGTVKEVRIKVGDSVSEGSVLVMLEPAGAAAAAPAPAAAAAPAAPAPAAAAPAPAAPAAPAPAAAPAGGGTVEVKVPDIGDYDAVPVIEIHVKVGDQINAEDALVTLESDKATMDVPSPQAGTVKEIKVKVGDNVAQGTLILILEAAGGAAAAAPAPAAAPAPAAAAPAPAPAAAAPAPVAAPAVAPAVQGTTGKAAHASPTVRKFARELGVDVSRVPGTAPKGRITQEDVQNYVKSVMSGQTATPSAPAAAAGTGVGLDLLPWPKVDFTRFGEVESKPLSRIKKISGANLHRNWVMIPHVTNCDEADITELEAFRVQLNKENEKAGIKVTMLAFMIKATVAALKKFPNFNASLDGDNLVLKKYFNIGFAADTPNGLVVPVIKDADKKGVLEISQEMSDLAKLARDGKLKPDQMQGGCFSISSLGGLGGTYFTPIINAPEVAIMGVCKSYMKPVWDGKQFAPRLTLPLSLSWDHRVIDGAEAARFNTYFAALLADFRRILL

SEQ ID NO: 20932 - protein, 292 aa, Erythrobacter sp. NAP1
MAQAFETRERLCKAHGWAEGEVELVPVVASGDKVLDRPLAEIGGKALWTKELDAWLAEGKIDVAVHSAKDVETIRPDAFRFAAFLPRADRRDALVGAASIADIPRGATVGTSAPRRASQLLNLRPDCKVVTFRGNVATRLGKLEAGEADVTFLAAAGLERLGQSEVGAPLETGDWIPAAAQGVIALECRADDDEAGELLAAIDHAATRAELEAERALLAKLGGTCHSPVAVLCSGDAGELTMRAALFSPDGSERVDGEASFSAGDHAPVHALAADLLHRATPAIAEHFGGEG

SEQ ID NO: 20933 - protein, 372 aa, Clostridium propionicum
MLEFDIPLSSMAQIKVIGVGGGGNNAVDRMIEDGLDGVDFISINTDGQALSKARSSTKTQIGEKLTKGLGAGGNPEIGEKSVDETQDEIAQALHGSDMVFITAGMGGGTGTGAAPRIAAISKELGILTVGVVTKPFNFEGKKRMSNAEKGIMELKKNVDTLVIIPNQRLLSIIDKKTTLTEAFKKADEILRQGVQGIADLISKPGVINLDFADVRTVMANKGIAHMGIGRASGENKAEIAAKMAIQSPLLETTIEGAKSVLINFSGDMNLGLMETEEAADLIREAIDPDAEIIFGTTINEDLNNEVVVTVIATGLDGEMPTIVEVKKPEIVAAEEQAKDEKADEEVRPRRFSDLDDFESEIKIPDFLTRKKF

SEQ ID NO: 20934 - protein, 282 aa, Glycine max
MASSLSTIALFLPQSLYIKPRLAPRPLPPPQFRSLFLTSPAGARTATVMPRRAAVIVSAATAETPKKKGESKGFVEEMRFVAMRLHTRDQAREGEKEVKQPEEKAVTKWDPSVEGYLKFLVDSKLVYDTLEKIVQEAPHPSYAEFRNTGLERSASLAEDLEWFKEQGYTIPEPSSPGLTYAQYLKELSVKDPQAFICHFYNIYFAHSAGGRMIGKKVAEKLLNNKALEFYKWDDDLPRLLQNVRDKLNKVAEPWSREEKDHCLEETEKSFKLSGEILRLILS

SEQ ID NO: 20935 - protein, 435 aa, Dehalococcoides sp. CBDB1
MKADYLIVGCSAGGIGAAEAIREVDRDGSIVIVGEEPYLAYSRPMIAKYLSGQKTVEKILFRRPEFYANNNITCLTDTKVEAVNTATHEVSLSNGEKISYGKLLLAPGGKPIVPPIDGSNKAGVFNFINMKDAVLIDGYVKAENVKKAVIIGGGLIGMSAADALTKLGIEVDIIELKGHILNTILDEAAGKIAAQTVTSYGVKLNTGRTVSKVLGLHKVAGVELDNGHQIESQMLVIAIGVIPRTELFKAAGLEVNRGVVVNDNMRTSNPDVYACGDACESFDFIYNSRRVTPIWPNAYIGGRIAGYNMAGMDTTYHGGTVMNSLNYFGMDIATAGMSVLPPDASGLEVLSTLTANGYKKLVLNAEGKIVGMLTLGETDTAGIIFGLMRDRSDVRPIKDNILNENFGLAYLSADSREEHLHGNTSGRVAPADFKH

SEQ ID NO: 20936 - protein, 468 aa, Bradyrhizobium sp. BTAi1
MSDETKPTLSKSLTGLHLWGIAVGLVISGEYFGWSYGWDKAGTLGFLVTTIFIAVMYTTFIFSFTELTTAIPHAGGPFAYSYRAFGPLGGFVAGFATLIEFVFAPPAIALAIGAYLNVQFPALSPKAAALGAYVVFMALNIAGVSIAATFELFVTILAIAELLVFMGVVSPGFSFANFAANGWAGESTFSLTSIGGIIAAIPFAIWFFLAIEGAAMAAEETKNPTKTVPLAYIAGILTLVVLAFGTMIMAGGVGDWSKLANINDPLPQAMKIVVGENSGWLHMLVWIGLFGLIASFHGIIMGYSRQIFALSRAGFLPAKLAALHPTCRTPHWAILAGGVVGIAAIFSDELIQFAGQTLTANIVTMSVFGALVMYIMSMAALFRLRATEPNLVRPFKAPLYPVLPAVALVCATLSLLTMVWFNLQVFAAFVVLFAAGLLLYRLTAGKRTNAANDNLLDIALNEARAMAD

SEQ ID NO: 20937 - protein, 491 aa, Malus x domestica
MTSILMGYDIGVMSGASIYIEKDLKVTDTQIEIMIGVIEIYSLIGSAMAGKTSDWVGRRYTIVISGAIFFIGAILMGFSTNYTFLMCGRFVAGIGVGYALTIAPVYSAEVSPTSSRGFLTSFPEVFVNIGILLGYLSNYAFSFCPLDLGWRLMLGVGAIPSVGLAVGVLAMPESPRWLVMQGRLGEAKRVLDRTSDSKEESMLRLADIKEAAGIPEECNDDIVQVSGHSHGEGVWKELLVHPTPTVRHILIAAIGFHFFQQASGIDALVLYSPRVFAKAGITSTNQLLLCTVGVGLSKTVFTLVATFFLDRVGRRPLLLTSMAGMVGALVCLGTSLTIVDQHEGVRMTWAVILCLCCVLAYVGFFSSGIGPIAWVYSSEIFPLRLRAQGCGMGVAVNRLMSGILSMTFISLYKAITMGGTFFLYAAIGTVGWIFFFTMLPETQGRTLEDMEVLFGKFHKWRKANKLLEKKKRVAHGDIGTSDPDNRAHLLA

SEQ ID NO: 20938 - protein, 298 aa, Prochlorococcus marinus str. MIT 9312
MSLKLDGKKLSLEIEERLNDYIFINKKIAKRAPGLAVIRIGEDPASGVYVNNKEKACSRVGIKSFIFHLKDNVEQKEVEQLINKLNFDKNIDGMLLQLPIPKKFDEQRLISYINPSKDVDGLNEINIGKLVKNEPAMRSCTPAGIINLLRSQNITIEGKKIVVIGRSLLVGKPLSLMLLNLNGTVTMTHSKTLDLNKVCKEADILIAAAGKPNLIDSSFVKEGAVIIDVGIHRLKSSDKNKTRLCGDVLLEDVIPKVLAYTPVPGGVGPMTVTMLLVNTIFSWQKQFGLSSTLNDLLP

SEQ ID NO: 20939 - protein, 494 aa, Burkholderia sp. 383
MKSESEHPGLAAALAWCRSGAKQHFIDGKWVPAASGRTMETLNPATADVLAHIAEGDKADVDLAVAAARRAFESSGWRGMSPHARTAVLLRLADAIEQHADELAALETLDNGMPAWFSAAVVKMTVDTFRYYAGWPTKILGTTVPTDPSAFIYTLREPIGVCGQINPWNVPLLLAGVKFGPALACGNTIVAKPSELASLTCLRLVEIFHEAGLPPGVMNVVTGYGQTVGAAISEHPGIDKVAFTGSTAIGKQILLASAGNLKRVTLELGGKSPHIVFPDADLDKALAAAVNGFTRNSGQICSSGTRLFVHRSIHDEFANEVAKLAARLKVGNPFDADTKLGPLISSKQRDRVMSYVAAGNDEGATLLTGGRQACDAGYYVEPTVFSGVSNAMRIAQEEIFGPVVCVIPFDTEEDVIAQGNDSTYGLAGGIWTRDIGRAHRIAAALKGGRIWINTFGETDPVMPFGGYKQSGLGREFGAESIQTYTEAKSVMLRY

SEQ ID NO: 20940 - protein, 269 aa, Kirkomyces cordense
HTFYNELRVAPEEHPVLLTEAPLNPKSNREKMTQIMFETFNAPAFYVAIQAVLSLYASGRTTGIVLDSGDGVTHTVPIYEGYALPHAILRLDMAGRDLTDYLMRILAERGHSFTTTAEREIVRDIKEKLCYVALDFEQEMQTAAQSSAFEKSYELPDGQVITDGNERFRAPEALFQPALLGLESAGIHETTYNSIMKCDVDIRKDLYSNIVMSGGTTMYPGIADRMQKEITALAPSSMKIKIVAPPERKYSVWIGGSILASLSTFQQMW

SEQ ID NO: 20941 - protein, 1209 aa, Oryza sativa
MSKVIATTLLLSVISHGAYPAMGSAWEEEDFARNCPPSWCSDSGPEIRFPHQLESSNSSSSSSCSASCARLACSGPDTILHHPFLGPCKVTAIDYKKAVFQIIPLVDSLSSYPLQKLIIDNLPEPDYHSSRCSLYNAQPGKIVCCSKVLTPSMSPTNDYDGNIADHAVVGPISCLSDPSHFSYLVDAYEDIYSLPLDCKAVSKGIVPISGAVTADGPTFKQLAERILNFAETTVSWSEGGIPDNCSRVKVIAEVHLKVEMFLRTYGTSKPTRYTFSEVKKIARCFKEKVGQGGFGTVYKGKLPNGVPVAVKMLENPTGDGEEFINEVATIGTIHHTNIVRLLGFCSEGTRRALVYELMPNESLEKYIFLRDPNTQELLSPDKMLDIALGIARGMEYLHQGCNQRILHFDIKPHNILLDYNFSPKISDFGLAKLCPRDQSIITLTKARGTMGYIAPELYSRNFGEISYKSDVYSFGMVVLEMVSGRRSWDPSIENQNEVYFPEWIYEKVITEQDFILSREMTEEEKQMVRQLALVALWCIQWNPRNRPSMTKAVNMITGRLQNIQSQGSHAQWRWEPGSRVDFGAGTGGAAAVCWSAAAARRSPPVRDQQHQLGDRHRPALHQDCTIVTCNFWADSTNYAAGATLNITNRCSFTVWPAAVPVGGGMRLDPGESWALDVPANSGAGRVWARTGCSFDANGNGSCQTGDCGGVLKCKNSGKPPQTLAEFTVDQTSVQDFFDISLTDGFNVPMDFLPVPAPEQRHGAPPCSKGPRCPANITSQCPSELKAPGGCNSACNVFKQDKYCCTGTTGTKTCEPTTFSLPFVRMCPDAYSYSLDDSSSTTFTCPSGTNYQIIFCPPTDLTSSSPVPPPAPIAIGPSGLDSSSKRGGRLVATIVVSVIGSTSVLTIIIASIIIIKRRIRRHQEMQEEEQEFEELPLQGMPRRFTFQQLQEATDQFRDKLGQGGFGSVFLGQIGGERVAVKRLDQSGQGMREFMAEVQTIGSIHHINLVRLIGFCAEKSQRLLVYEHMPKGSLDRWLYHQQGSPAPALDWWTRYKIITQVAKGLSYLHEECMMRIAHLDVKPQNILLDDNFNAKLSDFGLCKLIDRDKSQVITRMRGTPGYLAPEWLTSQITEKADVYSFGIVVMEMISGRKNLDTSRPQMSEVVKVLEGTTSIETDIDHDFVATNPVSFGVAGIVDSDPPVASNLSGPR

SEQ ID NO: 20942 - protein, 175 aa, Secale cereale
  misc_feature (168)..(168): Xaa can be any naturally occurring amino acid
MAPAVMASSATTVAPFQGLKSTAGLPVGRRSGSAGLSSVSNGGRIRCMQVWPIEGIKKFETLSYLPPLSTEALLKQVDYLIRSKWVPCLEFSKVGFVFREHNNSPGYYDGRYWTMWKLPMFGCTDATQVLNEVEEVKKEYPDAYVRVIGFDNMRQVQCVSFIAFRPPXCEESGKA

SEQ ID NO: 20943 - protein, 711 aa, Salinibacter ruber DSM 13855
MASGSSDLQKTLTLYDVYSISTGAMFSSGFFLLPGIAAAETGPSVILAYLVAGLLILPSMYSMAELSTAMPKAGGTYYFLDRALGPLAGTVGGLGTWLALVFKSAFALIGMGAYLAIYADVPIKPLAAALTLAFGVLNVVGAKESSLLQRVLVTILVGVLGFYAAQGVLSVWGGQSAVGGAAGEFTPFFTEGARGFLATIGIVFVSYAGLTKVASVAEEVKNPDRNIPLGMGLSLLTATGIYVVGVAIMVAILPATDLHADLTPVYTSGEVFFNWLPYTLGPILIVVAAVAAFASTGNAGIMSASRYPLAMARDRLLPDGFARIGRFNTPTRSIVVTVALMLVIIFVLSEEGVAKLASAFQLLIFALLNFAVIVMRESEIPSYAPGYRSPLYPWVQVAGIAIPFFLISEMGTLAIVFTGVVVLVGVGWYFYYASDVPREGAIFHLFARLGKQRYDGLDRELQTILEEKGVGHDTAFDRLVAESDVIHLDEPVPYADVVEDVSGRLAEELGLSTETLEHGFLEGAPYSAVSVSHGAALPYCRLDGISESKMVMVHCQSGICVDLEDEIEELDRSEPVYAFFFLVSPKDDEGEHLRTLATLANRTDEEQFLVEWRAAADEQEVKESLLHHERYLTLNLLSGTNTDEFIGQTVTDLNLPAGVLVALVRRDGQITVPSGATRLEEGDRVTIIGNPAGIDRLYELYRAGEQEGVVQ

SEQ ID NO: 20944 - protein, 200 aa, Oryza sativa
MAVATMALSSSFAAAAAGSAPWRGVVAAGRAAVGFPPRRRAAALVVRAQAEPEVEPTKEEAATSSSPTPTPSPAAAAPRAKPAASTGLWDVLAFSGPAPERINGRLAMVGFVSALAVEASRGGGLLEQAGSGGGLAWFAATAPVLSAASLVPLLRGESAEARSGGVMSADAELWNGRFAMLGLVALAFTEFLTGSPLVNV

SEQ ID NO: 20945 - protein, 175 aa, Secale cereale
MAPTVMASSATSVAPFQGLKSTAGLPVSRRSNGASLGSVSNGGRIRCMQVWPIEGIKKFETLSYLPPLTTEALLKQVDYLIRSKWVPCLEFSKVGFIFREHNASPGYYDGRYWTMWKLPMFGCTDATQVINEVEEVKKEYPDAYVRIIGFDNMRQVQCVSFIAFKPPGCEESGKA

SEQ ID NO: 20946 - protein, 455 aa, Salinibacter ruber DSM 13855
MEIPSVERLTSARIPTVDGEFSLSLYENSKDDKDHLALACGDVADGEDVLVRVHSECFTGDVLGSLRCDCGEQLDASMRRIAKNGRGILLYLRQEGRGIGLLSKLRAYNLQDDGYDTVEANRILGHGADERDYAIAARILDDLGVSSARLLTNNPQKIESLAEHGVEITERISLEPHVNRHNAEYLRTKVNRMRHILDLGPANGHAQGNAHGTSLRDLKQRIDRYFAEKGRPFVTLTYAQSLDGSIASTSGTPLPISSEQALRFTHQLRALHDGILVGIGTVLADDPRLTVRHNDGTHPVPIVLDSSLRFPSDAQLLAGDGPDPLIVTSPNADPDRKERLEAHGGTVIELSCGPEGGICVKTLLRTLGERDFSSVMVEGGTSILTSFLRRQCAQRVIVTVAPMFVGGTAALSSLAPEDQDTHARSDFPRLDNIQQRWYGEDLVLEGDPVWPVASE

SEQ ID NO: 20947 - protein, 259 aa, Helianthus annuus
ANYRGDKQYGRETRHTGDYENPIHSTGGQYEQEVLQTDEYGNPVRRTGQTDEYGNPVRRTDEYGNPAHSTTGGTMGDYGSTGLGQGTGTGGIGTGGYGTTGHHGLGTGVGHTTGGTGTDYTSGGRSTGQTGYQGLGTESEFGGKTGTFQNQPSATPVGGVGLSSGTGAGVGGTGTGTGILHRSGSSSSSSSEDGGQGGRRKKKGVMQKIKEKLPGGHRQEEQYQSQTTTTTTGGGAGYGETHEKKGMMEKIKEKLPGHH

SEQ ID NO: 20948 - protein, 502 aa, Bdellovibrio bacteriovorus HD100
MRLRISARKSDLARLQAYMVGDALKEKNPQIEIDYRFRESLGDKNLTDPLWKIPEKGVFTEDFFGELLRDETDLVVHSWKDLPTEHKSETVIAATLPRADQRDLLLVKKSHFDKIKTSKTLKVFSSSPRREYNLTGFFKEHLPFGLQDVKFESVRGNMLTRVRKLIESPETDGLIVAKAAFDRLFSATLPEFLEGQQQLRQYFNELNWVVLPLSVNPNAAAQGALAVEVLKSRQDLQDLLQSIHHADTFHCSQKERDVLSSFGGGCHQKIGVAVLARPYGQITLLKGLTDAGQVLDKRELKLNNPAPQFAAQDLWSSEVTAEREALKSYQIPAGTNGLFVARSEAWPADLKWSDFVWTAGLKTWKNLSQKGIWVHGCAESLGEQEEALMDILAGKKLAWAKLSHEDGYASDQENMTLVPTYTLKAQQEYQNLSGKKFYFWSSGSQFLKAAEQEPGILSQHHASGPGNTHKVIRSYLEENKNYDPKRLHVFLDQEDWRKQCTK

SEQ ID NO: 20949 - protein, 259 aa, Helianthus annuus
ANYRGDKQYGRETRHTGDYESPIHSTGGQYEQEVLQTDEYGNPVRRTGQTDEYGNPVRRTDEYGNPVHSTTGGTMGDYGSTGLGQGTGTGGIGTGGYGTTGHHGLGTGVGHTTGGTGTDYTSGGRSTGQTGYQGLGTESEFGGRTGTFQNQPSATPVGGVGLSSGTGAGVGGTGTGTGILHRSGSSSSSSSEDDGQGGRRKKKGVMQKIKEKLPGGHRQEEQYQSQTTTTTTGGGAGYGETHEKKGMMEKIKEKLPGHH

SEQ ID NO: 20950 - protein, 367 aa, Silicibacter pomeroyi DSS-3
MSNPSLLILPGDGIGPEVMAEVRKIIGWFGDKRGLNFDVSEDLVGGAAYDVHGVPLADETMAKAQEADAVLLGAVGGPKYDDLDFSVKPERGLLRLRKEMDLFSNLRPAQCFDALADFSSLKKDIVAGLDIMIVRELTSGVYFGEPRGIFEEGNERVGINTQRYTESEIERVARSAFELAMRRSKKLCSMEKANVMESGILWREVVTRVAKDYPEVELSHMYADNGAMQLVRAPKQFDVILTDNLFGDILSDCAAMLTGSLGMLPSASLGAPMANGRPKALYEPVHGSAPDIAGQGKANPIACILSFAMALRYSFDQGAEADRLEAAVEQVLADGVRTADLLGTEGVTPVSTTEMGAAILAKLDASL

SEQ ID NO: 20951 - protein, 354 aa, Triticum aestivum
MDGNKGPAGVTGASGFVGSWLVLELLQAGYTVRATVRDPANVEKNKPLLELPGAKERLSIWKADLSDEGSFDDAIVGCTGVFHVATPMDFDSKDPENEVIKPTVEGMLSIMRACKEAGTVKRIVFTSSAGSVNIEERQRPAYDQDNWSDIDFCRRVKMTGWMYFVSKSLAEKAAMEYASENGLDFISIIPTLVVSPFLSADMPPSLVTALALITGNEAHYSILKQVQLVHLDDLCDAMTFLFEHPEANGRYICSSHDATIHGLARMLRDRIPEYSIPHKFAGVDDDLQPIHFSSKKLLDHGFSFRYTAEDMFDAAIRTCREKGLIPLGDAPAPAAAGKLGALAAGKGQAIGTET

SEQ ID NO: 20952 - protein, 229 aa, Wolbachia endosymbiont of Brugia malayi
  misc_feature (212)..(212): Xaa can be any naturally occurring amino acid
  misc_feature (221)..(221): Xaa can be any naturally occurring amino acid
  misc_feature (223)..(224): Xaa can be any naturally occurring amino acid
  misc_feature (229)..(229): Xaa can be any naturally occurring amino acid
MEHIKDSHMLFITAGMGGGTGTGAAPVIAKATREARAGVKDKASKEKKILTVGVVTKPFGFEGVRRMRIAELGLEELQKYVDTLIVIPNQNLFRVANEKTTFSDAFKLADNVLHIGIRGVTDLMVMPGLINLDFADIETVMSEMGKAMIGTGEAEGEDRAISAAEAAISNPLLDNVSMKGAQGILINITGGGDMTLFEVDAAANRVREEIDXNANIIFGCXLXXTMEGX

SEQ ID NO: 20953 - protein, 146 aa, Magnetospirillum magnetotacticum MS-1
MEYLHTMVRVADLDRALAFYVDTFGLKEVRRVENEKGRFTLVFLAAPGDVARAEAEKSPLIELTYNWDPEEYSGGRNFGHLAYQVDDIYAFCQRLKEAGVTINRPPRDGHMAFVRSPDGISIEILQKGGAKPPQEPWASMENTGSW

SEQ ID NO: 20954 - protein, 507 aa, Oryza sativa
MAAVAGTGVFAEILEGEVYRYYADGEWRVSASGKSVAIVNPTTRLTQYRVQACTQEEVNKVMETAKVAQKAWARTPLWKRAELLHKAAAILKEHKTPIAECLVKEIAKPAKDAISEVVRSGDLVSYTAEEGVRILGEGKLLVSDSFPGNERNKYCLSSKVPLGVVLAIPPFNYPVNLAVSKIGPALIAGNALVLKPPTQGAVAALHMVHCFHLAGFPKGLINCVTGKGSEIGDFLTMHPGVNCISFTGGDTGIAISKKAGMVPLQMELGGKDACVVLEDADLDLVAANIVKGGFSYSGQKCTAVKVVLIMESVADIVVEKVKAKLAKLTVGPPEADSDITPVVTESSANFIEGLVMDAKEKGATFCKEKGATFCQEYRREGNLIWPLLLDHVRPDMRIAWEEPFGPVLPVIRINSVEEGIHHCNASNFGLQGCVFTKDINKAIMISDAMETGTVQINSAPARGPDHFPFQGLKDSGIGSQGITNSINMMTKVKSTVINLPSPSYTMG

SEQ ID NO: 20955 - protein, 377 aa, Sorghum bicolor
MADAEDIQPLVCDNGTGMVKAGFAGDDAPRAVFPSIVGRPRHTGVMVGMGQKDAYVGDEAQSKRGILTLKYPIEHGIVSNWDDMEKIWHHTFYNELRVAPEEHPVLLTEAPLNPKANREKMTQIMFETFNTPAMYVAIQAVLSLYASGRTTGIVLDSGDGVSHTVPIYEGYALPHAILRLDLAGRDLTDYLMKILTERGYSFTTTAEREIVRDMKEKLAYIALDYDQEMETAKTSSSVEKSYELPDGQVITIAADRFRCPEVLFQPSFIGMEAAGIHETTYNSIMKCDVDIRKDLYGNIVLSGGTTMFPGIADRMRQGNHCLAPSSMKIKVVAPPERKYSVWIGGSILASLSTFQQMWIAKAEYDESGPSIVHRKCF

SEQ ID NO: 20956 - protein, 1065 aa, Bacillus cereus ATCC 10987
MDKKVSAIPQPKTYGPLGNLPLIDKDKPTLSFIKIAEEYGPIFQIQTLSDTIIVISGHELVAEVCDETRFDKSIEGALAKVRAFAGDGLFTSETQEPNWKKAHNILMPTFSQRAMKDYHAMMVDIAVQLVQKWARLNPNENVDVPEDMTRLTLDTIGLCGFNYRFNSFYRETPHPFITSMTRALDEAMHQLQRLDIEDKLMWRTKRQFQHDIQSMFSLVDNIIAERKSSGNQEENDLLSRMLHVQDPETGEKLDDENIRFQIITFLIAGHETTSGLLSFAIYFLLKNPDKLKKAYEEVDRVLTDPTPTYQQVMKLKYIRMILNESLRLWPTAPAFSLYAKEDTVIGGKYPIKKGEDRISVLIPQLHRDKDAWGDNVEEFQPERFEDLDKVPHHAYKPFGNGQRACIGMQFALHEATLVMGMLLQHFEFIDYEDYQLDVKQTLTLKPGDFKIRIVPRNQNISHTTVLAPTEEKLKNHEIKQQVQKTPSIIGADNLSLLVLYGSDTGVAEGIARELADTASLEGVQTEVAALNDRIGSLPKEGAVLIVTSSYNGKPPSNAGQFVQWLEELKPDELKGVQYAVFGCGDHNWASTYQRIPRYIDEQMAQKGATRFSTRGEADASGDFEEQLEQWKESMWSDAMKAFGLELNKNMEKERSTLSLQFVSRLGGSPLARTYEAVYASILENRELQSSSSERSTRHIEISLPEGATYKEGDHLGVLPINSEKNVNRILKRFGLNGKDQVILSASGRSVNHIPLDSPVRLYDLLSYSVEVQEAATRAQIREMVTFTACPPHKKELESLLEDGVYHEQILKKRISMLDLLEKYEACEIRFERFLELLPALKPRYYSISSSPLIAQDRLSITVGVVNAPAWSGEGTYEGVASNYLAQRHNKDEIICFIRTPQSNFQLPENPETPIIMVGPGTGIAPFRGFLQARRVQKQKGMNLGEAHLYFGCRHPEKDYLYRTELENDERDGLISLHTAFSRLEGHPKTYVQHVIKEDRMNLISLLDNGAHLYICGDGSKMAPDVEDTLCQAYQEIHEVSEQEARNWLDRLQDEGRYGKDVWAGI

SEQ ID NO: 20957 - protein, 462 aa, Polaromonas sp. JS666
MSHFCPGYPKPREKRSSVWALFRSARNSWIDALYARSYSMQMGEVHLPGVDLYMVNDPALVRRMLSGQPDQFPKSPLLADALRPLLGDSILTTNGDQWQRQREMMNPAFAQAKLDVAFPVMRAAADDLVERLTEAAQRGSELNIEVELTHVTADIIYRTIFSEPLSGDDAHKVFDAFARFQALAPKLMLPSMYGVRWLVWPWNVWQSRRAASDIRRLLEKLIRSRHEAWLRGDDLGKNDILSALMTSRDRKTGEPFSFDELVDQVAVLFLAGHETSASALTWAVYLLSAVPEVQERVHQETCRVFGQRTPEQRDMKALVLTRNVFRETLRLFPPVGFMARESAQTCPMRDKMVPKGASVMISPWLIHRHRERWSDPDAFNPDRFDDDASRESIRQSYLPFGMGPRVCLGAAFALQEATLILASLIRAFRLETVTGHTPMPVGRLTIRSDNGVRLRIFKREDQ

SEQ ID NO: 20958 - protein, 464 aa, Desulfitobacterium hafniense Y51
MRCCMLTVEKIGGTSMSQFEDVLKNIIGEPDSQRFSFGRVFVVSAYAGVTNKLLEDKKTKAPGIYRHFVNGEDCEEALNVLLQDLLKVNERFVNIGLDYEAAKEFLGSRIQQTKSYLHSMHEIIASGYVDRENIFSAARELLASLGEAHSAFNSVNILQNRGIPARLVDLTGLRDSSQLTIDERIAKAFRGVDPFKEIVIVTGYTKGKEGIMRQFERGYSEITFSRIATHLHAEEAIIHKEFHLSSADPKIVGVEKAIPVGRTNYDVADQLADIGMEAIHPNASKPLEMAGINLRLKNTFEPDHPGTLISKDYIGPVAKIEIIAGSDKVVVVEIHDSLMVGEAGYDKQIMEMFMNYSVSYIMKATNANSISLVIWEHDLNEALMAELKGAYQTVTILPAAIVCVIGSNIAVPNILARATSSLAKNHINVNCVSQSLRQVNMQFVIDRDKYTSAIYHLNEDLCVG

SEQ ID NO: 20959 - protein, 216 aa, Wolbachia endosymbiont of Brugia pahangi
MEHIKDSHMLFITAGMGGGTGTGAAPVIAKATREARAGVKDKASKEKKILTVGVVTKPFGFEGVRRMRIAELGLEELQKYVDTLIVIPNQNLFRVANEKTTFSDAFKLADNVLHIGIRGVTDLMVMPGLINLDFADIETVMSEMGKAMIGTGEAEGEDRAISAAEAAISNPLLDNVSVKGAQGILINITGGGDMTLFEVDAAANRVREEVDEKCKI

SEQ ID NO: 20960 - protein, 540 aa, Burkholderia xenovorans LB400
MTQNSLPSWSSLQTHYEKIRDAHMRDWFAPENDPAPTRAERFAFAGGGLAADFSKNRITDETLKLLVQLAREAGVEKRRDAMFAGAVVNPTEGRAALHTALRATDPKAPFYDQVQAERARMAAFADQVRSGEWKGYTGKRIRYVVNIGIGGSDLGPKMVVHALHHLATPEITTHFVSNVDGADLYNVMQQIDPEETLAIIVSKTFTTLETMTNARSLRDWFVEKGCPESALAKHFVGVSANPAEVVKFGIAKENVFEMWDWVGGRYSLWSAVGLSIMIAVGPQQFGELLAGANEMDQHFRDAPLEKNLPVLLGMIGIWYRNFFGSQSYLVAPYSEALHFLPSYLQQLEMESNGKSARLDGVMVDYPTAAVTWGEPGTNGQHAFFQMLHQGPTIVPIDFIAVLTPEHPLVSHHPKLLANCFAQSEALMLGRTLEEAKKVAGADKPELAPHLVFPGNRPTSTLLVDALTARSLGALIALYEHKVLVQASVWDINPFDQWGVELGKILGKVVEADLTAPSVDEKKHDSSTSALIARARAALKK

SEQ ID NO: 20961 - protein, 337 aa, Vitis vinifera
MGSQSETVCVTGASGFIGSWLVMRLLERRLTVRATVRDPTNVKKVKHLLDLPKAETHLTLWKADLADEGSFDEAIKGCTGVFHVATPMDFESKDPENEVIKPTIEGMLGIMKSCAAAKTVRRLVFTSSAGTVNIQEHQLPVYDESCWSDMEFCRAKKMTAWMYFVSKTLAEQAAWKYAKENNIDFITIIPTLVVGPFIMSSMPPSLITALSPITGNEAHYSIIRQGQFVHLDDLCNAHIYLFENPKAEGRYICSSHDCIILDLAKMLREKYPEYNIPTEFKGVDENLKSVCFSSKKLTDLGFEFKYSLEDMFTGAVDTCRAKGLLRPSHEKPVDGKT

SEQ ID NO: 20962 - protein, 130 aa, Zea mays
  misc_feature (46)..(46): Xaa can be any naturally occurring amino acid
  misc_feature (51)..(52): Xaa can be any naturally occurring amino acid
  misc_feature (57)..(57): Xaa can be any naturally occurring amino acid
  misc_feature (60)..(60): Xaa can be any naturally occurring amino acid
  misc_feature (72)..(72): Xaa can be any naturally occurring amino acid
  misc_feature (110)..(110): Xaa can be any naturally occurring amino acid
  misc_feature (117)..(117): Xaa can be any naturally occurring amino acid
AVGFVLQKWVAPPSQLVAGVAGLLLLLAGGAGTATAAVSCGEVTSXVAPCXXYAMGXARXPSAACCSGVGWXKSRASSTADREATCNCLKSMTGRLGGGVRMANAANIPXKCGVSVXVPISPTVDCTKIN

SEQ ID NO: 20963 - protein, 282 aa, Haemophilus somnus 2336
MPAQIISGTELSKNIKFNVAEKIQHYLQQGKRAPGLAVILVGADPASQVYVGSKRRSCEELGIYSKSYDLPAETTEQELLTLIEQLNQDPQIDGILVQLPLPEKINSTKVIEHISPTKDVDGFHPYNVGRLCQRIPTLRACTPLGIMKLLETTGVDLYGQHAVIIGASNIVGRPMALELLLAGCTVTVTHRFTKDLKSHVHQADILVVAVGKPHIIPGEWIKEGAIVIDVGINRVDGKLVGDVQYDEASKKASFITPVPGGVGPMTVAMLMFNTLLAYESHS

SEQ ID NO: 20964 - protein, 418 aa, Xanthomonas axonopodis pv. citri str. 306
MTTGNLLYAQSGGVTAVINATAAGVIAEARARKIKVLAARNGILGALREELIDTSKESAAAIAALAQTPGGAFGSCRYKLKSLEEDSAKYERLLDVLRAHDVRWFLYNGGNDSADTAWKVSQLAKAYGYPLHCIGVPKTIDNDLAATDTCPGFGSAAKYTVVSVREAALDVAAMADTSTKVFIYEAMGRHAGWLAAAAGLAGQGPDDAPQIILLPERAYDQAAFLAKVKQVVEKVGWCVVVASEGIQDAHGKFVADAGGAADSFGHAQLGGVASFLAAQVKQELGYKVHWTLPDYLQRSARHLASKTDWEQAQAVGKAAVQYAIKGMNAVIPVIERVSDAPYRWKIVPAPLHKVANHEKKMPPSFLRKDGFGITERARRYFAPLIKGEAALAYGSDGLPKYVSLKNVAVAKKLPAWEG

SEQ ID NO: 20965 - protein, 365 aa, Photobacterium leiognathi
MTLSSAQEIINDIRLGKMVILMDDENRENEGDLIIAADMITPEAINFMATYGRGLICLTLTKDRCQTLNLPLMVQNNHDKFSTAFTVSIEAAADVTTGISAYDRAKTVQAAIGPNASADDIVMPGHIFPLMAQDGGVLIRAGHTEAGCDVARLAGLEASSVIVEILNEDGTMARRPQLEVFAQKHGLKLGTIADLIEYRTQRESHIERLSESELCTEYGVFNLITYRDTIDNQLHYALCKGDINPDSETLVRVHVKDTLKDILHTGATQWSLQAAMQRIQADGGILVIISQIEPSAMILNQINHLDSEHQASLPLPITPQSRQIGLGSQILSELGLCKIRLLSSQSQQYRSLSGFDLEVVEYICN

SEQ ID NO: 20966 - protein, 663 aa, Arabidopsis thaliana
MISLTPSLFLNKTVVPGCSTRLSLRQPRTIITPPASLRVFSSLGSNQDPTGSVLIETTATSSSSLETSAADIVPKSTVSGGVQDVYGEDAATEDMPITPWSLSVASGYTLLRDPHHNKGLAFSHRERDAHYLRGLLPPTVISQDLQVKKIMHTLRQYQVPLQKYMAMMDLQETNERLFYKLLIDHVEELLPVIYTPTVGEACQKYGSIFLRPQGLFISLKENEDTIFNNRGKIHEVLRNWPEKNIQGMGIPVGKLSLYTALGGVRPSACLPVTIDVGTNNEKLLNDEFYIGLRQRRATGEVIGTFHLSVRRSCENYGETEPLILFFLQEYSELMHEFMTAVKQNYGEKVVIQFEDFANHNAFDLLAKYGTTHLVFNDDIQGTASVVLAGLIAALRFVGGSLSDHRFLFLGAGEAGTGIAELIALEISKKSHIPLEEARKNIWLVDSKGLIVSSRKESIQHFKKPWAHDHEPIRELVDAVKAIKPTVLIGTSGVGQTFTQDVVETMAKLNEKPIILSLSNPTSQSECTAEEAYTWSQGRAIFASGSPFAPVEYEGKTFVPGQANNAYIFPGFGLGLIMSGTIRVHDDMLLAASEALAEELMEEHYEKGMIYPPFRNIRKISARIAAKVAAKAYELGLATRLPQPKELEQCAESSMYSPSYRSYR

SEQ ID NO: 20967 - protein, 112 aa, Xanthomonas axonopodis pv. citri str. 306
MKMIMAIVKPFKLDDVREALAGCGVAGITVTEVKGFGRQKGHTELYRGAEYVVDFLPKVKIEVAVTDDQAERVVEAIVGAAGTGKIGDGKVFVYDLGTVVRIRTGELDSDAL

SEQ ID NO: 20968 - protein, 269 aa, Mucor amphibiorum
HTFYNELRVAPEEHPVLLTEAPLNPKSNREKMTQIMFETFNAPAFYVAIQAVLSLYASGRTTGIVLDSGDGVTHTVPIYEGYALPHAILRLDMAGRDLTDYLMRILAERGHSFTTTAEREIVRDIKEKLCYVALDFEQEMQTAAQSSALEKSYELPDGVVITIGNERFRAPEALFQPALLGLESAGIHETTYNSIMKCDVDIRKDLYSNIVMSGGTTMYPGIADRMQKEITALAPSSMEIKIVAPPERKYSVWIGGSILASLSTFQQMW

SEQ ID NO: 20969 - protein, 385 aa, Brassica rapa
MVAHKETVCVTGASGFIGSWLVMRLLERGYFVRATVRDPGNLKKVQHLLDLPNAKTQLTLWKADLSDEGSYDDAINGCDGVFHIATPMDFESKDPENEVIKPTVNGVLGITKACDKAKTVRRIVFTSSAGTVNVEEHQKNVYDENDWSDLDFIMSKKMTGWMYFMSKTLAEKAAWDYAKEKGIDFISIIPTLVIGPFITTSMPPSLITALSPITRNEAHYSIIRQGQYVHLDDLCNAHIFLYEQAAAKGRYVCSSHDATILTISEFLRQKYPEYNVPSTFEGVDENLKSIMFSSKKLIDMGFNFKYSLEDMLVESIETCRQKGFLPVTLPEHLKSEDKVPGSDDNKEIKNGSAGLTDGMVACKKTEPGMAGEKADSHMSAQQICA

SEQ ID NO: 20970 - protein, 394 aa, Salinibacter ruber DSM 13855
MESGDTVGVVLLNLGGPDGEESVEPFLYNLFMDPAIIDFSEVVYFQARGRVRQAFSKIISYFRSQSVAEDYKEISDDGGSPINPLTRDQADNLEQTLNEQYAAETGATFKTYMAMRYWEPFSEDAAAQMQEDGVDKVVLLPLYPQYSKTTTGASLVYWHELEKAGEIPAWPTTSVFEYATYPKYIEALSDRIDEGLERFPDDVRDDVHLLFSAHGTPLSEMKDRDDPYCCLVHSTVKHLMEHRGFDHDFSTAFQSKVGPSEWLTPATDDTVEELAEEGEDVLVIPVAFVTDHIETSYELAIEIPEDLEEEGAPIPEHYEVMPGLNSHPKFIETLADMTAAQLQLPNVQTPTPASERPCCQVQDRDIRCHQCQHVAEATDWSAPEEEQARELETA

SEQ ID NO: 20971 - protein, 335 aa, Bdellovibrio bacteriovorus HD100
MGKKGLLLINIGSPKSYQVNDVKKYLSEFLMDEDVITLPYVLRWPLVNLLIVPRRAPFSAENYKKVWMKEGSPIAVYTRRFAALLQEELKDQFVVKVGLQYSEPSVESALKDLQQAGVDEILVAPMFPQYAEATNGSSFKLAERMAKKLHLTAPLRRLPAFFDDASFVGTSVKLVEETLQDKEVDHYLFSFHGLPESHVRKIPGCLTTEDCCFEKNACAKNCYRAQCFATATAIAESLNLAPSHWSVAFQSRLGRAEWLKPATDHSLEVLAKTGKKNIAVICPSFVADCIETLEEIGIGGQETFHEHGGDQYYLVPCVNDNPKWVQGFADLVKSI

SEQ ID NO: 20972 - protein, 269 aa, Mucor circinelloides f. lusitanicus
HTFYNELRVAPEEHPVLLTEAPLNPKSNREKMTQIMFETFNAPAFYVAIQAVLSLYASGRTTGIVLDSGDGVTHTVPIYEGYALPHAILRLDMAGRDLTDYLMRILAERGHSFTTTAEREIVRDIKEKLCYVLLDFQQEMQTAAQSSALEKSYELPDGQVITVGNERFRAPEALFQPALLGLESAGIHETTYNSIMKCDVDIRKDLYSNIVMSGGTTMYPGIADRMQKEITALAPSSMKIKIVAPPERKYSVWIGGSILASLSTFQQMW

SEQ ID NO: 20973 - protein, 527 aa, Salinibacter ruber DSM 13855
MAFLYSDLQHRHPKRRPTCVASSVRRSFFTGPQRPDDMADAVTPRDEDYSQWYQDVVRNGQLAENSPARGCMIIKPNGMALWENMRDQLDQMFKDTGHQNYYFPLFIPERYMEREAEHVEGFAKECAVVTHSRLTQDEEGDLVPDPESELGENYIVRPTSETIIWDTYSKWIQSYRDLPLLYNQWANVVRWEMRPRLFLRTAEFLWQEGHTAHATETEAVEEAERMLDVYTTFAEEYMAMPVLQGRKTESERFPGAVDTYCIEAMMQDGKALQAGTSHFLGQNFAKAFDCTFTNEDNEEEYVWATSWGVSTRLIGGLIMTHSDDQGLVLPPKLAPHQVVIVPLFFDDDQEGPVMETCERLQERLEDHGIRVKMDQNHTQSPGWRFSEHELRGVPLRLAIGPRDLENDNVEMARRDTQEKEVVPQDGIAERVSDTLDDIQHALHERAQDRQADNTRVVEDYDAFREVIGRGGFAWAHWDGTPETEARIQEETSATIRLIPFDREDHEEGEDMLTGEPSEGRVLFAQAY

SEQ ID NO: 20974 - protein, 591 aa, Oryza sativa
MAPATAISCAVVKCGGGGGPRQPRVSAPPRQQGHAAAAASLEQLLLLPRWSPPSSPLSFARPAAERVAARRARAAAVAMKVVEDATPPAAGAVLLAGAQSRHAIFRDELVRRAFYAAEAAHRGQMRASGDPYLQHCVETAALLAELGAGPAVVAAGLLHDTVDDAGLGYGSLSVQFGAGVADLVKGVSNLSHLSKLARRNDTASRVDEADKLRTVFLAMEDARAVLIKLADRLHNMRTLDSLPKVKQQCFAKETLEIFAPLANQLGILNWKEQLENLCFKYLYPELYEELSSNLLEFYNQDMIAAAIRRLEQALQVRGLCYHTISGRNKSMYSIYSKMARKKLDMDEIYDIHGVRVILDNKADCFTTLEIVHHLWPRIPGKFKDYINSPKPNGYQSLHTVVLSEETLPLEIQIRTRDMHLQAEFGIAAHWRYKEAVRNCCSSVPEMVEWVRWVVTWQCETLHIDHPSSLTHGAPPRAICSCSSQSDDCPFSYSKRCAYSGPILVILLENEKMSVQEFPQNSTVLDLLKRTSSYDMQLRLRLNCHVVHNLNQELKMGDVVELIPLAQCNPGAGGYAREFHQMYDHRLTVSQS

SEQ ID NO: 20975 - protein, 269 aa, Mucor hiemalis f. hiemalis
HTFYNELRVAPEEHPVLLTEAPLNPKSNREKMTQIMFETFNAPAFYVAIQAVLSLYASGRTTGIVLDSGDGVTHTVPIYEGYSLPHAILRLDMAGRDLTDYLMRILAERGHSFTTTAEREIVRDIKEKLCYVALDFEQEMQTAAQSSALEKSYELPDGQVITVGNERFRAPEALFQPALLGLESAGIHETTYNSIMKCDVDIRKDLYSNIVMSGGTTMYPGIADRMQKEITALAPSYMKIKIVAPPERKYSVWIGGSILASLSTFQQMW

SEQ ID NO: 20976 - protein, 101 aa, Sorghum bicolor
VLAATTSEAAISCGQVSSAIAPCLSYARGQGSAPSAGCCSGVRSLNSAARTTADAAACNCLKNAARGISGLNAGNAASIPSKCGVSVPYTISTSTDCSRVN

SEQ ID NO: 20977 - protein, 581 aa, Triticum aestivum
  misc_feature (212)..(212): Xaa can be any naturally occurring amino acid
MGAPKWVVAPLALLLLLQLAGASHDVRRSLEAEAATPSVPASILSPLLRTGYHFQPPMNWINDPNGPLYYKGWYHLFYQYNPKGAVWGNIIWAHSVSRDLINWMALDPAIKPSIPTDQYGVWSGSATILPNGTVAMLYTGIDRPGTNYQIQNIAFPKDPSDPLLREWVKPGYNPIAVPEAGINATQFRDPTTAWHAGDGLWRMLVGGAQARXLRGMAILYRSRDFKHWVRAKHPLHSALTGMWECPDFFPVREPGKTDGLDTSEFGPRYKYVLKNSLDLTRYDYYTVGTYNNRTERYVPDNPTGDVYQRLQYDYGNFYASKTFYDPAKNRRVLLGWANESDSVAHDNAKGWAGIHAIPRKIWLDPSGKQLLQWPVEELDQLRGKAVSVGDKLVKPGQHFEVTGLQSYQSDVEVSFEVSSLDKAEPFDPAYANDAQKLCGMKNADVKGGVGPFGLWVLASDNLAEKTAVFFRVFKDGHGKPLVLMCSDPTKSSLTPGLYKPTFAGFVDTDISSGKISLRSLIDRSVVESFGAGGKTCILSRVYPSMAIGKDAHLYVFNNGVTDIKVSKLTAWEMKKPMMNGA

SEQ ID NO: 20978 - protein, 809 aa, Nocardioides sp. JS614
MRRAHRNAVGPFVVDADALPQSIEVVRTRAAGLGIDVVVADLTDGLPADVLEGGLCGVLVQYPGASGRVLDPRRVIEQAHEQDALAVVAADLLALTLLESPGELGADVVVGSSQRFGVPLFYGGPHAGFMSVAAGLERHLPGRLVGVSVDAEGRPAYRLALQTREQHIRRDKATSNICTAQVLLAVVASMYAVYHGPEGLRAIATRAHRYAAVLAAALGQGGFPVRHESYFDTLVVQATGRAAAVVAAARALGVQLRLVDADHVGISTSECTTRSTVASVLKAFGLATGPADGSVDLDAVDAATGDALPEALRRTTPYLTHEVFTSYHSETAMLRYLRRLSARDYALDRGMIPLGSCTMKLNATTEMEPISLPGFADLHPFAPAEDAQGYRQLVTELEGWLAEVTGYDSVSIQPNAGSQGELAGLLAIRGYHRANGDEARNVVLIPSSAHGTNAASAVLAGMRVVVVKSGPGGEVDLDDLRAQCAAHADDLAAIMVTYPSTHGAYEETITELCEIVHAHGGQVYVDGANLNALLGYAKPGEFGGDVSHLNLHKTFCIPHGGGGPGVGPVAVRAHLAPYLPSHGMHPDETKRTGIGPVSAAPYGSAGILPISWAYIRLMGAAGLTRATAAAVLSANYVAARLGEHYPVLYRGHGGLVAHECILDLRGLTKESGVTVDDVAKRLIDYGFHAPTMSFPVAGTLMVEPTESEDLGEIDRFIDAMIAIRGEIDRVGAGEWTPEDSPLRGAPHTSRALVGEWDRPYSRELAVFPTGLTGPNGVADKYWPPVARIDQAYGDRHLVCSCPPVEAFAE

SEQ ID NO: 20979 - protein, 409 aa, Lactococcus lactis subsp. lactis Il1403
MTNRVVISGYGVVSAIGNSPEEFWNNLKAGKTGIGPITHFDAEATGISVAAEVKEFPFDKYFQKKDARRMDTFSLYAVYAALDAMEMSGITEENTNFDRLGCIMASGIGGLEQSQKNSQAIVAKGPRKGVAPLYVPLAIANMATGNVALRTGARGVSRAEVTACAAGANSIGSAFREIKHGYADAMIAGGAEAAICELGIAGFANLTALTKETDPEKACIPFDKNRSGFVMGEGSGVLILESLEHAQARGANILAEIVGYGNTNDAFHMTTPSGVGAENAIKLALEEAGASPADVDYVNAHGTSTHANEETESKAIHNVIGDKAYVSSTKALHGHALGATGAIEAVATVQALLNQYAPVNAGTTELDEGMTINVVLGEGKPADINLALSQDFGFGGHNAVLAFKKWTGE

SEQ ID NO: 20980 - protein, 208 aa, Ralstonia metallidurans CH34
MSRQRTLESVQRTALAGALTLAAAVAVMLPPPAHAAEKAVPAAAQPAGNCPASLNFRFPRLQDESPQNLCQYAGKVVLVVNTASYCGFTPQYEGLEALYAKYRERGLVVLGFPSNDFSQEPGSSKDIADFCYNTYGVKFPMLGKSHVRGSDANPMYALLAQETGTAPKWNFYKYLIDRKGQVIGSYNSMVKPDDKQFVSKIEELLNAR

SEQ ID NO: 20981 - protein, 139 aa, Brassica napus
  misc_feature (128)..(128): Xaa can be any naturally occurring amino acid
MTDAHTARTIVGIIGNVISFGLFCSPIPTMIKIWKMKSVSEFKPDPYLATVLNCMMWSFYGLPFVHPDSLLVVTINGTGLFMELVYVTIFFIFATSAIRRKITIAMVVEMIFMAVVIFCTLYFLHTTXQRSMLIGIMCI

SEQ ID NO: 20982 - protein, 490 aa, Schizosaccharomyces pombe
FTPSSGFMNDPNGLVYTGGVYHMFFQYSPKTLTAGEVHWGHTVSKDLIHWENYPIAIYPDEHENGVLSLPFSGSAVVDVHNSSGLFSNDTIPEERIVLYWTGVPERLAIAYTTNGGYTFKKYSGNPVLDINSLQFRDPKVIWDFDANRWVMMVALSQNYGIAFYPSYDLIHWTELSVFSTSGYLGLQYECPGMARVPVEGTDEYKWVLFISINPGAPLGGSVVQYFVGDWNGTNFVPDDGQTRFVDLGKDFYASALYHSSSANADVIGVGWASNWQYTNQAPTQVFRSAMTVARKFTLRDVPQNPMTNLTSLIQTPLNVSLLRDETLFTAPVINSSSSLSGSPITLPSNTAFEFNVTLSINYTEGCTTGYCLGRIIIDSDDPYRLQSISVDVDFAASTLVINRAKAQMGWFNSLFTPSFANDIYIYGNVTLYGIVDNGLLELYVNNGEKTYTNDFFFLQGATPGQISFAAFQGVSFNNVTVTPLKTIWNC

SEQ ID NO: 20983 - protein, 299 aa, Arabidopsis thaliana
MASSSDHTAKIIDGKAIAHTIRSEIAEEVRGLSEKHGKVPGLAVVIVGSRKDSQTYVNTKRKACAEVGIKSFDVGLPEEVSEADLISKVHELNSNPDVHGILVQLPLPKHINEEHILGAISIDKDVDGFHPLNIGKLAMKGREPLFLPCTPKGCLELLARSGVKIKGQRAVVVGRSNIVGLPVSLLLLKADATVTTVHSHTKDPEAIIREADIVIAACGQAHMIKGNWIKPGAAVIDVGTNAVSDPSKKSGYRLVGDVDFAEASKVAGFITPVPGGVGPMTVAMLLRNTVDGAKRVFGE

SEQ ID NO: 20984 - protein, 394 aa, Zea mays
MQAAAASVKSSTTAAAAAATCKAGFKPLHLPPLPAAGSRPLSLSVSARPLYRQDHVLATTVAMAAAGRSDRAASPAPPSATADGARPVVEVAAPAETARRAKIGVYFATWWALNVIFNIYNKKVLNAFPYPWLTSTLSLAAGSAIMLASWATRIAEAPQTDLDFWKALTPVAIAHTIGHVAATVSMAKVAVSFTHIIKSGEPAFSVLVSRFFLGEHFPAPVYFSLLPIIGGCALAAVTELNFNMVGFMGAMISNLAFVVRTIFSKKGMKGKSVSGMNYYACLSIMSLVILLPFAVAMEGPKLWAAGWQQAVAEIGPNFVWWVAAQSVFYHLYNQVSYMSLDEISPLTFSIGNTMKRISVIVASIIIFQTPVQPINALGAAIAILGTFIYSQAKQ

SEQ ID NO: 20985 - protein, 149 aa, Pseudomonas syringae pv. maculicola
AETRDLLVSLAGEVGLKEAIKAQYDGELVNSSEGRPALHTALRRPVGDKLKVNGVDVMPDVHRVLNQMTELVGRIHDGLWRGYTEKPITDVVNIGIGGSFLGPELVSEALVAYAHKGVRCHYLANIDGSEFHELSMKIRAETTLFIVSS

SEQ ID NO: 20986 - protein, 140 aa, Thermus thermophilus HB8
MVVTCPKCGAKNRLGTPPPGQVPVCGACKTPLPWVVEADEKGFAQEVAGAPLTLVDFFAPWCGPCRLVSPILEELARDHAGRLKVVKVNVDEHPGLAARYGVRSVPTLVLFRRGAPVATWVGASPRRVLEERLRPYLEGR

SEQ ID NO: 20987 - protein, 400 aa, Arabidopsis thaliana
MATMISNLPRDLIEEIFSRVPLTSMKAVRLTCKSWNNLSKSESFTKVHIGRAATREEKTMIVDVMPHKLNLMSIVIDDVTPSAEFKGQFSLLHKNYRINQVLHYEGLLLCIMKDPTRIVVWNPYLGQTRWIQLRYFHRPHGIDHFRYALGYADKESCSSLKFLRFLDYFYKAPEEEFFWYEIYDFDSGLWTTLNVTPHWGIYSTCPCVSLKGNTYWPAKERSTQGFQDYIIRFDFTRERFGPLLALPTDRESSFVSLSCVKEEKLAALFKHRLHHDSYEYEFEIWITTKIEVEMVSWSKFLRMDMRPKMELPLTFYIDEEKKVFMGFDHGEYPKLLFLNVVGETGFLRKFENIQYRSPCSYVPSLVQVKKLARDRLRKQRSLENRRFAQNILRLARNGKS

SEQ ID NO: 20988 - protein, 157 aa, Ashbya gossypii ATCC 10895
MAEEDHTFETAEAGASLTYPMQCSALRKNGFVVIKGRPCKIVDMSTSKTGKHGHAKVHLVAIDIFTGKKLEDLSPSTHNMEVPVVKRTEYQLLDIDDGFLSLMTMDGETKDDVRAPDGELGETMQASFDEGKDLMVTVITSMGEEAAISFKEAPRSD

SEQ ID NO: 20989 - protein, 918 aa, Salmonella typhimurium LT2
MTNYSLRARMMILILAPTVLIGLLLSIFFVVHRYNDLQRQLEDAGASIIEPLAVSSEYGMNLQNRESIGQLISVLHRRHSDIVRAISVYDDHNRLFVTSNFHLDPSQMQLPAGAPFPRRLSVDRHGDIMILRTPIISESYSPDESAIADAKNTKNMLGYVALELDLKSVRLQQYKEIFISSVMMLFCIGIALIFGWRLMRDVTGPIRNMVNTVDRIRRGQLDSRVEGFMLGELDMLKNGINSMAMSLAAYHEEMQHNIDQATSDLRETLEQMEIQNVELDLAKKRAQEAARIKSEFLANMSHELRTPLNGVIGFTRLTLKTELNPTQRDHLNTIERSANNLLAIINDVLDFSKLEAGKLILESIPFPLRNTLDEVVTLLAHSSHDKGLELTLNIKNDVPDNVIGDPLRLQQVITNLVGNAIKFTESGNIDILVEKRALSNTKVQIEVQIRDTGIGIPERDQSRLFQAFRQADASISRRHGGTGLGLVITQKLVNEMGGDISFHSQPNRGSTFWFHINLDLNPNVIIDGPSTACLAGKRLAYVEPNATAAQCTLDLLSDTPVEVVYSPTFSALPLAHYDIMILSVPVTFREPLTMQHERLAKAASMTDFLLLALPCHAQINAEKLKQGGAAACLLKPLTSTRLLPALTEYCQLNHHPEPLLMDTSKITMTVMAVDDNPANLKLIGALLEDKVQHVELCDSGHQAVDRAKQMQFDLILMDIQMPDMDGIRACELIHQLPHQQQTPVIAVTAHAMAGQKEKLLSAGMNDYLAKPIEEEKLHNLLLRYKPGANVAARLMAPEPAEFIFNPNATLDWQLALRQAAGKPDLARDMLQMLIDFLPEVRNKIEEQLVGENPNGLVDLVHKLHGSCGYSGVPRMKNLCQLIEQQLRSGVHEEELEPEFLELLDEMDNVAREAKKILG

SEQ ID NO: 20990 - protein, 149 aa, Pseudomonas syringae pv. maculicola
AETRDLLVALAGEVGLKDAIKAQYDGELVNSSEGRPALHTALRRPVGDKLKVNGVDVIPDVHRVLNQMTELVGRIHDGLWRGYTEKPITDVVNIGIGGSFLGPELVSEALVAYAHKGVRCHYLANIDGSEFHELSMKIRAETTLFIVSS

SEQ ID NO: 20991 - protein, 449 aa, Streptomyces peucetius ATCC 27952
MKDDSPAPCVADRDRIARRTASTCGPPGQRRESMATNAAFVIVGASLAGAKAAQTLREENFDGPVVLLGEESEHPYERPPLSKGYLLGKDERDTVYVHPAQWYPEHDVDLRLGATVTAIDPAGHEVTLADGSRIGYEKLLLTTGSSPRRLTVPGADLEAVHYLRRLADSDRIKESFASATRIVVIGAGWIGLETAAAARAAGVEVTVLEMAELPLLRVLGREVSQIFADLHTEHGVDLRFGVQVAEITGADGRANGVMLADGSRIDADAVIVGVGITPNTQLADAAGLEVDNGIRVDAHLRTSHPDIYAAGDVANAFHPLLGKHIRVEHWANAVNQPHVAAKAMLGQDVAYDRVPYFFTDQYDLGMEYTGYVEPGGYDQVVFRGRTDTREFIAFWLAEGRVLAGMNVNVWDVTDPIRDLVTSRRPVDAKRLADSDVPLAHLLGRPDTTA

SEQ ID NO: 20992 - protein, 64 aa, Glycine max
  misc_feature (53)..(53): Xaa can be any naturally occurring amino acid
RRGGGCCNRVKSLTAAAKTAVDRQTACTCLISCDNLICGCNAYNSGLMTVQCXVSIPYKISTST

SEQ ID NO: 20993 - protein, 424 aa, Bartonella quintana str. Toulouse
MGVDISRLSNGLTIATHTMQQIDSVALGIWVKVGSRNETFSQHGIAHLLEHMAFKGTENRTAFQIATDIEDVGGEINATTSTETTAYFARVLKNDIPLAIDILADILMYSKFDEDELEREKQVVFQEIGAARDIPDDIVFDHFTETAFRHQSLGRSILGTPKTVQSFTSADLHSFMDKQYSADRMIVVAAGAVEHENFLQEVESHFRTFRPHSIAPLTNLANYVGGDFREYRDLMDTQVVLGFEGRAYHARDFYAAQILSIILGGGMSSRLFQEVREKRGLCYSIYAFHWGFSDTGLFGVHAATGQEGLKELLPVILDELSKASKNIHANELQRARAQYRASLTMSQENPSSQANLIARQMLLYGRPIPLSETIERLELITPARLTDLAHRLFINSTPTLAAVGPVGSLMNFDDLTSTLSPNIK

SEQ ID NO: 20994 - protein, 490 aa, Photorhabdus luminescens subsp. laumondii TTO1
MTNNVNTELLRQQAYINGQWVDADNQATFKVTNPANGEVIAHVSNMGAAETERAIAAAQQALPAWRTMTAKQRSQILQRWFQLMMANQPALAELLSREQGKSQTEAMGEIAYGASFIEWFAEEGKRTYGETIPSPLPGRRIVTIKQPIGVVAAITPWNFPNAMITRKVGPALAAGCTVILKPASETPLSALALAALAEQAGIPAGVFNVVTGIDAKAIGGAMTQSPIVRKLSFTGSTRVGKLLMAQSADTVKKLSLELGGNAPFIVFDDANIDAAVQGALIAKFRNSGQTCVCANRILVQETIYDTFAERLAQAVNQLQVGPASDAKSQQGPLINQAAVDKVEEHISDAISHGARILAGGKPHALGGLFFEPTVLADVNKSMLISQEETFGPIAPLFKFRDEAEAIHLANETEFGLAAYFYSRDIGRIYRVAEALESGMVGINEGLISNEAAPFGGIKQSGLGREGSRYGIEDYLEVKYLCFGGIEDTGV

SEQ ID NO: 20995 - protein, 951 aa, Pseudomonas putida KT2440
MTINLGTANEFIARHIGPRAADEQAMLTALGFDSLDAMTAAVIPDSIKGTSVLGSHDGQSEADALAALKAIAGKNQLFKSYIGQGYYNTHTPAPILRNLLENPAWYTAYTPYQPEISQGRLEALLNFQTLISDLTGLPIANASLLDEATAAAEAMTFCKRLSKNKSSHAFFASVHCHPQTLDVLRTRAEPLGIEVVVGDERELGDVSAFFGALLQYPASNGEVFDYREVVQRFHAANALVAVAADLLALTLLTPPGEFDADVAIGSAQRFGVPLGFGGPHAAYFATRDAFKRDMPGRLVGVSIDRFGKTALRLAMQTREQHIRREKATSNICTAQVLLANIASMFAVYHGPAGLKRIAERTHALTAILAAGLKALGVQVVGASAFDTLTLATGTATASLHDKARAQGINLRQIDAAHVGLSLDETSTQADVESLWQLLGGEQAQPDFTALAASTGSLLPAALLRQSAILEHPVFNRYHSETELMRYLRRLADKDLALDRSMIPLGSCTMKLNAASEMIPVTWAEFGNLHPFAPAEQSQGYLQMTTELEAMLCAATGYDAVSLQPNAGSQGEYAGLLAIRAYHRSRGEGHRDICLIPSSAHGTNPATAHMAGMRVVVTACDARGNVDVEDLRAKAIEHRERLAAIMITYPSTHGVFEEAIGEICAIIHDNGGQVYIDGANMNAMVGLCAPGKFGGDVSHLNLHKTFCIPHGGGGPGVGPIGVKSHLAPFLPGHAQLENTQGAVCAAPFGSASILPITWMYIRMMGGAGLKRASQMAILNANYIARRLEEHYPVLYTGGNGLVAHECILDLRPLKDTSGISVDDVAKRLIDFGFHAPTMSFPVAGTLMIEPTESESKEELDRFCNAMIQIREEIRAVEDGSLDKDDNPLKNAPHTAAELVGEWTHGYSREQAVYPLASLVEGKYWPPVGRVDNVFGDRNLVCACPSIESYQDA

SEQ ID NO: 20996 - protein, 481 aa, Malus x domestica
MTSILLGYDIGVMSGASLFIKENLKISDVQVEIMNGTLNLYSLIGSALAGRTSDWIGRRYTIVLAGTIFFIGALLMGFAPNYAFLMFGRFVAGVGVGYALMIAPVYTAEISPASFRGFLTSFPEVFVNIGILLGYVSNYAFSKLPIHLNWRIMLGVGAFPSVILAVGVLAMPESPRWLVMQGRLGDAKRVLQKTSESIEECQLRLDDIKEAAGIPKESNDDVVQVSKRSHGEGVWKELLLHPTPAVRHILIAALGIHFFEQSSGIDSVVLYSPRIFEKAGITSYDHKLLATVAVGVVKTICILVATVFLDKFGRRPLLLTSVAGMVFSLSCLGASLTIVDQQHGKIMWAIVLCITMVLLNVAFFSIGLGPITWVYSSEIFPLQLRAQGCSMGVAVNRVTSGVISMTFISLYKAITIGGAFFLYAGIAAVGWVFFYMLYPETQGRTLEDMEVLFGKYHKWREANALLQKAKQVDGDDKGQVH

SEQ ID NO: 20997 - protein, 261 aa, Brassica napus
RSTHASEGAKVRPDTTTFNIVIYCLSKLGQTSQALDVFNSMREKKRAECRPDVVTFTSVMHLYSVRGEVESCRAVFEAMVAEGLKPNIVSYNALMGAYAVHGMSENALSVFQEIKRNGMVPDVVSYTCLLNSYGRSGQPGKAREVFLMMRKERRKPNVVTYNALIDAYGSNGLLPEAVGVFRQMEQDGVKPNVVSVSTLLAACSRSGKKVNVETVLSAAETRGIKLNTAAYNSAIGSFITVLSLRGCCGVSTMSRKKVKLI

SEQ ID NO: 20998 - protein, 570 aa, Oryza sativa
MAERLTRIAIVSEDKCKPKKCRQECKKSCPVVKTGKLCIEVTPASKLAFISEELCIGCGICVKKCPFDAIEIINLPKDLEKDTTHRYGPNTFKLHRLPVPRPGQVLGLVGTNGIGKSTALKVLAGKLKPNLGRFKNPPDWQEILTYFRGCELQNYFTRILEDNLKAIIKPQYVDHIPKAVQGNVGQVLDQKDERGVKAELCVDLELNQVIDRNVGDLSGGELQRFAIAVVAVQNAEIFMFDEPSSYLDVKQRLKAAQVVRSLLRPNSYVIVVEHDLSVLDYLSDFICCLYGKPGAYGVVTLPFSVREGINIFLAGFVPTENLRFRDESLTFKIAETQESAEEIETYQRYKYPTMSKTQGNFKLTVVEGEFTDSQIVVMLGENGTGKTTFIRMLAGLLKPDTVEGTEIEIPEFNVSYKPQKISPKFQHSVRHLLHQKIRDSYTHPQFVSDVMKPLQIEQLMDQEVINLSGGELQRVAICLCLGKPADIYLIDEPSAYLDSEQRIVASKVIKRFILHAKKTAFIVEHDFIMATYLADKVIVYEGRPSIDCTANAPQSLVSGMNKFLSVSSEY

SEQ ID NO: 20999 - protein, 917 aa, Pseudomonas putida KT2440
MLDRLGIRSRVLLLALLPAGLMALVLGSYFTWLQQNDLRTQLLQRGKMIAEQLAPLAAPAMARLAPAQLERIAAQTLEQADVRAVAFLAPDRTRLAHAGPSMLNLPPSGGTGTQLLQRSGNDATRYLMPVFGHHRDLATDAVPAEAERLLGWVEIELSHDGTLLRGYRNLFTSLLLILACLALSGLLALRMSRTINDPIERIKHAVNQLKDGHLEERLPTMGSHELDELAHGINRMAETLQNAHEELQHSIDQATEDVRQNLETIEIQNIELDMARKEALEASRIKSEFLANMSHEIRTPLNGILGFTHLLQKSEMTPRQLDYLNTIEKSADNLLGIINEILDFSKIEAGKLVLDSIPFNLRDLIQDTLTILAPAAHAKQLELLSLIYRDTPASLVGDPLRLKQILTNLVSNAIKFTREGTIVVRAMLEDEHEDCAQLRISVQDTGIGLSPQDVRTLFQAFSQADNSLARQPGGTGLGLVISKRLIEQMGGEIGVDSTPGEGSQFWISLNLPKAHDDAEALPPQPLLGRRAAIVDGHELARQALEHQLEDCGLSVSLFASYDQLLQGVQAASQAGLPFEFAVLGANLGNLSPEQLGHYHQQLERYHCQCVVLCPTTEQALYHPYLPNGHGQLLSKPTCTRKLRRLLLELVQPRRPLAEGSNPNGQRRPKILCVDDNAANLLLVKTLLEDLGAEVLAVNNGYAAVQAVQEELFDLVLMDVQMPGMDGRACTEQIRLWENTQSGNPLPIVALTAHAMANEKRALLHSGMDDYLTKPISERQLAQVVMKWTGLSLGTPQQAQAELLTNGDELKVLDPEEGLRLAAGKADLAADMLSMLLASLDTDREAIRAARAADDRNGLIEQVHRLNGASRYCGVPQLRAACQRSETLLKQDNPQAQQALDELDSAISRLAAQARLSA

SEQ ID NO: 21000 - protein, 488 aa, Photorhabdus luminescens subsp. laumondii TTO1
MTVISHWINGKNISSKTYFETTNPATGEVLAEVASGGQEEVDQAVAAAKAAFPKWADLPMKERARLMRRLGELIDENVPEIAAMETKDTGLPIHQTQNVLIPRASHNFNFFAEICQQMNGRTYPVDDKMLNYTLVQPVGVCALISPWNVPFMTATWKVAPCLALGNTAVLKMSELSPLTANRLGELALEAGIPAGVLNVVQGYGATAGDALVKHHDVRAVSFTGGTATGRQIMKNAGLKKYSMELGGKSPVLIFEDADIERALDAALFTIFSINGERCTAGSRIFIQQSIYPEFIKRFAERANRLRVGDPQDPTTQIGALISKPHWEKVSGYIRLGIEEGATLLAGGPDKPIDLPAHLKDGHFLRPTVLADVDNRMRVAQEEIFGPVACLLPFKDEAEGLRLANDVEYGLASYLWTQDVSKVLRLARNIEAGMVFVNTQNVRDLRQPFGGVKASGTGREGGEYSFEVFAEMKNVCISMGDHPIPRWGV

SEQ ID NO: 21001 - protein, 152 aa, Zea mays
LQEIRDLLDQVNACDPYRVAVTVESALFERIGRSTGTHKVKYRSILFNLKADNNPDFRRRVLLGEVRPGSLVDMPADEMASDARKLENQQIKEKALFDCERASAPKASTDQFKCGRCGQRKTTYYQLQTRSADEPMTTFVTCVNCNNHWKFC

SEQ ID NO: 21002 - protein, 269 aa, Mucor indicus
HTFYNELRVAPEEHPVLLTEAPLNPKSNREKMTQIMFETFNAPAFYVAIQAVLSLYASGRTTGIVLDSGDGVTHTVPIYEGYALPHAILRLDMAGRDLTDYLMRILAERGHSFTTTAEREIVRDVKEKLCYVGLDFEQEMQTAAQSSALEKSYELPDGHVITIGNERFRAPEALFQPSLLGLESAGIHETTYNSIMKCDLDIRKDLYSNIVMSGGTTMYPGIADRMQKEITALAPSSMKIKIVAPPERKYSVWIGGSILASLSTFQQMW

SEQ ID NO: 21003 - protein, 203 aa, Oryza sativa
MRHKLHTFFCSMFAEPLFFSLAQSRDSYSDMLEGGNFSNQETLYEVLSVRKDATYDEIRAAYKSAVLNTHPDKAQMALNPLVSSSERNEFLSVQKAWEILRYPKSRAEYDKQLQSSRQNLEIVATEIEIDDMIVESTADSVELLYPCRCGDYFSITSRELGQIGISVREDGEMELHTSDSVPSSVVLGCGSCSLKARLVTNKT

SEQ ID NO: 21004 - protein, 441 aa, Xylella fastidiosa Ann-1
MMPRSLTHPSDVPAMSSHYKSSSHMAKETLLYAQSGGVTAVINATAAAVITEARSHRIKVLAARNGILGALREDLIDTSKESITAIRALTHTPGGAFGSCRFKLKSLEADHDKYERLLEVFKAHNVRWFLYNGGNDSADTALKVSQLAKTFDYPLHCIGVPKTIDNDLAITDASPGFGSAAKYTAVSICEAARDVAAMAETSTKVFIYEAMGRHAGWLAAAAGLAGQGQEEAPHIILLPERTYDETAFLAKVQQVVDRVGWCVVVASEGIRSNDGRFVADAGGTTDAFGHTQLGGVAAYLASRVKQALGLKVHWTLPDYLQRSARHIASKTDWEQAQAVGKAAVHYALEGMNAVMPVIVRTSDTPYRWKIEPAALTKIANHEKTLPASFLRRDGFGISERARTYFEPLIRGEAPMPYERNGLPRHVHLKNQSVQKRLPAWE

SEQ ID NO: 21005 - protein, 79 aa, Triticum aestivum
  misc_feature (48)..(48): Xaa can be any naturally occurring amino acid
RIKHEEERHEASWKEPEGWVFSATTRTDVAARLGELRDQILAGCASFXDLAAQHSGCSSARRGGDLVCMVEPIDLQKIA

SEQ ID NO: 21006 - protein, 269 aa, Mucor ramosissimus
HTFYNELRVAPEEHPVLLTEAPLNPKSNREKMTQIMFETLNAPAFYVSIQAVLSLYASGRTTGIVLDSGDGVTHTVPIYEGYSLPHAILRLDMAGRDLTDYLMRILAERGHSFTTTAEREIVRDIKEKLCYVALDFEQEMQTAAQSSALEKSYELPDGQVITVGNERFRAPEALFQPTLLGLESAGIHETTYNSIMKCDVDIRKDLYSNIVMSGGTTMYPGIADRMQKEITALAPSSMKIKIVAPPERKYSVWIGGSILASLSTFQQMW

SEQ ID NO: 21007 - protein, 372 aa, Thiomicrospira crunogena XCL-2
MQLNTIEELIEDYKQGKMIILMDDEDRENEGDLMMPASAVTADQINYMARYGRGLICLTLTKERCQQLHLPLMTRNNQDSLGTSFTVSIEAAEGVTTGISAADRAKTIQAAIQPEAQPADIVTPGHVFPIMAKPGGVLERAGHTEAGCDLARLAGLEPASVIVEIMNEDGTMARRDDLEIFAKEHGIKLGTVADLIEYRLKNEKTIERVSECHMPTEYGDFRLIGYEDVLEHRTHLALVHGPLKKDHPTMVRVHMLDTLCDLFDSQRDECGWSLRCAMKQIAQEESGVVVVLRKHEEGAELLDKIQQFQMKDRGISQPEIQTEDDAKTYGLGAQILSDLGLTQLKVIGSAWKMSALGGFGLEIVENIDKQKE

SEQ ID NO: 21008 - protein, 354 aa, Triticum aestivum
MDGKKGPVVVTGASGFVGSWLVMKLLQAGYTVRATVRDPANVEKNKPLLELPGAKERLSIWKADLSDQGSFDDAIAGCTGVFHVATPMDFDSQDPENEVIKPTVEGMLSIMRACKEAGTVKRIVFTSSAGSVNIEERQRPAYDQDNWSDIDFCRRVKMTGWMYFVSKALAEKAAMEYASENGLDFISIIPTLVAGTFLSAGMPPSLVTALALITGNEAHYSILKQVQLVHLDDLCDAMTFLFEHPEANGRYICSSHDATIHGLATMLRDRFPEYRIPHKFPGVDDDLQPIHFSSRKLLDHGFSFRYTAEDMFDAAIRTCREKGLIPLGDAPPPAAAGKLGALAAGEGQAIGAET

SEQ ID NO: 21009 - protein, 269 aa, Mucor recurvus var. indicus
HTFYNELRVAPEEHPVLLTEAPLNPKSNREKMTQIMFETFNAPAFYVAIQAVLSLYASGRTTGIVLDSGDGVTHTVPIYEGYSLPHAILRLDMAGRDLTDYLMRILAERGHAFTTTAEREIVRDIKEKLCYVALDFEQEMQTAAQSSALEKSYELPDGQVITIGNERLCAPEALFQPSLLGLESAGIHETTYNSIMKCDVDIRKDLYSNIVMTGGTTMYPGIADRMQKEITALAPSSMKIKIVAPPERKYSGWIGGSILASLSTFQQMW

SEQ ID NO: 21010 - protein, 586 aa, Medicago sativa
MCGILAVLGCSDDSQAKRVRILELSRRLKHRGPDWSGLHQHGDNYLAHQRLAIVDPASGDQPLFNEDKSIIVTVNGEIYNHEDLRKQLPNHKFRTQCDCDVIAHLYEEYGENFVDMLDGIFSFVLLDTRDNSFIVARDAIGVTSLYIGWGLDGSVWIASELKGLNDECEHFEVFPPGHLYSSKDREFRRWYNPPWFNEAVIPTTPYDPLVLRNAFEKAVIKRLMTDVPFGVLLSGGLDSSLVAAVTARYLAGTKAAKQWGAKLHSFCVGLKGAPDLKAGREVADFLGTVHHEFQFTIQDGIDAIEDVIYHTETYDVTTIRAATPMFLMSRKIKSSGVKWVISGEGSDEIFGGYLYFHKAPNKEEFHQETCRKIKALHRYDCLRANKSTYAWGLEARVPFLDKDFIKVAMDIDPEYKMIKHEEGRIEKWILRKAFDDEENPYLPKHILYRQKEQFSDGVGYGWIDGIKDHAAKHVTDRMMLNASHIFPFNTPLTKEAYYYRMIFERFFPQNSARLTVPGGASVACSTEKAIEWDASWSSNLDPSGRAAFGVHNSAYENQVNSVAKTVEPEKIIPKMEISNLGVAIQS

SEQ ID NO: 21011 - protein, 550 aa, Pichia anomala
MIQLSPLLLLPLFSVFNSIADASTEYLRPQIHLTPDQGWMNDPNGMFYDRKDKLWHVYFQHNPDKKSIWATPVTWGHSTSKDLLTWDYHGNALEPENDDEGIFSGSVVVDRNNTSGFFNDSTDPEQRIVAIYTNNAQLQTQEIAYSLDKGYSFIKYDQNPVINVNSSQQRDPKVLWHDESNQWIMVVAKTQEFKVQIYGSPDLKKWDLKSNFTSNGYLGFQYECPGLFKLPIENPLNDTVTSKWVLLLAINPGSPLGGSINEYFIGDFDGTTFHPDDGATRFMDIGKDFYAFQSFDNTEPEDGALGLAWASNWQYANTVPTENWRSSMSLVRNYTLKYVDVNPENYGLTLIQKPVYDTKETRLNETLKTLETINEYEVNDLKLDKSSFVATDFNTERNATGVFEFDLKFTQTDLKMGYSNMTTQFGLYIHSQTVKGSQETLQLVFDTLSTTWYIDRTTQHSFQRNSPVFTERISTYVEKIDTTDQGNVYTLYGVVDRNILELYFNDGSIAMTNTFFFREGKIPTSFEVVCDSEKSFITIDELSVRELARK

SEQ ID NO: 21012 - protein, 531 aa, Coccidioides immitis RS
MLEELVTAVSPGQAVLIAFGLFATFLFILDLKIDWRIQKLGPQAPRVRTYLPLGADFIYRAMKAAGKQKDLEFWTKMTEVPKYTGPGRLSTFEVKFSCYSRSLFTIDPDNIKAVLTGQFADYGKGRRFHEEWRDFLGDSIFATDGELWSKSRQLIRPMFSRDRIVDTEIFEKHIHKLIPLLGGGANQDGSKVVDVGPLFFRFTLDAATDYLLGQSVDSLDNPKTTFAESFQYVLHRQSVIFRSGPLSPLLSRKLFHENLKKMDDFMQPFIEQVRALTPEELDHKLSKKDTFLHALARFTRDPTVLRDQLVAILLAGRDTTAATLSFCIFELSRHPAVVQRLRNEIETVCGNRKPTYSELKEMKYLNAVLNETMRLYPVVPFNVRHALVDTTLPRGGGSDGQSTIGVPADTRIVYSTMAMQRRRDLYPPPPVPGEKTLQPYFDPLLFHPERWLSGWQPKPWHFIPFNGGPRICLGQQFATIEMGYTVTRILQHYPEIIGVGAPKPGTDPKFKFDVTLSPGQRLDCVFVKKEE

SEQ ID NO: 21013 - protein, 468 aa, Corynebacterium glutamicum ATCC 13032
MNDPQRSPTLLWFRDDLRLSDNAALKWAADHGPVIGLFIDETINRSIGAAARWWREQSLNALAQDLSFYGVPLLRRTGNPLEILPKIVSEMEVKAVTWNRRYHQPLCEVDATLKKNLRDKGIEVHSHPGFLLTEPWEVSTATGTPYKVFTPFSKAAWEVARVHAYETVKNNVPVPSHLTGPEDVELPILEMEQPFWSTTLVKECAPGEKNASEKLFDFLEHLQDYPQARDSLARSATSKLSAHLRFGEISIHRVWAETAAIDSEGTELFLKELLWRDFAWHRLYALPHMDTQNVRMQFNRFGWSWDPSEKDKLNTPSTPLIPTKADQFHEDLAAWRAGKTGIPLVDAGMRELWATGSMHNRVRMVVASFLTKNLQIHWRHGEEWFWETLVDADPASNAFNWQWAAGSGDDASPYFRIFNPVTQAKKFDPDETYIRRWVPEYGTPSYPDPIVDLKESRQIALDAYSAIK

SEQ ID NO: 21014 - protein, 457 aa, Synechococcus elongatus PCC 7942
MDPVVLLTSVSALTQTQKPCRGRRNARDRIPTCSQETLEGKALALRVAVVGGGPAGSCAAETLVKAGIETYLIERKLDNAKPCGGAIPLCMVSEFDLPAEIIDRRVRNMKMISPSNREVNINLDNADEYIGMTRREVLDGFLRDRAAKLGTKLINGTLFRLELPKGDRDPYVLHYADHSNGSLEGIPSTLEVDVVIGADGANSRIAKAIDAGDYNYAIAFQERIRLPEDKMHYYENLAEMYVGGDVSPDFYAWVFPKYDHVAVGTGTMHVNQRLIKKLQAGIRARAANRLEGGKIIKVEAHPIPEHPRPRRVVGRAALVGDAAGYVTKSSGEGIYFAAKSGRMCAETIVETSNNGARIPTEADLKQYLRRWDKKYGTTYKVLDLLQTVFYRSDATREAFVEMCDDKDVQRLTFDSYLYKTVVPANPLVQLKITAKTLGSLLRGNALAPAEYKPIDAA

SEQ ID NO: 21015 - protein, 277 aa, Beta vulgaris
  misc_feature (15)..(15): Xaa can be any naturally occurring amino acid
EDLQLLPKILTWCRXIHLFVGVVYCLISWTVGLPKRAPIDGTLLKLLIPVAVCHALGHVTSNVSFAAVAVSFTHTVKALEPFFNAAASQFILGQPIPITLWLSLAPVVIGVSMASLTELSFNWLGFISAMISNISFTYRSIYSKKAMTDMDSTNIYAYISIIALFVCLPPAIIVEGPQLIKHGFNDAITKVGLTKFVSDLFWVGMFYHLYNQLATNTLERVAPLTHAVGNVLKRVFVIGFSIIIFGNKISTQTAIGTSIAIAGVAIYSFIKAKMEEE

SEQ ID NO: 21016 - protein, 387 aa, Geobacter metallireducens GS-15
MPFDFKLPDLGEGITEAELRKWLVKEGDTVREHQPVAEVETDKAVVEVPSPRGGRVGRLARREGETVAVGATLFTIEEEGEAPPERPKSVGIVGELPEAEEAREVIATPLVRKLARERGIDLATVRGSGPRGSITPDDLEKVSAPVAQPAESFGPVELVPLRGVRRAVARNVMASQRNTAFVTGMEEADITELWELRRRELGAVETRGAHLTFLPFFIKAVQHALREHPYLNAAIDDTAETIILKRHYHFGIAVETPDGLMVPVIRDVDRKSIIELAAEIQGLGSKARKRTISLDELKGSTFTLTNYGHFGGVFATPIINWPDVAILGFGRIGERPWIHKGQIAIRRILPLSLTFDHRVTDGADAAQFLLKVVAYLEDPALLFIEST

SEQ ID NO: 21017 - protein, 228 aa, Geobacillus stearothermophilus
MYKDDQEIELFKKAVQIVEESLEATLPYIKPGAVELEIAAQLEYEMRKRGSEGIPFGTIVASGYRSALPHGRASNKVINSGELVVLDFGSIYRGYVADITRTVAVGEITDELKEIYEVVREAQQAAIDIIKPGITAHEVDETARKIIREKGYGNYFTHRTGHGIGLSGHEAPYIMQNNQLVLKPGMAFTVEPGIYLPGKGGVRIEDNIVITENGFINLMSYHKDLITL

SEQ ID NO: 21018 - protein, 401 aa, Thiocapsa roseopersicina
MTNLETFDVVIVGGGPAGATAATDLARRGRRVLLLDRGGRIKPCGGAIPPQAMREFEIPESMLANQVNSARMVSPSDQRVDMPINGGYVGMVDREHFDEWLRERAAQAGAERRTGTFEAVERDTDGTALIRYRPGAGRSGNESERVRARAVIGADGAHSSVGKQCVPGADMIKYVAAYHEIVRTPANGGPADFDGTRCDVYYQGDISPDFYGWVFPHGDTTSVGVGTAVEGFSLKSATTELRRRAGLEHAETLRREGAPIPLKPLKRWDNGRDLVLAGDAAGVVAPASGEGIYYALVGGRLAGDAVDTFLATGDARALKTARARFMKAHGKVFWVLGMMQYFWYSSDKRRERFVSMCKDPDVQSLTWDAYMNKRLVRAKPAAHLRVFFKDMAHLLGFVSAR

SEQ ID NO: 21019 - protein, 989 aa, Methylobacterium extorquens
MSNGPEPHGNKIEQPEIRADERQDAGGPANGAPSTSGGAYSQGAKSGGQAAPDPSGSYGIKDAPVAPATIAFEFDGQQVEAQPGETIWAVAKRLGTHIPHLCHKPDPGYRPDGNCRACMVEIEGERVLAASCKRTPAIGMKVKSATERATKARAMVLELLVADQPERATSHDPSSHFWVQADVLDVTESRFPAAERWTSDVSHPAMSVNLDACIQCNLCVRACREVQVNDVIGMAYRAAGSKVVFDFDDPMGGSTCVACGECVQACPTGALMPAAYLDANQTRTVYPDREVKSLCPYCGVGCQVSYKVKDERIVYAEGVNGPANQNRLCVKGRFGFDYVHHPHRLTVPLIRLENVPKDANDQVDPANPWTHFREATWEEALDRAAGGLKAIRDTNGRKALAGFGSAKGSNEEAYLFQKLVRLGFGTNNVDHCTRLCHASSVAALMEGLNSGAVTAPFSAALDAEVIVVIGANPTVNHPVAATFLKNAVKQRGAKLIIMDPRRQTLSRHAYRHLAFRPGSDVAMLNAMLNVIVTEGLYDEQYIAGYTENFEALREKIVDFTPEKMASVCGIDAETLREVARLYARAKSSLIFWGMGVSQHVHGTDNSRCLIALALITGQIGRPGTGLHPLRGQNNVQGASDAGLIPMVYPDYQSVEKDAVRELFEEFWGQSLDPQKGLTVVEIMRAIHAGEIRGMFVEGENPAMSDPDLNHARHALAMLDHLVVQDLFLTETAFHADVVLPASAFAEKAGTFTNTDRRVQIAQPVVAPPGDARQDWWIIQELARRLDLDWNYGGPADIFAEMAQVMPSLNNITWERLEREGAVTYPVDAPDQPGNEIIFYAGFPTESGRAKIVPAAIVPPDEVPDDEFPMVLSTGRVLEHWHTGSMTRRAGVLDALEPEAVAFMAPKELYRLGLRPGGSMRLETRRGAVVLKVRSDRDVPIGMIFMPFCYAEAAANLLTNPALDPLGKIPEFKFCAARVVPAEAAPMAAE

SEQ ID NO: 21020 - protein, 458 aa, Listeria innocua
MAQTSTIQNDTKAAEEYAARVFETIKQRNPGETEFHQAVEEFLNSVIPALAKEPKYEAHGILEQLTEPERLISFRVPWVDDAGTVQVNRGYRVQFNSAIGPYKGGLRFHPSVTGSIVKFLGFEQIFKNSLTGLPIGGGKGGSDFNPKGKSDAEVMRFCQSFMTELQKHIGPDTDVPAGDIGVGGREIGYLFGQYKRLRGAYDAGTLTGKGLSYGGSLARTEATGYGLVYFTVEMLEAAGESIRGKKIVVSGSGNVAIYAIEKAHELGAKVVACSDSAGFVYDKEGIKVETVKQLKEVERKRISEYVTLHPSAEYYAGGDVWSVPCDIALPCATQNEINADQARALVKNGVIAVAEGANMPSTLEAVDIYHENKVLFGPAKAANAGGVAVSALEMAQNSTRMSWTFQTVDEHLQNIMKDIYKNSSNAASEYGAPGNLVVGSNIAGFLKVADTMIAHGII

SEQ ID NO: 21021 - protein, 313 aa, Spirulina sp. PCC 6313
NGFGRIGRNFLRCWAGRTDTNIELVGLNDTSDPRTNAHLLKYDSMLGKFAGDVSADDTTITVNGKTIKTVSDRNPDNLPWKDWGIDLVIESTGVFIDKVGASRHINAGAKKVLITAPGKNEDGTFVVGVNEDQYNHDIHNIISNASCTTNCLAPVAKVLLENFGIVKGVMTTTHSYTGDQRLLDASHRDLRRARAAALSIVPTSTGATKAVALVLPELAGKLNGIALRVPSPNVSVVDFVVQVEKKAIAQEVNEAFRAAAEGPMKGILEYNELPLVSIDYRGTDASSIVDSSLTMVMGGNMVKVVAWYDNEWG

SEQ ID NO: 21022 - protein, 234 aa, Vitis vinifera
MSQVPSVTAVQVENVLFPPSVKPPGSTNDLFLGGAGVRGLEIQGKFVKFTAIGVYLENSAVPTLAVKWKGKTVEELADSVDFFRDVVTGPFEKFTKVTTILPLTGRQYSDKVSENCVAFWKSVGIYTDAEAKAIEKFNEVLKDETFPPGNSILFTHSPLGALTMSFSKDGSLPEVGNAVIENKLLTEAVLESIIGKHGVSPEAKKSLAARLSELFCKEAGDEKIEAEKVAPVAC

SEQ ID NO: 21023 - protein, 267 aa, Streptomyces avermitilis MA-4680
MADTVLYEVSDGLATITLNRPEAMNAMNIATKVAFRDAARTAADDEAVRAILLTAAGDRAFCVGQDLKEHIGLLASDKQSGSGQTMSTVREHYNPIVRALTGAAKPVVAAVNGVAAGAGFGFALAADYRIVADTAAFNTSFAGVALTADSGISWTLPRVIGPSRAADLLLFPRSITAQEAYEWGIANRVVPAAELRAEAQKVARSLAEGPTVAYAALKESLAYGLSHTLDETLEKEDELQARAGASEDHGIAVQAFVNKEKPKYLGR

SEQ ID NO: 21024 - protein, 517 aa, Arthrobacter nicotinovorans
MTYDISRRTALQGAGVGALALFMSNAIPVAAHAQASLRAIYHMTPPSGWLCDPQRPVHTNGAYQLYYLHSGQNNGPGGWDHATTGDGVSYTHHGVVMPMQPDFPVWSGSAVVDTANTAGFGAGAVIALATQPTDGKFQEQYLYWSTDGGYSFTALPDPVIVNTDGRTATTPAEVENAEWFRDPKIHWDATRNEWVCVIGRARYAAFYTSPNLRDWQWKSNFDYPNHALGGIECPDLFEMTAGDGTRHWVFGASMDAYSIGLPMTFAYWTGSWNGTAFIADNLTPQWLDWGWDWYAAVTWPAVEAPETKRLATAWMNNWKYAARNVPTDASDGYNGQNSITRELRLERQSGGWYTLLSTPVPALSNYATSSTTLPDRTVNGSFVLPWSGRAYELELDISWDTAANVGVSVGRSSDGSRHTNIGKYGDELYVDRASSEQSGYALAPYTRAAAPIDANARSVHLRIFVDTQSVEVFVNSGHTVVSQQVHFAAGDTGISLYADGGPANFTGITIREFGNPI

SEQ ID NO: 21025 - protein, 327 aa, Kluyveromyces lactis NRRL Y-1140
MESKETVRIGGRRSKLAVVQSEQVKVMIESKFSHIECPLLSVHTLGDQVQSKPLYSFGGKAVWTKELEDLLYKDDESRIDLIVHSLKDMPTLLPDGFELGGITKRVDPTDALVMPIGSPYSSLSELPDGSVVGTSSVRRSAQLKRKFPNLKFESIRGNIQTRLAKLDDPETPYKCIVLASAGLMRSGLDSRITQRFNADTMCYAVGQGALGIEIRKDDEKMKKILKEICDPSTTICCLAERSLLRTLEGGCSVPIGVVSNYDESTKVLTLKGIVINVEGTEWVEIEHKVTISNEREDSINCGKELAAKLTQNGAKEILDSINLDKIT

SEQ ID NO: 21026 - protein, 230 aa, Streptococcus pneumoniae R6
MVKLVFARHGESEWNKANLFTGWADVDLSEKGTQQAIDAGKLIKEAGIEFDQAYTSVLKRAIKTTNLALEASDQLWVPVEKSWRLNERHYGGLTGKNKAEAAEQFGDEQVHIWRRSYDVLPPNMDRDDEHSAHTDRRYASLDDSVIPDAENLKVTLERALPFWEDKIAPALKDGKNVFVGAHGNSIRALVKHIKGLSDDEIMDVEIPNFPPLVFEFDEKLNVVSEYYLGK

SEQ ID NO: 21027 - protein, 440 aa, Chlamydophila pneumoniae AR39
MSKIVYKFGGTSLATAENICLVCDIICKDKPSFVVVSAIAGVTDLLVDFCSSSLREREEVLRKIEGKHEEIVKNLAIPFPVSTWTSRLLPYLQHLEISDLDFARILSLGEDISASLVRAVCSTRGWDLGFLEARSVILTDDSYRSASPNLDLMKAHWHQLELNQPSYIIQGFIGSNGLGETVLLGRGGSDYSATLIAELARATEVRIYTDVNGIYTMDPKVISDAQRIPELSFEEMQNLASFGAKVLYPPMLFPCMRAGIPIFVTSTFDPEKGGTWVYAVDKSVSYEPRIKALSLSQYQSFCSVDYTVLGCGGLEEILGILESHGIDPELMIAQNNVVGFVMDDDIISQEAQEHLVDVLSLSSVTRLHHSVALITMIGDNLSSPKVVSTITEKLRGFQGPVFCFCQSSMALSFVVASELAEGIIEELHNDYVKQKAIVAT

SEQ ID NO: 21028 - protein, 269 aa, Mycotypha africana
HTFYNELRVAPEEHPVLLTEAPLNPKSNREKMTQIMFETFNAPAFYVAIQAVLSLYASGRTTGIVLDSGDGVTHTVPIYEGYALPHAILRLDMAGRDLTDYLMRILAERGHAFTTTAEREIVRDIKEKLCYVALDFEQEMQTAAQSSALEKSYELPDGQVITIGNERFRAPEALFQPSLLGLESSGIHETTYNSIMKCDVDIRKDLYSNIVMSGGTTMYPGIADRMQKEITALAPSSMKIKIVAPPERKYSVWIGGSILASLSTFQQMW

SEQ ID NO: 21029 - protein, 269 aa, Mycotypha microspora
HTFYNELRVAPEEHPVLLTEAPLNPKSNREKMTQIMFETFNAPAFYVAIQAVLSLYASGRTTGIVLDSGDGVTHTVPIYEGYALPHAILRLDMAGRDLTDYLMRILAERGHSFSTTAEREIVRDIKEKLCYVALDFEQEMQTAAQSSALEKSYELPDGQVITIGNERFRAPEALFQPSLLGLESAGIHETTYNSIMKCDVDIRKDLYSNIVMSGGTTMYPGIADRMQKEITALAPSSMKIKIVAPPERKYSVWIGGSILASLSTFQQMW

SEQ ID NO: 21030 - protein, 916 aa, Dechloromonas aromatica RCB
MQKTLLRQLKRSIGVGSEAELADLLASIRTAGTTLEPAFRGILEGLGDLLSRVDASYEQYERDLELRTRSLEISSAELSAANEKLRQSLAGRDNALRSLRKTIRDHLPEANEDAETLAEEDIAVLSRRVAAMVAESEHGLRELANQKFALDQHAIVSITDTAGIITYANDRFCAISGYAREELIGQNHRIVNSGIHPPELFRDMWHTIVLGKVWHGEVCNRARDGHLYWVNATVVPLLDAKGEPERYIAIRTEITDRKRMEAQLSEQLHLVEELIENIPLPIYLKDGSGRYIRLNRAFEQFFEVRREAFIGRTLHDLLPAEDARQHAEMDADLFAAKGTQTYEATVHSQDGIAHETIYRKAVLTRRDGSVSGLLGIIVDITDRKRAEIEVLRAKEAAEAANRAKSDFLANMSHEIRTPMNGVIGMTDLALETALTEEQREYLNIAKSSAESLLTVINDILDFSKIEAGKLQVEDIPFDLHRLIADTLKPLALRAHEKDIEILSDVVHDVPRFVKGDPSRIRQVLVNLVGNAIKFTEQGEIALQADLMQLQNGHAVIHFAVRDTGIGISADKQMLIFDAFAQEDSSTTRKYGGTGLGLSICRRLVELMGGTLWLHSEPGKGSTFHFSVQLQISENAIPLVIHPVDVTGRHMLIVDDNATNRRILRGMLATLHVTCQEADSGKTALALMREQGSQFDCILLDAQMPEMDGYELARHLHAEHPALPPMLMLSSGALRGDALRCQEAGIAGFFAKPISSDELLSALGRLFDNSPKESSPEPSPLLTRHSLREAQRVLNILLVEDHPTNQKLALGLLNKWGHHGTLAQNGQEALDILASQSFDIILMDMQMPVMSGVEATQRIRAREAAMQLPRTPIIAMTAAAMQDDRDACLAAGMDDYLAKPIKVKELQALLLAYTSAP

SEQ ID NO: 21031 - protein, 149 aa, Mesorhizobium loti MAFF303099
MAQDNLVVCDKCGGVNRLPPARNADEAKCGKCGNRLFSGHPLDVDAKAFDHQIARSSIAVVVDIWAPWCGPCKMMAPAYEAAARELEPHVRLLKLNSDNEQAVAARLGIRGIPTMILFHGGREIARTSGAMTAGQIVRWVRDRLPTVAA

SEQ ID NO: 21032 - protein, 674 aa, Rhodobacter capsulatus
MAAKDIDDTKPDTAADEDASFDMSQAAVKRMIGEAKERGYITIDQLNAVMPPETVSGEQIEDVMSMLSEMGINVVEGEEVEESEGGEVVETGSGSREIAVAGAAGETLDRTDDPVRMYLREMGSVELLSREGEIAIAKRIEAGRNTMIAGLCESPLTFQAITIWRDELLSEEILLRDVIDLEATFGRSLDGDEGMEGMEGIEGPVVEGLDLETAEGAAPAARRPASDEPEYDADGNPISRIDEEEDDDDSSNMSLAAMEAALKPKVLETLELIARDYAKLAEMQDLRMSATLNEDGTFSVAEEAAYQKLRSEIVLLVNELHLHNNRIEALIDQLYGINRKIMSIDSGMVKLADAARINRREFIDEYRGYELDPTWMDRMSAKPARAWVTLFEKSRDKVEDLRHEMAQVGQYVGVDISEFRRIVNQVQKGEKEARQAKKEMVEANLRLVISIAKKYTNRGLQFLDLIQEGNIGLMKAVDKFEYRRGYKFSTYATWWIRQAITRSIADQARTIRIPVHMIETINKLVRTGRQMLHEIGREPTPEELAEKLQMPLEKVRKVMKIAKEPISLETPIGDEEDSQLGDFIEDKNAILPLDSAIQENLKETTTRVLASLTPREERVLRMRFGIGMNTDHTLEEVGQQFSVTRERIRQIEAKALRKLKHPSRSRKLRSFLDQ

SEQ ID NO: 21033 - protein, 269 aa, Phascolomyces articulosus
HTFYNELRVAPEEHPVLLTEAPLNPKSNREKMTQIMFETFNAPAFYVAIQAVLSLYASGRTTGIVLDSGDGVTHTVPIYEGYALPHAILRLDMAGRDLTDYLMRILAERGHSFTTTAEREIVRDIKEKLCYVALDFEQEMQTAAQSSALEKSYELPDGQVITVGNERSRAPEALFQPALLGLESAGIHETAYNSIMKCDVDIRKDLYSNIVMSGGTTMYPGIADRMQKEITALAPSSMKIKIVAPPERKYSVWIGGSILASLSTFQQMW

SEQ ID NO: 21034 - protein, 155 aa, Brassica napus
STHASVLVEKMGRRPLLLASTSGMCLCSLFLAFSFSFRSYGMLDELTPIFTCIGVVGFISSFAVGMGGLPWIIMSEIFPMNVKVSAGTLVTLANWSFSWIVAFAYNFMIEWNASGTFLIFFSICAGGIVFIYAMVPETKGRTLEDIQASLTDFLQ

SEQ ID NO: 21035 - protein, 162 aa, Pseudomonas syringae pv. syringae B728a
MSAFHDIKLKALGGQELPLANFRKKVVLVVNVASKCGLTPQYAALENLYQQYKDQGLEILGLPCNQFAGQEPGTEQEIAEFCQLNYGVTFTLGEKLDVNGPNRHSLYRLLAGEGAEFPGDITWNFEKFLVGKNGGVSARFSPRTTPDDPAVIQAIEKALAQS

SEQ ID NO: 21036 - protein, 369 aa, Brassica juncea
MSVSAIGFEGYEKRLEVSFFEPSLFVDTHGKGLRALPKSQIDEILAPAECTIVSSLSNDELDSYVLSESSLFIFPYKIIIKTCGTTKLLPSIEPLLRLAGELSLEVKSVRYTRGSFLCPGGQPFPHRNFSEEVSVLDGHFAKMGLSSVAYLMGDDDETKKWHVYSASAPARNGNGNNNNNVYTLEMCMTGLDKEKASVFYKNESSSAGSMTDNSGIRKILPQSQICDFEFEPCGYSMNSVEGDAISTIHVTPEDGFSYASFEAVGYDFTTMDLSHLVSKVLTCFEPKQFSVAVHSSVAQKSYDSGLSVDLEDYGCRETTIESLGEERGTVMYQSFEKLGRYCGSPRSTLKCEWSSSSSCTSEDEKEEGI

SEQ ID NO: 21037 - protein, 355 aa, Bordetella parapertussis
MAAKHRIAVIAGDGIGKEVMPEGLRVLEAAATRFGIDFQWDHFDWSCDYYARHGKMMPDDWAAQIGGHEAIFFGAIGWPDAVPDHEALWGSLFRFRRDFDQYINLRPVRLMPGVPTPLANRKPGDIDFFIVRENTEGEYSNSGGRLFAGTEREVVIQESVFTRVGADRVLKFAFELARKRGKHLTAATKSNGISISMPWWDERVAEMAASYPDVRWDKYHIDILCAHFVQHPDWFDVVVASNLFGDILSDLGPACTGTIGIAPSANLNPERKFPSLFEPVHGSAPDIYGKGIANPIGQIWSGALMLDFLGYPQAAAAVVAAIEQVLVDGPRTPDMQGKATTAEVGSAIAALVAAG

SEQ ID NO: 21038 - protein, 242 aa, Oryza sativa (japonica cultivar-group)
MAASLVHAAAASASPAPAARVGAFHPLASSSPFLRLACATASSPSTRRRRCLDAPLRALSAGSRLAAGWGAPRTRRVIATFAGEESVGSESGDDKEKGKGEMKPEEAQEVWKEMLKQFKDEAQRMHGLTLQAYGVYSQRAREVLLEASEKLKIHADKAQKDLSVIATEVGGFLNFMLTGRTSAIRFGIILGFALLAMGISSLRSQRAGGRRPRLLLKGQAACVFPLYVNVNTFNSSLRILPY

SEQ ID NO: 21039 - protein, 443 aa, Shewanella oneidensis MR-1
MKRTLSALVLAMGLLNPLSQAQATTAEDIKSFTLANGMKIMVLEDSSIPNANMYLFWKVGSRNEVPGITGISHFFEHMMFNGSKKYGPKMFDRTMEAEGGANNAYTTEDMTVYTDWFPANALETMFDLEADRIANLDINPEMVESERGVVQSERSTGLENSNWNTLEGEIKGVAFLAHPYSWSVIGHESDIAAWTLEDLVQYHKTYYAPNNAVVVIAGDVKLAQVKALADKYFAPIPAQTPPKAIRTVEPEQKGERRTFVQKASVSTPNVMLAYHIPAATHADFYALDLLSSILSQGNSSRLYQALVDKQVALEAQTYMPMSVDPNLFYVMGVATPEVKASTLERALIEQIDAIATNGVSQQELDKVKNIKLMDFYRAMETINGKANTIGTYEMYFGSYDKLFNAPEAYNKVTSADIQRVAQTYLRKSNRTVAVLAANEENSQ

SEQ ID NO: 21040 - protein, 228 aa, Fusobacterium nucleatum subsp. vincentii ATCC 49256
MKLVLIRHGESAWNLENRFTGWKDVDLSPKGVEEAKAAGKSLKEMGLVFDVAYTSYLKRAIKTLNIVLEEMDELYIPVYKSWRLNERHYGALQGLNKAETAKKYGDEQVHIWRRSFDVAPPSIDKNSEYYPKSDRRYANLADSDIPLGESLKDTIARVLPYWHSDISKSLQEGKNVIVAAHGNSLRALIKYLLNISNEDILNLNLTTGKPLIFEMDKDLKVLKAPESF

SEQ ID NO: 21041 - protein, 261 aa, Salmonella enterica subsp. enterica serovar Typhi str. CT18
MSESLHLTRNGPILEITLDRPKANAIDAKTSFAMGEAFLNFRDDPELRVAIITGGGEKFFSAGWDLKAAAEGEAPDADFGPGGFAGLTEIFDLDKPVIAAVNGYAFGGGFELALAADFIVCAENASFALPEAKLGIVPDSGGVLRLPKLLPPAIVNEMVMTGRRMSAEEALRWGIVNRVVSQSELMESARELAQQLVNSAPLAIAALKEIYRATSEMPVEEGYRYIRSGVLKHYPSVLHSEDALEGPQAFAEKRAPVWKGR

SEQ ID NO: 21042 - protein, 120 aa, Malus x domestica
DIVTGPFEKFIQVTTILPLTGQQYSDKVSENCLVFWKSVGIYTDAEGKAIEKFLEVFKDQNFPPGASILFTQSPKGSLTISFSRDASVPEAANVVIENKLLSEAVLESIVGKHGVSPGSK

SEQ ID NO: 21043 - protein, 320 aa, Pseudomonas syringae pv. syringae B728a
MSDVRHSRVIILGSGPAGYSAAVYAARANLKPLLITGMQAGGQLTTTTEVDNWPGDPHGLTGPALMERMREHAERFETEIVFDHINSVDLAGKPFSLQGDSATYTCDALIIATGASARYLGLPSEEAFMGKGVSACATCDGFFYRNREVAVVGGGNTAVEEALYLANIASKVTLVHRRETFRAEKILIDKLHARVAEGKIELKLNATLDEVLGDNMGVTGARLKNNDGSSSELKVDGVFIAIGHTPNTSLFDGQLALKDGYMVVQGGREGNATATSVEGVFAAGDVADHVYRQAITSAGAGCMAALDVERYLDGLADVSF

SEQ ID NO: 21044 - protein, 120 aa, Malus x domestica
DIVTGPFEKFIQVTTILPLTGQQYSDKVSENCVAFWKSIGIYTDAEGKAIEKFLEVFKDQNFPPSASILFTQSPKGSLTISFSRDASVPEAANTVIENHLLSQAVLESIVGMHGVSPGSK

SEQ ID NO: 21045 - protein, 459 aa, Aspergillus oryzae
MADVAIPIFRPQLPAFAALSRYYASKSFPPHTIISMPALSPTMLAGNIGAWQKKPGDSLQPGDVLVEIETDKAQMDFEFQEEGVLAKVLKETGEKEVAVGSPIAVLVEEGTDVSSFESFTAEDAGGDKGAAPAQESKEESKGAADAAPASTPAPEPAAQEPETSGEKLQPSLDREPTISPAAKALALEKGVPIKALKGTGRGGQITKEDVEKYKPSASAAAGPTYEDIPLTSMRKTIASRLQQSTRENPHFFVSTTLSVTKLLKLRQALNASADGKYKLSVNDFLVKACAAALQKVPAVNSSWHEENGQVVIRQHKNADISVAVATPAGLITPVVKNVQGLGLSSISNSIKDLGKRARDNKLKPEEYQGGTFTISNMGMNPAVERFTAVINPPQAGILAVGTTRKVAVPVETENGTEVEWDDQIIVTGSFDHKVVDGAVGAEWIKELKKVVENPLELLL

SEQ ID NO: 21046 - protein, 120 aa, Malus x domestica
DIVTGPFEKFIQVTTILPLTGQQYSDKVSENCVAFWKSIGIYTDAEGKAIEKFLEVFKDQNFPPGASILFTQSPKGSLTISFSRDASVPKAANTVIENKLLSEAVLESIVGMHGVSPGSK

SEQ ID NO: 21047 - protein, 116 aa, Arabidopsis thaliana
  misc_feature (69)..(69): Xaa can be any naturally occurring amino acid
  misc_feature (75)..(75): Xaa can be any naturally occurring amino acid
  misc_feature (95)..(95): Xaa can be any naturally occurring amino acid
MAPCATTRMTSRISGTRPRVARPFPTDAEVESGYKRCAIRKVSGIAKDQLSRKVTRDSPAITATQSGSXNPGHGXINFVSTLQWENPLMGWTSTXGDPNGIVGYSAHAFESEQTAK

SEQ ID NO: 21048 - protein, 293 aa, Zea mays
MTEQLNREYDIGDEIGRGRFGVVRRCVSRATGDAFAVKSVDRSLLGDDLDRALAELEPKLARLAGGEGDGNPGVLQVRAVYEDDAWTHTVMDLCTGPDLLDWIRLRRGAPVPEPDAARVVAQLAEALAGCHRRGVVHRDVKPDNVLLDVDPAGEAPPRVRLADFGSAAWLGEGARGRAEGLVGTPHYVAPEVVAGGEYGEKVDVWSAGVVMYALLSGGALPFGGETAADVFAAVLRGSLRFPPALFAGVSPAAKDLMRRMMCRDVSRRFSAEQVLRHPWIQSGGGGRELVRPT

SEQ ID NO: 21049 - protein, 129 aa, Listeria monocytogenes str. 4b F2365
MTAKMLHTCIRVKNLTESITFYEKALGLKEVRRKDFPDFEFTLVYMAFEEGGFELELTYNYDQKEAYDLGNGYGHLAVGVPDVHALLKEHQEAGFTVTDLKGLPGEDPFYYFLTDPDGYKTEIIQDGAL

SEQ ID NO: 21050 - protein, 278 aa, Mycobacterium sp. KMS
MAGRTIVITGASDGVGAAAAKRLSRSGENVVVVGRSPQKTAAVADALEADSFVADFSDLAQVRDLAQRLLDAYPRIDVLANNAGGMMNTRETTVDGFEKTFQVNHLAPVLLTTLLLDRLVQCRASVLNTSSMANKFVRTGFDDLDAVQKQSGSVAYSSSKLANILFTKELHRRYHGAGISTAAFHPGPVASNFSAEVDNPMFGVIYRSPLRHLALIGTEQGSDELVWLASATPGVDWRSGEYYHKHKVAKANKLADDAGMAERLWENSLELLGERAVS

SEQ ID NO: 21051 - protein, 996 aa, Ustilago maydis 521
MEYPTNDGTDFDDCRALNPQYNSSTWSACSNNRRQSSRRTTSTLSAALSAIRLGSSLNVPFLLLGSFAFFLAFCASSAQARVLPAALDQSQPLGDSRASFQAYSDIAHHDRFIALARRGSVPNASPSHFDSTSPASASSHDILQWIRDELHETDSESSQAFLNQLYQRLSVQQRSVADVVPSHVAPTSSRFRFWKRATSGGSESQCHETELSEAQKAVYGILIPILVVLSGLFAGLTLGYMSLDETQLQVLALQGTPKQKQYAEKIMPIRKDGHLLLTTLLIANMITNETLPIIADPLLGGGVQAVIVSIVLVVIFAELIPQSVCSRYGLAIGAKLAPLTRVVIILLWPIAFPVSRVLHWTLGPHHGIVYRRSELKELVNMHAATAGRGDLNNDTVTIVGGALDLQEKVVKQAMTPIDQVFMISIESKLGYETLQQIVSSGHSRIPVYQEIEIPVNRARGGSGTLTPNRGSGLLNALSRKASNTQTKASSDDQRTLDGSVTTDKELLPVNAESQVTTVSASVATNEKSGTTTIKRKKIIGALLVKQCVLLDPEDETPVRDMVINALPTVPADEPLLNLLNVFQEGRSHLAIVSSRTRRSSPGSFVDLGNENDPRKTQAVTRSGTAARVEDLGDIDEEKQLDDSTIKKSGFWSRHLRRHHRHATKTSSQDLPPEALGEDVDAGAVATEMAQRDVPIGIITLEDVLEELIGEEILDEYDSEVEQNFAQISPPPSPGHKEMMDKKVEAPKDADEVQLPSSILKLPTSPKITLPRFKLGRSASQKDTDIGDLAPTKSLSVPPTPVLESSGAELPSIKETQPKSGNAGVHFPFEVAESRCRTDGALSRPGSRPVSPGPGAVLASTDEQPTHAVPRANKPVVIRHQAPDGTIATAIVAESLLRGRTNALNTERSASGDASRSNTPSGTRVSRFKSTPLPVSVPSTPVTAAPPRGRPFGKSEIGSTFAEGETATAPVASPEELDSDERYKQLGNGDTDETDTL

SEQ ID NO: 21052 - protein, 327 aa, Zea mays
  misc_feature (20)..(20): Xaa can be any naturally occurring amino acid
MASTLLHAATASGAEPLPAXARGGAATAFHPLASTPSIRLARSSFSSNRRLEGSLRAGSAGHRFAGRGAPRGRRVVAALAGEQTEGSEVGDDKDNSNGEIKPEEAQEAWKGMLEQFKGEALRMQALSVQAYDVYSMRAREVLLEASEKLKIQADKAQKDLSVIATEVSQEGQEYLVMAARNSPDSIKDITTTFRALGRLNWPSEYEDYHVGIPFGTFLTVGGFLNFMLTGSTSALRFGIVLGLALLTLGISSLRSHREGDRRPRLLVKGQAAIALVIFFREFSVLLQNGWFPKIFIVLLSGVVAAFYFYRIATGTPKDLTSKNDSAN

SEQ ID NO: 21053 - protein, 188 aa, Triticum aestivum
  misc_feature (44)..(44): Xaa can be any naturally occurring amino acid
  misc_feature (54)..(54): Xaa can be any naturally occurring amino acid
MRRFHEKEAPMVLEELCNSDALNVKRLLEGPSVEAPVPEGGRYXVRLLKNRVLXESSFLVLRVTGVSRTRLVGVGTPIGKFTHGEVFPLSVLALDLLGAHARRRIWVKPHMDQSFLLAIFVLKYVLAHITDNANSGDGLVVMCIADDPLGFGVAPSGAQDYRKADIHEVVLLHQSDAAEFLCKEEDLI

SEQ ID NO: 21054 - protein, 227 aa, Neisseria meningitidis Z2491
MELVFIRHGQSEWNAKNLFTGWRDVKLSEQGLAEAAAAGKKLKENGYEFDIAFTSVLTRAIKTCNIVLEESDQLFVPQIKTWRLNERHYGRLQGLDKKQTAEQYGDEQVRIWRRSYDTLPPLLDKDDEFSAHKDRRYAHLPADVIPDGENLQVTLERVLPFWEDQIAPAILSGKRVLVAAHGNSLRALAKHIEGISDEDIMGLEIPTGQPLVYKLDDNLKVIEKFYL

SEQ ID NO: 21055 - protein, 687 aa, Erythrobacter sp. NAP1
MAHATAQQSFPWHSGEVAVQERLGVAERMAKNGSQVVRDYMPEQHRNFYNSIPFMMIGSVDESGDVWASMVTGEPGFMRSPDPRELTIDFAPDSSDPAAAGLKDGKAIGMLGIELSTRRRNRMNGLVHSTTASGFAVSVGHSFGNCPQYIQLRDFEFVRDPQADFPIEVEELSSLDDEARTMIAAADTFFVASYVDLKEERQVDVSHRGGKPGFVRVDGEGRMTIPDFAGNLHFNTLGNFTVNPRAGLIFADFETGDVLQITGDTQIVFDGPEIANFQGAERIWHFTPRRIVRRRAALPIRWKLRAGDAFSPNSLMTGSWEETAARIEAQKAAKTWREFRIETITRETAEISSFTLVPMDGGGISTFKAGQHLPVRADIPGSATPVTRTYTLSSAPSDGTYRLSVKRQGLFSEHLHSLKEGDVIEARGPGGDFFIEGDEKRPAVLVAAGVGITPMLSMLRQIVFEGKRTRGTRPTWLVHAAKSRDLRAFHDEIGELVREAAGAVKFIAVHDAPGDDEKQGEDYSWHGRFRAADLGRFLPFGDYDFYMCGPPGFMQGVYDGLRDMNVSDARIHAEAFGPSSLIRRPDEGVAVTEVVPAATESVPVIFAGSNKEARWEPQGGTLLELAEARGIEAPFSCRRGTCGMCAVKLLKGKVAYTNKPSVEVAEGEVLTCSAVPHRDVDKLEIEL

SEQ ID NO: 21056 - protein, 270 aa, Lactococcus lactis subsp. cremoris
MTKKIVTLAGDGIGPEIMSAGLRVLKAVSKKIAFEYELVAKDFGGIAIDKHGHPLPEETLQAVKNADAILLAAIGHPKYNDAKVRPEQGLLALRKELGLYANVRPLKIYPALKNLSPIRNVENVDFVVIRELTGGIYFGQHELSDEKARDINDYTADEIRRILHFAFKIAQNRPRKLLTSVDKQNVLATSKLWRKIADEIAVEYPDVTLEHQLVDSCAMLLITEPQKFDVIVTENLFGDILSDEASSLAGTLALCPLVLMDLTDCHYMSQ

SEQ ID NO: 21057 - protein, 403 aa, Dehalococcoides sp. CBDB1
MPNARVEEVIADIKAGRFVIVVDDYDRENEGDLVMASEKVTPDAINFMAKNARGLICVSLIAERLEQLKIPMMVTENTSPYSTGFTVTVEARKKVTTGISAADRAATVQVLIDPAATREDIAMPGHMFPLRAREGGVLVRAGHTEASMDLARMSGLYPSGVLCEIMNDDGTMARLPQLEQKAAEWGIKIISIKDIISYRRRTEKMVKKVTEAELPTSHGQFKAVAYKSQFDADEHIALVMGDISGPEPVLVRVHSECITGDVFGSKRCDCGEQLDMALNQIAQAGRGVLLYMRQEGRGIGLHNKLCAYALQDKGLDTVEANLELGFAPDLREYGIGAQILVDLGLSQIRMLTNNPKKVVGLEGYGIKVVETVPIIVEPNSFNRHYLETKQRKMGHILNVDKVN

SEQ ID NO: 21058 - protein, 214 aa, Zea mays
  misc_feature (96)..(96): Xaa can be any naturally occurring amino acid
  misc_feature (118)..(118): Xaa can be any naturally occurring amino acid
  misc_feature (138)..(138): Xaa can be any naturally occurring amino acid
MAYSMLSSAAVVTSPAQATMVAPFTGLKSSSAFPVTRKANNDITSIVSNGGRVSCMKVWPPVEKKKFETLSYLPDFTEVELGKEGDYLLPAQGIPXVKSKLSKDFVYREHGSTPRIQXGRYWKMGKSPLFGRPPLAQXVKEAQKGKKGNPKPFLQGSSGFKTTREGRGVIFFPQKKPKFPGGLKLLLKKKKLSLFFLPKKGGCFFFLRGIVEKK

SEQ ID NO: 21059 - protein, 501 aa, Glycine max
MTSLTNGDAGSLNKVPTIKFTKLFINGDFVDSLSGKTFETIDPRTGDVIARISEGDKEDIDIAVKAARHAFDNGPWPRLPGSERARILLKWAEIIEENAEELAALDAIDAGKLYHMCRNVEVPAAANTLRYYAGAADKIHGEVLKMSREFHAYTLLEPLGVVGHITPWNFPNTMFYIKVAPSLAAGCTMVLKPAEQTPLSALFSAHLAKLAGIPDGVINVVPGFGPTAGAALSSHMDVDKVSFTGSTQTGRVIMQAAAKSNLKQVSLELGGKSPLIIFDDADIDKATELALLGILYNKGEVCVASSRVFVQEGIYDEFEKKLVEKAKAWVVGDPFDPKVQQGPQVDKEQFEKVLSYIEHGKKEGATLLTGGKTVGNKGYFIEPTIFSNIREDMLIAQDEIFGPVMALKKFKTTEEAIKSANNTKYGLAAGIVTKNLDTANTVSRSIRAGTIWINCYFAFGDDVPFGGYKMSGFGKDHGLEALHKYLQVKSVVTPLYNSPWL

SEQ ID NO: 21060 - protein, 333 aa, Pseudomonas putida KT2440
MTLRIAINGFGRIGRNVLRALYTQGYRQDLQVVAINDLGDSTMNAHLLKYDSVHGTFDATVEADHESLTVNGDRIAVSAIRNPAELPWKAEAIDVVFECTGLFTDRAKAAAHLAAGAGKVIVSAPAKGADATVVYGVNHDILRASHQIISNASCTTNCLAPIAQVLHREFGIEQGLMTTIHAYTNDQVLTDVYHSDPYRARSATQSMIPSKTGAAEAVGLVLPELAGKLTGMAVRVPVINVSLVDLTVNLKREATAEQVNQLFLEASKHSKVLGYNALPLVSCDFNHNPLSSIFDANHTRANGRMLKVLAWYDNEWGFSNRMLDNCLALHRAG

SEQ ID NO: 21061 - protein, 155 aa, Bacteroides fragilis YCH46
MKKVLSLVALAMISTIMFAVNDGVKADQNKKEAKSGEVIVMNKEMFINDVFDYQNSKEWKYKGDKPAIIDLYADWCGPCRMTAPIMKSLAKEYDGKIVIYKVNVDKEKELAALFNATSIPLFVFIPMEGEPQLFRGAADKATYKKAIDEFLLKQK

SEQ ID NO: 21062 - protein, 269 aa, Pilaira anomala
HTFYNELRVAPEEHPVLLTEAPLNPKSNREKMTQIMFETFNAPAFYVAIQAVLSLYASGRTTGIVLDSGDGVSHTVPIYEGYSLPHAILRLDMAGRDLTDYLMRILAERGHSFTTTAEREIVRDIKEKLCYVALDFEQEMETAAQSSALEKSYELPDGQVITVGNERFRAPEALFQPGLLGLESVGIHETTYNSIMKCDVDIRKDLYSNIVMSGGTTMYPGIADRMQKDITALAPSSMKIKIVAPPERKYSVWIGGSILASLSTFQQMW

SEQ ID NO: 21063 - protein, 447 aa, Moorella thermoacetica ATCC 39073
MKGTDVLVIGGSAAGLTAAITAKRYFKDKKVTVVRKEEKVLVPCGIPYIFGTVGSPDKNLIPDATLVNNGIELVIDEVIGIDRQSKAVSTVKSGSITYEKLVLATGSSPVVPPVKGADLEGVFVVKKDVAYLEQLKKALDKAKNLVIVGGGFIGVEFADECRKGRELNITIVELLPHCLALAFDDEVCTMVEDKLRSQGINIITGTKVEEFLGNGKVEQVRLSNGETLPADIVIFGIGVAPNIELAQMAGLKVDHRFGIWVDDYMRTSDPSIFAIGDCAKKSSFFGHGPSLIKLASVATHEARVAGANLFGLRRSRVAAVGVFSTIVGDLALGSVGLTERAAREAGIEVVTGTAKAPDRHPGSMPGTRELGVKLIFTKDTGVILGGQVYGGTSVGELTNLLAAAVQHKMRADELETMQVGTHPALTASPVAYQVTNAAEDAVLKLRS

SEQ ID NO: 21064 - protein, 269 aa, Pilobolus umbonatus
HTFYNELRVAPEEHPVLLTEAPLNPKSNREKMTQIMFETFNAPAFYVAIQAVLSLYASGRTTGIVLDSGDGVTHTVPIYEGYSLPHAILRLDMAGRDLTDYLMRILAERGHSFTTTAEREIVRDIKEKLCYVALEFEQEIQTAAQSSALEKSYELPDGQVITVGNERFRAPEALFQPALLGQEANGIHETTYNSIMKCDVDIRKDLYSNIVMSGGTTMYPGIADRMQKEITALAPSSMKIKIVAPPERKYSVWIGGSILASLSTFQQMW

SEQ ID NO: 21065 - protein, 319 aa, Lactobacillus delbrueckii; identical to SEQ ID NO: 530

SEQ ID NO: 21066 - protein, 520 aa, Zea mays
  misc_feature (492)..(492): Xaa can be any naturally occurring amino acid
  misc_feature (504)..(504): Xaa can be any naturally occurring amino acid
MMVGHSHVVCRLKHRGPDWSGLYQHEGNFLAQQRLAIVSPLSGDQPLFNEDRTVVVVANGEIYNHKNVRKQFTGAHSFSTGSDCEVIIPLYEKYGENFVDMLDGVFAFVLYDTRDRTYVAARDAIGVNPLYIGWGSDGSVWMSSEMKALNEDCVRFEIFPPGHLYSSAAGGFRRWYTPHWFQEQVPRTPYQPLVLREAFEKAVIKRLMTDVPFGVLLSGGLDSSLVASVTKRHLVKTDAAGKFGTELHSFVVGLEDGIDAIEEVIYHDETYDVTTIRASTPMFLMARKIKSLGVKMELHRETCRKVKALHQYDCLRANKATSAWGLEVRVPFLDKEFVDVAMGMDPEWKMYDKNLGRIEKWVLRKAFDDEEHPYLPEHILYRQKEQFSDGVGYNWIDGLKAFTEQQVTDEMMNSAAQMFPYNTPVNKEAYYYRMIFERLFPQDSARETVPWGPSIACSTPAAIEWVEQWKASNDPSGRFISSHDSAATDRTXTSWRWSTATGTXANGTVNGNDVAVAIAV

SEQ ID NO: 21067 - protein, 269 aa, Poitrasia circinans
HTFFNELRVAPEEHPVLLTEAPLNPKSNRERMTQIMFETFNVPAFYVSIQAVLSLYASGRTTGVVLDSGDGVTHAVPIYEGYSLHHAIKRIDLAGRDITGYLKLLLSDRGYSLTTTAETEIVRDIKEKLCYVSLDFEQEMATAAGSSALEKNYELPDGNIMTIGNERFRAPEALFQPHLLGLEAEGVDKTLYSSIMKCDIDVRRELYANTIMSGGTTMYPGMADRMQKELSLLAPSSMKVKVTAPPERKYSVWIGGSILASLSTFQQMW

SEQ ID NO: 21068 - protein, 241 aa, Glycine max
  misc_feature (50)..(50): Xaa can be any naturally occurring amino acid
MEPRFVEYFRLATPELEYGRMNIGSRPAKRRPSEGIARSVSMPPLGLLFXWTQTRFHLPVWLGFGAAFKKVIEENVKNLNMLQEMYNQWPFFRVTLDLVEMVFAKGDPKIAALNDRLLVSKDLWPFGDQLRNKYEETRKLLLQVAGHKEILEGDPYLKQRLRLRHAPITTLNIVQAYTLKRIRDPNYNVKVRPRISKESAEASKSADELVKLNPTSEYAPGLEDTLILTMKGIAAGMQNTG

SEQ ID NO: 21069 - protein, 269 aa, Protomycocladus faisalabadensis
HTFYNELRVAPEEHPVLLTEAPLNPKSNREKMTQIMFETFNAPAFYVSIQAVLSLYASGRTTGIVLDSGDGVTHTVPIYEGYALPHAILRLDMAGRDLTDYLMRILAERGHSFTTTAEREIVRDIKEKLCYVALDFEQEMQTAAQSSALRKSYELPDGQVITVGNERFRAPEALFKPSLLGLESFGIHETTYNSIMKCDVDIRKDLYSNIVMSGGTTMYPGIADRMQKDITALAPSSMKIKIVAPPERKYSVWIGGSILASLSTFQQMW

SEQ ID NO: 21070 - protein, 458 aa, Mycobacterium leprae
MNTTPSAHETIHEVIVIGSGPAGYTAALYAARAQLTPLVFEGTSFGGALMTTTEVENYPGFRNGITGPELMDDMREQALRFGAELRTEDVESVSLRGPIKSVVTAEGQTYQARAVILAMGTSVRYLQIPGEQELLGRGVSACATCDGSFFRGQDIAVIGGGDSAMEEALFLTRFARSVTLVHRRDEFRASKIMLGRARNNDKIKFITNHTVVAVNGYTTVTGLRLRNTTTGEETTLVVTGVFVAIGHEPRSSLVSDVVDIDPDGYVLVKGRTTSTSMDGVFAAGDLVDRTYRQAITAAGSGCAAAIDAERWLAEHAGSKANETTEETGDVDSTDTTDWSTAMTDAKNAGVTIEVTDASFFADVLSSNKPVLVDFWATWCGPCKMVAPVLEEIASEQRNQLTVAKLDVDTNPEMAREFQVVSIPTMILFQGGQPVKRIVGAKGKAALLRDLSDVVPNLN

SEQ ID NO: 21071 - protein, 250 aa, Vibrio angustum S14
MQRHVFVCHLKLSTSPDSGYIFGETMNQTSLLAEFGSPTTRVENALNALRRGLGVMLLDDENRENEGDLIFSAEHITATQMALMIRECSGIVCLCLTEKHVKQLDLPAMVENNNSANKTAFTVSIEAKEGVTTGVSASDRVTTIKTAIALNAQPSDLARPGHVFPLCANRKGVLGRRGHTEGTIDLMKLAGLEPAGLLCELTNIDGTMAKADEVVYFAKRHNIPVLTIEDIVAYRLQQKKDKSQEFEMVL

SEQ ID NO: 21072 - protein, 486 aa, Oceanobacillus iheyensis HTE831
MLKTDKQSYLNFINGRWKSSEGGETKEVLNPADKNDVVGVIQRSTIDDVNEAIASAKSAKESWRKLSGNERGNYLYKVANILESRLDDVAETLTREMGKTLPEAKGETARGVAILRYYAGEGLREVGDVIPSTDSSGIMYTTRTPLGVVGVITPWNFPVAIPIWKMAPALIYGNTVVIKPATEAAATAAKVMECFADAELPDGVVNMVTGSGSIVGNRIAEHPDVNGVTFTGSDQTGKHIGQTALARGAKYQLEMGGKNPVIVADDADLDLAVKATISGGLSSTGQKCTATSRVIVQRSVYDAFKEKLLTQIQALTVGNGLEDGNWMGPSVSESQLETVLHYIKKGKEEGATLLTGGHRLTDAEHKDGNFVEPTVFEDVTNDMTIAQEEIFGPVLALIKVETFEEAMKLANDTEYGLSAAVFTENIRKMLTFIDDIEVGLVRVNAETAGVELQAPFGGMKSSSSHSREQGKAAIEFFTSIKTVFIK

SEQ ID NO: 21073 - protein, 314 aa, Zea mays
  misc_feature (113)..(113): Xaa can be any naturally occurring amino acid
  misc_feature (137)..(137): Xaa can be any naturally occurring amino acid
  misc_feature (146)..(146): Xaa can be any naturally occurring amino acid
  misc_feature (178)..(178): Xaa can be any naturally occurring amino acid
MPLIDAAASAVAPPPPRRVAQLRFFSTRRPGILSLTATSCSPSPPPPVAAEVPAPPQEAKSKPRPRRYPKQYPGESVGVAEEMRFVAMRLRNPKRTTIKDKSGTEDADAGAGXPEGEAEEDDGGGVKEEHEEEDEGXELEEGEWMXPSMEGFVRYLVDSRLVFGTIERVVAESTDVAXKSGLERSASISKDLEWFRKQGIAIPEPSTSGSTYAAYLTELAESNAPAFLSHYYNIYFAHITGGVTIGNKICEKILEGRDLEFYKWDTDAELLLKDAREKLNELSKHWTRKDRNLCLKEAAKCFQYLGKMVRLIIL

SEQ ID NO: 21074 - protein, 117 aa, Avicennia marina
MEGMNKSMCIIVVVAVLAAWVVPHGEAAISCGTVASKLAPCIPYVTNRGPLGGCCGGVKSLYGLARTTPDRQSVCGCLKSLASSYNVNLGKAAGLPGQCGVNIPYKISPSTDCSKVH

SEQ ID NO: 21075 - protein, 101 aa, Brassica napus
MLGAARRQLGSGPMLGQVLRRLRPAAAAEVARGYSAAAKEMTVRDALNSALDEEMSADPSVFLMGEEVGEYQGAYKISKGLLDKYGPDRVLDTPITEAGFT

SEQ ID NO: 21076 - protein, 241 aa, Arabidopsis thaliana
MAAKVSVSPTSLLNQIVVPGDVVLDLSNMNNQTIKLGSGLLQDNDAISAMGAGKLSYSKPNKYWLESSHKRYIPRPDDHVLGIVVDSRADNFWVDIKGPQLALLPVLAFEGGTRRNIPKFEVGTLLYLRVVKTNIGMNPELSCTEASGKAALFGPLRDGFMFETSTGLSRMLLNSPTRPVIEALGKKLSFEIAVGLNGRVWVNATAPRIVIIVANAIMNSESLSGTQQRIMVEKLLAIISD

SEQ ID NO: 21077 - protein, 413 aa, Candida glabrata CBS 138
MLSRSAVCAKRYITPRHVAAWKLPVQKVVPAYLSQYRWASTSVKVPSMAESLTEGSLKEFTKKVGEFVEQDELLATIETDKIDIEVNSPVSGTVTKLNFEPEDTVTVGDELAQIEEGGAPADGGAKPAAEESKPAEESKPAEQAKPAAPAAEKKSAPVKKPESPKQEASNAAQQAPSTAAFSRNENRVKMNRMRMRIAERLKESQNTAASLTTFNEVDMSALMEMRKLYKDEIIKKTGTKFGFMGLFSKACTLAAKDIPAVNGAIEGDQIVYRDYTDISIAVATPKGLVTPVVRNAESLSVIEIEQEIVRLGQKARDGKLTLEDMAGGTFTISNGGVFGSLYGTPIINMPQTAVLGLHGVKERPVTVNGQIVSRPMMYLALTYDHRLLDGREAVTFLKTVKELIEDPKKMLLW

SEQ ID NO: 21078 - protein, 467 aa, Streptococcus pneumoniae R6
MESKMNIFRTKNVSLDKTEMHRHLKLWDLILLGIGAMVGTGVFTITGTAAATLAGPALVISIVISALCVGLSALFFAEFASRVPATGGAYSYLYAILGEFPAWLAGWLTMMEFMTAISGVASGWAAYFKGLLSQYGIALPQALNGTFNPQAGTFVDLLPILVLVLVTSLVLLNAKAALRFNSILVILKFSALALFVLVGIWNIKFDNWSNFAPYGFGQIYGASTGIMAGASLMFFGFLGFESISMAVDEVKTPQKNIPRGIVLSLSIVTILYALVTLVLTGVVHYSHLNVDDAVAFALRSVGISWAANYVSLVAILTLITVCISMTYALSRMIYSLARDGLVPAAFKELTKTSKVPKNATILTGLASAVAAGMFPLASIAAFLNICTLAYLILLAYGLIRLRKEKGMPKAGEFKTPLVPLLPILSIIICLSFMLQYNVNTWIAFLVALLVGSIIYFTYGYKHSTIEE

SEQ ID NO: 21079 - protein, 904 aa, Arabidopsis thaliana
MAVSATGFEGFEKRLEISFFETTDFLDPQGKSLRSLTKSQLDEILTPAECTIVSSLTNSFVDSYVLSESSLFVYPYKIIIKTCGTTKLLLSIPHILRLADSLCLTVKSVRYTRGSFIFPGAQSYPHRSFSEEVALLDDYFGKLNAGSKAFVMGGSDNNPQRWHVYSASSTEESAVCDKPVYTLEMCMTGLDNIKASVFFKTNSVSASEMTISSGIRNILPGSEICDFNFEPCGYSMNSIEGDAVSTIHVTPEDGFSYASFETVGYDLKALNFKELVDRVLVCFGPEEFSVAVHANLGTEVLASDCVADVNGYFSQERELEELGLGELTDKGVNFEVVALIGIKSSLTDPHGVLMNWDDTAVDPCSWNMITCSDGFVIRLEAPSQNLSGTLSSSIGNLTNLQTVLLQNNYITGNIPHEIGKLMKLKTLDLSTNNFTGQIPFTLSYSKNLQYLDLSYNNLSGPVPRSLAKTFNVMGNSQICPTGTEKDCNGTQPKPMSITLNSSQNKSSDGGTKNRKIAVVFGVSLTCVCLLIIGFGFLLWWRRRHNKQVLFFDINEQNKEEMCLGNLRRFNFKELQSATSNFSSKNLVGKGGFGNVYKGCLHDGSIIAVKRLKDINNGGGEVQFQTELEMISLAVHRNLLRLYGFCTTSSERLLVYPYMSNGSVASRLKAKPVLDWGTRKRIALGAGRGLLYLHEQCDPKIIHRDVKAANILLDDYFEAVVGDFGLAKLLDHEESHVTTAVRGTVGHIAPEYLSTGQSSEKTDVFGFGILLLELITGLRALEFGKAANQRGAILDWVKKLQQEKKLEQIVDKDLKSNYDRIEVEEMVQVALLCTQYLPIHRPKMSEVVRMLEGDGLVEKWEASSQRAETNRSYSKPNEFSSSERYSDLTDDSSVLVQAMELSGPR

SEQ ID NO: 21080 - protein, 285 aa, Oenococcus oeni PSU-1
MVQILDGRSVSKKILQEVKDKVAKAGFPVKLATIYNEENEGSKMYVGMKIRRATFAGLISVEYKVDNSWKTDDILRLLSKLNMDSSICGILVQSPLGDGIDESKIFNAIDPLKDADGLSAFNQGLLFENAKENYIVPATPAGVISLLEAYHYQFAAKNALVVGRSVLFGRPMSVLLTNRDMTVTLAHSKTPVDQLRQFAKRADLIVVAIGKANWFQFTDLKKDVVVIDVGANKLNGHATGDVDFEKVYPHVSQISPVPGGVGPMTIATLIKHTFDLAVFQQGEQK

SEQ ID NO: 21081 - protein, 354 aa, Thinopyrum ponticum x Triticum aestivum
MDGNKGPVVVTGASGFVGSWLVMKLLQAGYTVRATVRDPANVEKNKPLLELPGAKERLSIWKADLSDEGSFDDAIAGCTGVFHVATPMDFDSKDPENEVIKPTVEGMLSIMRACKEAGTVKRIVFTSSAGSVNIEERQRPAYDQDNWSDIDFCRRVKMTGWMYFVSKSLAEKAAMEYASENGLDFISIIPTLVVGPFLSAGMPPSLVTALALITGNEAHYSILKQVQLVHLDDLCDAMTFLFEHPEANGCYICSSHDATIHGLARMLRDRFPEHSIPHKFAGVDDDLQPIHFSSKKLLDHGFSFRYTAEDMFDAAIRTCREKGLIPLGDAPAPAAAGKLGALAAGKGQAIGAET

SEQ ID NO: 21082 - protein, 504 aa, Magnaporthe grisea 70-15
MEKFPDLDVGITNHNANKLNGHANGIANGGSHSQPVGVRWTPASSTYSGSGRSGGHSRQKSISEAIRTIRSRHGSVSQNAHEIADALKAPLSPRLIFAFVCGYCLLLSWLASISPGLRTAVPALKHGIRYPSRDVIQTTMPLAAFQIFGHLLSSTATSKIPVSLVHTIKGLSPLFTVLAYRIVFNIRYPAATYLSLVPLTLGVMLACSGKHKFGGEILGIVYALVATLIFVTQNIFSKRLFNEAARAEAEGMGHKSRKLDKLNLLCYSSGMAFILTVPIWFWSEGIGIIGDFLRDGSVDLTTAPGTFDHGRLFIEFVFNGTFHFGQNIMAFVLLSMVSPVTYSVASLIKRVFVIVIALVWFRSPTTKIQAVGIALTFVGLYLYDRTKEGNRADKRATYLGDKGAKDSLLPLSTKSNGVNGGLVFESPASAGPDGFDGGINAPRPYVNGYALPVRTEGDNKKSDDQTPGRGGRQRGASTTSWLPPGTRQEDTWRVGDRSSGGPVR

SEQ ID NO: 21083 - protein, 419 aa, Streptococcus pneumoniae R6
MTFSFDTAAAQGAVIKVIGVGGGGGNAINRMVDEGVTGVEFIAANTDVQALSSTKAETVIQLGPKLTRGLGAGGQPEVGRKAAEESEETLTEAISGADMVFITAGMGGGSGTGAAPVIARIAKDLGALTVGVVTRPFGFEGSKRGQFAVEGINQLREHVDTLLIISNNNLLEIVDKKTPLLEALSEADNVLRQGVQGITDLITNPGLINLDFADVKTVMANKGNALMGIGIGSGEERVVEAARKAIYSPLLETTIDGAEDVIVNVTGGLDLTLIEAEEASQIVNQAAGQGVNIWLGTSIDESMRDEIRVTVVATGVRQDRVEKVVAPQARSATNYRETVKPAHSHGFDRHFDMAETVELPKQNPRRLEPTQASAFGDWDLRRESIVRTTDSVVSPVERFEAPISQDEDELDTPPFFKNR

SEQ ID NO: 21084 - protein, 358 aa, Lycopersicon chilense
MDLPVSAIGFEGFEKRLEISFVEPGLFADPNGKGLRSLTKAQLDEILGPAECTIVDNLSNDYVDSYVLSESSLFVYSYKIIIKTCGTTKLLLAIPPILRLAETLSLKVQDVRYTRGSFIFPGAQSFPHRHFSEEVAVLDGYFGKLAAGSKAVIMGNPDKTQKWHVYSASAGTVQCNDPVYTLEMCMAGLDREKASVFYKTEESSAAHMTVRSGIRKILPKFEICDFEFEPCGYSMNSIEGAAVSTIHITPEDGFSYASFESVGYDPKTTELGPLVERVLACFEPAEFSIALHADVATKLLERVCSVDVKGYSLAEWSPEEFGKGGSIVYQKFTRTPYCESPKSVLKGCWKEEEKEEKE

SEQ ID NO: 21085 - protein, 522 aa, Glycine max
MISLIKNKINHLAPPTHHYSSLLLLPLSSKHTSSTMAAPSSETKSPSSSNTQLPLKPIPGSYGMPFFGAISDRHNYFYHQGRDKFFATRIEKHNSTVIRTNMPPGPFISSDPRVVALLDGASFPILFDNDKVEKLNVLDGTFMPSTKFTGGFRVCAYLDTTEPNHALIKQFFLNVLAKRKDSFVPLFRNCLQESFAEIEDQLSKNTKADFNTVFSDASFNFMFRLFCDGKDPSQTNLGSKGPKLVDTWLLFQLAPLATLGLPKIFNYIEDFLIRTLPFPACLTKSGYKNLYEAFKTHATTALDEAEKLGLKRNEACHNVVFTAGFNAYGGLKNQFPYVLKWLGLSGEKLHADLAREVRRVVNDEGGVTFTALENMPLVKSVVYEVMRIEPAVPYQYARARENLVVSSHDASFEVKKGEMLFGYQPFATRDPRIFEDAEVFVPRRFVGEGEKMLKHVLWSNGRETEEPSASNKQCPGKNLVVLLCRLFLVELFLRYDTFEFEYTQAGFGPTITIKSLTKASTI

SEQ ID NO: 21086 - protein, 681 aa, Triticum aestivum
  misc_feature (366)..(366): Xaa can be any naturally occurring amino acid
LAWSRPRLTPEVTRDVCLLARMMAANLYCAQIEDLMFELSMWRCNDELRSRADELHQSSKKDAKHYIEFWKKVPPNEPYRVILGDVRDNLYNTRERSRELLSSGHSDIPEEATLTNLEQLLEPLELCYRSLCACGDRVIADGTLLDFLRQVSTFGLSLVKLDIRQESDRHTDALDAITSYLGIGSYREWSEERRQEWLLSELNGKRPLFGADLPMTEEVADVMGAFQVIAELPGDNFGAYVISMATSPSDVLAVELLQRECHIKTPLRVVPLFEKLADLEAAPAALARLFSIDWYRERINGKQEVMIGYSDSGKDAGRLSAAWQMYKAQEDLVKVAKQFGVKLTMFHGRGGTVGRGGGPTHLAILXSQPPDTINGSLRVTVQGEVIEQSFGEEHLCFRTLQRFTAATLEHGMRPPISPKPEWRALLDEMAVVATEEYRSIVFQEPRFVEYFRLATPETEYGRMNIGSRPSKRKPSGGIESLRAIPWIFAWTQTRFHLPVWLGFGGAFKHILKKDIRNFHMLQEMYNEWPFFRVTIDLVEMVFAKGNPGIAALYDRLLVSEGLQPLGEKLRANYEETQKLLLQVAGHKDLLEGDPYLKQRLRLRDAYITTMNVCQAYTLKRIRDPDYHVAFRPHLSKEVMDTSKPAAELVTLNPGRVSYAPGLEDTLILTMKGIAAGLQNTG

SEQ ID NO: 21087 - protein, 279 aa, Pseudomonas aeruginosa PAO1
MSEDRSSNGHKSWLDKITQAFAHEPRNRQELLELLRDAHDNKLLDSEALSIVEGAIQVADLQVRDIMVPRSQMMSIRSTQTPKEFLPAIIEAAHSRYPVVGESLDDVMGVLLAKDLLPLILHNDERPFDIKELLRPATFVPESKRLNVLLREFRANRNHMAIVIDEYGGVAGLVTIEDVLEQIVGDIEDEHDVEEDSYIKPLPSGDFIVKALTPVDAFNDFFGSEFSDEEFDTVGGLVMSAFGHLPKRNEVVELGEFRFRVLNADSRRVHLLRLSPLQN

SEQ ID NO: 21088 - protein, 287 aa, Buchnera aphidicola str. Bp (Baizongia pistaciae)
MLKKVLNGTRIAKKLEFKILKQVNYKLSLGQRPPGLAVILIGSNSASTIYVKKKRFMCEQVGFISKFWKFSKNIQESKILNLIYKLNYDTTIDGILVQLPIPPNINNQKLFSSIIPTKDVDGFHPYNIGSLCQKSPYLRPCTPFGIITMLKHYKIKIRGLHAVVIGASNIVGRPMSMELLLAGCTTTITHRFTKNLKHYVKQADLIVIAIGHAHFLKGTWIKKGAIVIDVGINRLKNGEIVGDVDFKTAYKKSSYITPVPGGVGPMTVITLLNNTLKAYEQISKDCK

SEQ ID NO: 21089 - protein, 555 aa, Gluconacetobacter xylinus
MPSISPFAGKPVDPDRLVNIDALLDAYYTRKPDPAIATQRVAFGTSGHRGSSLTTSFNENHILSISQAIADYRKGAGITGPLFIGIDTHALSRPALKSALEVFAANGVEVRIDAQDGYTPTPVISHAILTYNRDRSSDLADGVVITPSHNPPEDGGYKYNPPHGGPADTDITKVVETAANDYMAKKMEGVKRVSFEDALKAPTTKRHDYITPYVDDLAAVVDMDVIRESGVSIGIDPLGGAAVDYWQPIIDKYGINATIVSKEVDPTFRFMTADWDGQIRMDCSSPYAMARLVGMKDKFDIAFANDTDADRHGIVSGKYGLMNPNHYLAVAIEYLFNNRENWNASAGVGKTVVSSSMIDRVAKEIGRKLVEVPVGFKWFVDGLYNGTLGFGGEESAGASFLRRAGTVWSTDKDGIILGLLAAEITARTKRTPGAAYEDMTRRLGTPYYARIDAPADPEQKAILKNLSPEQIGMTELAGEPILSTLTNAPGNGAAIGGLKVSAKDGWFAARPSGTENVYKIYAESFKSAAHLKAIQTEAQDAISALFAKAAQKNAG

SEQ ID NO: 21090 - protein, 505 aa, Solanum melongena
MDVPCPWYSLLIPLFVFIFLLIHHCFFTTSKKQNMLLLPSPRKLPIIGNLHQLGSLPHRSLHKLSQKYGPVMLLHFGSKPVIVASSVDAARDIMKTHDVVWASRPKSSIVDRLSYGSKDVGFSPFGEYWRRAKSITVLHLLSNTRVQSYRNVRAEETANMIGKIRQGCDSSVINLGEHLCSLTNNIISRVALGRTYDEKESGIEHIIEQFVELLGIFNVGDYIPRLEWVNKFTGLDAKVKKVAKELDMFLEIVIEEHIIRKKKEEYTSTGEAKDFVDVLLEIQNGNETDFPLQRDSLKAILLDSFAAGTDTTFATLDWTMAELLRQPRALKTLQDEVRGLAQGKSEITEDDLKNMQYLRAVIKESLRLHPTQESLLVPRESMEDVNLLGYYHIPARTQAIINAWAIGRDPLSWENPEEYQPERFLNSDADVKGLNFKLLPFGAGRRGCPGSSFAIAVIELALARLVHKFDFALPEGIKPEDLDMTETIGITTRRKLPLLVVATPC

SEQ ID NO: 21091 - protein, 578 aa, Tortula ruralis
MGNSCVGAAGYFQGFTSVIALGGRSSRSPSEVSPTPSKAESRGGSRAEAESPETQRKPPRPAHIPAVEPAETQQFKEVIEAMKKGREMKPVPGQSLTHSVLQRKTENLRDLYVLGKKLGQGQFGTTYLCIEKATNREYACKSIAKRKLISKEDVDDVRRELQIMHHLSGHPNIVMIKGAYEDPASVHLVMELCAGGELFDRIIQRGQYSEAKAAVLTRTIVGVVETCHSLGVMHRDLKPENFLFSSTKEDAALKTTDFGLSVFFKPGEVFRDVVGSPYYVAPEVLRKNYGPEADVWSAGVILYILLSGVPPFWAETEQGIFEQVLKSELDFASDPWPKISDSAKDLIRKMLTPQASKRLKAHQVLAHPWICEDGVAPDRPIDSAVQSRLKHFSAMNKLKKIAIRVIAESLSEEEIAGLKEMFKMMDTDNSGSISYEELKAGLKKVGSNLKEEDVRQLMDAADVDGSGAIDYGEFLAATLHLNKVERDENMFAAFSYLDKDNSGYLTVDELQHALAEFNMGDVSVEELLREVDQNNDGQIDYTEFVTMMRKGNMGGGAGRSSLRNSQQLSLTDVLGIGG

SEQ ID NO: 21092 - protein, 269 aa, Radiomyces spectabilis
HTFYNELRVAPEEHPVLLTEAPLNPKSNREKMTQIMFETFNSPAFYVAIQAVLSLYASGRTTGIVLDSGDGVTHTVPIYEGYSLPHAILRLDMAGRDLTDYLMRILAERGHSFTTTAEREIVRDIKEKLCYVALDFEQEMQTAAQVSALEKSYELPDGQVITVGNERFRAPEALFQPSLLGLESVGIHETSYNSIMKCDVDIRKDLYSNIVMSGGTTMYPGIADRMQKEITALAPSSMKIKIVAPPERKYSVWIGGSILASLSTFQQMW

SEQ ID NO: 21093 - protein, 685 aa, Oryza sativa (japonica cultivar-group)
MGDSTVAGALVPSVPKQEQAPSGDASTAALAVAGEGEEDAGARASAGGNGEAAADRDLLCPICMAVIKDAFLTACGHSFCYMCIVTHLSHKSDCPCCGNYLTKAQLYPNFLLDKVLKKMSARQIAKTASPIDQFRYALQQGNDMAVKELDSLMTLIAEKKRHMEQQESETNMQILLVFLHCLRKQKLEELNEIQTDLQYIKEDISAVERHRLELYRTKERYSMKLRMLLDEPAASKMWPSPMDKPSGLFLPNSRGPLSTSNPGGLQNKKLDLKGQISHQGFQRRDVLTCSDPPSAPIQSGNVIARKRRVQAQFNELQEYYLQRRRTGAQSRRLEERDIVTINKEGYHAGLEDFQSVLTTFTRYSRLRVIAELRHGDLFHSANIVSSIEFDRDDELFATAGVSKRIKVFEFSTVVNEPSDVHCPVVEMATRSKLSCLSWNKYSKNVIASSDYEGIVTVWDVQTRQSVMEYEEHEKRAWSVDFSRTEPSMLVSGSDDCKVKVWCTKQEASAINIDMKANICSVKYNPGSSHYVAVGSADHHIHYFDLRNPSAPVHVFGGHKKAVSYVKFLSTNELASASTDSTLRLWDVKENCPVRTFRGHKNEKNFVGLSVNNEYIACGSETNEVFVYHKAISKPAANHRFVSSDLDDADDDPGSYFISAVCWKSDSPTMLTANSQGTIKVLVLAP

SEQ ID NO: 21094 - protein, 269 aa, Rhizomucor miehei
HTFYNELRVAPEEHPVLLTEAPLNPKSNREKMTQIMFETFNAPAFYVAIQAVLSLYASGRTTGIVLDSGDGVTHTVPIYEGYALPHAILRLDMAGRDLTEYLVRILVERGHSFTTTAEREIVRDIKEKLCYVALDFEQEMQTAAQSSALEKSYELPDGQVITVGNERFRAPEALFQPSLLGLETAGIHETAYNSIMKCDVDIRKDLYSNVVMSGGTTMYPGIADRMQKEITALAPSSMKIKIVAPPERKYSVWIGGSILASLSTFQAMW

SEQ ID NO: 21095 - protein, 255 aa, Escherichia coli
MSELIVSRQQQVLLLTLNRPAARNALNNALLTQLVNELEAAATDSSISVCVITGNARFFAAGADLNEMAEKDLAATLNDTRPQLWARLQAFNKPLIAAVNGYALGAGCELALLCDVVVAGENARFGLPEITLGIMPGAGGTQRLIRSVGKSLASKMVLSGESITAQQAQQAGLVSDVFPSDLTLEYALQLASKMARHSPLALQAAKQALRQSQEVALQAGLAQERQLFTLLAATEDRHEGISAFLQKRTPDFKGR

SEQ ID NO: 21096 - protein, 177 aa, Neisseria meningitidis Z2491
MGIYDFQMKDAEGNAVDLSGYRGKVLLIVNTATRCGLTPQYEALQKLYAQYTAEGLEILDFPCNQFREQAPESSGEIAQVCMMKFGTKFKIFDKIEVNGANTAPLYAYLKSVKPQDKGNHLFKDFVLKLAALGEKRDEGDIKWNFTKFLVNRDGEVVERFAPSVTPEEIEADIRALL

SEQ ID NO: 21097 - protein, 94 aa, Zea mays
MDGQPGAAASSSPGRRVKASLVLGSESFTINSESGTLSEQLATVKEKSMAVLKEHIARHNAPNEVPDEAAEGESDSEDEAALVDNPPKKPKKQK

SEQ ID NO: 21098 - protein, 262 aa, Escherichia coli
MMEFILSHVEKGVMTLTLNRPERLNSFNDEMHAQLAECLKQVERDDTIRCLLLTGAGRGFCAGQDLNDRNVDPTGPAPDLGMSVERFYNPLVRRLAKLPKPVICAVNGVAAGAGATLALGCDIVIAARSAKFVMAFSKLGLIPDCGGTWLLPRVAGRARAMGLALLGNQLSAEQAHEWGMIWQVVDDETLADTAQQLARHLATQPTFGLGLIKQAINSAETNTLDTQLDLERDYQRLAGRSADYREGVSAFLAKRSPQFTGK

SEQ ID NO: 21099 - protein, 269 aa, Rhizomucor pusillus
HTFYNELRVAPEEHPVLLTEAPLSPKSNREKMTQIMFETFNAPAFYVAIQAVLSLYASGRTTGIVLDSGDGVTHTVPIYEGYALPHAILRLDMAGRDLTEYLVRILVERGHSFTTTAEREIVRDIKEKLCYVALDFEQEMQTAAQSSALEKSYELPDGRVITVGNERFRAPEALFQPSLLGLETAGIHETAYNSIMKCDVDVRKDLYSNVVMSGGTTMYPGIADRMQKEITALAPSSMKIKIVAPPERKYSVWIGGSILASLSTFQSMW

SEQ ID NO: 21100 - protein, 344 aa, Helicobacter pylori J99
MILRRVTEALEAYKNGEMLIVMDDEDRENEGDLVLAGIFSTPEKINFMATHARGLICVSLTKDLANKFELPPMVSVNDSNHETAFTVSIDAKEAKTGISAFERHLTIELLCKDTTKPSDFVRPGHIFPLIAKDGGVLARTGHTEASVDLCKLAGLKPVSVICEIMKEDGSMARRGDKFLSDFAIKHNLKTLYVSDLISYRLENESLLKMFCQEEREFLKHQTQCYTFLDHQQKNHYAFKFKGAKTHDLAPLVRFHPIKEDFDFLTTGAFEAFFKALEYLKREGGYLIFMNTHSEQNNIVKDFGIGALVLKNLGVKDFRLLSSCEDRQYKALSGFGLKLVETISL

SEQ ID NO: 21101 - protein, 605 aa, Vibrio sp. Ex25
MSQPILSQINVFPVKSVGGLSLSSVWVEKQGLSFDRRFMIAKADGAMITARKYPQMVTIKSALLSDGVVFSSLGMEPLKIRYQDFKMQETPATVWKDTFTAYTTTDDADDWFSRVLGQRVELLFSGEQSNRVREKLGQNVSFADGYPVLVISQASLDELNRRSSEQHSMDQFRTNLVVSDTKPFEEDSWKRIRIGEVEFESLKPCERCILTTVNTQRGTFRESKEPLKTLQQFRANDVGGVFFGQNLVARNEGIIRQGDKVEVLEYKEPEFYADNSPVRMTLTCVEREEIAQDFVTLWLEPNKGSLPNYLPGQHLPIEVNIDGKKVGRRYTLSSSPSRPGRYAISVKRIAGGRVSNSLLDNLQVGDVLEAEQPDGQFHLKTHEAQPLLLLSAGSGVTPMLSMVRYLADHNQLENVVFYHQCRAENDIPCRSELEQLKRKHPGLEVKICLTQPAVDWFGLKGRLSLSHIKQIKDIEQRQVFVCGPDGFMEKAKNLLLRKGLPEENYHQEAFGVSSVTSRPEKSIAIDFNGTKVVGNNQKTLLEQLEDAGKVVSNSCRAGLCGACKVQLTSGQVHHPDVPALTDEERAMGTVLACCAVPETDVTVTN

SEQ ID NO: 21102 - protein, 331 aa, Vibrio cholerae O1 biovar eltor str. N16961
MTIKVGINGFGRIGRFVFRAAQERNDIEIVGINDLIDVDYMAYMLKYDSTHGRFNGTVEVKDGNLIVNGKTVRVTAERNPADLKWGEIGVDVVAEATGLFLTDETARKHIEAGAKKVVLTGPSKDKTPMFVMGVNHKTYAGQDIVSNASCTTNCLAPIAKVLNDNFGIESGLMTTVHATTATQKTVDGPSAKDWRGGRGASQNIIPSSTGAAKAVGVVLPELNGKLTGMAFRVPTANVSVVDLTVNLQKAASYDDIKAAMKAASEGELAGILGYTEDAVVSTDFNGDTRTSIFDADAGIALTDKFVKVVSWYDNEIGYSNKVLDLIAHISK

SEQ ID NO: 21103 - protein, 503 aa, Mesorhizobium loti MAFF303099
MIKTIDRFLDHLTMYRLVLYYLMALVGAAFVLGFVRLVPHDPIALAFTTALALAACWITNKVFARIFAVPANKESVYITALILALILDPVAVTDIKGIAAVAFASVWAISSKFILAIGRKHLFNPAALGVALSALLLDQPATWWVGGNLPLLPLVLVGGMLIVRKLRRLYLVSTFVVVALATILATTDPSQYWTALAETLGSSPLLFFAFVMLTEPLTAPTMRWPRIAFAAIVGFLFAPNIHIGSFYFTPELALLAGNLFAYAAGPKGRFVLTLERIEQSAVDSFDFVFRSPRKLAFEAGQYLEWTLGLDRADNRGNRRFFTVASAPTEETVRLGVKFYPQSSAFKRELMTMKPGSTIHAAQLAGNFTLPARRETKIAFLAGGIGITPFRSMLQYLLDRKERRPIVILYGTEGQQDIAYREVLGAARQELGIKTIHAVASGGERGQYPGYIDERLIRLAIPDYLERTFYISGPQAMVKALRQKLLAMGVRRPKIKVDYFPGFA

SEQ ID NO: 21104 - protein, 391 aa, Rhodobacter sphaeroides 2.4.1
MAKAKFERNKPHVNIGTIGHVDHGKTTLTAAITKYFGEFRAYDQIDGAPEERARGITISTAHVEYESDTRHYAHVDCPGHADYVKNMITGAAQMDGAILVVNAADGPMPQTREHILLGRQVGIPYMVVYMNKVDQVDDPELIELVEMEIRELLSSYDYPGDDIPIIKGSALAAMNGTDKEIGEDSIRALIAAVDEYIPTPARAVDQPFLMPVEDVFSISGRGTVATGRIERGVVKVGEELEIVGIRPSKKTVCTGVEMFRKLLDQGEAGDNVGLLLRGVDRDGIERGQVLCKPGSVKPHTKFEAEAYILTKEEGGRHTPFFANYRPQFYFRTTDVTGTVQLPEGTEMVMPGDNLKFNVELIAPIAMEEKLRFAIREGGRTVGAGVVSKIIA

SEQ ID NO: 21105 - protein, 231 aa, Zea mays
MACRRWWSTAVVFPPVARPPGSAGSHFLGGAGVRGVEIGGNFIKFTAIGVYLEDAAVPALAKKWGGKTADELASDAAFFRDVVTGDFEKFTRVTMILPLTGEQYAEKVTENCVAFWKAAGLYTDAEGVAVEKFREVFKPETFAPGRSILFTHSPAGVLTVAFSKDSSVPAAGGVAIENKRLCEAVLESIIGERGVSPAAKLSLAARVSELLAKETAAAADAPQAEPVSITA

SEQ ID NO: 21106 - protein, 269 aa, Rhizomucor variabilis
HTFYNELRVAPEEHPVLLTEAPLNPKSNREKMTQIMFETFNAPAFYVSIQAVLSLYASGRTTGIVLDSGDGVTHTVPIYEGYSLPHAILRLDMAGRDLTDYLMRILAERGHSFTTTAEREIVRDIKEKLCYVALDFEQEMQTAAQSSALEKSYELPEGQVITVGNERFRAPEALFQPSLLGLEGAGIHETTYNSIMKCDVDIRKDLYSNIVMSGGTTMYPGIADRMQKEITALAPSSMKIKIVAPPERKYSVWIGGSILASLSTFQQMW

SEQ ID NO: 21107 - protein, 108 aa, Escherichia coli
SDKIIHVTDDSFDTDVLKADGAILVDFWAEWCGPCKMIAPILDEIADEYQGKLTVAKLNIDQNPGTAPKYGIRGIPTLLLFKNGEVAATKVGALSKGQLKEFLDANLA

SEQ ID NO: 21108 - protein, 635 aa, Arabidopsis thaliana
MGFLVDTQKEGGGHSWGYVRSLVRRKQVDSANGQSHGHQLARALTVPHLVAIGVGATIGAGVYILVGTVAREHSGPSLALSFLIAGIAAGLSAFCYAELSSRCPSAGSAYHYSYICVGEGVAWIIGWALILEYTIGGSAVARGISPNLALIFGGEDGLPAILARHQIPGLDIVVDPCAAILVFVVTGLLCMGIKESTFAQGIVTAVNVCVLLFVIVAGSYLGFKTGWPGYELPTGFFPFGVDGMFAGSATVFFAFIGFDSVASTAEEVRNPQRDLPIGIGLALLLCCSLYMMVSIVIVGLIPYYAMDPDTPISSAFASHDMQWAVYLITLGAVMALCSALMGALLPQPRILMAMARDGLLPSIFSDINKRTQVPVKATVATGLCAATLAFIMDVSQLAGMVSVGTLLAFTMVAISVLILRYVPPDEQPLPSSLQERIDSVSFICGETTSSGHVGTSDSSHQPLIVNNDALVDVPLIKNQEALGCLVLSEETRRIVAGWSIMFTCVGAFLLSYAASSLSFPGLIRYPLCGVGGCLLLAGLIALSSIDQDDARHTFGHSGGYMCPFVPLLPIICILINMYLLVNLGSATWARVSVWLLIGVIVYVFYGRKNSSLANAVYVTTAHAEEIYREHEGSLA

SEQ ID NO: 21109 - protein, 1141 aa, Staphylococcus aureus subsp. aureus N315
MINRDNKKAITKKGMISNRLNKFSIRKYTVGTASILVGTTLIFGLGNQEAKAAENTSTENAKQDDATTSDNKEVVSETENNSTTENDSTNPIKKETNTDSQPEAKEESTTSSTQQQQNNVTATTETKPQNIEKENVKPSTDKTATEDTSVILEEKKAPNYTNNDVTTKPSTSEIQTKPTTPQESTNIENSQPQPTPSKVDNQVTDATNPKEPVNVSKEELKNNPEKLKELVRNDNNTDRSTKPVATAPTSVAPKRLNAKMRFAVAQPAAVASNNVNDLITVTKQTIKVGDGKDNVAAAHDGKDIEYDTEFTIDNKVKKGDTMTINYDKNVIPSDLTDKNDPIDITDPSGEVIAKGTFDKATKQITYTFTDYVDKYEDIKARLTLYSYIDKQAVPNETSLNLTFATAGKETSQNVSVDYQDPMVHGDSNIQSIFTKLDENKQTIEQQIYVNPLKKTATNTKVDIAGSQVDDYGNIKLGNGSTIIDQNTEIKVYKVNPNQQLPQSNRIYDFSQYEDVTSQFDNKKSFSNNVATLDFGDINSAYIIKVVSKYTPTSDGELDIAQGTSMRTTDKYGYYNYAGYSNFIVTSNDTGGGDGTVKPEEKLYKIGDYVWEDVDKDGVQGTDSKEKPMANVLVTLTYPDGTTKSVRTDANGHYEFGGLKDGETYTVKFETPAGYLPTKVNGTTDGEKDSNGSSITVKINGKDDMSLDTGFYKEPKYNLGDYVWEDTNKDGIQDANEPGIKDVKVTLKDSTGKVIGTTTTDASGKYKFTDLDNGNYTVEFETPAGYTPTVKNTTAEDKDSNGLTTTGVIKDADNMTLDSGFYKTPKYSLGDYVWYDSNKDGKQDSTEKGIKDVKVTLLNEKGEVIGTTKTDENGKYRFDNLDSGKYKVIFEKPAGLTQTVTNTTEDDKDADGGEVDVTITDHDDFTLDNGYFEEDTSDSDSDSDSDSDSDSDSDSDSDSDSDSDSDSDSDSDSDSDSDSDSDSDSDSDSDSDSDSDSDSDSDSDSDSDSDSDSDSDSDSDSDSDSDSDSDSDSDSDSDSDSDSDSDSDSDSDSDSDSDSDSDSDSDSDSDSDSDSDSDSDSDAGKHTPVKPMSTTKDHHNKAKALPETGSENNGSNNATLFGGLFAALGSLLLFGRRKKQNK

SEQ ID NO: 21110 - protein, 231 aa, Mesorhizobium loti MAFF303099
MSRLHTENHLISRIGWLRAAVLGANDGIVSTASLIVGVAAANAAASNVLVAGIAGLVAGAMSMAAGEYVSVSSQSDTERADLDRERRELATQPSFERQELADIYVKRGVEPKLALQVADQLMAKDALGAHARDELGISEMTTARPIQAALASAAAFSVGAAMPLAMVLVSPAAWLAATVSVASLLFLAVLGAIGAKAGGANVLRATVRVTFWGALAMALTASIGAVVGTAI

SEQ ID NO: 21111 - protein, 134 aa, Lactobacillus delbrueckii subsp. lactis
HARGLLCTSIGREIAERLELPQMWQDNTDPFGTAFTVSVDYKTTTTGISAYDRATTIKALADPEAKPEAFFKPGHCFPLVAKDGGVLERNGHTEASVTLARLAGEAEVAYICEILKEDGHMARRPEMEEIAKEY

SEQ ID NO: 21112 - protein, 467 aa, Listeria innocua
MTSVMWFRRDLRVNDNKALYHACKEEDLILLFQVNPEQFIKGSPSHQAFFASVAHFQQELNKNTHLQIMFGEPIELLKQLKEKIPTWDKVFFNRDETGYGASRDEAARAFFADKEITVHSYHDSYLHSAEEVKKSATEYYKIFTPYYKKWREEIKEMPLKVTLKPEKIRKESLFPNYEEQFRELIQDLPAFDSGEKAANTRLANFVKEDLADYDKARDVPALDKTSHLSRYLRTGEISIRTVWQALQKEEATEGRATFEKELCWRDFYNMIYVSFPKQKNEPIQENYRFIEWENNREFFKKWQDGQTGFPLVDAAMRQLKETGWMHNRLRMITASFLTKDLLIDWRFGEKYFQQMLIDYDPASNIGGWQWAASTGTDAVPYFRIFNPTTQSEKFDPDGTFIRKYVKELRDLPDKFIHQPEKMSETEQKEHGLILGKDYPLPIIDHKERRKLAIARYEFSKEHSRGNI

SEQ ID NO: 21113 - protein, 333 aa, Candida albicans SC5314
MSYPTIPWPTFADLKQMLHGFWASKPTYTESQYPDLQDKVVIVTGGNTGLGYETVKSLAGSTKARIYVFSRNKEKTLAAIKQIQLEIAEEYNVSNSDIRFIQVDLSDLTTIKPAVEEFLKQEQRIDIIIHNAGIMGPPVGSKSKQGYELQWGTNVVGPHLLQRLLDPLFIKTSETNPPGFSRIVWVSSTAHLFAPQGGVFWDNVNYENLKLSQTQVRTTLYAQSKAGNLIQARTWSRKHNYPNVISSSLCPGYLYTDLIRNLNSFEQCFVKRLIYPRRYGAYTELYAAFSPDVKDGAHTIGFGVPSHARTDLTSEAVGDKTWAYLDKETDAYL

SEQ ID NO: 21114 - protein, 510 aa, Mycobacterium tuberculosis H37Rv
MTTQISHFIDGQRTAGQSTRSADVFDPNTGQIQAKVPMAGKSDIDAAVASAVEAQKGWAAWNPQRRARVLMRFIELVNDTIDELAELLSREHGKTLADARGDVQRGIEVIEFCLGIPHLLKGEYTEGAGPGIDVYSLRQPLGVVAGITPFNFPAMIPLWKAGPALACGNAFVLKPSERDPSVPVRLAELFIEAGLPAGVFQVVHGDKEAVDAILHHPDIKAVGFVGSSDIAQYIYAGAAATGKRAQCFGGAKNHMIVMPDADLDQAVDALIGAGYGSAGERCMAISVAVPVGDQTAERLRARLIERINNLRVGHSLDPKADYGPLVTGAALARVRDYIGQGVAAGAELVVDGRDRASDDLTFGLPEGDANLEGGFFIGPTLFDHVAAHMSIYTDEIFGPVLCMVRARDYEEALRLPSEHEYGNGVAIFTRDGDAARDFVSRVQVGMVGVNVPIPVPVAYHTFGGWKRSGFGDLNQHGPAAIQFYTKVKTVTSRWPSGIKDGAEFVIPTMS

SEQ ID NO: 21115 - protein, 852 aa, Arabidopsis thaliana
MGNALVKKEPPPPVVLVPPLFDYPPLSARTRMLESSYNLLFGKLALRCLFEDYFEEANRFTGKFLLKPTDDPHKIRIFLNSLKVSGAVDGRVEGDFVGNAEFRWQRVLLMRSSAYYPKYGIGAFAVYPLISKITGKSSEEYRIMGLRYGSTNLSVGATVTPFSANNELPKHAWLVSKMGSLTVGVQYEPLHGSKDLAKYTDPRNWSCAAGYGVGSQSPLTPSFNIGIELARSSQFIASFYQHVVVQRRVQNPFEENQVVGITNYIDFGFELQSRVDDSKTPPNAPDSLLQVAASWQANKNFLLKGKVGAHSSTLSLAFKSWWKPSFAFNISATTNHRTGNVQCGFGLRVDNLREASYQRADPNFVMLTPNKEHLAEGIVWKMGKRPMYQADVDAENFKTTIPLSHDQKKKKKLNGDDDELFASPFFHSLPSLSSFFSPLLLQSLFFTILSNFSLPNPIQTLFPNPLELSLNDNNRDDDDDTLHFTPFSAVKPFFLLCTSVALSFSLFAASPAVESASAFVVSTPKKLQTDELATVRLFQENTPSVVYITNLAVRQDAFTLDVLEVPQGSGSGFVWDKQGHIVTNYHVIRGASDLRVTLADQTTFDAKVVGFDQDKDVAVLRIDAPKNKLRPIPVGVSADLLVGQKVFAIGNPFGLDHTLTTGVISGLRREISSAATGRPIQDVIQTDAAINPGNSGGPLLDSSGTLIGINTAIYSPSGASSGVGFSIPVDTVGGIVDQLVRFGKVTRPILGIKFAPDQSVEQLGVSGVLVLDAPPSGPAGKAGLQSTKRDGYGRLVLGDIITSVNGTKVSNGSDLYRILDQCKVGDEVTVEVLRGDHKEKISVTLEPKPDES

SEQ ID NO: 21116 - protein, 231 aa, Aspergillus oryzae
MSQSHALSDDQVAGELRKMTAFIRQEALEKAREIELKADEEFAIEKSKLVRQETAAIDTLYEKKFKQAAMSQQITRSTLSNRTRLRVLSSRQELLDELFQQARDKISSIASKDAKKYETVLQGLILEGLYALNEEKVAIRVRAKDTDAAKKAIEEAQKVFKEKVGKDVTVEVDEAEPLPEGSAGGVVIIGGQGTIELNNTFEERLRLLEIDALPAVRETLFGKNQNRRFYD

SEQ ID NO: 21117 - protein, 509 aa, Cryptococcus neoformans var. neoformans JEC21
MGNTPSHQQQPSRVSPPSTDAPQRHPSLRIHMPRRHVSPQSSNPTSPSSGRPGSGSPRRRKSLELPDLNKLSFTPAALTPAAPVPTTHTHTSHHFAPSTAAGHHARHPASPPLPGTPTGAPSLGSEAANGSGTGSSNRYWRDQLGARASPLAGANSLGALSKLEPTLSASSTGSRGGAMGSDVNPFFPDPYGVQDPSARNVKAIPIPIPGKDKGQDQPQVQQATAQAQAQPRPSDLGAIVPVQEEKPKDDGLVDVQIQWNGGGRNVYVAGTWDGGWAKRIKLHRSTHDFNTTIRLPPGQYRLKFIVDDSWRCSKQISTAVDDDGTLVNWIEVEAPKTAEEIKAEWAMDSEPAAKEEDTDESQWTSEIPPALILYQYIEELPFRFHPDELSSFLKSVPYIPNVPAPPTLPRILDKVIVNNDSKRLWDSKDHKGQPGYQHAPPAGVDDNSMLAVPNHVVLNHLTASAIRNGTLGVGTTTRYRKKYITTMFFRDQPAPNEHPANQPVPQSAH

SEQ ID NO: 21118 - protein, 831 aa, Saccharophagus degradans 2-40
MTVTRRDFVRHQALATAAAAAGVAVPAAATNIVTTAADNKLVWSKAPCRFCGTGCSVNVATKEGRVVATHGDIKSPVNRGLNCVKGYFLSKVMYGEDRLTQPLLRKKNGVYAKDGEFEPVTWEEAFTIMAEKFKKTLKEKGPEGIGMFGSGQWTVWEGYAASKLMKAGFRSNNIDPNARHCMASAVGGFMRTFGIDEPMGCYDDFEHADAFVLWGSNMAEMHPILWTRIADRRLSYPHVQVAVMSTYEHRSFDLADLGVVFTPQSDLAIANFIANYIIQNKKVNWDFVKKHTNFRVGTTDIGYGLRPEHPLQKAAKNADSAGASEPIDFETYAKFVADYTVEKASEISGVSEDKLIKLAKLYADPNIKVMSLWTMGVNQHTRGVWMNNLIYNIHLLTGKISEPGNSPFSLTGQPSACGTAREVGTFSHRLPADMVVTNPKHRAYAEKIWKLPEGSIPEKVGAHAVLQSRKLKDGEINAYWVQVNNNVQAGPNINEEVLPGYRNPQNFIVVSDAYPTVTAQAADLILPSAMWVEKEGAYGNAERRTQFWHQLVNAPGDARSDLWQLVEFSKYFKVEEVWPADLIAKMPEAKGKTLFDILYKNGKVNKFPLAQVSKDYENKEADAFGFYIQKGLFEEYAEFGRGHGHDLADFDRYHEERGLRWPVVNGEETLWRYREGSDPYVEKGKGVQFYGKPDGKAIIFALPYEPPAESPNKEYPFWLCTGRVIEHWHSGSMTQRVPELYKAFPDAVCFMHPEDARSAGLRRGDKVKLQSIRGHIITRIETRGRNKPPKGLVFVPWFDARQLINKVTLDATDPISKQTDFKKCAVKVERV

SEQ ID NO: 21119 - protein, 149 aa, Pseudomonas syringae
TETRDLLVSLAGEVGLKDAIKAQYDGELVNSSEGRPVLHTALRRPVGDKLKVNGVDVMPDVHRVLNQMTELVGRIHDGLWRGYTEKPITDVVNIGIGGSFLGPELVSEALVAYAHKGVRCHYLANIDGSEFHELSMKIRAETTLFIVSS

SEQ ID NO: 21120 - protein, 319 aa, Prunus persica
MENFPIINLEGLNGEGRKATMEKIKDACENWGFFELVSHGIPTEFLDTVERLTKEHYRQCLEQRFKELVASKGLEAVKTEVNDMDWESTFYLRHLPKSNISEVPDLEDQYRNVMKEFALKLEKLAEQLLDLLCENLGLEQGYLKKAFYGTNGPTFGTKVSNYPPCPNPELIKGLRAHTDAGGLILLFQDDKVSGLQLLKDGQWIDVPPMRHSIVINLGDQLEVITNGKYKSVEHRVIAQTDGTRMSIASFYNPGSDAVIYPAPTLVEKEAEEKNQVYPKFVFEDYMKLYAGLKFQPKEPRFEAMKAVETNISLGPIATA

SEQ ID NO: 21121 - protein, 455 aa, Glycine max
VIPSFTVGEACQKYGSIFMHPQGLYISLKEKGKIREVLRNWPEKNIQVIVVTDGERILGLGDLGCQGMGIPVGKLSLYTALGGVRPSACLPITIDVGTNNEKLLNDELYIGLKQRRATGQEYAELMHEFMTAVKQTYGEKVLIQFEDFANHNAFNLLEKYRSTHLVFNDDIQGTASVVLAGLVASLKLVGGNLADHRFLFLGAGEAGTGIAELIALETSKQTNAPLEEVRKNIWLVDSKGLIVSSRKDSLQHFKKPWAHEHEPVKNLLDAVNKIKPTVLIGTSGQGRTFTKEVIEAMASINKRPIILSLSNPTSQSECTAEEAYKWSQGRAIFASGSPFPPVEYEGKVFVPGQANNAYIFPGFGLGLIMSGTIRVHDDLLLAASEALAAQVSQENFDKGLIYPPFTNIRKISAHIAANVAAKAYELGLATRLPQPKDLVKFAESCMYTPAYRSYR

SEQ ID NO: 21122 - protein, 142 aa, Malus x domestica
VADFGVARVISQSGVMTAETGTYRWMAPEVIEHKLYDHKADVFSFGVVLWELLTGKLPYEYLTPLQAAVGVVQKGLRPTIPKNTPPKLAELLEKCWQQDPKSRPDFLEIIEILQALAKEVGDGEERHKSSGGFMSILRRGHH

SEQ ID NO: 21123 - protein, 613 aa, Arabidopsis thaliana
MASLSGLYSSSPSLKPAKNHSFKALPAQSRDSFSFPHTSKPTNLPLTLSSARSVARDISHADSKKELLKDPDALWKRYLDWFYQQKELGLYLDISRVGFTDEFVAEMEPRFQAAFKAMEDLEKGSIANPDEGRMVGHYWLRNSKLAPKPTLKTLIENTLDSICAFSDDIISGKIKPPSSPEGRFTQILSVGIGGSALGPQFVAEALAPDNPPLKIRFIDNTDPAGIDHQIAQLGPELASTLVVVISKSGGTPETRNGLLEVQKAFREAGLNFAKQGVAITQENSLLDNTARIEGWLARFPMYDWVGGRTSIMSAVGLLPAALQGINVREMLTGAALMDEATRTTSIKNNPAALLAMCWYWASNGVGSKDMVVLPYKDSLLLFSRYLQQLVMESLGKEFDLDGNTVNQGLTVYGNKGSTDQHAYIQQLRDGVHNFFATFIEVLRDRPPGHDWELEPGVTCGDYLFGMLQGTRSALYANGRESISVTIQEVTPTSVGAIIALYERAVGLYASIVNINAYHQPGVEAGKKAAAEVLALQKRVLSVLNEATCKDPVEPLTLEEIADRCHAPEEIEMIYKIIAHMSANDRVLIAEGNCGSPRSIKVYLGECNVDDLYA

SEQ ID NO: 21124 - protein, 166 aa, Brassica napus
  misc_feature (156)..(156): Xaa can be any naturally occurring amino acid
DQFLEPLELCYRSLCDCGDRPIADGSLLDFLRQVSTFGLALVKLDIRQESDRHTDVLDAITQHLGIGSYKEWSEDKRQEWLLSELSGKRPLFGHDLPKTEEIADVLDTFKVISELPHDSFGAYIISMATAPSDVLAVELLQRECGITHPLRVVPLXFEKLADLENA

SEQ ID NO: 21125 - protein, 268 aa, Actinoplanes teichomyceticus
MSSVTAARVRYHRTGHVARVTLDRPDVLNAMDLRMHEELARIWDDIEADDRIRVVVLTGAGDRAFSVGQDLKERARRDAAGTPGSSFGSRGQPGWPRLTERFGFSKPVVARVDGYALGGGFELALACDLIIASDRSVFGLPEVRLGLVPGAGGVFRLVRQLPQKTAMGYLLTGRRFDAATALRFGLVNEVVPAQRLDACVDGWVDDLVTSAPLSVRAIKEAALRSVDLPLPDAFTATYRWEQRRRASADAVEGPRAFAERRAPRWSGT

SEQ ID NO: 21126 - protein, 364 aa, Streptococcus pneumoniae R6
MKKAILMMTFGSPEEITFEGVADFFTNIRRGVRPQDHEIQTLYDNYVRIGGTPLQKITRQEVTLVEARLGNEYSVYFANKFSSPFIPDVIGQMEADGIEQCICLILEPHYSFYSVMGYEKFLESKQIQFLVIKDWYQEEALLNYWADEIAKILKEEVKQDSFKVIFSAHSVPIFALDFGDPYIDQIFENSKLVAEKLGLSSEQYTNTWQSESDIGIPWIKPDVLEYLREQTEHPDHYIFVPISFISEHIEVLFDNDVECYDLCQEFGVNYHRPPMPNTDSRLIDALVNTVRVNENQEFKEFLPEEETFDELVPSDETKNILAESEDLQMPEFVKKLIEKKGRENVKMPYLIKKMLEKAGKLPKE

SEQ ID NO: 21127 - protein, 487 aa, Vigna radiata
MRRGLDNQAYYVLGHKTPNIRDLYTLGRKLGQGQFGTTYLCTENSTSNEYACKSISKRKLISKEDVEDVRREIQIMHHLAGHKNIVTIKGAYEDPLYVHIVMELCSGGELFDRIIQRGHYTERKAAELTKIIVGVVEACHSLGVMHRDLKPENFLLVNKDDDFSLKAIDFGLSVFFKPGQIFTDVVGSPYYVAPEVLLKHYGPEADVWTAGVILYILLSGVPPFWAETQQGIFDAVLKGHIDFDSDPWPLISDSGKDLIRKMLCSQPSERLTAHQVLCHPWICENGVAPDRAIDPAVLSRLKQFSAMNKLKKMALRVIAESLSEEEIAGLREMFQAMDTDNSGAITFDELKAGLRRYGSTLKDVEIRDLMEAADVDKSGTIDYGEFIAATVHLNKLEREEHLIAAFQYFDKDGSGYITVDELQQACAEHNMTDAFLEDIIREVDQDNDGRIDYGEFAAMMQKGNAGIGRRTMRNSLNLSMRDASSAQ

SEQ ID NO: 21128 - protein, 847 aa, Rosa hybrid cultivar
MEMPGRRSNYTLLSQVPDDHFAAATATSFYESEGKNNNNKAKGDSRGFDWETGGGEYRAAPANRIGNVYSSVGLQRQSSGSSFGESSLSGEYYAPTLSTTAANEIDGFGYVNDDGFKTGGGGGEFRGKGGGMDGGVGPPGGSSSGKSWAQQTEESYQLQLALALRLSSEATCADDPNFLDPVPDESSSRLSSSADAVSHRFWVNGCLSYFDKVPDGFYLIHGIDSYVWSMCTDVQESGRIPSIESLKSVDPGTGSSIEVVLIDRRSDPSLKELQNRVLSISYACITTTEIVDQLAKLVCSRMGGSASVGEAEFFSIWRESSDDLKDCLGSVVVPIGSLSIGLCRHRALLFKVLADTIDLPCRIAKGCKYCTRDDASSCLVRFGIDRELLVDLIGNPGCLCEPDSLLNGPSSISISSPLRFPRLRTVEPTIDFRSLAKQYFSDCQLLNLVFDEAPAGSAGDEDNKGFSMYPKQKFTDGNNLFLVSGLGDDTSMHVDDRNPQFLKSFNPSQNIVHQQTVLKDQIPLKRIPPIGHRDISRLDTSKDSRFGEGLQVVPSKPNKELTLDVDDLDIPWSDLVLKERIGAGSFGTVHRADWHGSDVAVKILMEQEFHAERFNEFLREVAIMKRLRHPNIVLFMGAVTKPPNLSIVTEYLSRGSLYRLLHKPGPILDERRRLYMAHDVAKGMNYLHRRNPPIVHRDLKSPNLLVDKKYTVKVCDFGLSRLKANTFLSSKSAAGTPEWMAPEVLRDEPSNEKSDVYSFGVILWELATLQQPWGNLNPAQVVAAVGFKNKRLEIPRDLNPQVASIIEACWANEPWKRPSFASIMESLRPLIKAPTPQPSHADMPILT

SEQ ID NO: 21129 - protein, 526 aa, Chlamydophila pneumoniae AR39
MERKRFIDCDSTKILQELALNPLDLTAPGVLSAERIKKFSWLGGGFTFSFATERLDDAILAALISLAEERGLHESMLAMQQGQVVNYIEGFPSEMRPALHTATRAWVTDSSFTGEAEDIAVRSRVEAQRLKDFLTKVRSQFTTIVQIGIGGSELGPKALYRALRAYCPTDKHVHFISNIDPDNGAEVLDTIDCAKALVVVVSKSGTTIETAVNEAFFADYFAKKGLSFKDHFIAVTCEGSPMDDTGKYLEVFHLWESIGGRFSSTSMVGGVVLGFAYGFEVFLQLLQGASAMDQIALQPNARENLPMLSALISIWNRNFLGYPTEAVIPYSSGLEFFPAHLQQCCMESNGKSIVQDGRRVGFSTSPVIWGEPGTNGQHSFFQCLHQGTDIIPVEFIGFEKSQKGEDISFQGTTSSQKLFANMIAQAIALACGSENTNPNKNFDGNRPSSVLVSSQLNPYSLGELLSYYENKIVFQGFCWGINSFDQEGVSLGKALANRVLELLEGADASNFPEAASLLTLFNIKFR

SEQ ID NO: 21130 - protein, 154 aa, Triticum aestivum
  misc_feature (40)..(40): Xaa can be any naturally occurring amino acid
  misc_feature (87)..(87): Xaa can be any naturally occurring amino acid
MAPTVMASSATSVAPFQGLKSTAGLPVSRRSNGASLGSVXSNGGRIRCMQVWPIEGIKKFETLSYLPPLSTEALLKQVDYLIRSKWXVPCLEFNKVGFIFREHNASPRVLRRLLGQCGNCLCSGWNRPTQGDRWGRVGTLDAVRPQSIRITIPR

SEQ ID NO: 21131 - protein, 477 aa, marine gamma proteobacterium HTCC2207
MSIAASSSTKKLSILQITIVAALGGLLFGYDTGVIAGSQLYFTKYFNLSAAEQGWAVSSALYGCLVGALAGGYLTKRISRKYTLILAASLFAVSAWGSGMAATLNELAIYRIIGGLAVGMASLAAPMYIAEMAPPKYRGRMVSYYQLAVVIGFFVVFLATYFIGGGDTQNMTPEVLAQLHEHNVNQGWRIMLWSELLPALAFLGLLFTVPHSPRWLISQGRTEEAKTVLAQITSSEQEAASEFADIEASLTHSPAPNLAMLFGKGIGFALFLGVMLSIFQQVTGINAILYYGAEIFSNALGYGPEDALKQQLWLGAVNLIFTFVAIYKVDSWGRKPLFIAGSIGMCAGLTVLGLTIYTQQMGVVSLIAVLVFIASFAMSMGPVVWVMLSEMFPNNVRSVAMSIAVAAQWLFNALVANSFPLVNQSTLNQEGFNGALPYFIFASFCVVAMIFVWKLVPETKGKTLEEMEALWSAKDAG

SEQ ID NO: 21132 - protein, 557 aa, Pseudomonas putida KT2440
MTMLKDPSKKYRAFPTIDLPDRTWPSKTITQAPIWCSSDLRDGNQSLIEPMDSEKKLRFWKTLVQVGVKEIEASFPSASQTDFDFVRTLIEDGHIPDDTTIQVLTQAREDLIARTFESLRGAKKAIVHLYNATSPSFRRIVFNQDKQGVKDIAVNAAKLFVKYAAQQPETQWTFQYSPETFSATEMEFAKEVCDAVIEVWNPTPEHKIILNLPATVEVSTPNIYADQIEWFCRNVSRRDSVIISLHCHNDRGTGIAATELGLMAGADRAEGCLFGNGERTGNVDLVTLALNLYTQGIDPLLDFSDIDGVRKVVEECNQLPVHPRHPYVGDLVHTAFSGSHQDAIRKGFAKQQDGELWEVPYLPIDPADIGRSYEAVIRVNSQSGKGGITYLLEQEYGISLPRRMQIEFSQVVQGETDRLGLEMTAQQIYSLLHKEYLQANAPYALVSHRLQEENGHSAVEVEVAGEGETTLHWRGKGNGALEALVAGLPIAVEIMDYNEHAIGAGTNAKAAAYIELRVAGGRPVHGVGIDENITTASFKALFSALNRSLSQQEAKAA

SEQ ID NO: 21133 - protein, 337 aa, Oceanicola granulosus HTCC2516
MAVKVAINGFGRIGRNVLRGIIESGRTDIEVIAINDLGPVETNAHLLRYDSVHGRFPAEVKTTEDTIDVGQGPIKVTALRDPKELPWSDVDIVLECTGIFTSPEKAGLHLENGAKRVLVSAPLSNPTQGEKTIVYGVNHETLTADDKIVSNASCTTNCLSPVAKVLNDAIGIKKGFMTTIHSYTGDQPTLDTMHKDLYRARAAALSMIPTSTGAAKAVGLVLPELNGKLDGVAIRVPTPNVSVVDLTFEASRETSVEEINDAIRAAAGSGPLKGILTYTDEKLVSSDFNHDPSSSIFHMDQTKVMEGTMCRILTWYDNEWGFSNRMADTAVAMSKYI

SEQ ID NO: 21134 - protein, 286 aa, Staphylococcus aureus subsp. aureus MRSA252
MVAKILDGKQIAKDYRQGLQNQVEALKEKGFTPKLSVILVGNDGASQSYVRSKKKAAEKIGMISEIVHLEETATEEEVLNELNRLNNDDSVSGILVQVPLPKQVSEQKILEAINPDKDVDGFHPINIGKLYIDEQTFVPCTPLGIMEILKHADIDLEGKNAVVIGRSHIVGQPVSKLLLQKNASVTILHSRSKDMASYLKDADVIVSAVGKPGLVTKDVVKEGAVIIDVGNTPDENGKLKGDVDYDAVKEIAGAITPVPGGVGPLTITMVLNNTLLAEKMRRGIDS

SEQ ID NO: 21135 - protein, 319 aa, Kineococcus radiotolerans SRS30216
MPQQDTTPWTPDAMGRQEGRTVLVTGANSGLGLQVATEFARRGADVLLACRNAERGRAAVAELTAAVRDSGVEPTVEVIPLDVADLASVRRAAGDVLHRRSGIDVLVNNAGVMAPPFGRTVDGFETQVGTNHLGHFAFTGLLLPALLTGGGARVVSVASVAHKFGRLNRQNYQSERSYQKWLAYGQSKLSNLLFAFELQRRAAAVGAGIVSTAAHPGLSDTNLWKNTPLAPGRVGAPLGTALSRAVGQPPAQGAWPLLRAATDPAVVGGEYFGPGGRKEWRGFPVQVQANAAAYDTADAAWLWARSVEWTGVDFRELHA

SEQ ID NO: 21136 - protein, 296 aa, Xylella fastidiosa 9a5c
MQDLKKKVILVTGASDGIGKFTAATLAKQGHKLIIHGRNRQKTEAALAEIKRQSGNPDVAMFLADFLPLAGVKAFADAIKEKYDHIDVLINNAGAQFTEQREVTSEGHEKTMAINVFAPMLLTKLLMPLLVKSESARVVTVASDAHRMAGKPDLDDIELKQGYHMAKAYSLSKLYVIWVMHHFIGETKKAGIHNVTFNLVHPASTRTNLGREAVKSWKWKIIFFLWQIMLVSMDKAASSTLYAATAPELEGVSGRYFGPKGEEQPSAKYHSPENEQKVWDYALNAIRPYLPAGAQS

SEQ ID NO: 21137 - protein, 247 aa, Thermobifida fusca YX
MSTLVLLRHGESVWNAEGLFTGWVDVDLSPKGEEEARRGGRLLAEAGIRPDVVHTSLLKRAIRTANIALEEAGLHWIPVKRSWRLNERHYGALQGKNKAQTRAEFGDEQFMIWRRSYDTPPPPLAEDSEFSQHNDPRYATLPPELMPRTECLADVVRRMLPYWYDAIIPDLAAGRTVLVAAHGNSLRALVKHLDNIDDKSIAGLNIPTGIPLVYELNDDFTPRKTGGEYLDPEAAKEAIEAVKNQGK

SEQ ID NO: 21138 - protein, 406 aa, Methylococcus capsulatus str. Bath
MRRVVVTGIGIVSSIGNNKGEVVESLRLGRSGVCRSEEYGELGFRSQVYAPIRLNPDELIDRKIRRFMGDGAAFNYLAMQEAIADAGLEPGEVSNPRTGLIMGSGGPSTSNMLAAWSTFREKGVKKVGPYMVPRSMSNTNSACLATPFQIKGVNYSISSACATSAHCIGNAAEQIQLGKQDIVFAGGGEEVHWTMSVLFDAMGALSAKYNDTPECASRPYDVDRDGFVISGGGGVLVMEELEHAKARGARIYAELTGYGATSDGYDMVQPSGEGAVRCMRQAMATMSGAKVDYVNAHGTSTPVGDIRELEAMKTVFGEDVPPVSSTKSLTGHALGAAGVHEAIYSLLMLEHGFICASANIRNLDPGAAGVPIARERIDDARLDTVMSNSFGFGGTNATLIFQRYAG

SEQ ID NO: 21139 - protein, 122 aa, Oryza sativa (japonica cultivar-group)
MAPRCATLAVVVVLVAAVVAPPTAVRAAISCSAVYNTLMPCLPYVQAGGTVPRACCGGIQSLLAAANNTPDRRTICGCLKNVANGASGGPYITRAAALPSKCNVSLPYKISTSVNCNAYVHA

SEQ ID NO: 21140 - protein, 573 aa, Streptomyces coelicolor
MANRQQPSPMPTAKYRGYDQVDIADRTWPNQRITTAPRWLSTDLRDGNQALIDPMSPVRKRAMFDLLVKMGYKVIEVGFPASGQTDFDFVRSIIEEPGAIPDDVTISVLTQAREDLIERTVESLKGARRATVHLFNATAPVFRRVVFRGSRDDIKQIAVDGTRLVMEYAEKLLGPETEFGYQYSPEIFTDTELDFALEVCEAVMDTYQPGPGREIILNLPATVERSTPSTHADRFEWMGRNLSRREHVCLSVHPHNDRGTAVAAAELALMAGADRIEGCLFGQGERTGNVDLVTLGMNLFSQGVDPQIDFSDIDEIRRTWEYCNQMEVHPRHPYVGDLVYTSFSGSHQDAIKKGFDAMEADAAARGVTVDDIEWAVPYLPIDPKDVGRSYEAVIRVNSQSGKGGIAYVLKNDHSLDLPRRMQIEFSKLIQAKTDAEGGEITPTAIWDVFQDEYLPNPDNPWGRIQVANGQTTTDRDGVDTLTVDATVDGAETTLVGSGNGPISAFFHALQGVGIDVRLLDYQEHTMSEGASAQAASYIECAIGDKVLWGIGIDANTTRASLKAVVSAVNRATR

SEQ ID NO: 21141 - protein, 522 aa, Candida tropicalis
MSIQDIVETYSTKWYVVVSVALIVYKVFDFFYARYLMYKLGAKPFLQSQTDGYLGFRVPFELMGKKSEGTLIDFTYQRTLELDNPDIPTFTFPIFSVSIISTLEPDNIKAILATQFNDFSLGTRHSHFAPLLGDGIFTLDGAGWKHSRSMLRPQFAREQVSHVKLLEPHMQVFFKHIRKHHGQTFDIQELFFRLTVDSATEFLFGESVESLRDESIGMLNDALDFDGKAGFADAFNYSQNYLASRALMQQMYWILNGKKFKECNAKVHKFADYYVEKALELTPDQLEKQDGYVFLYELVKQTRDRQVLRDQLLNILVAGRDTTAGLLSFVFFELARTPRVANKLREEIEDKFGLGQDARVEEISFESLKSCEYLKAVLNECLRLYPSVPQNFRVATRNTTLPRGGGKDGLSPVLVRKGQTVMYSVYAAHRNKQIYGEDALEFRPERWFEPETKKLGWAFLPFNGGPRICLGQQFALTEASYVTVRLLQEFSHLTMDPNTEYSPKKMSHLTMSLFDGANIQMY

SEQ ID NO: 21142 - protein, 326 aa, Pichia guilliermondii
SIVGRPRHQGIMVGMGQRDSYVGDEAQSKRGILTLRYPIEHGIVKNWDDMEKIWHHTFYNELRVAPEEHPVLLTEAPMNPKLNREKMTQIMFETFNVPAFYVNIQAVLSLYSSGRTTGIVLDSGDGVTHVVPIYAGFSLPHGILRLDLAGRDLTDYLMKILSERGYTFTTTAEREIVRDIKEKLCYVALDFEQEMQTSSQSSAIEKSYELPDGQVITIGNERFRAVEALFRPSDLGLEAAGIDQTTYNSIIKCDLDVRKELYGNIVMSGGTTMFPGIAERMQKEITALAPSSMKVKIIAPPERKYSVWIGGSILASLSTFQQMWIS

SEQ ID NO: 21143 - protein, 238 aa, Archaeoglobus fulgidus
MILDFEESLRAFRKGSPVLIYDFEDREGETDIAIPAIHVGKDEVAMMRIDGGGLICVAIHPVAAEKLGLPFMHDVLRIASEKLPEIRKVADADDIKYDSRSSFSLWVNHRDTFTGITDVDRALTIRRIGEVVDEVMMGKKVDFGREFRSPGHVALLRAADKLTYERVGQTELSVALAEMAGIAPAVAICEMLDAETGKALTKEKAMEYAEEKGIPFIDGRTIVEHYRKFREVEVSLFV

SEQ ID NO: 21144 - protein, 149 aa, Pseudomonas syringae pv. syringae
TETRDLLVSLAGEVGLKDAIKAQYDGELVNSSEGRPALHTALRRPVGDKLKVNGVDVMPDVHRVLNQMTELVGRIHDGLWRGYTEKPITDVVNIGIGGSFLGPELVSEALVAYAHKGVRCHYLANIDGSEFHELSMRIRAETTLFIVSS

SEQ ID NO: 21145 - protein, 175 aa, Synechococcus sp. WH 7805
MSIPEGYRLRRMLRSAMAPSVSNVSVRTPDGSEKSLGSYAGQVLLIVNVASRCGFTKQYAGLQSLQDTFGPRGLQVLGFPCNDFGAQEPGTLDEIKSFCSTTYGASFELFDKVHATGSTTEPYTTLNQTEPAGDVAWNFEKFLVGKDGTVLARFKSGVAPEDAELSAAIEAALQA

SEQ ID NO: 21146 - protein, 230 aa, Brassica napus
  misc_feature (188)..(188): Xaa can be any naturally occurring amino acid
  misc_feature (214)..(215): Xaa can be any naturally occurring amino acid
MTFPKMMSFREKTPRSPKSPLRRRRSSWTSSWLNNSTTSFKQVVSAVMQSQSPRSISKPQTPTDFEFSSNTDRTLSLPDSLLLKILHKLPESQNDDVSLVCKRWLNLQGRRIGTLRVLDLDFLLSGKLLSRFPKLTNVDLSNACIYPSRNSAILLSQKSISFRVSSNWDFVEENLLHSETVDRGLRVXGRGSCDLLRLVVINATEMGLLGLAEXXCDLQELELHKVHDNL

SEQ ID NO: 21147 - protein, 240 aa, Corynebacterium glutamicum ATCC 13032
MIISTNTAHPLHEPHVPSHHNRMNTLRAGVLGANDGIVSIAALLLGVIATGASDTVVFGAGLASTIAGAVSMALGEYVSVSSQRDTERVLIAKEAKELAEDPTAEHVELSEILHSYGISPETANQAATEIGQGDALGAHLQLELGIDNEQLTSPLAAAFSSAVAFLLGALLPMVSVFIAPAGWDAGVVFVVTLLVLAVTGFISAQISGTSPMRACGRLVIGGALGLALTYGVGVLFGAAV

SEQ ID NO: 21148 - protein, 369 aa, Oenococcus oeni PSU-1
MAKFNQTRLNKLQKTLVDKQIDFAFISDYKTIQYITGFGSNPYERILAMIVFADKDPFIFAPALEVEVVKSVGWPYDLYGYQDNEDGLEMIYDHIKERSANPKKIATEQGNLTLSRFNRLQAAFPDADYSFNLTPVIEHQRLIKDEDEIKKLEQAGRDADLAFEAGFKALKVGKTELQVAAKLEFATKNRNVPEMSFGTLVQTAEHAADPHGETSDLALKNNSLVLFDLGTVYKGYISDASRTVALGTPTDHMREVHQVVLEAQLAAQAAVKPGITAASLDKIARDIIEKAGYGKYFIHRLGHGMGMSEHEYPSIMQGNDLVLEPGMCFSLEPGVYIPGDLGVRIEDCVHVTENGCQPFTHMDKKLQLF

SEQ ID NO: 21149 - protein, 304 aa, Klebsiella pneumoniae
MRFCQALMTELYRHLGADTDVPAGDIGVGGREVGFMAGMMKKLSNNTACVFTGKGLSFGGSLIRPEATGYGLVYFTDAMLKRHGLGFEGMRVAVSGSGNVAQYAIEKAMALGARVITASDSNGTVVDEAGFTTEKLARLCQIKSQQDGRIADYAKEFGLTYLEGQQPWGVSVDIALPCATQNELDAPAARILIANGVKAVAEGANMPTTIEATDLFLEAGVLFAPGKAANAGGVATSGLEMAQNAARMGWKAEKVDLRLHHIMLDIHQACVEYGGEDKQTHYVRGANIAGFVKVADAMLAQGVL

SEQ ID NO: 21150 - protein, 626 aa, Solanum tuberosum
MAIFSNQMRLSSTLLKRLHQRVAAAVNSSSSRNFTTTEGHRPTIVHKRSLDILHDPWFNKGTAFSFTERDRLHIRGLLPPNVMSFEQQIARFMADLKRLEVQARDGPSDPYVLAKWRILNRLHDRNETLYYKVLMENIEEYAPIVYTPTVGLVCQKYSGLFRRPRGMYFSAEDRGEMMSMVYNWPADQVDMIVVTDGSRILGLGDLGIQGIGIAIGKLDLYVAAAGINPQRVLPVMIDVGTDNENLLKDPLYLGLQDHRLDGEEYIEVIDEFMEAVFTRWPHVIVQFEDFQSKWAFKLLQRYRNNYRMFNDDIQGTAGVAIAGLLGAVRAQGRPMIDFPKMKIVVAGAGSAGIGVLNAARKTMARMLGNTEIAFESARSQFWVVDAKGLITEARENVDPDARPFARKIKEIERQGLSEGATLAEVVREVKPDVLLGLSACGGLFSKEVLEALKHSTSTRPAIFPMSNPTRNAECTPEEAFSILGENIIFASGSPFKDVDLGNGHVGHCNQANNMFLFPGIGLGTLLSGSRIVSDGMLQAAAECLAAYITEEEVLKGIIYPSISRIRDITKEVAAAVVKEAIEEDLAEGYREMDSRELRKLDEAQISEFVENNMWSPDYPTLVYKKD

SEQ ID NO: 21151 - protein, 149 aa, Pseudomonas syringae pv. syringae
TETRDLLVSLAGEVGLKDAINAQYDGELVNSSEGRPALHTALRRPVGDKLKVNGVDVMPDVHRVLNQMTELVGRIHDGLWRGYTEKPITDVVNIGIGGSFLGPELVSEALVAYAHKGVRCHYLANIDGSEFHELSMKIRAETTLFIVSS

SEQ ID NO: 21152 - protein, 669 aa, Zea mays
MAAVHGRVLLLLLSTLTFLAVHAVTAAAATATSCAPRTCGNLTIAYPFWLPVPDQQASSSSLPPCGPSAFQVDCRGGRASLARSFRGAYKILRVSYADRTVVVANDNVQTDASGCPVPRIDVSASLSLAPFTASGANAQLVFLFNCSKPPPAGFVNVTCPGAQAVVRLDPRYNTTDARAVAGACDYSVVPVLVSPGGGASAGDYPRLLRGGYLLEWRASPGNCTACNASGGQCGYDSDTDAFACLCDDGSSHPARCGAKKSDRKVILIVSVSIAFGLLLALLVLILKFHRQITRSFSFLLDRSSSGDTADVEKLLQKYGSLAPKRYRYAELKRITKSFQRKLGEGGYGAVYSGVLAAGAGGTRAREVAVKVLHHARPNGEEFLNEVVSIGRTSHVNIVTLLGFCLEGSKRALVYEYMPNGSLDRYIRSESDPAGTAALGWEALQEIAAGIARGLEYLHEGCNTRIIHFDIKPQNVLLDADFRPKIADFGMAKLCNPKESILSMADARGTIGFIAPEVFSRGFGVISTKSDVYSYGMLLLEMVGGRSNAKACAADKSSGGELFFPLWVYDHLLLEDGVGVLRGGGGGGAGGSGEAAAGEEIARKMALIGLWCIQTVPASRPSMSRVLEMLERSVHDLAIPPRPYHTSPSNSPSPSHPSSYPSSTSDFTQR

SEQ ID NO: 21153 - protein, 283 aa, Ashbya gossypii ATCC 10895
MLLLALSDAHIPDRSIDLPSKFKKLLNVPNKIGQVVLLGNCTRSYQFLKFVNEVSSNVVIVRGEFDNATIRTVQNVKEEIPMNTIIKQGDFKIGCCNGYTLVPKSDPLSLLILARQLDVDIMLWGGTHSVEAYTLEGKFFINPGSCTGAFSTDWPLQDDALQGEGSPSAKLNGAATAPQPTEGEAGDENGLQQELSTSSRTPREAEARVLGSPNNRRELEGGAADVEAEENSEDDEEVDEVDINGGCIPSFCLLDISGSTCTLYIYTFVSGEVKVDKVVYKKD

SEQ ID NO: 21154 - protein, 413 aa, Listeria monocytogenes str. 4b F2365
MDKRRVVVTGIGAVTPIGNDAETSWENAKKGVNGVAKMTRLNPDDFPVKIAAELKDFDVEKYLEKKEARKMDRFTHYAIASAEMAVQDSGLVIDDSNANRVGVWIGSGIGGMETFETQYEIFLNRGHRRVSPFFVPMMIPDMGSGQVSIRFGAKGINSTTVTACATATNSIGDAFKVIERGDADAMITGGAEAPITKMSLAGFTANKALSLNPDPETACRPFDKDRDGFIIGEGAGIVILEEYEHAKARGAKIYAEIVGYGATGDAYHITAPAPNGEGAARAMKMAIDDAGLTPDKVDYINAHGTSTPYNDEYETQAIKTVFGDHAKKLAISSTKSMTGHTLGASGGIEAIFALLTIRDNIIAPTIHLKNQDEVCDLDYVPNEAREANVNVVISNSFGFGGHNATLVFKRIED

SEQ ID NO: 21155 - protein, 154 aa, Photorhabdus luminescens subsp. laumondii TTO1
MASRGVNKVILIGRLGQEPEVRYRPEGDTVAVLSLATSETWRDRQTGEQKERTEWHRVVIFGKLAEIAGEYLKKGSQVYIEGQLRTRKWFDKASGQDRYSTEVVLNQQGTMQMLGGRSQSEPSRSSGREQSQSSSSVPPRGSEPPIDFDELIPF

SEQ ID NO: 21156 - protein, 205 aa, Ustilago maydis 521
MASRKKVLLKVIILGDSGVGKTSLMNQYVNKRFSSAYKATIGADFLTREVMVDDRLVTMQLWDTAGQERFQSLGVAFYRGADCCCLCYDVNNAKSFETLDSWRDEFLIQAAPHDPENFPFVVLGNKIDVEESKRMVSQKRAMTWCQSKGNIPYFETSAKEAINVEQAFQTIARAALQQEAEAELYADYPDPIRIDQDNQQSGCNC

SEQ ID NO: 21157 - protein, 229 aa, Listeria monocytogenes str. 4b F2365
MKLVLIRHGQSEWNKLNLFTGWHDVDLSQEGVVEAMTAGKRIKEAGLEFDVAFTSVLTRAIKTLNYVLEESDQMWVPVHKSWRLNERHYGALQGLNKQETAEKYGADQVQKWRRSYDTLPPLLEENDERQAKNDRRYQLLDTHAIPAGENLKVTLERVIPYWMDTIAPEIKEGRRVVIAAHGNSLRALVKFLEGIGDDEIMDLEIPTGVPLVYELNDDLKPVNKYYLDK

SEQ ID NO: 21158 - protein, 108 aa, Triticum aestivum
  misc_feature (79)..(79): Xaa can be any naturally occurring amino acid
MAAAFICTSLPPLSLRSETKAASSSLSSRRLFAVSPESGGLRIRLSQSPSSLTSIQPRAPRLRRGVVVCEAQETTTDIXSIVNDSTWDSLVLEADGPVLVDFWAPWCG

SEQ ID NO: 21159 - protein, 234 aa, Chlamydophila pneumoniae CWL029
MLSVCYSDPCLSDFCQGKRPLRIASRNSNLAKAQVHECISLLRSWYPKLWFQLSTTETTGDREKKIPLHLVENSYFFTDGVDALVHKGVCDLAIHSAKDLPETPSLPVVAITRCLHPADLLVYADHYVHEPLPLSPRLGSSSLRRSAVLKQLFPQGQILDIRGTIEERLDQLHRGHYDAIVLAKAASLRLHLHHAYSIELPPPYHALQGSLAITAKDHAGKWKQLFTPIHCHSS

SEQ ID NO: 21160 - protein, 570 aa, Xanthomonas campestris pv. vesicatoria str. 85-10
MALAQPLQAQPKLVAELSVRLGHSQDSQNCVVSLARLSNSGLGMEGVDANNAKYWPAMARCPSQQASPAMSQSVPRVFLLIDGEMVVSASTQWQDVVNPADQSVLAQVPFATTAEVDAAVAAASRAFVTWRKTPIGTRARIFLKYQQLIRENMPELAALLSAEQGKTLADAEGDVFRGLEVVEHAAAIGNLQLGELANNVANGVDTYSLLQPLGVCAGITPFNFPAMIPLWMFPMAIATGNTFVLKPSEQDPMVTMRLVELALEAGIPKGVLNVVHGGEEVVNALCDHPDIKALSFVGSTKAGTHVYRRASLAGKRVQCMMGAKNHAVVLPDANREQTLNAMVGAAFGAAGQRCMAASTLVLVGDARTWIPELVAKAKSLKIGAGNAPGTEVGPLISCAARERVEGLIASGVEQGATLELDGRAPQVPGFEQGNFVGPTIFSGVKPGMRIYDEEIFGPVLVILEAATLDEAIALVNANPNGNGTALFTQSGAAARRFQEDIDVGQVGINVPIPVPVPLFSFTGSRASKLGDLGPYGKQVVMFYTQTKTVTARWFDDQTLAHGVNTTISLK

SEQ ID NO: 21161 - protein, 472 aa, Oceanobacillus iheyensis HTE831
MQSYKMFVGGKWFGNNLEQIDVINPATNEQIGTIPNGGKEEAKQAVDAAHNALKEWSARTAEDRSNYLVKWHELIKEERETIAKIMTEEQGKPLKEAIGEVDYANGFISWYAEEGKRIYGDIIPASHTNKRIFVQKKPVGVVAAITPWNFPAAMITRKVGPALAVGCTVVIKPATQTPLTAFKLVELAEKAGIPRGVINIVTGSSSQIGKVWNDDGRVRKLTFTGSTEVGKILMKDAANTMKKISLELGGHAPFVVMEDADLDKAVAGVIASKFRNAGQTCVCTNRVYVHESIKDIFQDKLTEAVSKLKVGNGLEEGINIGPLIDQSAVDKVDEQVKDAISKGGRVTFGGKSLRGLYVEPTIVVDATDDMLCMYEETFGPLVPVTTFRDEEEVIARANNSPYGLAAYVFTENIGRAIRISEALEYGIVGLNDGAPSTPQAPFGGFKESGLGREGGYYGIEEFLEIKYISLAF

SEQ ID NO: 21162 - protein, 219 aa, Solanum tuberosum
MSAFGKFVVIMAVVMLAISLDKACAGDPDMLQDVCVADLSNSLTVNGYFCKKNFSEIDFSSMAIAKAGATNNTFGSVVTGANVMRVPGLNTLGVSMARIDYAPGGINPPHTHPRATEMIFVLEGELDVGFITTSNVLITKHIVKGEVFSFPRGLVHFQQNNGDVPAVVAGFNSQLPGTHSIATTLFASSPSVPDSVLTKTFQVGTKQIQKIKSRLAPKK

SEQ ID NO: 21163 - protein, 414 aa, Vibrio cholerae O1 biovar eltor str. N16961
MSKRRVVVTGMGMLSPVGNTVESSWKALLAGQSGIVNIEHFDTTNFSTRFAGLVKGFDCEQYMSKKDARKMDLFIQYGIAAGIQALEDSGLEVNEENAARIGVAIGSGIGGLELIETGHQALIEKGPRKVSPFFVPSTIVNMIAGNLSIMRGLRGPNIAISTACTTGLHNIGHAARMIAYGDADAMVAGGAEKASTPLGMAGFGAAKALSTRNDEPQKASRPWDKDRDGFVLGDGAGIMVLEEYEHAKARGAKIYAEVVGFGMSGDAYHMTSPSEDGSGGALAMEAAMRDAGVTGEQIGYVNAHGTSTPAGDVAEVKGIKRALGEAGTKQVLVSSTKSMTGHLLGAAGSVEAIITVMSLVDQMVPPTINLDNPEEGLGVDLVPHVARKVESMEYAMCNSFGFGGTNGSLIFKRM

SEQ ID NO: 21164 - protein, 542 aa, Bartonella quintana str. Toulouse
MTIMTVLTTAFNDQKPGTSGLRKKVSVFQQPHYVENFIQSLFNNIGPLEGKLLILGGDGRYFNHTLLQVVLKMAAAHGVACVKVGKGGLLSTPAVSHLIRKYHAHGGIILSASHNPGGLEGDCGIKYNISNGGPAPASLCDAVFATSQHLSFYKIVEAPDIDLSTQGTTFVGAMQVDVIDPVADYVALMQEIFDFDCIAKAVAEGLTLRFDAMHAVTGPYAHEIFEKCLGFSEGTVVNGVPLPDFGGKPPDPNLVHAKDLYDLLMSDQGPDLGAASDGDGDRNLIIGRKQFVTSSDSLAIMADHAHLIKGYRQGIVGIARSMPTGRAADLVAEKKALNFFETPTGWKFFGSLLDAGKVTFCGEESFGTGSHHIREKDGLWAVLFWLNLLAVTGKTVAQITQQHWHTYGRFYTLRYDYEAVEACKARMVMDALCARLPKAGMEIVGLQVEKADDFTYHDPIDQSISTGQGVRIFFKNGARLVVRLSGTGTVGSTLRLYFEQYEADPCKHNQDPQKILQPLQKAALELLKIQQKLGCKQPDVIT

SEQ ID NO: 21165 - protein, 125 aa, Triticum aestivum
  misc_feature (34)..(34): Xaa can be any naturally occurring amino acid
  misc_feature (68)..(68): Xaa can be any naturally occurring amino acid
  misc_feature (74)..(74): Xaa can be any naturally occurring amino acid
  misc_feature (96)..(96): Xaa can be any naturally occurring amino acid
  misc_feature (103)..(103): Xaa can be any naturally occurring amino acid
PARRTFQGSPDLKAAREVADYLGTIHHEFHFTVXDGIDAIEEVIYHDETYDVTTIRANTPMFLMARKXIKSLGXVRWCVPGKGSEQLLGRLLYFNXAPNKEGXHKEDCRKGEGLHNTPARNKATS

SEQ ID NO: 21166 - protein, 509 aa, Arabidopsis thaliana
MDAQSVSEKLRSSGLLRTQGLIGGKWLDSYDNKTIKVNNPATGEIIADVACMGTKETNDAIASSYEAFTSWSRLTAGERSKVLRRWYNLLSRSEPLHFTKHRYDLLIAHKEELGQLITLEQGKPLKEAIGEVAYGASFIEYYAEEAKRVYGDIIPPNLSDRRLLVLKQPVGVVGAITPWNFPLAMITRKVGPALASGCTVVVKPSELTPLTALAAAELALQAGVPPGALNVVMGNAPEIGDALLTSPQVRKITFTGSTAVGKKLMAAAAPTVKKVSLELGGNAPSIVFDDADLDVAVKGTLAAKFRNSGQTCVCANRVLVQDGIYDKFAEAFSEAVQKLEVGDGFRDGTTQGPLINDAAVQKVETFVQDAVSKGAKIIIGGKRHSLGMTFYEPTVIRDVSDNMIMSKEEIFGPVAPLIRFKTEEDAIRIANDTIAGLAAYIFTNSVQRSWRVFEALEYGLVGVNEGLISTEVAPFGGVKQSGLGREGSKYGMDEYLEIKYVCLGDMNRH

SEQ ID NO: 21167 - protein, 287 aa, Streptomyces peucetius
MTASTPHHGTPRGGLSGRTVLVTGATSGIGRAAALAVARQGARVVLVGRDPERLRTVTNEVARTAGPAPDAFRADFAELRQVRDLGERLRDRYPRIDVMASNAGGMFWSRTTTQDGFEATIQVNHLAGFLLARLLRERLAGGRLILTSSDAYTQGRIDPDDLNGDRHRYSAGQAYGTSKQANIMTAAEAARRWPDVLAVSYHPGEVRTRIGRGTVASSYFRFNPFLRSAAKGADTLVWLASAPAEELTTGGYYSDRRLSPVSGPTADAGLAAKLWEAGAAAVGDTAH

SEQ ID NO: 21168 - protein, 667 aa, Borrelia burgdorferi
MIQAYEIAHLIKINDLEKARNIFKKTVENTYKDEFERKSIFKALEIAEQLHYGQYRESGEPYIIHPIMVSLFLAKFQLDFKATIAGLLHDVLEDTNVEKEEIVKEFDEEILSLIDGVTKIHDLHNKTRSIKEANTISKMFFAMTHDIRIIIIKLADKLHNMTTLSYLPKNRQDRIAKDCLSTYVPIAERLGISSLKTYLEDLSFKHLYPKDYKEIKNFLSETKIEREKKLYKGKLSIEKELQKSGIEAEITVRSKHFYSIFRKMQTRTNKLTQIFDTLGIRIICKKQKECYEILEIVHRVWKPIPGRLKDYIASPKENKYQSLHTTVRIPEDNQLIEIQIRTEEMDRIANYGVAAHWIYKEQIELKADDLSFINRIKKWQQESANKSQYSMNDIHKELLNTFIYVYTPEGEVVELPFGSNSIDFAYIIHTDIGDQALYAKINGKISSITKPLKNEQIVEIFTSKDSKPDVIWLNSVRTKKARSKIRSWLNKNDNTIFVDNNIIAYLVGANKEQRKLFSLFKSYTKTKIKRIAIDPECSPTTGEDIIGIIHKDEIIVHNENCQKLKSYKKPQLIEVEWEATPTRKVHHIILLLKELKGIFSYLENIFTLNDVRLISEKIEDCGNGHGITNIIVSSNAKNITKIISALKENPNILQIMQIEEDIKNYDN

SEQ ID NO: 21169 - protein, 797 aa, Shewanella sp. MR-4
MARCHLHKFGGSSLADADCYRRVAHILLTHGHSDDLVVVSAAGKTTNFLYKLLSLRDSNQLWQEELQVLISYQQGLIEQLLSNEQARDLRERLTTDKAQLISLLSLDSRNDYQISHVVSFGERWSARLMAALLRESGVAASHVDACSILVADEAAVPQIRVQESRAKVQALLAAHPNERLVITGFICANERGDTLLLGRNGSDFSASLIASLADIERVTIWTDVEGVFNADPNKINDAKLLKSMSLAEADRLARLGSPVLHSRTLQPLFNTEVSLAVRSSYASHTDFTLIAPHSSSASAPVVTNLNAVVLFGFKIAGDVASLLEQLVEAGLTPLAHWVSAHQRLELAYTAENQKQVQKLLDAQAEALGIKDLQINTELGLVALVSADAEHYRRSFARLLSRDAKPLFSGDLSLVTLVPQSQVNLLTQKVHRRCAGPRKRIGVLLLGVGNIGEAWVKLFKSVSPSLNQELEARVELVGLVSSSKALIKSTAVDLENWQQEFDAEATPWQYEHLFEQLEQLNCDELIALDISASASLTLQYPEFFERGIHMVSANKLAGSGPLPFYRELKEQLGYRRLFWRYNASCGAGLPIQHALNDLRNSGDTVEAVGGIFSGTLCWLFEKYDTSKPFSELVVEARGLGITEPDPRDDLSGRDMQRKLLILAREIGLEIELEDIELRSLVPAHLADIPLEQFLARIAELDDELQQQYGAAAEQNKVLRYVASLDNSDAALKAEVGLQWIDANHPYANLTPGDNVFVIRSAFYQGNPLIIRGPGAGREVTAAAVQSDLTQICRDLLQE

SEQ ID NO: 21170 - protein, 207 aa, Magnaporthe grisea 70-15
MTVMAGGALASRHLPASPRPAGRRAAPSSRRPHSTFVTWRESQLTPAAAEKGEETPLADYKGKVVLVVNTASKCGFTPQYAGLEALYKKITEKHPEDFTILGFPCNQFGGQEPGTDDDIQNFCQVNYGVTFPIMKKVDVNGDNADPLFKWLKEEMPGIMGLKRVKWNFEKFLIGRDGKVKGRWASTTKPESLEKDILKEIEAPKPSI

SEQ ID NO: 21171 - protein, 355 aa, Umbelopsis ramanniana; identical to SEQ ID NO: 449

SEQ ID NO: 21172 - protein, 667 aa, Borrelia burgdorferi
MIQAYEIAHLIKINDLEKARNIFKKTVENTYKDEFERKSIFKALEIAEQLHYGQYRESGEPYIIHPIMVSLFLAKFQLDFKATIAGLLHDVLEDTNVEKEEIVKEFDEEILSLIDGVTKIHDLHNKTRSIKEANTISKMFFAMTHDIRIIIIKLADKLHNMTTLSYLPKNRQDRIAKDCLSTYVPIAERLGISSLKTYLEDLSFKHLYPKDYKEIKNFLSETKIEREKKLYKGKLSIEKELQKSGIEAEITVRSKHFYSIFRKMQTRTNKLTQIFDTLGIRIICKKQKECYEILEIVHRVWKPIPGRLKDYIASPKENKYQSLHTTVRIPEDNQLIEIQIRTEEMDRIANYGVAAHWIYKEQIELKADDLSFINRIKKWQQESANKSQYSMNDIHKELLNTFIYVYTPEGEVVELPFGSNSIDFAYIIHTDIGDQALYAKINGKISSITKPLKNEQIVEIFTSKDSKPDVIWLNSVRTKKARSKIRSWLNKNDNTIFVDNNIIAYLVGANKEQRKLFSLFKSYTKTKIKRITIDPECSPTTGEDIIGIIHKDEIIVHNENCQKLKSYKKTQLIEVEWEATPTRKVHHIILLLKELKGIFSYLENIFTLNDVRLISEKIEDCGNGHGITNIIVSSNAKNITKIISALKENPNILQIMQIEEDIKNYDN

SEQ ID NO: 21173 - protein, 459 aa, Zea mays
  misc_feature (27)..(27): Xaa can be any naturally occurring amino acid
  misc_feature (79)..(79): Xaa can be any naturally occurring amino acid
  misc_feature (123)..(123): Xaa can be any naturally occurring amino acid
  misc_feature (247)..(247): Xaa can be any naturally occurring amino acid
  misc_feature (278)..(278): Xaa can be any naturally occurring amino acid
  misc_feature (350)..(350): Xaa can be any naturally occurring amino acid
LFFSNVQESCVYTIRCNDEWRSWLSKXLGCASKRFPTTYLGLPLSNKRLNSGDLLQWIQKIVDRLPGWKANLLNITGRXLKSVLSIIPVYLFIALKIPKWVIKAINKIRRNFLWKGRKEARGXNCLIAWEKVTRPVDLGGLGISNLLTMSWALQMRWLWLPKTNSDKPWRGLDLNVSNQARALFRVSVTSIIGDGATTYFWMDKWINGCSIEELAPIIAAAAPKNIGKLGLQQALPSHSWVRDIQGXLSLAGIMQYLQLWDALENNDTHVWRFSSDGXFISKSAYRIFFSGAISFEPWKKICKAWAAPKCKTFIWLAINNKCWTADRLQKIGLDYPQSCVLCDQEKETIXHILTNCVFARQFWHAILSSLRLNNVESKRGDSCFEDWWRKASHLFPKGKRKSFNSIVILGAWSIWKHRNSCVFYGARPCLSSLEERFKEELHLWSLAGAKSIRTLFDPG

SEQ ID NO: 21174 - protein, 225 aa, Salmonella typhimurium LT2
MPEEARVQCKGFLFDLDGTLVDSLPAVERAWCSWADRFNLAHDEVLGFIHGKQAITSLRHFMAGKSEAEIAAEFTRLEQIEATETAGITALPGAVDLLNHLNKVGIPWAIVTSGSMPVARARHQVAGLPAPEVFVTAERVKRGKPEPDAYLLGAQLLGLAPQECVVVEDAPAGVLSGLAAGCHVIAVNAPADTPRLADVDFALDSLTQLSVAKQPNGDVVVLRKT

SEQ ID NO: 21175 - protein, 358 aa, Cryptococcus neoformans var. neoformans JEC21
MAPSSALPATSKKAKKPQPTPKAPLPLPSTFSTAQAEKAVKALLAHHAKVSKQKEEEQLLPREEHVWVVVNTKTGSTRRSLNPVKIQLPHPALPPPPTSSVCLFTKDPQRQYKDLLAQHNIKFISRVVGVEKLKGKFKPYEARRELLRDHDLFLCDERVLGVMPKLLGKMFFEAKKQPIPVNLQRKDLTSTLARAISSTYFHPTTGTSTSTRIATPSHSSTSQTLANLLEAVPQIVAEVDGGWEGVLSVGIKTSGSVMLPVWTGKLGGRFEKAEKPEKSANSGEEMEVEVEEKSETPSAPAPTVEKREKKEKAAAAPVEKPKKKSSTIGSTAGGAAKRAKQVAVGAKKPAVKKSKSKL

SEQ ID NO: 21176 - protein, 303 aa, Bacillus cereus E33L
MIYTVTLNPSIDYIVQVNSLELGAVNRAEKDMKFPGGKGINVSRVLHRLGVKNVALGFTGGFTGRFIKDVLQTEGVITNFIQVNEDTRINVKIKGEEETELNGQGPSVTNEQFEQLMKQIESMQKGDCVVLAGSVPASIPTTFYESIAAFGAEKGIRVVVDASGSALQHVVKNKPFLIKPNHHELGELFGVEISTAEDILPYGRKLIEQGVEHVIVSMAGDGALLFTTEGIYEATVPKGVVINSVGAGDSLVAGFVGKYEQTKDIEKAFQYGVATGSATAFSADLCEKEKVEELLSQVIVTKR

SEQ ID NO: 21177 - protein, 149 aa, Pseudomonas syringae pv. syringae
TETRDLLVSLAGEVGLKDAIKAQYDGELVNSSEGRPALHTALRRPVGDKLKVNGVDVMPDVHRVLNQMTELVGRIHDGLWRGYTEKPITDVVNIGIGGSFLGPELVSEALVAYAHKGVRCHYLANIDGSEFHELSMKIRAETTLFIVSS

SEQ ID NO: 21178 - protein, 894 aa, Acinetobacter sp. ADP1
MIQQIDAPLREDVRLLGNLLGETLKQHAGQDLFNQIEQIRALAKGARDGQAETEKKLEQLFLDLKDEEILPLTRAFSYFLNFANIAEQYHVVRSRRRSEFDEQGPPPNPLIHLFEKFKQNQISSKQLFQQVSNLSIELVLTAHPTEVSRRTLIQKYDDINEGLSKLDQQKLTPRERQQVLDDLKQLICSAWQTDEIRQNKPTPLDEAKWGFTTIEQTLWNAVPKFVRELDTLVHQHCDAHLPLDISPIRFASWMGGDRDGNPNVTHNVTQEVLWLSRWQAADLYLRDIEDLRWELSIQACSEELSQTLGRRHPEPYREYLRSTRERLKATRQWLSLRLQGLDGDDSQIIRHKQELLDPLLLCHRSLMECNLPEIANGKLLDFIYRVNCFGIELLKLDIRQESGRHRQAISAITEYLGLGNFESWTEQARQNFLIQELQSKRPLLPKYLNEPEGSLIEHPDVKEVFATMRTLAEQPPESLGAYIISMAEYASDVLAVLLLQKEAGILQPLRVVPLFETLKDLDGAAKTMETLFNMHWYKQHIQGKHEVMIGYSDSAKDAGFMSANWAQYRAQEELTAVAKSHGVQLTLFHGRGGSISRGGAPTQQALFSQPPGSISGAIRVTEQGEMIRFKFGLEGVALQNLEIYTAATLEATLLPPPVPKQEWRDLMHQMTDISVRVYRETVRENPHFVQYLRTVTPELELQMLPLGSRPAKRKVSGGIESLRAIPWVFAWTQIRLMLPAWLGTGAAINQVIDENKKAVLDEMLAEWPYFQTLIDMLEMVLSKSDANIALYYESHLTDNEDLKILGEMLRQRLNDAVQTLLSMKGESKLLSKNDVLDQAMQVRKPYLLPLHLLQAELMKRRRLYTAQSNAERTPVDHALMVSIAGIAAGLRNTG

SEQ ID NO: 21179 - protein, 149 aa, Pseudomonas syringae pv. tabaci
TETRDLLVSLAGEVNLKDAIKAQYDGELVNSSEGRPALHTALRRPVGDKLKVNGVDVMPDVHRVLNQMTELVGRIHDGLWRGYTEKPITDVVNIGIGGSFLGPELVSEALVAYAHKGVRCHYLANIDGSEFHELSMKIRAETTLFIVSS

SEQ ID NO: 21180 - protein, 369 aa, Mycobacterium avium subsp. paratuberculosis K-10
MTHSQRRDRLRARLEADGLDALLVTDLINVRYLSGFTGSNGALLVFADDRPPVLATDGRYRTQAAEQAPDLDVAIERALGRYLAGRAAEAGARTLGFESNVVTVDGFDALTGELDGRKAATELVKAAGTVEALREVKDAGEVALLRLACEAADAALTALVDGGGLRPGRTEREVSRELEALMLDHGADGISFETIVATGANSAIPHHRPTDAVLADGDFVKIDFGALVGGYHSDMTRTFVLTKAADWQLEIYRLVADAQRAGREALRAGADLREVDAAARRVIADAGYGEQFSHSLGHGVGLEIHEAPGIGATSTGTLRAESVVTVEPGVYLPGRGGVRIEDTLVVPPETAGKPPELLTRFPKELAVLA

SEQ ID NO: 21181 - protein, 350 aa, Arabidopsis thaliana
MVRIIPMAASSIRPSLACFSDSPRFPISLLSRNLSRTLHVPQSQLFGLTSHKLLRRSVNCLGVAESGKAAQATTQDDLLTWVKNDKRRMLHVVYRVGDMDRTIKFYTECLGMKLLRKRDIPEEKYTNAFLGYGPEDSHFVIELTYNYGVDKYDIGAGFGHFGIAVDDVAKTVELVKAKGGKVSREPGPVKGGKTVIAFIEDPDGYKFELLERGPTPEPLCQVMLRVGDLDRAIKFYEKAFGMELLRTRDNPEYKYTIAMMGYGPEDKFPVLELTYNYGVTEYDKGNAYAQIAIGTDDVYKTAEAIKLFGGKITREPGPLPGISTKITACLDPDGWKSVFVDNIDFLKELE

SEQ ID NO: 21182 - protein, 149 aa, Pseudomonas syringae pv. theae
AETRDLLVALASEVGLKDAIKAQYDGELVNSSEGRPALHTALRRPVGDKLKVNGVDVIPDVHRVLNQMTELVGRIHDGLWRGYTEKPITDVVNIGIGGSFLGPELVSEALVAYAHKGVRCHYLANIDGSEFHELSMKIRAETTLFIVSS

SEQ ID NO: 21183 - protein, 307 aa, Acidobacteria bacterium Ellin345
MLATILDGNKISAEIKTEVAAEVAELKAKGLTPGLAVVLVGHNPASEIYVRNKVKACEMTGIYSEQHTPPDTVSTADLLQLVESLNRRNDIDGILVQLPLPKQVDSKKILLAVSPEKDVDGFHPMNVGYLSTVRPGLVPCTPAGCMEILRRSNVPVEGADAVVVGRSDIVGKPIAMLLTNANATVTICHSKTHDLPAVCRRADILVAAIGRPGMITPDFVKPGATVLDVGINKITDRAEFEKFFAGDAKREAAFAKNGSTLVGDCHPKVAEVAGAFTPVPGGVGPLTIAMLMANTVKAAKLRRGNTV

SEQ ID NO: 21184 - protein, 385 aa, Arabidopsis thaliana
MSDLPRDLLAEILSRVPLTSLRAVRLTCKKWNDLSKDRSFLKKQIVETKKKQLESKEIEVIMMRNFRVYLTSIDIHNNVDPSFTPKGTLISLSDDANHHQVDNVSRVFHCDGLLLCITKDLHYRLVVWNPYFGQTRWIQPRNSYHRKDNYALGYDEKKNHKILRLKDNYYAPRERICEFELYSFESNSWKVVLDVSPDWYIPSYNRGLSLKGNTYWYATEKHVNVDFLICFDFTTEKFGPRLPLPFNATESPTYEDVVTLSSVGEEQLAVLFQSEYTLMMEIWVTSKVESTEVLWNKLFLEVDLIAISSHFQFLAEAGSFFIDQKKNVVVVFDKDMDEATDRDMAYVVGKNGYFKKVDIGEEAYTSCFPLVCSYVPSSEQIRQLT

SEQ ID NO: 21185 - protein, 532 aa, Oceanicola granulosus HTCC2516
MWDKLNAHHESVAARRFETLFDGGRAEDFSVRVGDMLFDYSKTNIDAEGRALLIELLERADVAGRREAMFSGAPINETEGRAVLHTALRNINGEPVTVDGQDVMPGVRETLERMEAFAADVREGRFTGQGGRITDVVNIGIGGSDLGPAMATLALAPYHDGPRCHFVSNVDPADIAGVLRGCDPATTLVIVASKTFTTIETMTNARTAKAWMSETVSEPAAQFAALSTAADKTADFGIAPERVFGFEDWVGGRYSMWGPIGLSLMIAIGPRAFRQFLAGGAEMDRHFRAADWSENMPALLALVGIWHNQVCGHATRAVLPYDNRLSRLPAYLQQLEMESNGKRVSMDGAELSVQSGPIVWGEPGTNGQHAFYQLIHQGTRVVPCEFLVAARGAEDDLHHQHQLLVANCLAQSEALMKGRTLDEARAKVADKFSGDELERQASHRVFPGNRPSTTLAYPELDPATLGRIIALYEHRVFVEGAVLGINSYDQWGVELGKELATGLQPVVEGRESTDGKDGSTAGLVNFLRQSGM

SEQ ID NO: 21186 - protein, 287 aa, Erwinia carotovora subsp. atroseptica SCRI1043
MAAKIIDGKTIAQQVKDEVAARVTQRLAEGKRAPGLAVVLVGDNPASQIYVTSKRKVCEEVGFISRSYDLPITTTESELLALIDQLNADQAIDGILVQLPLPEGIDNTKVIERIAPDKDVDGFHPYNVGRLCQRAPLLRACTPRGIITLLERYNIDTFGLNAVVVGASNIVGRPMSLELLLAGCTTTVTHRFTKNLRHHIENADLLVVAVGKPGFIPGEWIKPGAIVLDVGINRLESGKVVGDIEFETAQERASYISPVPGGVGPMTVATLIQNTLQACEEYHDHAE

SEQ ID NO: 21187 - protein, 309 aa, Listeria monocytogenes str. 4b F2365
MTKKVGLLVMAYGTPYKDEDIERYYTDIRHGHKPSEEMIADLRGRYHAIGGLSPLAKITEAQAYGLEKALNESQDEVEFKAYIGLKHIEPFIEDAVEAMHKDGIEEAISIVLAPHYSSFSVEAYNKRAKDAADKLGGLRIKAINDWYKQPKFIQMWADRINETAKQIPADELLDTVLIVSAHSLPEKIKQHNDPYPDQLQETADFIFEKVVVPHYALGWQSEGKTGEPWLGPDVQDLTRELYGREKYKHFIYTPVGFVAEHLEVLYDNDYECKVVTDEVGATYHRPPMPNSDPEFLEVLRTVVWEKYSN

SEQ ID NO: 21188 - protein, 285 aa, Glycine max
MKVPAVVDGRFKLFERHRFCAMAEERQVIGVHTGDAWKGNSRMQKTPKNCTGRGKTFDMRNDRERTTGCGGGSGSGKDKIDSLSRLLTRILRHMAYELNLNMRSDGYVKVNDLLKLNLKTFANIPLRSHTIDHIREAVRKDNKQRFSLLEENGELLIRANQGHTVKVVETESLLKPILSAEEFPVCVHGTYRKNLESILGSGLKRMKRLHVHFSCGLPTDGEVISGMRQDVNVLIFLDVRKALEEGMKLYISDNKVILTEGFDGVVPAKYFEKIESWPSRQPIPF

SEQ ID NO: 21189 - protein, 265 aa, Xanthomonas campestris pv. vesicatoria str. 85-10
MSDWEGRLHTGLQVERDGHVAIVTLSNPPANTWTVHSLAALRDLVRALDADRSIYALVITGEGEKFFSAGADLKQFADGDKANARQAARRFGEAFEALSAFRGVSIAAINGYAMGGGLECALACDLRIAEQHAQLALPEASVGLLPCAGGTQNLPRLVGEGWAKRMILLGERIDAATAQRIGLVEEVVGKGESRALAVAWAQRAGKQSPVSVAACKQLVQSTRHGTHAAALIAEREAFVDLFEHADQAEGVAAFLDKRAPQWSNR

SEQ ID NO: 21190 - protein, 517 aa, Medicago truncatula
MGNRISSKHKPSSDSQTRSKSEPSHSTPTSFHPPNRTPKQSTHTPTPSSSPLGRVLGKPMEDVRSTYTFGRELGRGQFGVTYLVTHKLTKEQFACKSIATRKLIRRDDLDDIRREVQIMHHLTGHRNIVELKGAYEDRHSVNLIMELCAGGELFDRIISKGHYSERAAAELCRQIVTVVHNCHTMGVMHRDLKPENFLFLSKHENSPLKATDFGLSVFFKPEDVFKDLVGSAYYVAPEVLRRSYGPEADIWSAGIILYILLSGVPPFWAENEQGIFDAILRGHLDFASDPWPKISSIAKDLIKKMLRADPKERISAVEVLDHSWMKEDGASDKPLDIAVLTRMKQFRAMNKLKKVALKVIAENLSEEEIIGLKEMFKSMDTDNSGTITFEELKAGLPKLGTKISESEVRQLMEAADVDGNGTIDYIEFITATMHLNRMEREDHLYKAFEYFDNDKSGYITKEELESALTKYNMGDEKTIKEIIDEVDSDNDGRINYEEFVAMMRKGNPDLITNKRRK

SEQ ID NO: 21191 - protein, 366 aa, Brassica juncea
MALSAIGFEGYEKRLEVSFFEPSIFQDSKGLGLRALTRSQLDEILTPAACEIVSSLSNDHLDSYVLSESSFFVYPYKVIIKTCGTTKLLLSIPPLLKLAGELSLSVKSVKYTRGSFLCPGGQPFPHRSFSEEVSVLDGHFSKLGLNSVAYLMGNDDETRKWHVYAASAQAPSNCNNNVYTLEMCMTGLDREKASVFYKNETGENGSMTDNSGIRKILPKSQICDFEFEPCGYSMNSIEGDAISTIHVTPEDGFSYASFEAVGYDFNTLDLSQLVTRVLSCFEPKQFSVAVHSSVGANAYKPEISVDLEDYGCRERTFESLGEESGTVMYQTFEKLGKYCGSPRSTLKCEWSSNNSCSSEDEKDEGI

SEQ ID NO: 21192 - protein, 357 aa, Thiomicrospira crunogena XCL-2
MTQEVLILPGDGIGPEITAEAVKVLEALQQKDNLDISMTHDLVGGAAYDQHGVPLAEETLEKAKQSDAILLGAVGGYQWESLDISVRPEKGLLALRSNLELFANLRPAYLFPQLADASTLKPEVVAGLDILIVRELTGGIYFGQPRGIRTLDNGERQGYNTYVYSESEIKRIAHVAFDAAMKRNKKLCSVDKANVLEVTEMWREIVDEVAKEYPEVEVQHMYVDNAAMQLVLNPKQFDVMVTGNMFGDILSDEASMLTGSIGMLASASLDANNKGMYEPSHGSAPDIAGQNIANPLATILSAAMMLRYSLNREDLALKIETAVSKVLDQGLRTGDIWSEGLTKVSTSEMGDAVVAAL

SEQ ID NO: 21193 - protein, 533 aa, Thermoplasma volcanium GSS1
MNGATKNVSFENSITNSNLIENEERKFRRKLGLLDLFMIGITGVIGSGWLFSPLYAANAAGPASIASWVLGGALVLMVGLVFSQLMRFKSEAGGITRYPYYTNGALAGTITGWTLWLAYSMNPPSESSGLVQYMSSYVPGLYINGALTPVGLAIAISFMGLFVLVNYFGVVIFSKIINAITALKLVVPTITMVTLFLVSFKLRNFSAYGVAPYGPFSVVSAIVTSGIVYSYLGFQAVINLAGESRNPKRDGPLSLILVIIFSVVFYVVLQIAFIGSVPASDISKGWAFLSLPSPFADIAVSFNMFWLYTLIIADSIYSPSGSSMAAVASNSRNLYALSKNGTLPSFFLRVDNNTGIPRRALLFNFVISLIVLVTLKSWHQIIETLGILLLISFIGSAVSSGVIGSIKRYSSIKMPFIVIVSAIVFVFSGLIISISSFSKVLVVSLLLVPSLLLFAVSSGRGNRVIADVKAGLWFIIYVMEIAILSFIYNEHYVSGYIFLGAYLLSSTITFILARRSGVKFMHQAGEYDIAEIP

SEQ ID NO: 21194 - protein, 349 aa, Umbelopsis ramanniana
MEQVQVTALLDHIPKVHWAPLRGIPLKRRLQTSAIVTWLALLPICLIIYLYLFTIPLLWPILIMYTIWLFFDKAPENGGRRISLVRKLPLWKHFANYFPVTLIKEGDLDPKGNYIMSYHPHGIISMAAFANFATEATGFSEQYPGIVPSLLTLASNFRLPLYRDFMMSLGMCSVSRHSCEAILRSGPGRSIVIVTGGASESLSARPGTNDLTLKKRLGFIRLAIRNGASLVPIFSFGENDIYEQYDNKKGSLIWRYQKWFQKITGFTVPLAHARGIFNYNAGFIPFRHPIVTVVGKPIAVPLLAEGETEPSEEQMHQVQAQYIESLQAIYDKYKDIYAKDRIKDMTMIA

SEQ ID NO: 21195 - protein, 662 aa, Oryza sativa
MAAAAAAASLSVSDAAAKLPKPGGQVQRRRDRDRPRVDAAACTRDSRRPTRERCSTTVSLAATATATTATPVRAPVRTRAPMGQRKGADIVVEALEWCGVRDVFEYPGGASMEIHQALTRSPVIRNHLLRHEQGEAFAASGYARSSGRPGVCVATSGPGATNLVSALADAHLDSVPLVAITGQAPRRMIGTDAFQETPIVEFTRSITKHNYLILDVDDIPRVINEAFFLASTGRPGPVLVDIPKDIQQQMAVPSWDAPMRLPGYISRLPKPPAANLLDEVIRLVGDAERPVLYVGGGCSASGYELRRFVELTGIPVTTTLMGIGNFPSDDPLSLRMLGMHGTVYANYAVDNADLLLALGVRFDDRVTGKVEAFASRAKIVHVDIDPSELGKNKQPHVSICADVKLALQGMNAMLEEQSAAAARKNLDFSAWRSELEKKKVEFPLGYRTFGEEIPPQYAIQVLDEVTNGEAIVATGVGQHQMWATQHYTYRRPRQWLSSAGLGAMGFGLPAAAGAAVANPGATVVDIDGDGSLLMNIQELAMVRVEDLPVKVMVLNNQHLGMVVQWEDRFYDANRAHTYLGNPAANGGGEVYPDFVTIAGGFGIPAARVTRKGEVRAAVEEMMAAPGPYLLDVVVPHQEHVLPMIPSNGAFKDIIVDGGGRRT

SEQ ID NO: 21196 - protein, 617 aa, Mucor circinelloides
  misc_feature (443)..(443): Xaa can be any naturally occurring amino acid
  misc_feature (522)..(522): Xaa can be any naturally occurring amino acid
MLSLKRIATTTKSNIFHRALLAQRSYSYINANEYSDPRHDKNVHVMHSRGVNLLHDPLLSKGTAFSIAERERLSIRGLVPPRCQEMDKQLLRIKRNLDACETPLAKFVFLAALHDRNETLYYKIIMEHLEELAGIIYTPTVGLASQMSHSIYRRSRGMYFSSQDRGQMSAMVYNWPHDKVDVIVVTDGSRVLGLGDLGANGMEIPIGKLSLYVAAGGIRPRAVLPVVLDVGTNNQDLLNDPLYLGMSHPRLEGEEYYSFIDEWVTAITSRWPDTLIQFEDFKYPHAYNLLAKYRNRITCFNDDIQSTSSITLAGILASLKSRGMSQEDLSNERIICVGAGSAGVGVCEGIIDCMVAQGRVKSREEAYSKIYMLDQYGLLGNPGVHLPSDEEHGHPYQPRTTKLDDRQYCYVKHDLRDQMGLEELVRKVKPTVLLGLTGIQGVXSEEAVREMAKHHERPVIFPLSNPDTHAECTAEEAFKWTDGRAIFASGSPFKDVELPNGKIGRTNQCNNSYSFPVSGLGXGITVSRASRVTPNMFLETARTIADMATPSQLKEGILFPGVSQLREVALNVGTRVCEVAFEEGYATAKLEEGEILSEVVRSSAYQPEYVPLVYRDH

SEQ ID NO: 21197 - protein, 479 aa, Gloeobacter violaceus PCC 7421
MSSIAIVWHRRDLRVHDNPALWQASRTGGQVLAVFIVDPTIVERDDTAPARIYFLRESVLELQKAYRTIGGRLAVRVGEPVQQLVALAQAVGAGAVYFNDDIEPYARERDARAAEALRAAGITVHACAEILLHPAGEVLTAAGGKPYTVYTPFWRQWSAKPKPKPFPTPERLEAPTVEEQSFPELAQLGRPFAGELLVSPGEQSGLEQLEAFAREGLYRYGERRDLPGCDGTSRLSAHLKFGTVGIRAVWARTMDAWKQAEHDRDRAGLAVWQQELGWREFYKYELFHLPQLAGRPFRREFENFQWDEDQERFERWCQGETGYPIVDAAMRQLNTVSWMHNRLRMIVASFLTKDLLLPYGWGERYFMQKLVDGDLSANNGGWQWAASVGTDPKPLRIFNPSTQAGRYDPKAVFIRRWLPELEGVDTALLVTSERLPPLMRAQHRYAQPIVEHKRQQQVFKERYRAVRAQQADPGARDSE

SEQ ID NO: 21198 - protein, 420 aa, Oceanobacillus iheyensis HTE831
MVEVKLHDIGEGMTEGDILTYFIQEGDQVEEDQPIVEMQTEKMVAEITAPAKGTVKEIFIAEGTTISVGTTIMTIESEDAMEKTKSSEIQRAEGNQATQLSASDNQHTETKQKNGPKRIKASPYTRKVARELDVDIELVEGTGKDGRIMIEDVQQFSQNRESAATKVKPEVEQLQNQFFQETEEQVDAKEEEAEIIPFKGRRKQIAKKMTTSIYTIPHVHHMEEVDMTELLEFRKEIKSDADISVAAFFIKALTIALKEYPIFNAKLHEEKEEIRLEKGIHMGIATDTEEGLIVPVIQSADIKSIRTIHREMKELMKKAKENTLSLKEMTGSTFTISNVGPMGSIGATPIINYPEVALMAFHKTKKAPVVNDNDEIVIRSMMNVTLTFDHRVTDGGNAIAFTNKFKALIENPRLLLIELR

SEQ ID NO: 21199 - protein, 430 aa, Methanosarcina acetivorans C2A
MAETKSMGLWASASIGVGAMVGAGIFSIFGTAAQISGNAVYVSFIIAGMIALLNTYSYAKMGVRYPSAGGPVEFMLKGFGDGILSGGLNLLLWVGYVFGLALYAKGFSYYAITFLPAGSAPVWTSFFATAIILAFTAINFRGAKTVGKSELFIVSIKVGILLLFAAAGMFYVTPGNLSISAWPAPKNLFFGAGMVFLAYQGFGLITNAAEDMKNPEKNLPRALYLSVVLVIIIYVSVSLAVIGNLSVPEIQNAQDYALAAAAKPFLGDIGFKIMAFAALFSTSSAINASLYGGANVSYILAKDGELPEIFERKVWHRSPEGLFITSSLVILCANFLQLEGIGMLASTCLLMVYVAVNISHLRLLKETGAKSYIIWASLLSSLTFFCVLLYYEFMHSKTTLGLLGFTVFCCFAAEWTYRKYSGRLIKERTG

SEQ ID NO: 21200 - protein, 311 aa, Oryza sativa
MAASSAAFAACLLACALLFQMCVASRKLTALVQDQPITMTYHKGALLSGRIAVNLIWYGNFSAPQRAVITDFVSSLSTPPSPQPQPEPSVASWFKTAQKYYANSKARFPALSLGQHVLDQSYSLGKRLGEKDLVRLAARGSPSRAINVVLTADDVAVDGFCMSRCGTHGASPRSRAGRFAYVWVGNPATQCPGQCAWPYHQPVYGPQAAPLTPPNGDVGVDGMVISLASMIVGTVTNPFGNGFFQGDADAPLEAATACAGVYGKGAYPGYAGSLLVDPASGASYNANGAHGRKYLVPALVDPDTSACSTVG

SEQ ID NO: 21201 - protein, 481 aa, Methylobacterium extorquens
MATDILMPALSPTMEEGKLAKWLKKEGDPVKAGDILAEIETDKATMEVEAIDEGVLAKILVADGTENVAVNTPIAIIAEEGEDVSAAASGGKGKSDGAAGSAPAPTPDMQAEGMADSSAATAKTGDDAQKAPASPAIITNKAPDPVMEEFPADSPMKTTTVREALRDAMAEEMRKDDKVLVMGEEVAEYQGAYKITQGLLQEFGARRVVDTPITEHGFAGIGVGAAFMGLRPIVEFMTFNFAMQAIDHIINSAAKTLYMSGGQLGCPIVFRGPNGAAARVGAQHSHDYAAWYSNVPGLKVIAPYTASDAKGLLKAAIRDPNPVIFLENEILYGQSFPVPEIEDFVLPIGKARVHRPGKDVTIVSFSIGMTYALKAAQALAEEGIEAEVIDLRTIRPMDSATVVESVKKTGRCVCVEEGFPQSGVGAEIVARLMVDAFDYLDAPVLRVTGKDVPMPYAANLEKLALPSVADVIEAVKSVCYK

SEQ ID NO: 21202 - protein, 53 aa, Arabidopsis thaliana
KVDPEASTSKIGEDQLFYFQQRGIDHERALPPMISGFCRDVFNQLPDEFGAEG

SEQ ID NO: 21203 - protein, 348 aa, Arabidopsis thaliana
  misc_feature (84)..(84): Xaa can be any naturally occurring amino acid
MGVDYYKVLQVDSSASDDDLKKAYRKLAMKWHPDKNPNNKKDAEAMFKQISEAYEVLSDPQKKAVYDQYGEEGLKGNVPPPNAXTSGATYFSTGDGSTSFRFNPRSADDIFAEFFGFSTPFGGGGGGTGGQRFASRMFGDDMYASFGEGGGGGGAMHHHHHHHHHAAARKVAPIENKLPCSLEDLYKGTTKKMKISREIVDVSGKAMQVEEILTIGVKPGWKKGTKITFPEKGNEHPGVIPADLVFIIDEKPHPVFTREGNDLIVTQKVSLADALTGYTANIATLDGRTLTIPITNVIHPEYEEVVPKEGMPLQKDQTKKGNLRIKFNIKFPARLTAEQKAGFKKLIG

SEQ ID NO: 21204 - protein, 168 aa, Glycine max
MGLVKGKWKQNMISKAWEGCRLTSRRPHLKLKSLSENDDDHEKKGSQIAPHGCFSVHVGPERQRFVVKTKYVNHPLFQMLLEETEQEYGFESDGPIWLPCNVDLFYKVLAEMDGEENNNNIIIHGFRRSFITMAKVFPFLVLRSPPRLLSHMNKDHGAYSVMDSELLR

SEQ ID NO: 21205 - protein, 330 aa, Glycine max
MKATLRYLAGMAGPSGFGSNSTAEQVTEDCSCFLPSALTALITGASSGIGAETARVLAKRGVRVVIAARDLKKAKEVKKNIQKETPKAEVILLEIDLGSFGSVQRFCSEFLALELPLNILINNAGMFSQNLEFSEDKIEMTFATNYLGHFLLTEILLDKMIETAEKTGIQGRIINVSSVIHSWVKKGGFRFNDILSGKKYNGTRAYAQSKLANILHAKEIAKQLKARNERVTINAVHPGIVKTGIIRAHKGLITDSLFFIASKLLKTTSQGASTTCYVALSPKTEGISGKYFADCNESKCSSLANDESEAQTLWNNTHALLQKRLRQATI

SEQ ID NO: 21206 - protein, 149 aa, Pseudomonas syringae pv. tomato
TETRDLLVSLAGEVGLKEAIKAQYDGELVNSSEGRPALHTALRRPVGDKLKVNGVDVMPDVHRVLNQMTELVGRIHDGLWRGYTEKPITDVVNIGIGGSFLGPELVSEALVAYAHKGVRCHYLANIDGSEFHELSMKIRAETTLFIVSS

SEQ ID NO: 21207 - protein, 442 aa, Methylobacterium extorquens
MATDILVPTLGESVSEATIGRWFKKPGDTVAADEPLVELETDKVTLEVNAPAAGELGEILVKDGETVEPGAVLGSIVEGGKGSGKSDAKPAPKSAEPAETKTQSREEKGESKPAKEDAPAQESSASYGSHGDAPPTDGRPADDSGPAVAKLARESGIDPASLNGSGKDGRVTKGDMLAAIDRNGQKAPAQEARSETKAPPPRAPSAPDDAAREERVRMTKLRQTIAKRLKSAQETAAMLTTFNDVDMGAVMAMRSQYKDIFEKKHGTKLGFMGFFTKAVIGALKDVPAVNAEIDGQDLVYKNYYHIGIAVGTDKGLVVPVVRDADDLSIAGIEKKISGFGKKAREGKLSIDEMQGGTFTITNGGIYGSLMSTPILNAPQSGILGMHRIEERPVVRNGKIEARPMMYLALSYDHRIVDGKEAVTFLVRVKEALEDPARLVLDL

SEQ ID NO: 21208 - protein, 612 aa, Carboxydothermus hydrogenoformans Z-2901
MCGIAGMISFSKDLSPFVPLLEKMTQSLTHRGPDALGIWHSENIILGHRRLAVIDPERGRQPMIRTFGDWQYVIVYNGELYNTKELRDELEARGHHFYTTCDTEVLLVSYIEWGKECLSKLNGIFAFAIFDEKENQLFLARDRLGVKPLFYALVNDTLIFASEIKTLLLHPDIPSRLSTDGLKEVLFLGPARTPGMGVFAHISELLPGDYAVFNPEGLFIKPYWRLTSNPHPDDFPTTVKKTRELLEDAVIRQLVSDVPICTLLSGGLDSTVITAFAASHLHSRGETLNTFSVDYAENELYFTESAFQPNCDAMFIPLVAKEFNTLHRNIVLTQEELFEALFPALIARDLPGMVDIDSSLWLFSREIKKEATVGLSGECADEIFGGYPWFFRKEALEAKTFPWALSLDRRKTLFRQDLIAELKPDEYVQKRYHEALEEIPEISGLSPEEKRLREITYLTLTRWMPILLDRKDRMTMAWGLEVRVPYCDHRLVEYLWNVPWHFKTAGGQEKGLLRQAVADLIPDYILKRKKSPYPKTHHPLYTKLVREALTQILAENSSPINFLIDENEVRKLITNPSPPNARPWFGQLMGDTQIMAYLIQLNYWFKKYHISF

SEQ ID NO: 21209 - protein, 196 aa, Nostoc punctiforme PCC 73102
MSTDSPVNSSDKSESSLGKRLRNFLVVMVAIALSVALVLGLRTETTSASLAKLSNSSTPLEVAVSNGKPSLVEFYADWCTVCQKMAPDITQLETEYADKMNFVMLNVDNTKWLPEMLKYRVDGIPHFVFLSQQGETIAQAIGDQPRTIMASNLEALVTGSSLPYAQASGKVSKFSAPVAPTASQDDPRSHGSQVVN

SEQ ID NO: 21210 - protein, 149 aa, Pseudomonas syringae pv. tomato
AETRDLLVALAGEVGLKDAIKAQYYGELVNSSEGRPALHTALRRPVGDKLKVNGVDVIPDVHRVLNQMTELVGRIHDGLWRGYTEKPITDVVNIGIGGSFLGPELVSEALVAYAHKGVRCHYLANIDGSEFHELSMKIRAETTLFIVSS

SEQ ID NO: 21211 - protein, 228 aa, Ehrlichia chaffeensis str. Arkansas
MLTKKNSFNRGKVVEVSSSILSADFANLGKSVEMLTDAGVDYIHVDVMDGNFVPNITIGPVVVSAIKKYTTIPFDVHLMINSPGNYIEAFVDAGADMITIHAESDIHLDRIIQKIKSYKKSAGLSLVPTSHYNILEYIIFELDLVLIMTVNPGFGGQQFITSQLDKISCVRNLIEKYSLKTKIAVDGGVNIKNAKSVIEAGADILVVGSAIFNANNMLDYVQQLKSSF

SEQ ID NO: 21212 - protein, 495 aa, Burkholderia vietnamiensis G4
MSMNPMAETPPSEYSCLPRSRGLFYAGDWHEPLSATYRETLNPANGLPVASVAHASADDAEAAIERAHEAWLDWRGTAPAKRQRMLHEAASLLREHAEEFAMIDAINTGNPVAEMVGDAMVAADSLDFFAGLVPMLKGETIPVDGNSLHYSLREPLGVVARIVAYNHPLMFAAGKVAAPLAAGNTVIVKPPEQAPLSCLRLAEVLRDVFPPGVLNILPGGRECGQTLASHPLVKKVTLIGSVNTGRAILRGAADTIKPTLLELGGKNALIAFPDADIKALIHGIARGMNFTWAGQSCGSTSRVFLHDSIHDQVLESVATYVRETYVPGVPTDAATTMGPLISAQRRDEVMDFIASATREGARLVTGGKAPDTPELRGGYYIEPTIFSDVTASMRIAREEIFGPVMSVFRWKDEEELFKVVNGTEFGLTASIWTSALSTAHRAASRVEAGYVWINQTSRHYLGVPFGGVKHSGLGREECLEELLDFTATKSINIQL

SEQ ID NO: 21213 - protein, 402 aa, Desulfitobacterium hafniense Y51
MKANIAIVQAGGPTSVLNASLAGFLEAAASSERYHHVLGFCNGIEGLIKNQVMHLEGLSKAQLDALKSQPGAVLGAGRYPLTPERLSKVCCNLQLREISQLVLVGGNGTMWAADQIAEACPDVQIVGIPKTVDNDLWGTDHSPGYLSAAKFIGEAVRSLALDLWAMRNFERVRVVEVMGRNVGWLAAAGSLAQTSLPDYPPLHFYLPEHPFELEKFFTKVDEHLHRHPCLLVIVSEGIRLADGSPVAEFEIGRCKVPGGAAQMLSSELRNRGIPSRSEVLGILQRANTWSVCERDRQEAIFLGKQAIGVLGQGKSKVMLGLPAETVDFAEDSKAQWVDLKSVAGLERPVAPCYLTESGIDPSFTAWLQNKMGEPLAEANSALQVWKLAAEQLSSNPVNRQSR

SEQ ID NO: 21214 - protein, 479 aa, Desulfitobacterium hafniense Y51
MKKEIRESLFIDGEWQEAINKEVKGVINPATGKVFCEIGYGEVDDALSAVDAADRAFGAWSKTSVRERADILNRTADLLRQRADHIGLILAAESGKPLPQAVGEVKFSAEYFQWFAEEIRRPYGQSIPSDAANKRHHVYTQPAGVALCLSPWNFPVSIQARKLAPALAAGCTVVARGSEVAPLSLIELFQCLQDAGIPKGVANLIQGPAAVTTAAMMKHPAVRVVSFTGSTPVGRSLMRQAADGVIRLALELGGNAPFIVFADADIEKAVEGAMIAKFRNNGQSCIGANRFYVHERIYDKFTALFAEKILRMKIGNPTEEVDLDLGPMVNLKDKARIESLIYEAEALGAKPLVPKAEVPAEGYYVPPVILENVPESAALAREELFAPVAPLFKFADENEVIEKANSSDMGLAAYVYTNDLSRSIRVTESLKFGIIGLNNALPSVAYAPMGGVKQSGIGREGARIGLEEFMDVKYVATEI

SEQ ID NO: 21215 - protein, 413 aa, Bacillus anthracis str. 'Ames Ancestor'
MIKKYTCKNGVRIVMENIPTVRSVAIGIWIHAGSRNENEKNNGISHFLEHMFFKGTETRSAREIAESFDSIGGQVNAFTSKEYTCYYAKVLDEHAKYALDVLADMFFNSTFDEEELKKEKNVVCEEIKMYEDAPDDIVHDMLTKATYETHPLGYPILGTEETLNTFTGDTLRQYIKDHYTPENVVVSIAGNIDEAFLQTVEQYFGSYEGTTNREQVHSPIFHFNKVARKKETEQAHLCLGYKGLQMGHEDIYNLIVLNNVLGGSMSSRLFQEVREQRGLAYSVFSYHSSYEDTGMLTLYGGTGSQQLDTLYETMQETLETLKNTGITEKELINSKEQLKGNLMLSLESTNSRMSRNGKNELLLRKHRSLDEIIESVNTVTKENVDELIRNMFTDEFSAALISPDGKLPKGIKL

SEQ ID NO: 21216 - protein, 579 aa, Arabidopsis thaliana
  misc_feature (517)..(517): Xaa can be any naturally occurring amino acid
MEFDEYEYLEKTVEEGAGSNKKKEESGNERSERSYRKREGGERQGEEGGEEERVSSRSKKSRGDGEENGGGKRDRERERHRSSRDKDRERDKVREGSRDKESDRERSSKERDRSDRDKPRDRERREREKRSSSRSRREEKEPEVVERGSRRHRDKKDEPEADPERDQRTVFAYQMPLKATERDVYEFFSKAGKVRDVRLIMDRNSRRSKGVGYIEFYDVMSVPMAIALSGQLFLGQPVMVKPSEAEKNLAQSNSTTVGGTGPADRKLYVGNLHFNMSELQLRQIFEAFGPVELVQLPLDPETGQCKGFGFIQFVQLEHSKAAQIALNGKLEIAGRTIKVSSVSDHIGTQDSAPKSADFDDDDGGGLALNAQSRAMLMQKLDRSGIATSIVGSLGVPGLNGAAFNQPGMNPSFPTSVLPTTAIPSFVNEHVGLPSECLLLKNMFDPATETEPNFDLEIRDDVADECSKYGPVNHIYVDKNSAGFVYLRFQSVEAAAAAQRAMHMRWFAQKMISATFMXLMNMKPKPRPELKTSRIFVFSRFLVLTAMQILNLLSEICYIDKRIMNEDLSFFFFFFCPRLL

SEQ ID NO: 21217 - protein, 989 aa, Arabidopsis thaliana
MSDHGEKTCPLCAEEMDLTDQQLKPCKCGYQICVWCWHHIVDMAEKDQIEGRCPACRTPYDKEKIVGMTVNCDSLASEGNMERKKIQKSKSKSSEGRKQQLTSVRVIQRNLVYIVGLPLNLADEDLLQHKEYFGQYGKVLKVSMSRTASGVIQQFPNNTCSVYITYGKEEEAVRCIQAVHGFILDGKPLKACFGTTKYCHAWLRNVACVNPDCLYLHEVGSQDDSFTKDEIISAYTRVQQITGATNILQHHSGNMLPPPLDAYCSDSSSAKPIIKVPSTNATSVPRYSPPSGSGSSSRSTALPAAASWLVFTGTHQSLATSVTSNGSSDIQRSTSVNGTLPFSAVVANAAHGPVSSNDILKRPSRKEESQIVMDKVKPSVLKPLQHNVVVSGSERITAPDRDPTSNRLSSSVDSAYGGRDIDQPSAYSGRDIDKPSSTVSSFDAANEAVEDVPTVSNLLDGVACMRITMNCRDERPDITMAIGSQSDQGSIRQPGSEVSKLPDLEQCRIDSSINTDKKAISLEDRIPRTRPGWDWISDLQSQMQGSSKLQVEDISTLDSQRPHPEEDIIHSRLLSNLSSSSLDTNHMASRSSLPCEVRGSDRLHLPNGFGEKSMSSVEHSLFANEGRNKVNNAEDAILSNILSLDFDPWDESLTSPHNLAELLGEVDQRSSTLKPSNFLKQHNNQSRFSFARYEESSNQAYDSENYSIYGQLSRDKPIQESAMSRDIYRNNLGSVNGFASNFAGGLDNFAASPLFSSHKNPVSRPQVSAPPGFSAPNRLPPPGFSSHERVGLSSDTTLGNRFLDSTSLRNAYQVPPPVGNSNGASDIDFVDPAILAVGRGMVNADLDMRSGFSSQLNSFENETGLHMLRQQSLSSAQQVNGFHHDLRNLSPSLNDPYGFSSRLMDQTQGSSLSPFSQLPRQQPSANSILSNGHHWDKWNEGQSVNNIGMAELLRNERLGFNGSLYNNGYEEPKFRIPSPGDVYNRTYGI

SEQ ID NO: 21218 - protein, 323 aa, Gibberella zeae PH-1
MGNTYSLMFPPKPQFTEENLQPQDGRVFLVTGGYSGIGFELSRMLYEAGGSVYIAGRSQEKGEQAIAQLKGHCPDSSGSLSFLKISLDDLKSVKSAAEEFIAKESRLDVLFNNAGVSMPPPGSVSAQGYELSIATNAIGPWYFTQLLVPVLTQTAKNQPPASVRVVWTASIVTDVALPKGGVDMKEVINPSKDPQVNYTNSKTGNWYLASVLANQIGSQGVLSVCHNPGNLQTSLLRHMPWAVRYAVSIILYHAKFGAYTNLWAGLSPDLQIEDGGRFIWPWGRFHPSPRPDLLENLKSKEQGGTGTAAEFAEYCDKIIAEHR

SEQ ID NO: 21219 - protein, 117 aa, Zea mays
MEGFIKLSTLLIVCMLVSAPMAEAAISCGAVASNLGQCINYLTRGGFVPRGCCSGVQRLHSMARTTRDRQQACRCIQGAARALGSRLNPGRAARLPGACRVRISYPISARTNCNNIR

SEQ ID NO: 21220 - protein, 547 aa, Listeria monocytogenes str. 1/2a F6854
MTVKSGFDYMNNPLLNKGTAFSEEERANYQLDGLLPPIIETIEQQAVRIETQIENLETPLHKHQLLTNLYNENRTLYYYLVTKNVTDYLPIIYTPTIGDAVIQYHKEYTAPDEALFIDAFAPEKLSASIKNYAKNNPNIDMIVITDGEGVLGIGDWGVNGVKIAVGKLAVYTVAAGLAPDRVLPVVIDAGTNNETLLNDSLYLGNKGPRLSESEYDAFIASFVNVMKEVFPKAILHWEDFGRANASRILHNYRDKICTFNDDIQGTGAMVVAAVLATIQVSRIPLSEQKIIIFGAGTAGIGIADQLSAQLMRETGLPFEKAKKHFYLVDRKGLVLDNMTDLTTGQKKYAHPSAEWSNVPTDTLENLVEAVHPTMLIGCSGVTGAFKESIVKKMTQYTERPAILPLSNPTKLAEATASDLIQWTDGKALIVTGSPSKPVEYQNTTYEIGQANNALLYPGLGLGALVTRAKYITDDMLAAASMAVAEQISPNKAGAALLPHVRTLRETSRAVAIAVANQAIKENIHQVELTNVIEAIELEMWQPIYKGV

SEQ ID NO: 21221 - protein, 598 aa, Oryza sativa (indica cultivar-group)
MARLGLAVCAASFHLFLLLASISSLRRAPTEADTANHARRTAYHFQPAKNWQNDPNGPMYHNGMYHLFYQYNPHSALWDIGNLSWGHSVSGDLLNWAALDTALDPTSPFDANGCWSGSATILPGALPAILYTGIDASKEQVQNVAFAKNPSDPLLREWEKPAYNPVIALPADVPGDKFRDPSTAWLGRDGLWRIAVSAEVDGVASTLVYRSKDFVRWERNAAPLHASRAAGMVECPDLFPVAERGEDGLDTSANGAGGVRHVLKLSVMDTLQDYYMVGTYDDAADAFSPAEPERGDDCRSWRRLDYGHVYASKSFFDARKNRRVLWAWANESDSQADDVARGWSGVQTFPRKMWLAKDGKQLLQWPIEEIETLRRKRAGLRRGTRLGAGAVQEIVGVASSQADVEVVFKIPSLEEAERVDDPNRLLDPQKLCGEKGAAVRGGVGPFGLLVMASGDLHEHTAVFFRVFRHHDKYKLLMCTDLTKSSTRAGVYKPAYGGFVDMDIDDHKTISLRTLIDHSVVESFGGGGRACITARVYPEHVATSSSHLYVFNNGSDAVKVAKLEAWDLATATVNVVVGDHHGLVAPALELEPDTHDAVI

SEQ ID NO: 21222 - protein, 165 aa, Solanum tuberosum
KEVVEAMACMNKRPLIMALSNPTSQAECTAEEAYTWSEGRVVFASGSPFPSFEYDGKLNIPGQANNCYIFPGFGFGLVMSGTIRVHDDMLLAASEALAAQVTEEHYAKGMIYPPFADIRKISAHIAASVAAKAYELGVATRLPRPADLVKYAESCMYTPNYRSYR

SEQ ID NO: 21223 - protein, 407 aa, Arabidopsis thaliana
  misc_feature (140)..(140): Xaa can be any naturally occurring amino acid
MERLISHPPLMIVSDLDHTMVDHQDHENLSLLRFNSLWEYAYRRDSLLVFSTARSPVLYKELRKEKPLLTPDIIITSIGTEIAFGNSMVPDHAWVESLNSCKWNREIVLEETSKFPELTLQPKTEQRLHKVSFYIDEGKXDVKIIYSWGKNVDVIPRGAGKGEALEYLLKKLQAEGIFPVNTLACGDSEHDAELFSIPDVHGVMVSNSQEELLKWRSENALNNLKVIHSTERCADGIIQAIGHFNLGPDLSPRDVSEFLDRKMDNVNPGHEVVRFYLFYERLRRGEIKNYETYIASFKDSCLHAAVLFHPSGAEKSLRDTIDELKKCYGDKRGKKFWVWVDQVLVTDTIPGKWIVKFDKWEQCEDESQCCKTTVEFTSKGGDLVWEKVKQIWSEESKVKDDNSSWIL

SEQ ID NO: 21224 - protein, 339 aa, Oceanicola granulosus HTCC2516
MEGTDMAETRHTKVLIIGSGPAGYTAGVYASRAMLEPLLVQGIEPGGQLTTTTDVENWPGDTEVQGPDLMVRMEAHARAMGTEIVSDIITALDLSKRPFTAQSDSGTVYTADAVILATGARAKWLGLPSEEKFKGFGVSACATCDGFFYRGQEIVVVGGGNTAVEEALFLTNFASKVTLIHRRDELRAEKILQDRLMKNPKIEPLWFHQLEEVVGDDSPLGVTGVRAKNVKTGEITEIAAKGVFIAIGHAPASELVKDQLETHMGGYVVTKPDSTETSIPGVFAAGDLTDHKYRQAVTSAGMGCMAALEAERFLAEHHEAEREVVTEPLGYGAEVGAAE

SEQ ID NO: 21225 - protein, 472 aa, Pseudomonas putida KT2440
MPVGNHSAHGQATEGGPLKRELGERHIRLMALGACIGVGLFLGSAKAIEMAGPAIMLSYIIGGLAILVIMRALGEMAVHNPVAGSFSRYAQDYLGPLAGFLTGWNYWFLWLVTCVAEITAVAIYMGIWFPDVPRWIWALAALGSMGAVNLVAVKAFGEFEFWFALIKIVTIIAMVLGGIGIIAFGFGNDGVAVGISNLWSNGGFMPNGVTGVLMSLQMVMFAYLGVEMIGLTAGEARNPQKTIPQAIGSVFWRILLFYVGALFVILSIYPWNEIGSQGSPFVMTFERLGIKTAAGIINFVVITAALSSCNGGIFSTGRMLYSLAQNGQAPAAFARTSKNGVPRNALLLSIGALLLGVLANYLVPEKVFVWVTSIATFGAIWTWVMILLAQLKFRAGLTTAERKALKYRMWLWPLSSYLALAFLVLVVGLMAYFEDTRVALYIGPAFLVLLTVLYYTFRLAPKDAQGVTSTAS

SEQ ID NO: 21226 - protein, 325 aa, Staphylococcus aureus subsp. aureus MRSA252
MAQMTMVQAINDALKTELKNDQDVLIFGEDVGVNGGVFRVTEGLQKEFGEDRVFDTPLAESGIGGLAMGLAVEGFRPVMEVQFLGFVFEVFDAIAGQIARTRFRSGGTKTAPVTIRSPFGGGVHTPELHADNLEGILAQSPGLKVVIPSGPYDAKGLLISSIRSNDPVVYLEHMKLYRSFREEVPEEEYTIDIGKANVKKEGNDISIITYGAMVQESMKAAEELEKDGYSVEVIDLRTVQPIDVDTIVASVEKTGRAVVVQEAQRQAGVGAAVVAELSERAILSLEAPIGRVAAADTIYPFTQAENVWLPNKNDIIEKAKETLEF

SEQ ID NO: 21227 - protein, 430 aa, Staphylococcus aureus subsp. aureus MRSA252
MAFEFRLPDIGEGIHEGEIVKWFVKAGDTIEEDDVLAEVQNDKSVVEIPSPVSGTVEEVMVEEGTVAVVGDVIVKIDAPDAEDMQFKGHDDDSSSKEEPAKEEAPAEQAPVATQTEEVDENRTVKAMPSVRKYAREKGVNIKAVSGSGKNGRITKEDVDAYLNGGAPTASNESAASATNEEVAETPAAPAAVSLEGDFPETTEKIPAMRRAIAKAMVNSKHTAPHVTLMDEIDVQALWDHRKKFKEIAAEQGTKLTFLPYVVKALVSALKKYPALNTSFNEEAGEIVHKHYWNIGIAADTDRGLLVPVVKHADRKSIFQISDEINELAVKARDGKLTADEMKGATCTISNIGSAGGQWFTPVINHPEVAILGIGRIAQKPIVKDGEIVAAPVLALSLSFDHRQIDGATGQNAMNHIKRLLNNPELLLMEG

SEQ ID NO: 21228 - protein, 535 aa, Saccharophagus degradans 2-40
MTLKVHELLNNARLNKGTAFTLEEREELGLSGLLPPHVSTMKEQVERALSSIRRKESDIDRYIFLSALQKRNERLYYRLLIDHTKELMPLVYTPTVGQACLEFASIFRETSGFYLSYADKGLIQKRLANWPEQDVRLIVVTDGERILGLGDLGANGMGIPIGKLALYCACAGVKPEQCLPIMLDLGTNNESIRNDPLYLGVPEPRKRGSEYDDFLEEFVRAVEKQFPNALLQFEDFATGNAVNLLEKYRDQLLCFNDDIQGTASVVLAGLMATTRISKIPLQEQRFLFLGAGSAATGIGHLLTTALEREGITTDEARARLFFIDRKGLVTQCRDDLPGHVAPFAANMPPMDLKQAIDTIKPNALIGASGTAGVFTEEIIHTVASCHRNPTIFALSNPTSKAECTAEDAYKFSDGRAIFASGSPFDVVHINGEIKVPGQGNNAYIFPGLGLGAIHGKITRITDDQLITAAQELAGSVSDKQIQHGCLYPPLDEIRNVSVKIAAAVARDAERTGLTSEPVPENFEELLTAELYDPLY

SEQ ID NO: 21229 - protein, 394 aa, Gossypium raimondii
MASIRRTLSPAYHDRSYQNGAGFSSPSNKFLPNGSSKHFSSSHLPFLFNAVNIVYRKGWRRSFCRCLFFFVIGFVFGIAPFGYSDTDVRAKDFTFPELKPPHANLRFDDQIVTSVSLSVNTKLLEPKESTDIIEPLKQLIVVTPTYNRGFQAYFLNRLGQVLRLVKPPLVWIVVEEKAASHETAEILRKTGVMYRHVLCAFNSSSVKDPRVHQRNAALEHIERHKLDGIVFFADDDNVYTLELFESLRTISRFGTWPVAMLAQMLAPSKNKAVLEGPVCNASQVIGWHTNEKSKRLRRFHVDMSGFVFSSTILWDPKRWGRPFSNPIRQLDTVKEGFQETTFIEQVVEDESQMEGIPPGCSKVMNWHLHLDTGNVVYPKGWLLEKNLEVILPIK

SEQ ID NO: 21230 - protein, 394 aa, Chlamydophila pneumoniae CWL029
MSKETFQRNKPHINIGTIGHVDHGKTTLTAAITRALSGDGLASFRDYSSIDNTPEEKARGITINASHVEYETPNRHYAHVDCPGHADYVKNMITGAAQMDGAILVVSATDGAMPQTKEHILLARQVGVPYIVVFLNKVDMISQEDAELIDLVEMELSELLEEKGYKGCPIIRGSALKALEGDANYIEKVRELMQAVDDNIPTPEREIDKPFLMPIEDVFSISGRGTVVTGRIERGIVKVSDKVQLVGLGETKETIVTGVEMFRKELPEGRAGENVGLLLRGIGKNDVERGMVVCQPNSVKPHTKFKSAVYVLQKEEGGRHKPFFSGYRPQFFFRTTDVTGVVTLPEGTEMVMPGDNVELDVELIGTVALEEGMRFAIREGGRTIGAGTISKINA

SEQ ID NO: 21231 - protein, 197 aa, Triticum aestivum
HSRTSLYKKAGCYRSGIPGISSTHASAELLDVKIPMLQVEDVPGELRASSSSTVAAAGTGECSLQKSVSSGCLNSGDWMNGSAVRPNFLDFQGLDFEAAFGLRRAYSEGDIQKLGANTPRPGIAANVQASGERLVTISDLKSEERKQKLNRYRKKKIQRNFGRKIKYACRKALADSQPRVRGRFAKMDDGDMLKPRK

SEQ ID NO: 21232 - protein, 403 aa, Lotus japonicus
MASFRRTLSPAYHDRQHLNGAALSASSSPSHKAPSSNTKYSALAAAFRRVVGDILMRRNSRKGQWRRAVYRCVLCFFVGFLLGMFPFGHVVVEEEDENNVPVSFEIKPPNSGEMKRFVIDPVVSLSAEKQSQSLVAVERFDFVPRKLLIVVTPTYNRGFQSYFLNRLGQVLRLVPPPVLWVVVEMKAASLETAEVLRKTGVMYRHLVCPENSTDVKDRGVHQRNTALEHIERHRLDGIVYFADDDNVYSLDLFESLRDISTFYSRFGTWPVAMLAPSKNKAVLEGPVCNASQVIGWHTNEKSKRLRRFHVDMSGFAFNSTILWDPKRWQRPTSNPIRQLDTVKEGFQETSFIEQLVEDESQMEASPHGCLKIMNWHLHLGARDIDYPKGWMLQKNLDAVIPIK

SEQ ID NO: 21233 - protein, 310 aa, Mycoplasma mycoides subsp. mycoides SC str. PG1
MKNLTNEIYDVIIVGSGPAGLTSAIYTARAGLKTVIYEQSAPGGKLIKTDLIENYPGFETIQGPDLASKMYLQALSLNASVEFVGVDSIFKNADDIFEISLTNGEIKKAYSVILATGTQENKLGIKGEDELYGKGVSYCAVCDGAFYKNKPVAVVGGGYSAVQEAMYLSQLVDKVYLIVRRDVFRADANKVAKLKAQPNVEFLLKSQVKEIHGAEKVESLTITTPDGEKKLVVSAIFPYIGSTPLIDSVKHLCIENEKGYIPTNDKMQTEIKGLFVAGDVRDVPLRQIAIACGDGAIAGQMAVEYVQEVK

SEQ ID NO: 21234 - protein, 758 aa, Coccidioides immitis RS
MSSNHHAVRRYFGLGLIKLLLPLLARLPIVTGLPIFSPALATQEDGEPVNQPSFWLYLGVATALVVAGGAFAGLTIALMGQDEIYLQVIKTSGEGAEKRHAEKVLNLLKKGKHWVLVTLLLSNVITNETLPIVLDRSLGGGWPAVLGSTALIVVFGEVVPQSICVRYGLPIGAWMAPCVLILMYIMSPVAWPIAKLLDKLLGVDHRTLYKKAGLKTLVTLHKTLGSAGEQLNSDEVTIISAVLDLKEKPVGSIMIPMEDVFTMSTETVLDEKMMDLILSQGYSRIPIHSPDNPQNFVGMLLVKMLITYDPEDCKQVRDFALATLPETRAETSCLDIVNFFQEGKSHMVLVSEFPGEDHGALGVVTLEDVIEELIGEEIIDESDVFIDVHKAIRRMAPAPKARVPKGQIVTDPPDNLGALQNGDSEAASTGHKGPDASSSGTGDLQASRRKGSIGDIGSPPPPIFKLRKSSTHDAVEGPDAAIIQRGATPEIREHLKHLGPSNLASRPRQTRYNNVKIKPGSSSPLVSAVDSRLQSPDPQRRMSEVTSFSGNTGPGGGVKSAGKSASDAVLALRRYGSTTEAPSRRSITRDTVPTMNRDIINVRSDLLQPAPHRPSYRQGCLSPSEAPTLSAGGTTNSSPLSPPYLAHGPARSGSITEQVVDSNGIRKVILQTSDTHPASGEEGQGHSRQPSATQTKPVPPHAAVEHNSDDEDGQNEADISQSSTKQDKTKKKRRRKKRKPASSKSGDGAVDERQPLLG

SEQ ID NO: 21235 - protein, 423 aa, Streptomyces glaucescens
MSPTNRTVVVTGIGATTPLGGDAASTWEGLVAGRSGVKPLEQDWAADQAVRIAAPVAVEPTEVLPRPQARKLDRSAQFALVAAKEAWADAGFTGKAGEDSSVDPDRLGAVIASGIGGVTTLLDQYDVLKEKGVRRVSPHTVPMLMPNGPSANVGLAVNARAGVHTPVSACASGAEAIGYAIEMIRTGRADVVIAGGTEAAIHPLPIAAFGNMMAMSKNNDDPQGASRPYDVARDGFVLGEGAGVIVLESAEHAARRGARVYAEAVGQGISADSHDIVQPEPEGRGIAHALQNLLERTDLEPAEIMHVNAHATSTPAGDVAELKALRKVFGDEADHFAVSATKSMTGHLLGGAGGVESVATVLALYHRVAPPTINVDNLDPEAEANADIVRGEARKLPVEGRIAALNDSFGFGGHNVVLAFRTV

SEQ ID NO: 21236 - protein, 443 aa, Shewanella sp. MR-4
MSQQNPGLKQSLSLWQVVVMGLAYLTPMAVFDTFGIVSEITSGHVATSYLLALAGILFTAFSYGHLVRKYPYAGSAYTYAQKTFSPNVGFMVGWSSLLDYMFMPMINMLLAKIYLTAMFPNVEPWIFIFGLVAVMTVLNLRGIDLVANFNGVIVFAQIAIILVFIGLMAHSLSLGEGEGVIASVRPFYSEEISLAPLFTGATILCFSFLGFDGLSSLSEETKDAKRVIPRAIVLTALIGGVIFVSVSYFLQLFFPDISRFQQLDAVLPEIALYVGGNLFQSVVLVATTIAVLASGMAAHAGVARILYVMGRDNMLPNKGFGYIHPKWRTPAFNVILVGLLALSAVSFDLEMALALVNFGALVAFTFVNLSVIVQFYIKEKRNQSLKDHFQYFVLPLCGAATIGVLWLNLEPQSLELGLIWAAVGVLYLALRSLRLRKTVELQN

SEQ ID NO: 21237 - protein, 573 aa, Treponema pallidum subsp. pallidum str. Nichols
MSISLLQQERHRYLPKVPDLLRGDFRRVCARRGLSTTAVADYDALRSLFARTYGQPLVNFVNASEKNEDSPMETAPEPRGLRVAIVLSGGQAPGGHNVIAGLFDGLKRWHADSVLIGFLGGPAGVLSGDHIEICADRVDAYRNTGGFDLIGSGRTKIESESQFAAAAQTVTRMALDALVVVGGDDSNTNAALLAEHFVNSGISTKVIGVPKTIDGDLKNEAIETSFGFDTATKTYSELIGNIARDACSARKYWHFIKLMGRSASHIALECALKTQPNVCLISEEVAAQSLTLAQIVQSLCDTIATRAQHGEHFGIVLVPEGLIEFIPEMKALITELNEVMARRAQEFEALDTPDAQRVWIEQALSASARAVFNALPAEISTQLLADRDPHGNVQVSRIDTERLLILQVTERLAQMKQEGTYTGVFSSIAHFFGYEGRCAFPSNFDADYCYTLGLTACLLAVHRFTGYVASVRNLTSSVAEWAVGGVPLTMLMNMERRHGSQKPVIKKALVDLEGMPFRVFSRRRASWALKTSYVYPGAVQYYGPPAVCDEPSVTIRLERPAPAANSSFGHRSS

SEQ ID NO: 21238 - protein, 305 aa, Carboxydothermus hydrogenoformans Z-2901
METRELVIIGGGPAGLAAAIYGARAALNPLVLERGVPGGQAATTEWIENYPGFEDGIGGFELMVHMQRQAEKFGAEFKNADVTGIKKENGVFILNTSTGEIAAKTVIIATGAEPKELGVPGEREFRGRGVSYCATCDGNFFRGKTVAVVGGGDSALEEAIYLTKLVEKVYLIHRRDGFRAAKVIQERAKANPKIEFVLNTVVEEIAGERKVEKVIVKNVQTGEKSEILVDGVFIYVGLKPNTAFLEGFLELENGYIKTDENMATAIPGLFAAGDVRLKDLRQVVTAVADGAQAAVAAEKYLEGNK

SEQ ID NO: 21239 - protein, 357 aa, Triticum aestivum
  misc_feature (119)..(119): Xaa can be any naturally occurring amino acid
  misc_feature (152)..(152): Xaa can be any naturally occurring amino acid
  misc_feature (161)..(161): Xaa can be any naturally occurring amino acid
  misc_feature (193)..(193): Xaa can be any naturally occurring amino acid
  misc_feature (213)..(213): Xaa can be any naturally occurring amino acid
CRPSGPAASAATAARSYSATPKEMTVREALNSALDEEMSADPSVFLMGEEVGEYQGAYKITKGLLDKYGPDRVLDTPITEAGFTGIGVGAAYQGLRPVVEFMTFNFSMQAIDHIINSSXAKSNYMSSWSRYPVPIVFRGPNGAAWLGVGAQXSQCYAAWYXHCSRGLKVLTPYSCKKNARGLLKAAIRDPGPXLVFLENELLYGESFPIKPEXPDSSFSVPIGKAKIEREGKDVTITAFSKMVGYALQAAEILSKEGISAEVINLRSIRPWDRAAINASVRKTNRLVTVEEGFPQHGVGAEICMSVVEDSFEYLDAPVERIAGADVPMPYAANLERLAVPQVEDIVRAAKRACYRSS

SEQ ID NO: 21240 - protein, 395 aa, Burkholderia xenovorans LB400
MESLKTGTDTLFLLLGAGMVLAMHAGFAFLELGTVRKKNQVNALVKILVDFSVSTIAYFFIGYAIAYGVQFFGSAESLAAHNGYALVRFFFLLTFAAAIPAIVSGGIAERSKFNPQLFATFVLVGFIYPFFEGIAWNGRFGIQNWLAEMFGAQFHDFAGSVVVHAFGGWVALPAVLLLGARHGRYHRDGGIAAHPPSNIPFLALGAWVLAVGWFGFNVMSAQTVDKISGLVAVNSLMAMVGGTLTAWLAGRNDPGFSYNGPLAGLVAVCAGSDIMHPLGALVTGGIAGVLFVYMFTCVQNRWRIDDVLGVWPLHGLCGAWGGLAAGIFGLRALGGMGGVSFGAQLVGTLGGIVVATLGGTLVYGAIRLTVGLRLDQEDEYNGADLSIHKISATPE

SEQ ID NO: 21241 - protein, 489 aa, Thermobifida fusca YX
MTTIEREARIVEQVPKQVCIGGHWRDAQSGATFKVEDPATGSVLCEVADAGVADGMAALEMAAATQPTWAEYPPRERGEILRRAYELLMHRQEDLAVLMTLEMGKPVAESKGEIAYAAEFFRWFSEEAVRIDGSYSVAPNGQSRLLVMRQPVGPSLLITPWNFPMAMGTRKIGPAIAAGCTMILKPAQQTPLSALALADILHEAGLPEGVLSVLPTTDAAGLTGPLLRDGRLRKLSFTGSTPVGRALIKQSADQVLRTSMELGGNAPFLVFDDADLDAAVAGALQAKMRNIGEACTAANRFYVQSGVAEEFSRRLAERMAGLRMGRGTEPDVDVGPLIDDKARTKVQSLVDDAANRGARVLLGGKRGDGAGYFYHPTVLTDVPKDSEVCRTEIFGPVAPVIPFDTEEEALAEANRTEFGLVSYVYTENLRRALRMAEKLESGMVGLNQGIVSNPAAPFGGVKHSGLGREGGRVGIDEYLETKYVGIAGV

SEQ ID NO: 21242 - protein, 489 aa, Gibberella pulicaris
MSAKSILEADGKAILNYHLTRAPVIKASPLPAPTTHNPPSRLASLHFPEDANVADILNQAEVTYPWLLQPDAKFVAKPDQLIKRRGKSGLLALNKSWPEAKAWVAERAGKEQQVEHTTGVLRQFLVEPFVPHPQDTEYYININSVRDATGILFTHEGGVDVGDVDAKAEKLLIPVDLAEYPSNEEIAATLLKKVPQGVHNVLVDFITRLYAVYVDCQFTYLEINPLVVIPNEDKTSAEVHFLDLAAKLDQTADFECGVKWAIARSPAALGLTNIAPSADGKISIDAGPPMEFPAPFGRELTKEEAYIADLDAKTGASLKLTVLNAKGRIWTLVAGGGASVVYADAIASAGFADELANYGEYSGAPTESQTYHYARTVLDLLLRAPKTDEGKVLFIGGGIANFTNVASTFKGVIRALRDFAPKLVEHKTAIWVRRAGPNYQEGLKNMKAATQELGLDAKIFGPEMHVSGIVPLALVPGKWEESKAQEFQG

SEQ ID NO: 21243 - protein, 106 aa, Malus x domestica
TDVPAPDMGTNAQTMAWILDEYSKFHGHSPAVVTGKPIDLGGSLGREAATGRGVVFGTEALLAEYGKSCKGLTFVIQGFGNVGSWAAKLIHEKGGKVIAVSDITGA

SEQ ID NO: 21244 - protein, 279 aa, Mesembryanthemum crystallinum
MCESFKREYQLCEEIGRGRFGVVYRCYNPSSTEDSDTPLAVKSIDKRLFLDDETDRECLDKEPKILHLLSPHPNILQIHNLFDSDTHLLIVTDLCQEETLYERIISNGPFSEPDAAAIFCQLAEALAHCHRNYVAHRDIKPDNILFDSRNRLKLCDFGSAEWFGAGDREMRGVVGTPYYVAPEVLSGKDYNEKADVWSAGVILYIMLGGVPPFYGETVEETFEAVLRGNLRFPARIFRNVSTQARDLLRKMMCKDVSRRFSAEQVLRHPWVTSGGLANM

SEQ ID NO: 21245 - protein, 600 aa, Synechococcus sp. WH 7805
MALLVQKFGGTSVGSVERIQAVAQRIAACKEDGNDLVIVVSAMGHTTDELTAKARAINSNPPQREMDMLLATGEQVSIALLSMALHALGVPAVSMTGSQVGIVTESAHGRARILDVRTDRLRSRLAEGQVVVVAGFQGTSLSSGGTAEITTLGRGGSDTSAVALAAALGADACEIYTDVPGVLTTDPRKVVDAQLMPEVSCDEMLELASLGAAVLHPRAVEIARNYGVTMVVRSSWSDDAGTTLTSRSAQPIGREGLELGRPVDGAELVEEQAVLALSHVPDQPGVAAQLFESLSKGGVNVDLIIQSTHENNSNDITFTVAESELDKARCICNAQLQTLGGDLVAEAGMSKLSISGAGIMGRPGIAAGLFQTLSRVGINLRLIATSEVKVSCVIEASAGAKALQATQEAFELDSALISLNPLPSGEGEPEVRGVALDRDQAQVSVRHVPNKPGTAGALCHALADAGISLDGIVQSERQHADGSRDISFTLKRDDRAAADRALRGLLAQWPGALLEDGPAIARVSAVGAGMPATAGTAGRMFRYLADAGLNIEMIATSEIRTSCVVAESDGIAALRAVHTGFQLGGSTHHEAQGTESPLEK

SEQ ID NO: 21246 - protein, 604 aa, Magnaporthe grisea 70-15
MSGAEAPLIANIDATGEVEPENASSEGIHEDGANLPRLPDAPPGLFIWLLVLSAGISGLLFGYDTGVISSTLVSIGDSLSGRQLTSLDKSVITSCTSLFALLISPFSSSIADSLGRKRVILVADFLFAVGAILQACSDTVAEMVAGRSIVGAGVGAASFVVPLYIAETAPADHRGKLITINVLFITLGQVIAYVIGWLFAEYGDKSSGWRWMVGLGAVPAVVQAVLLLGMPETPRWLVKSGREEEALEIIRRVSGGKHRSTSDRVAQRVLEEIQVEIREESEARRRLLASRDGMQSSRPEWMERWSELVKVRRNRRALTVACLLQGLQQLCGFNSLMYFSASIFTMVGFATPTLTSLTVAVTNFVFTVLALLLVDRIGRRRILLYSLPFMIAGLLLAAFAFSFISISSAPTSSPIPSAAKTGDAQLSPRAAAVMILISIMIYVASYAIGLGNVPWMQSELFSLSVRSVGSGVATGTNWLANFVVGLTFLPLMDAFGPAATFTMYGAVCGIGLVLIWRIYPETTGLSLEEAASLLEGSAWGVRDNQASFGCKISGANWDRARNHLRATIGTLKGGATGGPERIGKTDTEAPAWDLLGEGIRYYLV

SEQ ID NO: 21247 - protein, 898 aa, Haloarcula marismortui ATCC 43049
MTLHAREINQDVRELGALLGEVLEAQTSTEAFDTVETIRNSCIDYRRGDAETRDEVHRALNRLNPETQDIVARAFTTYFELINLAEERERVREIREGSQGDVLADSVEEAVRDLAERGADPEEFEQVLEDVLIQPTFTAHPTEARRKTVKAKLRSVARDIERLDERRLTEREQKRIERNLDAEVTSLWQTPQVRDRRPEVTDEALNVQWYLENVLFDVIDEVYDELEHTLEDVYDEDIDIDTLYEFRSWAGSDRDGNPFVTTDVTEETLERQRETVLPLYRTKLKELSGVLSQDASNIATDALFNERLDRHKSKLPGVAKEAEERYPDEPYRQKLRLMRESVIRVSDVRQGGYESEEELLTDLRVIADSLRENDAEVIAEAHVDPLIRKVETFGFTLASLDLRDHRKMHTDAIAEAVDRQGIDYASMDEDERVEFLTEAILQDNTVIDMEDTEGLSEDATRVLDRFRATADWQNEFGIDAIDTYAISWCEEPSHALEVLFLADQVDIVDLPGYCGFDVVPLLESEYALSGARRIMGTLFENEAYSQALEARDNIQEIMLGYSDSNKENGFLAANWSLYNNQKRLADITDDYDVEMRLFHGRGGSISRGGGPMNDAMLALPNETVTGQIKFTEQGEAIAEKYANHDIAERNLEQMLNAQIRARQNAIEEPVEEIPDEWAEAMETAADAARDEYQDLLETDGFVEFFEQATPITVIENLNMGSRPASRSEDRSVEDLRAIPWVFSWTQARCIIPGWYSISTGLDAYLENGGDMETLQEMYENWPFFRTKLDNASLALARTDLGIAEEYADLADPELRERIYPRIVEEYENTVAKVLEITGQDGLLSRDWLKENLERRNPYVDPLNLLQVRLLKQSHRTETERRTLRLTVQGIAAGMKNTG

SEQ ID NO: 21248 - protein, 228 aa, Buchnera aphidicola str. Bp (Baizongia pistaciae)
MKKFLLSSSVLSANFSRLGEDIFDVLKSGSDMIHYDVMDNHYVKNLTFGPIVLESLRSVEKIKSMVIDVHLMTCPVDDLIIKFAKLDVNIISFHPESTNNVEKTIKLIKSYGCKVGLALNPLTPLCVLDNVLDKIDLILLMSVNPGFPGQKFIPSILNKIRIVRELIDKSKKNILLEVDGGINLSNIFKIASFGTDIFVIGSAIFNSINYDLTIRSFRDVLKNINCKK

SEQ ID NO: 21249 - protein, 371 aa, Saccharophagus degradans 2-40
MASRFRGSAFNHIEEQKVGVLITNLGTPDAPTPSALRRYLKEFLSDPRVVEIPRLIWLLILHLIILRIRPAKSAKTYASVWTDQGSPLAFHTRDQADKLRQQLQAQHGDNLVVDYAMRYGNPSITSAITTLCDQGVRKLLVLPLYPQYSGSTTASTFDAVAKDFASRRWLPELRFVNHYNSHPDYINALVNSIRAHWGKHGRAQKLVLSYHGVPQFYLHKGDPYHCECLATTRLIIEALELGPEEYITTFQSRFGKAEWLKPYTDATLKELAANGTKSVQVICPGFAADCLETLEEIEEENREYFMEAGGERYEYIPALNSSDEHIQTLSNIVNTHIQGWTIQPTGSAERQQTLQARSEQAKRCPHNKPRA

SEQ ID NO: 21250 - protein, 112 aa, Acidobacteria bacterium Ellin345
MTKLEAIIQPRKLDEVKDALVAIGIDGMTVSEVRGHGRQKGHTETYRGREYDVSFLPKIKIEVVIDDERVDEAVETILQSAASGQIGDGKIFLYKVDEAIRIRNQERGVAAI

SEQ ID NO: 21251 - protein, 168 aa, Triticum aestivum
  misc_feature (62)..(62): Xaa can be any naturally occurring amino acid
MAALPLATAEACDANSHMITSGELRALQPVFRIYGGRRLFAGPVVTADEFARRVLLRGIWQXEGPGQGLLVDGGGSLRCAILGGNPVQQAQNNGWAGIVVNGCIRDVDEINGCDIGVRALASHPMKANKKGMGEKHVPVTIAGTRICDGEWLYADTDGILVSRTELIV

SEQ ID NO: 21252 - protein, 365 aa, Listeria monocytogenes str. 4b F2365
MEKNIDVLQNWLKDQGAEVAFLTDPENIAYFSGYHSEPHERVLGLAVFPDSEPFLFTPALEVEDVRGGDWTHPAYGYNDTENPFTIIADEIKKRVANPSKFAIEKKHMSVDRYEQLGGLFSGSSFIPIEHKIEQIRLIKTEAELKILKEAALLADYAVQVGVNEIAEGKTEAEIVAKIEYEMKKKGVTAMSFDTMVLTGKNGALPHGTPGETKIKKGDLVLFDLGVVHKGYCSDITRTVAFGDISDEQKKIYDTVLEAQIAAVEKVKAGVKASEIDLTARNIIREAGYGDYFPHRLGHGLGASVHEFPSITETNNMELQENMVFTIEPGIYVPGVAGVRIEDDLVVTKDGVQVLTEFPKTLQVID

SEQ ID NO: 21253 - protein, 541 aa, Acidobacteria bacterium Ellin345
MNHVPQHRSKLSLAQKFTRLATRLRDPEWRRYGATVAAGKAIGISVVMLAMVVITGLFFTTALASDTAVKAADIVNPINTVWTLIAAFLVFGMQVGFTMLEAGFCRSRETVNVLMECIVDTCLCGLLFYAFGFAFMFSHGNGFIGYHWFFLKDVPATYETTGVAFLAFWLFQFAFADTCSTITSGAMIGRTGFVGDLIYSVGVSGFIYPIVGHWAWGPDGFLATMGSSGYFLPSVGISFHDFAGSTVVHTIGGFIALAGSIVLGPRLGRKFKRDGGAPMLPHDLTIAASGGLLLWFGWYGFNPGSTLSAMDFEGIGRVATNTTLAACAAGLTAMAYGYFLSKKWDVGFTVNGFLAGLVAVTCPCYWVSPTGAIMLGGVAGVVVILGVEALEWLRIDDPIGAVPVHGLCGIWGTLSLGLFACGKYGSTGPLAPDNSAALKGLFYGGGFQLLTAQAIGSAIITFATFGVALALMYAVNATGTLRVSEEGELYGIDLHEHGIPAYPEYVISALASPSGAPPQHHAVEKHPVKLTEAVAGATAHK

SEQ ID NO: 21254 - protein, 315 aa, Oryza sativa
  misc_feature (206)..(206): Xaa can be any naturally occurring amino acid
MVVLVVATASDPASIGPAAAFLAMPGWSPGPPIPEGMESFTNGDVRLLKHERSIIAEDDLDNRWQAATGEAVSEVIFLSKHTAVSNRPALTVHPIGVPHLREDETPPQGGRPGWAALPNPRIGPWLRLMQKIAVDQGLVPEFEITLEATHHGPVTNTPTMFVEIGSTEEYWCRQDAAQAIALVLWKGLGLDEGNTVGSWQGNSEKXVLLGIGGGHYAPRHMDIIIKDGIWVGHLLSGYSLPMEVSPQGNGKSYSDVGGMWKHSIKVSYDATKAAFPGGQVIAHLDQKSFKGWQKNAIMSYLQELNIRIGKPNDFI

SEQ ID NO: 21255 - protein, 194 aa, Medicago sativa
MTLIAKPNVFNGLNFNINETQIPFSSFSVIRKRFGDSSHRNVVLRSNGNASVLPKIRAQNLPDYVPESKFYKVEAILRPWRIPQVSSGLLKMGIRGVTVSDVKGFGAQGGSKERQGGSEFSEDNFVAKVKMEIVVRKDQVEAVINKIMETARTGEIGDGKIFLIPVSDVIRIRTGERGEQAERMAGGLTDALYV

SEQ ID NO: 21256 - protein, 630 aa, Mesorhizobium loti MAFF303099
MCGIFGIVLKNEGTPVCAAAVERCADALAHRGPDASGLYINQSVAFAHRRLSIVDAHSRANQPYRDANTGVVVTYNGEIFNYREIRTELRDMGFFFSTVSDTEVLILSYIAWGKSFLNRLDGIFAFALFDPRNSLVLIARDRLGVKPLYYTICDVGLLFASQPNALIRWPGVMRGPDMIGALSFLSYRAVVGARTLFAGISKLEPGHLLEIRNGRHTSERWWNLSERISRCKPDYSDIRRLLGSAVERQLVADVPVAALLSGGLDSSILAYEASARSQIRPICYTGKVETADYDETAYAMEVAAEFGLTHRVVPIGEPSDIYAVSELVRLRGHPLGMHNEIAMFTLAKAISKEHKVVLTGEGADEIFAGYSRLFRTPYDYNRSKIIAALPRALAQVARRRLGLDVHGSQLQFFLARYSYFPTDEIRSLVIDGRVRREHEMALFDHFSTQFAEAGGDFFSKISYVLVSTHLPALLEMVDNTTMAAGLEARVPYTDHQLVTAAMAMPGSQRLRWRSPIASVQALWHPVASFSERLDVSKFPLRREYRSVLPRSVLSRKKMGFPLPLGQWAVGEGATEYRRLLFDKDSPLGDLFDPAALRRWFEAGRRNPSDSFGRKFWLLANLGIFFKEVFS

SEQ ID NO: 21257 - protein, 340 aa, Sorghum bicolor
MAALPPFSPRRPFSSPCFILCFLLGFVAGLFPFAHRHLHLDLHHLPLPVPDPPPTPPPAAPTQAAPTPPPTTTTLIVVTPTRARPLQAYYLHRLAHTLRLVPQPLLWLVVDRGAATRETAALLRGCGLMYRHLPSSHRGDAPDDARRRGATHEHPAERGLQRRQRNAALDHIEHHRIHGLVYFADEDNVYSLDLFHQLRGIRSFGTWPVAMLGVGKSKTLLEGPVCDSSQVVGWHTNERDKRQRRFHVNTSGFAFNSSMLWDADKRAHQAWNYIRLLDTVRDGFQATTFVEQLVEDETYMEGIPTGCSKIMNVNLHLEDKHLVYPKGWQMTENLDVLIPL

SEQ ID NO: 21258 - protein, 300 aa, Pseudomonas syringae pv. tomato str. DC3000
MSARIIDGKAAAARVLGQVRDDVHTLKAEGIEPALAVILVGNDPASEVYIRNKIVRAEEAGIRSLEHRLPADCSEARLLALIAELNTDRSVNGILLQLPLPAHINEAHALQAIAAAKDVDGFHSENVGGLSQGRNVLTPCTPSGCMHLLKETCGDLTGKHAVVIGRSNIVGKPMAALLLQAHCSVTVVHSRSTDAKALCQLADIVVAAVGRPRMIDAGWLKPGAVVIDVGINRIDDQGRSRLVGDVDFDNALDVVSAITPVPGGVGPMTIAFLMKNTVTAARQQAHAQRSQSEAVCLSIY

SEQ ID NO: 21259 - protein, 506 aa, Silicibacter sp. TM1040
MAALDQFEAKEGVDQETVDAVREVSTYKYGWDTDIEMEYAPKGVNQDIVRLISEKNEEPEWMTEWRLQAFERWEGMKEPNWAMVNYPEIDFQNQYYYARPKSMEVKPKSLDEVDPKLLATYEKLGIPLKEQMILAGVEGAEDAPAEGRKVAVDAVFDSVSVGTTFQDELKKAGVIFCSISEAIREHPELVKKYLGSVVPVSDNFYATLNSAVFSDGSFVYVPPGVRCPMELSTYFRINAENTGQFERTLIIADKGSYVSYLEGCTAPQRDTAQLHAAVVEIIIEEDAEVKYSTVQNWFPGDENGKGGIYNFVTKRADCRGDRSKVMWTQVETGSAVTWKYPSCILRGNESQGEFYSIAIANNMQQADTGTKMIHLGKDTKSRIVSKGISAGKAQNTYRGLVSMHPKAKNSRNYTQCDSLLIGDKCGAHTVPYIEVKNNSSRCEHEATTSKVDDDQLFYCRQRGMDEEEAVALVVNGFCKDVLQALPMEFAMEAQQLVAISLEGSVG

SEQ ID NO: 21260 - protein, 590 aa, Cryptococcus neoformans var. neoformans B-3501A
MSATHIEDRDNSFLENKAIDHTEEVENVKGSQEPSNLSGFGGHLIDENLVRVEGEDKVTWYLCFLVAASAIAGFLFGYDTGVVGVALPLVGTDLGGSALNSSQQEIITAGTTIGAIFGSAILGGWGDRLGRKMAILISDVFFTLGAVIIACSYSVPQIIVGRIVLGVGVGGASVIAPLFIAETAPTAVRGRCIGINAFFIPFGQVVADAIGAGVQNLHNGWRLLFALGVVPSVLQLLLFHYLPESPRILILRGDTDGARTVFQHIYPTATPEMIDYKFRVAQEYVTATTALQSDTTFWERVKKVWKTGSYRRSITCVSVIQAACQLSGFNTLLYYAGTLFGLLGLSNPALGGLIPASTNAVFVLIGMSLVDKVGRRGLMLFGVPIMLLGLVWNIVAFYYMCKPTGGFLDTSYSYDTTNVSVVIGGIVLFVLGYGLSYSHIAWYQAEYLALEVRSMGCGVATTANWIANLVVSVSYLSELETMTPSGTYGFYLGLSVIGFVFVVFCFPEAKELSIDETSILFENDWGVKRSIQMRKERRETQKRFHDAELAEAATAHIEARQQKSTSVSPAELSKFMAGLKGGKRKPSVSV

SEQ ID NO: 21261 - protein, 420 aa, Bartonella quintana str. Toulouse
MRRVVVTGLGLVSPLAANVEYSWKRLLERESGVRRITEFDVSDLPCQIAARIPLGDGTNGTYNADLHMEPKEQRKVDAFIVYAMAAVDQALADAEWFPKSDEDQISTGVLIGSGIGGIEGIVEAGYTLRDKGPRRVSPFFIPGRLINLASGYVSIKYDLRGPNHSVVTACSTGAHAIGDAARLIALGDADVMLAGGTESPINRISLAGFAACRALSTCRNDDPERASRPYDVDRDGFVMGEGAAIVVLEELEHAKRRGARIYAELIGYGLSGDAYHITAPSESGEGAQRSMMAALKRAQVNVSELDYINAHGTSTMADVIELAAVERVLGHYAAQVSMSSTKSSVGHLLGAAGAAEAIFCILAIRDNIAPATLNLDNPSIETKIDLVPHKPRERKIDTILSNSFGFGGTNASLVMRRFRG

SEQ ID NO: 21262 - protein, 565 aa, Bdellovibrio bacteriovorus HD100
METDNKYARPVYIPYSGTVLLEMSLLNKGSAFSEEERTHLNLHGLVPQTIETIEEQAERVYSQYRLLKADIDKHVYLRNLQDTNETLFYHLVVNHLTEMMPIIYTPVVGEACEHFSEIYRASRGLFISYPNKDRIDEMLRNVTKQKVKVIVVTDGERILGLGDQGIGGMGIPIGKLSLYTACGGISPAYTLPVVLDVGTNNQALLNDPLYMGWRQPRITGKEYEDFVDAFVQAVKRRWPDVLLQFEDFAQKNASPILKRYRDEICSFNDDIQGTAAVTVGCLIAASRANGGRLRDQRVVFLGAGSAGCGIAEQIIAEMKHEGLSDEQARQRVFMVDRFGLLTDKMPNLLEFQSPLVQKTETLAGWEVTNDEISLLDTVRNAKPTILIGVSAQPGLFTEEVIRTMQSHCEHPIVMPLSNPTSRVEATPADILRWTDGKALVATGSPFMPVHMNDQIYPIAQCNNSYIFPGIGLGVLACGARRVTDSMLMAASSALADCSPLAQNGKGALLPELSQIEKVSRTIAFAVAKAAQADEVAVKVSDEELLSLIDKNYWYPKYRSYKHASS

SEQ ID NO: 21263 - protein, 227 aa, Haemophilus influenzae
MELVFIRHGFSEWNAKNLFTGWRDVNLTERGVEEAKTAGKKLLDKGYEFDIAFTSVLTRAIKTCNIVLEESHQLWIPQVKNWRLNERHYGALQGLDKKATAEQYGDEQVHIWRRSYDISPPDLDPQDPNSAHNDRRYANIPSDVVPNAENLKLTLERALPFWEDQIAPAMLSGKRVLVVAHGNSLRALAKHIIGISDAEIMDFEIPTGQPLVLKLDDKLNYVEHYYL

SEQ ID NO: 21264 - protein, 363 aa, Mycoplasma mycoides subsp. mycoides SC str. PG1
MAICKIGSKYTFTIRGILFCYIIKFMLMCFLERGLYLMIKKIGILTSGGDAPGMNNAIAGVVKTAASKGIEVYGINDGYKGLVNGWFEKLNVEKTLDILSRGGTYLGSARLPEFKELEVRQKAVANLKKAGIEALVVIGGDGSYMGAQKLTEMGINCIGLPGTIDNDISSTDYTIGFHTALNTIVEAVDRIRDTMQSHNRADVVEIMGNGCGDLVTYTAVATGAEIFSPAEDLLTIEQMGQKAKQFRLLGKKSLIILVSEKSYGISAKEIAEKIQKISGYETKATVLGHIQRGGRPTAMDRYIAFTAGMFAVEKLAEGKGGLFIGLENNKLVARDIDSTLNMKKEDKKPFIKYLREINGYFSK

SEQ ID NO: 21265 - protein, 385 aa, Triticum aestivum
MIPAVKLSPAAFSVTNQRSKSALVPSVSILNMKKFASCSLRPLYLTWLDDPHTSELKPRRQLLDFRCAASAADDKESKAEVLPASSEAAQKLKISIYFATWWALNVIFNIYNKKVLNAFPYPWLTSTLSLACGSAMMLFSWVTCLVEAPKTDLDFWKALFPVAVAHTIGHVAATVSMSKVAVSFTHIIKSAEPAFSVLVSRFILGESFPMPVYLSLLPIIGGCGLAAATELNFNMIGFMGAMISNLAFVFRNIFSKRGMKGKSVSGMNYYACLSIMSLVILTPFAIAMEGPQMWAAGWQKALADVGPNVLWWIGAQSVFYHLYNQVSYMSLDQISPLTFSIGNTMKRISVIVSSIIIFRTPVRPVNALGAAIAIFGTFLYSQAKQ

SEQ ID NO: 21266 - protein, 363 aa, Oryza sativa
MDMATGAKEVVVVEAYEYEFDLENPFTSPADEPIASLLDAEGHHSPSVSAAASAARREAAGFISKVRYDGELDVHPRVAYLALNYVDRYLSKRQLACERNPWAPRLLAISCLTLAAKMQRAAAISAADIQRGEEFMFDEAKIQRMEQMVLNALEWRTRSVTPLAFLGFFLSACFPQPRHPALLDAIKARAVDLLLRVQPGTSKPPPRPMPPSSPLDSASAHLLPPVHFAEVKMAEFSPSVAAAAALLAAAGEVAGAHLLGFEAGVAACPFVNSEKLRECGEVMAAACGVGPSWAAAATSAETPVTVLGHHRSASSESERTTTVGSAANSADAKRRCMGPPRQWGASFVFVQKYWMLRAMNILW

SEQ ID NO: 21267 - protein, 197 aa, Oceanospirillum sp. MED92
MNWINSSMLIMAFAAALLLSKPLHADATSPSSVSSSCPDTLNYSFRRLGEDKLENLCDTYKGKLILVVNTASKCAFTPQYDGLESLYRQYKAKGLVVLGFPSNDFAGQEPGTEKEILSFCRLTYSVEFPMFEKIHAAQGKADPFFVTLADSTGEYPGWNFHKYLIAPDGKVIRSFRSFVKPTDPELVRIIEENLPHG

SEQ ID NO: 21268 - protein, 648 aa, Arabidopsis thaliana
  misc_feature (275)..(275): Xaa can be any naturally occurring amino acid
MYYLPSSCLVLFLFFSLFYHLPCASSKQTLGWCESQFQCGNITAGFPFWGGNRPEVCGHPLLELHCLDNITSLTISDHLYHVLSINHTYNTLRVARTDFLQSICLSPFPFANATLPPEIFDILPTYKSVTLYRCYPVIPDLARYGCPAIGSVSVSDNLENPVSCEARFTVNIPTSFVPNEKRLNITSLVRDVRNGFEVRLRIDENSCQECSSSHKYCGFTGTLPLETKCRPLNLPTRLSSEAKIGVLPSPILSNKLNLVMNTVFDLFNQTILWFXATIAGVSLLPFLVLTLVVHIIRKQKTSNDKGQQDLKEHIPKPRIKALIQLKQYSYEQVKRITNSFAEVVGRGGFGIVYRGTLSDGRMVAVKVLKDLKGNNGEDFINEVASMSQTSHVNIVTLLGFCSEGYKRAIIYEFMENGSLDKFISSKKSSTMDWRELYGIALGVARGLEYLHHGCRTRIVHFDIKPQNVLLDDNLSPKVSDFGLAKLCERKESILSLMDTRGTIGYIAPEVFSRVYGSVSHKSDVYSYGMLVLDIIGARNKTSTEDTTSSTSSMYFPEWIYKDLEKGDNGRLIVNRSEEDEIAKKMTLVGLWCIQPWPLDRPAMNRVVEMMEGNLDALEVPPRPVLQCSVVPHLDSSWISEENSISSEI

SEQ ID NO: 21269 - protein, 525 aa, Aspergillus oryzae
MYIKPFILPALAAVAQAASYSGDLRPQTHFSPPSNFMNDPNGLFYDSKRGVYHLYYQYNPTATVAGNQHWGHATSPDLYHWTNQPIALAGDKPEEYIFSGSAVVDSNNTSGFFPDQDDGVIAIYTVDTPTLETQHIAYSRDGGYTFTKYENNPVIDIGSKQFRDPQVVWHPETQQWVMTIAYAQDLVIGFYTSPNLKDWTHASNFTQEGLPGDQFECPNLVKLSVDRAVSEETSKFVLFISVNPGAPLGGSGTFYVVGDFNGTHFTSEVVQETLFDFSKDNYAAQWYSGIPENEPPVSIGWASNWDYTEEVPTGPLEGWRSAMTLPRAHTLTKVNGVWTVTHSPFEGLSALKGRQLVSKSVHSGDVKANFSGVPSNAVYFDVTLKGIDVAKPTGRVNFNFTSSVSGEFLDGGVSLDDSSFWISRAGTHLFTIEDNGNYTSSSTTTISSFGNGTFSFSGVIDRSVFEVFLGQDGIQSGTMTFFPSSPLDTLAVSAEDLGDRASVSVKAWGLQSGWNSTTASKRFRA

SEQ ID NO: 21270 - protein, 319 aa, Oryza sativa
MAVARLVAARAPLLSPAAVAAAHRSPPALLRLAFAPLPARRLAVPLRVAVGEPEPEEDARRAVAERAARKQSERRTYLVAAVMSSLGITSMAAAAVYYRFAWQMEVGNTPSPNSRSHLTITQFGNSFAAALKFLRVLDQGSGEIPVTEMFGTFALSVGAAVGMEFWARWAHRALWHASLQDMHESHHRPRDGPFELNDVFAISNAVPAMSLLAYGFFTRGLVPGLCFGAGLGITLFGMAYMFVHDGLVHRRFPVGPIANVPYFRRVAAAHQIHHMDKFEGVPYGLFLGPKELEEVGGIEELEKEIKRRIKRKETLDAIQ

SEQ ID NO: 21271 - protein, 219 aa, Acinetobacter sp. ADP1
MSSLIQAEIFFSALSPAEQRIQQALDDIRHGKPVLVMDDFDRENEADLIVAAETLNVETMARMIRDGSGIVCFCLTEQLADHLELTPMVQNNSSQFHTAFTVTIEAAQGVTTGVSAKDRVKTIHTAIQDGAIASDLNRPGHVFPLRARDGGVLTRRGHTEATIDLARLAGLKPSGVLCELTNPDGSMATGIQVLAYAQTHHLTVITIEELVQYRIKHNV

SEQ ID NO: 21272 - protein, 453 aa, Listeria monocytogenes str. 1/2a F6854
MKVIKFGGSSLASGIQLNKVFQLVAEDPDRKIIVVSAPGKRFKEDTKVTDLLIDCAAKALLGEDTSELFESVIARYAGIALDTGMSDEIINQIRADLQATISSDKSDPDKFLDRMKASGEDNNAKLIAAYFKFKGLNANYINPKDAGLLVTDEHASAQVLPESYDRLFALREREGIIVFPGFFGYTKDGEISTFSRSGSDITGAIVANGAQAELYENFTDVDAVYAVNPAIVKNPKKVLELTYREMRELSYAGFSVFHDEALIPAFHAGIPVHIKNTNNPDSCGTRVVHERENNNGPVVGIASDDGFCSIYISKYLMNREIGFGRKVLQILEDAGLNYEHMPSGIDDLTIIIRENQFGEDTERTIMSRLKEELNADQVIMQHGISLIMVVGETMRHNVGITSRASKALSDAKVNIEMINQGSSEVSIMFGVKEEQENTAVRALYNEFFSEVFV

SEQ ID NO: 21273 - protein, 162 aa, Triticum aestivum
MSAAEGAVVFSEEKEALVLKSWAIMKKDSANLGLRFFLKIFEIAPSARQMFPFLRDSDVPLETNPKLKTHAVSVFVMTCEAAAQLRKAGKITVRETTLKRLGGTHLKYGVADGHFEVTRFALLETIKEALPADMWGPEMRNAWGEAYDQLVAAIKQEMKPSE

SEQ ID NO: 21274 - protein, 135 aa, Salmonella typhimurium
MRLLHTMLRVGDLQRSIAFYTNVLGMKLLRTSENPEYKYSLAFVGYGPETEEAVIELTYNWGVESYDMGNAYGHIGLSVDNAAEACERIRQNGGNVTREAGPVKGGSTIIAFVEDPDGYKIELIEAKDAGRGLGN

SEQ ID NO: 21275 - protein, 167 aa, Salmonella enterica subsp. enterica serovar Agona
VLGRNGSDYSAAVLAACLRADCCEIWTDVDGVYTCDPRQVPDARLLKSMSYQEAMELSYFGAKVLHPRTITPIAQFQIPCLIKNTGNPQAPGTLIGASSDDDNLPVKGISNLNNMAMFSVSGPGMKGMIGMAARVFAAMSRAGISVVLITQSSSEYSISFCVPQSDC

SEQ ID NO: 21276 - protein, 847 aa, Shigella flexneri 2a str. 301
MSKVRLAIIGNGMVGHRFIEDLLDKSDAANFDITVFCEEPRIAYDRVHLSSYFSHHTAEELSLVREGFYEKHGIKVLVGERAITINRQEKVIHSSAGRTVFYDKLIMATGSYPWIPPIKGSDTQDCFVYRTIEDLNAIESCARRSKRGAVVGGGLLGLEAAGALKNLGIETHVIEFAPMLMAEQLDQMGGEQLRRKIESMGVRVHTSKNTLEIVQEGVEARKTMRFADGSELEVDFIVFSTGIRPRDKLATQCGLDVAPRGGIVINDSCQTSDPDIYAIGECASWNNRVFGLVAPGYKMAQVAVDHILGSENAFEGADLSAKLKLLGVDVGGIGDAHGRTPGARSYVYLDESKEIYKRLIVSEDNKTLLGAVLVGDTSDYGNLLQLVLNAIELPENPDSLILPAHSGSGKPSIGVDKLPDSAQICSCFDVTKGDLIAAINKGCHTVAALKAETKAGTGCGGCIPLVTQVLNAELAKQGIEVNNNLCEHFAYSRQELFHLIRVEGIKTFEELLAKHGKGYGCEVCKPTVGSLLASCWNEYILKPEHTPLQDSNDNFLANIQKDGTYSVIPRSPGGEITPEGLMAVGRIAREFNLYTKITGSQRLAMFGAQKDDLPEIWRQLIEAGFETGHAYAKALRMAKTCVGSTWCRYGVGDSVGLGVELENRYKGIRTPHKMKFGVSGCTRECSEAQGKDVGIIATEKGWNLYVCGNGGMKPRHADLLAADIDRETLIKYLDRFMMFYIRTADKLTRTAPWLENLEGGIDYLKAVIIDDKLGLNAHLEEEMARLREAVVCEWTETVNTPSAQTRFKHFINSDKRDPNVQMVPEREQHRPATPYERIPVTLVEDNA

SEQ ID NO: 21277 - protein, 415 aa, Gibberella zeae PH-1
MALTAAQVAIVKSTAPILKEHGKTITTTFYRNMLGAHPELKNYFSLRNQQTGAQQAALANSVLAYATYIDDLGKLSHAVERIAQKHVSLFIKAEHYPIVGTHLIGAIGEVLGSALTTEIKDAWVAAYGQLADIFIQREGQLYDAAGEWNSWRKFKIAKKEAENDSVTSFYLEPLDDKPLPKFLPGQYVSLQIPIPELDGLLQSRQFSLSEAPGSNHYRISVKLQGPEEEPSLEDLSAGKIPGLVCTRLHKRYNVGDEVELSPPAGEFFLNPADTSAAKKPLVLLSAGVGATPLVSILDSVLESETASRPITWIHGARYSGSTCFVPHVLDSAKKHDNITAKIFLEDVKEGDQYDFKGEIDLDQLQKDKLLQLDSSDAEYFICGPEDWMVKVRAFLEENGVPRERQHLELFKTGDV

SEQ ID NO: 21278 - protein, 142 aa, Trichodesmium erythraeum IMS101
MRLLHTMLRVNNLEKSIEFYCDVLGMKLLRKKDFPGGKFTLAFVGYGDELNHTVLELTYNWDTDKYDLGNAYGHIALGVDDIYSTCEKIKEQGGKVTREPGPMKHGSTVIAFIEDPNGYKVELIELKSDNSSLEKKVAANTN

SEQ ID NO: 21279 - protein, 654 aa, Oryza sativa
MNPKLLFFPLLATLLLLCHHAHAVCEPATCGDLTIKYPFWLSGPDLNRSSLAIAACGHPSFELWCSRDGVASLRGSQILVLGIDYTNSSFVAGHKRVADGGDGVCRTDFNISSSLALSPFTISSSNRAICFLYSCNGTEPPEIDGLVNATISNCSKPIYAYLGGSYDRDKPPAIKAGNCTYSYLPVLWPESPVNLTAGTNYSPLFKKGFVLEWQKNGFGDCDACNASGGQCRYNNDSAAAFACLCSDGELRGTICAAPTRYKYSEVTKITSFLNYKLGEGGYGVVFKGRLQDGRLVAVKFLHDSKGNGEEFVNEVMSIGRTSHINIVSLFGFCLEGSKRALLYEYMPNGSLDDYIYSENPKEILGWEKLYGIAIGIARGLEYLHHSCNTRIIHFDIKPQNILLDQDFCPKIADFGLAKLCRTKESKLSMTGARGTIGFIAPEVIYRSFGIVSTKSDVYSYGMMLLEMVGGRKNAKSMVENSSEKYFPDWIYDHFALDDGLQACEVTILPMHRPTITQVLDMFERSLDELEMPPKQNFSELLKYRTGCPSPRLPVACVCNPSPIRRPNQSPPPPTQRRRTLALFGDSLNAYGRAAGVYCCGSRSETAAAAILHGCTAADGDAAAAPGRREQPNKGCTDASQNSGPYYVMGQNLGP

SEQ ID NO: 21280 - protein, 289 aa, Listeria monocytogenes str. 4b F2365
MTHVTLPILEDWEGLSLTTILQEKFHLGKKARHEIRMSQNVLLNNKPLDDWNTPLFVGASLSLPVFLHDKIPVYEYDLEIIYEDDFLLVVNKPVDMKTHPNDSYETDTCANAVQYYLEKTGQDANALAVHRLDQTTSGLVLFAKNKLAIAGLSWQMENRAIHRTYLAAVDGTWGLVMQTINKPIGEDRHHGSRRQISPYGQPAVTHVKVLENDNEKNTSLVECQIETGRTHQIRVHLSGIGHPIIGDTLYGGSPRANRIMLHAEKLHLNHPFKGKEMNFSAPAGDDWVF

SEQ ID NO: 21281 - protein, 370 aa, Trichodesmium erythraeum IMS101
MFDCIIVGSGPAGASAAYHLAKNGRSVLVLEKETLPRYKPCGGGVSPIVQEWFDFDFTPAISLKINSICYTWKKGDLVEVKLQNKQPIWMVRREIFDYFIIQKAQKQGAEIRDKTRVIGIEFKNNNWQVYTDNQSFTSPYLIAADGAKGSMAKWLGFKNRKRFAGGAMEIEIPVKNQKIDSAYFEFGMLNNGYVWNFPKADGYSIGVGTFWRKHGQNFTALLTEYTSMFEVNIQNVQKFGHPLCLWNGNQKLHTQNAVLAGEAACIVDPFTAEGIRPSIFTGVKAARAIHNSLNGDLFALEKYTQIINEEWGKDMVWAQRLAQGFSRFSHIGYQVGVKRPHATNIMTKIMSGELRYSDVVGSALRRLWQR

SEQ ID NO: 21282 - protein, 417 aa, Shewanella sp. ANA-3
MTQRNPLGRRVVVTGIGGISALGHDWPSIASSLKAQKNCVVTMAEWDKYDGLNTRLAAPITDFEVPSHYSRKKIRSMGRVSIMATRASELALMDAGLLDDPIVTSGEMGIAYGSSTGSTDPLVAFGDMLKNGDMSGVTATSYIRMMAHTTAVNVGVFFGLKGRIHTTSSACTSGSQGIGYAYEAIKYGQQTLMLAGGGEELCPTEAVVFDTLFATSTKNATPELTPRPFDAHRDGLVIGEGACTLVLEELEHAMARGAKIYAEIVGFGTNSDGQHVTQPNSDTMEIAIRLALKDAALTPDAIGYVNAHGTATDRGDVAETHATHAVFGADMPISSLKSYTGHTLGACGALEAWVSIEMMNAGWFAPTLNLDNIDPECAALDYIRGEPRTLDTDYVMSNNFAFGGINTSLIFKRWKTT

SEQ ID NO: 21283 - protein, 390 aa, Buchnera aphidicola str. Bp (Baizongia pistaciae)
MTQKIIIFDTTLRDGEQSLKMSLSVKKKLKIAFALEKLGVDVIEAGFPISSPGDFESVKKISERIKDAKICSLARCIDGDIDIAAKAMKKANSFRIHIFLGTSALHVQSKLKKTFDQIIDMMVSSVKRAQKYTDDVEFSCEDAGRTSLDDLCRIIELAIDLGVKTINIPDTVGYTIPYEFSNIISSIYKKVPNIDKAIISVHCHDDLGMAVANSISAIQVGARQIEGTITGVGERAGNAALEEILMAIKIRKDILNFKTNIKYQEIYSTCRVISSICNIPVPVNKAIIGSNAFSHSSGIHQDGILKDKKTYEIIVPESIGFVSQPLNLTSRSGRAAVKYRMKKIGYKDSDYNIDILYSRFLKLADKKGRVSDSDLKQLVCFNNKLKNLKD

SEQ ID NO: 21284 - protein, 366 aa, Buchnera aphidicola str. Bp (Baizongia pistaciae)
MKRNYKIAVLPGDGIGPEIMREGYKILRILKSKLSLNIMTQEFDVGGVAIDKYGVALPKKTLQGCRDSHAILFGSIGGPKWEDLPSHLQPERGALLPLRKYFNLFSNLRLARIYSGLEKLSPLKSRISNLGCDILCVRELTGGIYFGDPKGSKVSKSLNCAFDTEVYYQFEIERIAHMAFDLALTRRCKVTSIDKANVLESSMFWRKIVNRISTQYSQVKLSHLYVDNAAMQIIKNPSQFDVLLCSNLFGDILSDECAAITGSIGLLPSASLNDKNFGLYEPAGGSAPDIKGKNIANPIALILSIGMMMRYSFKLYDVADLIDWAVNKTLKLGYRTQDISENNKFINTSSMGDIIAEILANRIHKI

SEQ ID NO: 21285 - protein, 454 aa, Mycoplasma mycoides subsp. mycoides SC str. PG1
MKVIVLGTNHAGTTAVRTLKRLDPTCEVTTYDKNDAISFLGCGIALWVKGEVKDPNMLFYATPEILRSEGVNVFMNHEVLSVDDKAKTVTVKDLKTGEVKTDNYDKLIVATGTWPLIPPIPGIDLEGVQICKNYHHAKKILEHNLDKSYKKIAVVGAGYIGVELVEAFNEYGKDVTLIDVANRIMPVYYDQEFTDLMQEKMTKAGVKLSLGAKVIEFKGENGKVTQVVTDKGNIDVDYVIFSVGVRPQSAILEGICDLDDRKAIVTNDFMQTTNPDIYAIGDCAQVYNKAMNKNVPIQLATTAVRTGVIAAFNVIKGNGLKSPGFTGANGISVFGLHMASVGISVEAAKRMGYDVDFINFKDLDRPEFMSTANEVLFKVVWDKKTRKIIGAQVASEKNHTEVMYMLALGIQKDLTIDELPLVDIFFLPHFNKPFNFISLAGLEVLGLNYFKKEK

SEQ ID NO: 21286 - protein, 329 aa, Mycoplasma mycoides subsp. mycoides SC str. PG1
MAIINNIKAVTDALDCAMQRDPNVIVFGEDVGTEGGVFRATQGLAVKFGNDRCFNAPISEAMFAGVGLGMAMNGMKPVVEMQFEGLGLASLQNILTNISRMRNRTRGKYTAPMVIRTPMGGGIRALEHHSEALEAVYAHIPGVQIVCPSTPYDTKGLILAAIDSPDPVIVVEPTKLYRAFKQEVPDEHYIVPIGEAYKIQEGNDLTVVIYGAQTVDCQKAIALLKETHPNATIDLIDLRSIKPWDKKMVVESVKKTGRLLVVHEAVKSFSVSAEIITTVNEECFEYIKAPLSRCTGYDVITPFDRGEGYFQVNPKKVLVKMQELLDFKF

SEQ ID NO: 21287 - protein, 1542 aa, Aspergillus nidulans FGSC A4
MSSRQQIDSVIDDDDEFCPLCIEEFDLSDKNFKPCPCGYQTQNEEGRCPNCRRVYDESTIQYKVPDADEFKADLALKHRKAAAAKKKEAEKREIEASSRKNLAGVRVVQKNLVYVIGLNPTIRDESQLLQTLRGKDYFGQYGEIEKIVVSKAKPGGNPNQGIGVYVTYAKKSDAATCIAAVDGSGNGDRILRAQYGTTKYCSSFLRNEQCHNRNCTFLHETGEDSDSYSRQDLSSMNSLPSQQRPNGTAGPSSATPPYIARSSAQPISQTLRRQPSKDDAGGTALPSSASWANKDSAINRTRRASLTGSQASQSPRSALATVATPSDDTKRVEKQQTQQDRPQTTQTPSPEAPSSSPPRPPSAQTPADKGTPLLDNLLKAVNSPCFKFIFSAAGLPPDELALIDNHPSLIDPYGGVKRRAMREKAEQERTKREQELLQSVPAATAEDEGRESGSLQLGGEPDDTNPPRGRAGRESHGAIQPPSQQGTTTSSAVGSPVSAASHHFQGINLSNRSLTPLQQQQLMLLKSAGNQQAGLVDPMQSGVGSNALDHAAQARQSLLQSQAAQLNALQQAQRGQNSRFSFADANAKNLANTRMLNQASLMQSGTPNPLAAPSPQHSLASNYYTSGVQGPPPGLKTAGTPPVSGGGMFAQGHGFTSNVNLLGGKQEANPELMRELLRGRSGTNASGLPDQDSKRELLFPSLLQHQTPPPLTPVNGLLSSVYGAQAGNTSDSGSQKQRKKGKKQRNANTSSAGGGVVHLADPSILQARMHQVGANAVAGQGLYGSQGQDRDFVHSYFDFEMLTNDFLVDEEFPPLGTTPKDKRSVDSFGSLMRSQLMSDSQPLGRSGTPSLPPGLPLPQGHSISALFQDQFKSSSPVSSVSGPPPGLEVPSPSLAAASRSSEDDATGLAAKPTTDNRQLPNRATSAADVSLGSPVAKSATRVRSQPKEESMPAAEKRGNQPKPAGSSEGKVSSAKVKPMKLDLSFNTPLAPEPVQKAEPPPYQLSAAPATAVNSRPNTPLTGASRVSDSPAPRQPRVLRVVDTPKAETPPPMSATQSVASFSLTSKVRSRRPSASSQSRSDTPGDIGSEADLYTSTSASRANSPPASSRIGSAPVRSITKSQLKKERKQKAKEAEAKKQETAPVTEEPVIAPIVGRKRKTKKAPAESSNPPPENAASTTKPTVAVTNEPTEKVEPAKKSKAPETVSESKPPPSEAKAPVEEKKSEEWRSKNTVEQLLKDAEATGVPLKELFAERTSPLQVLLSQLHKSGALDLNNHPLFNPSNLNQRFDMKCTSDDYEDLKQPIELTEQHRKALLRGEPVRLGSDSPSLKHRCLISPRGCVLHHLSPEEEDRYLALEKSISWTIDSFQEYPAIPVTEPDATNRGGGLDALFATPENFNLCWVDETSTGGISAQSPISVHSTTEGGTLTSIPPNVLSAMEADSTRNHNWAISNAAELMNATATSVRSFAAATAKHMLGAAGVVIGNIPDLDDVVGMTDEELRSFAVKSQKELEASRKELDAIDKKLGALVKRNRKLAQQALAT

SEQ ID NO: 21288 - protein, 428 aa, Mycoplasma mycoides subsp. mycoides SC str. PG1
MFKVKFADIGEGLTEGIVAEVLVKVGDVVKEGQSLYFVETDKVNSEIPAPVAGKIAVINIKAGQEIKVGDVVMEIDEGTGASVASEPKAEAKSEAKVEVVEENASVVGATPVSNDLIVRKQASTVAKSSTIKATPLARKVAADLNVDLSLVTPTGPNQRILVADIKNYHSSSAQPVSQPAPAPVVTPTIKVVEPSAPLSWDEVPMNGVRKATVKAMTKSHTEIAAFTGMKNTDITETHKMRTELKDHAAASGIKLTYLAFIIKAVAKSLRDMPNINVRGDFANNKIQFMHNINIGIAVDTPNGLMVPVIKGVDHLSVFEIAIKINELANKAKDGKLTRAEMTEATFTVSNFGSVELDYATPIINSPESAILGVGAMSQTPLYINGELQKRFIMPLSMTCDHRIIDGADAGRFLIKVQDYLSKPVLLFM

SEQ ID NO: 21289 - protein, 462 aa, Oceanobacillus iheyensis HTE831
MVKMQEWIEVTNPATGEVIDRVERGGKVEAREAVDKASEAFNDWSKRTAYERSELLMNWNALITKHQDELAEIMTMEQGKPIKEALGEVQYANNFVSWYAEEGKRLYGETIPASKADKRILVQRQPVGVIAAITPWNFPAAMITRKVAPALAVGCTAVVKPASATPRTAIRLAELAEEAGIPKGVLQVVTGSSGDISDAWMQDSRVRKISFTGSTEVGKILMKKSAETVKKVSLELGGHAPLIVMKDADIEKAAEGATASKFRNAGQTCVCTNRIYVHESIKDEFIKAFERKVRELRVGNGLEEGIDIGPLIDHDALEKVETHIRDAAHKGASIVYGGDKVGDDSLFYKPTILSNVTDNMLCMTEETFGPVAPVTTFSTEEEAVKRANHSPYGLAAYLFTENLATAIRISEQLEYGIVGINDGVPSTAQAPFGGFKESGIGREGGHHGMEEYVEVKYISIQL

SEQ ID NO: 21290 - protein, 468 aa, Oceanospirillum sp. MED92
MKLVWFRNDLRTGDHHALYQACMDNTGEGVLGVAIITPVQWKIQDESKSRVQFWRANLESLSCDLQSLNIPLLILRVPSNREIPALLVELAKRYQVSGVYFNREYPLYEQQRDNAVISAMAEISVPCLSFDSDVVLPAGTVLNQQGLPFKVFTPFSKRWRQQYLTSNPQPLPVPPVQAKLDISTDSVPKEICYPITVGADWSSERWPAGTEAAHKLLQHYVLEKVADYKQSRDFPAEPGTSSLSPYLSVGVLSTRQCLAAMQAYFDQPEWFDSQWVTELIWREFYRHLLVLFPEMNRWEPFKPEVEEKLSWQYDESLFQAWCKGETGFAIVDAGMKELLETGWMHNRVRMITASFLTKLLRQDWRLGARFFMQHLIDGDFASNLGGWQWSASVGADAAPYFRIFNPMRQAERFDAKGRYVGQYVPSLQGLTSVQQHDPMFAASYSRPTPIIDYAYERQYSLDAYKAKS

SEQ ID NO: 21291 - protein, 335 aa, Schizosaccharomyces pombe
MQQTYKPNTSALKDGAPKATVDQKQLLPCKYRVGRVLGGGTYATVREAVHIETNKMYAAKIMNKKMMEKKQDFVKNEIAILKRVSYEHPNILHLVDFFETVNNLYLITELATGGALFDRICAKGSFYEADAAALMRTTTSAVKYLHDNGIVHRDLKPENLLYRSKDPNSDLLIADFGLSHFYEDSQYYMLMTACGTPEYMAPEVFRRTGYGKPVDMWAIGVITYFLLSGYTPFARPSQVEVIEAILANEYTFNDPCWSGISETAKDFIKKCLENDPSKRLTAADALKHPFLSENGPATSNLLPNVRENFNARKTFRTAYNAVRAFNTWKKLENKH

SEQ ID NO: 21292 - protein, 572 aa, Vibrio cholerae O1 biovar eltor str. N16961
MKMDSEYTEKVNELTLELQRSIERGKQLAEENRVILAAISAFSVATNKNHIFEELKTLLNRYIQFDDFIVISKDKNGHQFRTAIASNASFNDVVWPNGVKFQRVLNGECILLFEPCKLDEFACLMGSIDKPVYSALITGIQAQISDSVLILLGQNKGQFSLEAKETLSRFRPLLERAISDIEHKEELQKLVEIRTRELRLAQKLAEQANQSKSNFLAMMSHELRTPLNAVLGLIDILRGESTSYQVELLEQMENSAELLLIIINDILDLSRIESGHFSLHCHWLDLEKKLDQSLVYHRQIAQDKGVHFYVQSNKNPTLEYYTDSARLTQILFNIVGNAIKFTKQGQVDVVLDYTKDGVVFRVKDTGIGIEKNRVEQLFTPFIQADNSITRNYGGTGLGLAITKHLVELMGGTIQVESEFGIGTTFTLYIPLQSRLKNIKPSTSSSQQIVNVKNHHILVVEDTKTNQMVIQLLLNKLGYDVTIAENGLQAVELLEKNHVFDLVLMDISMPIMDGIAATKILRDKHIEIPIIALTAHTAGSDKQNCIDAGMNDIVLKPIRSKDIMEVVKRFLNP

SEQ ID NO: 21293 - protein, 169 aa, Bdellovibrio bacteriovorus HD100
MSNIPGVCVSPDKETQKYVFNHTMLRIKDPKASLDFYTRVLGMKLVRKLDFAEWKFSLYFLAYVPEGTDVPTENEANARYAFGREAVLELTHNWGTEEQETTPYHNGNTEPRGFGHICISVPDIQQACARFESLGVNFQKRLGEGGMKNIAFVKDPDQYWIEVVQPGLL

SEQ ID NO: 21294 - protein, 878 aa, Bdellovibrio bacteriovorus HD100
MFQRLLKNWAVQIFLIFVLYYLTGRLGLLLALPPGYASLVWPPFGISIAALLLLGINRWPGVLIGAFLVNARHMESISNLLLPLGISMGNTISVIVAALLIRRFLHFPKRFYLEREVILFLFLAGPVAALLSASAGVGLLYLNDVVSQKNASMNWIYWFVGDAIGGLIFAPLALMFSTQSRRYWLKSVTKVLVPVCVAFALILSASQYLTLSEQEKQSAEFTRKAEFTFNVLEKDFNGNIDMLESLKSFFDSSTSVTRQEFRDFSSTLHSRRPEVQALAWIPYNQDKPETLRIEYIEPLPTNSQVLGTDFGTHPDRQALLKKALEKRRLITSGPMNLREFYPQARGIFLLLAIGRPEGVLLEVLRLDGILRDLTGVLNDPSYRVLIEDVTQTSNRELMVDTLSGGRDFHADFRWSSHLEIGDRLWEVTIQQDTSLRQGSAFNTAVFLLTSLVFVFLICTLLLTIANRIITVEEIVDEKTQHLIDLNVQLKKASETKSEFLANMSHEIRTPLNVIVGMSDLLEESPLNEDQKHYVDISKKAGHNLLSIINDILDISKIEAGLLTLEKTEVDLHSLVNDITEMFELKAREKNLELSVYLSEDTHSIFMGDPTRIRQVLSNLISNSLKFTTDGSIRVEVMKNQTEMEGNLIFHVSDTGIGIPRDKIPQLFQPFTQADSTITRKFGGTGLGLSISKRLVKMMNGDITVESELHRGSRFSFSLNLPWLRDVPAEGEHTAEEISQVPTGPAAEQEPLSILIVDDTEDNRLLIKAYLKNTPHQISEACNGRQALELAQKQRFDLILMDMQMPVMDGFTATQKIRKWEQDHQRPASTIWALTAFALKNEIDRSLSVGCNLHLIKPLRKADLLNHIQKLSEERHQHR

SEQ ID NO: 21295 - protein, 270 aa, Oceanospirillum sp. MED92
MAKLDSCLFEGHVMHHRFRPSVHRFIYRVFSLNVNLSELENLDRLKLFSVNRFNLFSFHEKDHGSGKGHLLSEIKQRLCDRGYPEATHKIQLLCYPRILGYTFNPLSVYFCYDQQDNLKVILYEVSNTFGSRHTYLLQTSGKEKLVRHGCDKTMYVSPFMPMDTRYQFRINPPKSKVAVCIRQTELSDNDRKRQPILHATFTGDRTELNDRTLFKAFLRYPLMTLKVMTAIHWEAFRLWRKKLKIQPRQKGIQQSISWKDEHGVSHYESL

SEQ ID NO: 21296 - protein, 357 aa, Zea mays
MERGAGASEKGTVLVTGASGFVGSWLVMKLLQAGYTVRATVRDPANVGKTKPLMDLPGATERLSIWKADLAEEGSFHDAIRGCTGVFHVATPMDFLSKDPENEVIKPTVEGMISIMRACKEAGTVRRIVFTSSAGTVNLEERQRPVYDEESWTDVDFCRRVKMTGWMYFVSKTLAEKAALAYAAEHGLDLVTIIPTLVVGPFISASMPPSLITALALITGNAPHYSILKQVQLIHLDDLCDAEIFLFENPAAAGRYVCSSHDVTIHGLAAMLRDRYPEYDVPQRFPGIQDDLQPVRFSSKKLQDLGFTFRYKTLEDMFDAAIRTCQEKGLIPLATAAGGDGFASVRAPGETEATIGA

SEQ ID NO: 21297 - protein, 554 aa, Burkholderia mallei ATCC 23344
MHSMSNPRLRFSSVVYGLIALAACASFAAHASGAQCAASPAKSADGTPQWRPALHYTPRRNWMNDPNGLVYENGVYHLFYQYNPHGNFWGDMSWGHATSRDLVHWDEQPVAMPANAREDIFSGSIVADARNTSGLGTPNAPPLVALYTSVYKAGFGHEPGTQAQSLAYSIDHGKTWRPYAHNPVLTLAPESRHFRDPNVTWYAPGGYWMMTAVVADAPVVKLYRSSDLIRWDFLSDFTLPDVPHRGALWEMPELLPMPLDGDAARMKWVMIVNVNPWSIAGGSGAMYFIGEFDGRTFTPDRAAPANADPAQYSWIDHGADYYAAGTFANAPGEGPVAIAWMSNWDYAERIPTTPWKGAMALPRELALKTIDGRPRVTVAPARAFDAFARTRPAVRIGSLAVASATRELGADARGTVQRIAVTIEPRSARRAGLIVRRSANGRVGTRIVYDSSAHTLSVDRSASGETNFSNAFSQRHIVALPLVNGKLRLDVIVDRDSVEVFDGDGRTVITDLVFPSPADNRLAVFAEGGDATFGDVVVTNLDETAGERRGCPTS

SEQ ID NO: 21298 - protein, 298 aa, Ehrlichia chaffeensis str. Arkansas
MNIRIGTRGSILAIAQTLEIKNLLNRYFPEISVQIVKIKTSGDINNQVPLSAIGGKSLFIKEIEEALLMGKVDLAVHSVKDIPAFYCEGLIIPCVLKRNSPYDVFISSKHKDIKSLPLNATIGTSSVRRKVQLNYLRPDLQVVPVRGNIDTRILKANVGEFDGIVLAEAGLIRINRCDVIKEILSPKIMLSAVGQGAIGIQCRVDDHSIINKIKVLNCHQSYVCVMAERSFLKTINGSCDTPLAALAQYVNNDTIHMSCMLANEKNMVFASCCFNECDAEKSGINMGKKLMDELSQYY

SEQ ID NO: 21299 - protein, 91 aa, Hordeum vulgare
LNCGQVDSKMKPCLTYVQGGPGPSGECCNGVRDLHNQAQSSGDRQTVCNCLKGIARGIHNLNLNNAASIPSKCNVNVPYTISPDIDCSRIY

SEQ ID NO: 21300 - protein, 450 aa, Vibrio parahaemolyticus RIMD 2210633
MSAFNVAKFGGTSVANFEAMSRCATIIENNPNTRLVVSSACSGVTNILVELANGVQDQEHRAELLKNLAEIHDSILAQLEDATEASSEVYGILDTVTSLAEAASIQANTKLTDHLVACGELMSTHILAQLMRERGINAVRFDIREVLRTDDNFGRAEPNVEAIAQLAQEKLIPLCLDSVVITQGFIGSDEEGNTTTLGRGGSDYSAALIAEGVKASGLEIWTDVPGIYTTDPRIAPKASPIPEISFSEASEMANFGAKILHPSTLVPALRHDIPVFVGSSKEPEKGGTWIRHQVESSPLFRALALRCNQTMVTLRSANMFHAYGFLAKVFEILAKHKISVDLITTSEISVSLTLDQTDTSGGAPQLPQAAREELEELCKVEVEHDLCLVALIGNKMSERKGYAKQVFGTLEDLNLRMICYGASPHNLCFLVNESVAKQAIQKLHTELFEQ

SEQ ID NO: 21301 - protein, 164 aa, Shewanella oneidensis MR-1
MLDLLPDLFDHYPSKLTLLPLAFRAFGGKRLFWGEVVTVKCFEDNSKVKEVLAQPGHGKVLIVDGGGSSRRALLGDLIAQSAMDNGWQGVIINGYVRDAARLSSFNLGVYALGAMPMKTEKLDQGQINVPIELGCVTVKPGMMVYVDENGIAISEESLNFAFLN

SEQ ID NO: 21302 - protein, 417 aa, Ehrlichia chaffeensis str. Arkansas
MKRILVKKFGGTSLQDIECINRVAEIIKQDVNNNYKVVVVVSAMGKFTDNIISQIKQISDVKSQSERSEYDLIISSGEQISCGLLSLALQKIGINAQSWLGWQLPIVTTEDHTKARIIDINTCSLQDSLANNDVAIVAGFQGMHKNNRVTTLGRGGSDTSAVAIAAALKVDLCYIYTDVDGIYTADPNVVPKARKLDYITYDEMIEMSSLGAKVLQVRSVEIAMKYNIKLCILSTFNPGKGTILRKKGESDMESQLITGVTCNNKTASITLKEVKAISGVTTVFNAIAEKNINVDMIIQSVNDNNANDITFTISEEDLPTTTKFLTEIQTELMYQDLIINSEVAKVSIIGVGMISHSGVAYKMFDTLTSNNIKILAVTTSEIKISVLISRKDSQLATIALHSTFGLDNTESDLHIIS

SEQ ID NO: 21303 - protein, 298 aa, Aspergillus oryzae
MALLFLKQKLFPGQDKRSAGKLGKPLLAPDDSTLNSDQDDIESQRSYSTFRPSSPTSESGSTSSSRSRINPRIVSDAILGLSDGLTVPFALSAGLSAFGNTKVVVLGGLAELAAGAISMGLGGYVGAKSEAESYETTVRETKELIETSPSETSMIVHDIFSTYALPEEAISQINTSLHASHGRLLDFLITFYHKESEPDCNQAWISAITLALGYFVGGFIPLIPYFIFSQVIVALYWSIGVMAITLLAFGYVKTCVVRGWQGRENIAAGIKGGVQMCFVGGVAAGAAIALLRMFGGGA

SEQ ID NO: 21304 - protein, 128 aa, Chlamydomonas reinhardtii
ARSSARPAFARAAPRRSVVVRAEAGAVNDDTFKNVVLESSVPVLVDFWAPWCGPCRIIAPVVDEIAGEYKDKLKCVKLNTDESPNVASEYGIRSIPTIMVFKGGKKCETIIGAVPKATIVQTVEKYLN

SEQ ID NO: 21305 - protein, 140 aa, Chlamydomonas reinhardtii
MALVARRAAVPSARSSARPAFARAAPRRSVVVRAEAGAVNDDTFKNVVLESSVPVLVDFWAPWCGPCRIIAPVVDEIAGEYKDKLKCVKLNTDESPNVASEYGIRSIPTIMVFKGGKKCETIIGAVPKATIVQTVEKYLN

SEQ ID NO: 21306 - protein, 652 aa, Saccharophagus degradans 2-40
MCGIAGLVSPSLPIDSLKATATAMAQAIEHRGPDAMGVWVEQEQKLAFSHRRLSIQDLSESGAQPMHSHSKRYTIAFNGEIYNFLEIKKPLIDAGFEFRGHSDTEVLLCAIEHWGLEQTIAKAKGMFAIALWDSQTKVLTLIRDRIGEKPLYYGVINGSFVFGSELKAIFAHTPAKALTLNKVAIASFLRHGYISAPNSVFVEVKKLSPGCRIDINLAKQSDWSIANLTPQPYWTVAQSANQPYLYTEQNQSEAISALDEKINKVINEQSIADVPLGAFLSGGIDSTVVSAVLQANTSTAIDTFTIGFEEKSFNEAEFAKEIAKHLGTKHHEHYVNQQDILELVNILPRVYDEPFADASQLPTILVNRFARSELTVCLSGDGGDELFAGYNRYVFTEAVLKKAAALPAVFKSILKALITSVAPGKWDKLYQALNSIAKRKGGAEFGNKLYKMVSLADAKSKAAAYEYLMSYWQQPEQVLKAFNGELAMQSPLSLEDDFINAAMAWDQQWYLPGDNLTKTDRASMAASLELRAPLLDIELIDFAWTVSPELKVRDGKSKWLLREVLYKYVPKELIERPKMGFSVPISQWIRTDLSAWVDELLDKEFIEKQGIFNYAPIQHALLEHRSGSYDHGKKLWTLLMFQAWFKTNIIDG

SEQ ID NO: 21307 - protein, 295 aa, Nostoc punctiforme PCC 73102
MNLTPESKVLIQGFCEFISGTHVAQMQAYGTNLVAGVNPGCGGQELHGLPVFDLVEEVIEQFGVIDTTIICVDPYDVLDAALEAIASHISQIIIITAGVPPLDMVQLLRKAEACETLVIGPNSPGIIVPGKILLGTQPSEFYTPGVVGIVSRSSTLTYEVAYELTKAGLGQSISVSIGSDAIVGSSFLQWLQILDEDETTEAIVLVGQPGGGSEEAAARYIAEAIDKPVIAYIAGRQAPPGKSWRQTGTLATVIGRDPNFGTAQSKLAALKEAEVPVAERPSQIPELLRKEIKIN

SEQ ID NO: 21308 - protein, 898 aa, Streptococcus pneumoniae R6
MSLQKLENSSNKSVVQEEVLILTELLEDITKNMLAPETFEKIIQLKELSTQEDYQGLNRLVTSLSNDEMVYISRYFSILPLLINISEDVDLAYEINHQNNIDQDYLGKLSTTIKLVAEKENAVEILEHLNVVPVLTAHPTQVQRKSMLDLTNHIHSLLRKYRDVKLGLINKDKWYNDLRRYIEIIMQTDMIREKKLKVTNEITNAMEYYNSSFLKAVPHLTTEYKRLAQAHGLNLKQAKPITMGMWIGGDRDGNPFVTAKTLKQSALTQCEVIMNYYDKKIYQLYREFSLSTSIVNVSKQVREMARQSKDNSIYREKELYRRALFDIQSKIQATKTYLIEDEEVGTRYETANDFYKDLIAIRDSLLENKGESLISGDFVELLQAVEIFGFYLASIDMRQDSSVYEACVAELLKSAGIHSRYSELSEEEKCDLLLKELEEDPRILSATHAEKSELLAKELAIFKTARVLKDKLGDDVIRQTIISHATSLSDMLELAILLKEVGLVDTERARVQIVPLFETIEDLDHSEETMRKYLSLSLAKKWIDSRNNYQEIMLGYSDSNKDGGYLSSCWTLYKAQQQLTAIGDEFGVKVTFFHGRGGTVGRGGGPTYEAITSQPLKSIKDRIRLTEQGEVIGNKYGNKDAAYYNLEMLVSAAINRMITQKKSDTNTPNRYEAIMDQVVDRSYDIYRDLVFGNEHFYDYFFESSPIKAISSFNIGSRPAARKTITEIGGLRAIPWVFSWSQSRVMFPGWYGVGSSFKEFINKNPENIAILRDMYQNWPFFQSLLSNVDMVLSKSNMNIAFEYAKLCEDEQVKAIYETILNEWQVTKNVILAIEGHDELLADNPYLKASLDYRMPYFNILNYIQLELIKRQRRGELSSDQERLIHITINGIATGLRNSG

SEQ ID NO: 21309 - protein, 101 aa, Zea mays
TTPQSANRRAYLSLLHCTALPCHHIMGGAMPPQPCCGGIRSLLQQANNTPGRRTICGCLKNVANGANGSGTYISRAAALPSKCGVALPYKISTNVNCNTIN

SEQ ID NO: 21310 - protein, 394 aa, Magnaporthe grisea 70-15
MYSNWTIQQQRLPSTTRGYELTRRTPFLGAKDSESNPDQVFHLIEGIINEDLLHPLAANLHKLPFESRKDAQFIFSSVFRFRPASASTKSDPVALGWVVNQRPQVLLELCRGYDHKESATAAGSVLREVLKHEGACKVILYDDGDQPGSSVNGVQAIDRDRPQSGTGVFWKFFDWIDRGSFEVSADAFTTFREILTKQKEVVPHYLRVNFDLFCSKYNTVLVQSSSYVTKRQSIKLLGEILLDRSNYSVMTEYVASGEHLKICMNLLRDDRKMVQYEGFHVFKVFVANPNKSIPVQRILIMNKDKLLNFLSHFLEDRTDDEQFIDEREFLIKQIRNMPASPVPPQGSPAVRPPDAKPNLRYDVRQGERREARGRDESLDEHMHLLLSSLDDDNG

SEQ ID NO: 21311 - protein, 838 aa, Bradyrhizobium japonicum
MTSPKLDRRQMLKLEAAAIAAAAAGLPVPALAANLATEREVSELKWDKAACRFCGTGCSVMVATKENRVVATHGDIKAEVNRGLNCVKGYFLSKIMYGHDRLTQPMLRKANGKYDKNGDFTPVSWTEAFDIMEVKWKEAMKKRGPNGVAMFGSGQWTIWEGYAASKLFKAGFRTNNIDPNARHCMASAVAGMMRTFGIDEPPGCYDDIEATDAFVLWGSNMAEMHPILWTRLTDRRLSAPHVRVAVLSTFEHRSFDLADIGMVFKPQTDLYLLNAIANHIINTGRVNKDFVAAHTVFRRGQTDIGYRVRPEHPLQKKATGAAKANRNDPRQDYDEYVKFVSEYTLEKAAEMSGVPLNRLEALAELYADPKTKVVSFWTMGFNQHTRGVWCNNLVYNIHLLTGKISSPGNSPFSLTGQPSACGTAREVGTFSHRLPADMVVTNKEHRTKAEHIWQLPEGTIPDKPGAHAVLQSRMLKDGLINAYWVQVNNNLQAGPNANEETYPGFRNPDNFIVVSDAYPSVTALAADLILPTAMWVEKEGAYGNAERRTQFWHQLVPAPGESKSDLWQLMEFSKRFKIEEVWPEELIAKKPEVRGKTLFDVLYKNGQVDKFPVSDIEQGYLNDESKAFGFYVHKGLFEEYASFGRGHGHDLAPFDAYHKERGLRWPVVNGQETRWRFREGSDPYVKQGTDVQFYGYPDGKARIFALPYEPAAESPDGEYPFWLSTGRVLEHWHSGTMTRRVPELYKAFPEAVCFMHPDDAQEAKIRRGDEVKVVSRRGFIRVRVETRGRDRPPRGLVFVPWFDESKLINKVTLDATDPISLQTDFKKCAVRIERVNVS

SEQ ID NO: 21312 - protein, 959 aa, Arabidopsis thaliana
MSESEEKTCNDDPKQPTLVRDLVISILDRLRFSDFHRARCISSEWYYASKSCIRVTTPWIIMFPYNTDWKENSSCKAVLWVDEETRDYLVVWNYDGFFAYHKKGDDKNNWKVIQPLMNQRCVDMVCKESKLYVLTDTHVTVLDFSHADASPIQCASFKSPNYGNDSFCGKNLAVTLSGQVLIVIHSGGVYKMDPKSLEWSRTNSLGDEAFIFDLGITVAAKDGVMKNCIYFYADPPYRPRRRFVRNAESGISVYHIKTKKVVQVYQPALTASSPISFSSARWFLNSCFKPKSKSLPTRISQKLESCTPLELSPAPILHLVDSVEEKISIFVGFSGKNSDGFALNRLENQTGVDSAKLVDMNSLVRRKQVDSVHLIKNDGPHQLAKKLSAVDLVAIGVGTTIGAGVYILVGTVAREHTGPALAVSFFIAGVAAALSACCYAELASRCPSAGSAYHYAYICLGEGIAWLVGWALVLDYTIGGSAIARGITPNLASFFGGLDNLPVFLARQTIPGVGIVVDPCAALLIMIVTILLCFGIKESSTVQAIVTSVNVCTLVFIIVVGGYLACKTGWVGYDLPSGYFPFGLNGILAGSAVVFFSYIGFDTVTSTAEEVKNPQRDLPLGIGIALLICCILYMLLSVVIVGLVPYYSLNPDTPISSAFGDSGMQWAAYILTTGAITALCASLLGSLLAQPRIFMAMARDGLLPAFFSEISPRTQVPVKSTIAIGVLAAALAFFMDVAQLSEMVSVGTLMAFTAVAVCVLVLRYVPPDGVPLSSSSQTLSDTDESRAETENFLVDAIESSDSPLLGNETARDEKYFGKRRKIAAWSIALVCIGVLGLASAASAERLPSFPRFTICGVSAVILLGSLITLGYIDEDEERHNFGHKGGFLCPFVPYLPVLCILINTYLIINIGAGTWIRVLIWLLIGSMIYIFYGRSHSLLNNAVYVPTMTCTRKTTDHLA

SEQ ID NO: 21313 - protein, 481 aa, Nostoc punctiforme PCC 73102
MSDLILFWHRRDLRISDNTGLAAAKRRSPKVVGVFCLDPHILERDDVAPVRVTYMIGCLQKLQERYAQVGSQLLILHADPVQAIPALAEAINAKAVFWNWDVEPYSQERDRTIINALKEKGIEFLNQNWDQILNSPDEIRTGGNSPYTVYTPFWKNWITKPKANPVETLQNVEGLTEAEQEIAKLSGSLTLPSAKDLGFIWDEQLIISPGEAAAQERLEEFTNKAITEYQEQRNFPAVDGTSQLSAALKFGVIGIRTVWQATIEALENSRSEETAVNIRTWQQELAWREFYQHAMYNFPELADGAFRDTFKNFPWETNEEHFQAWCEGRTGYPIVDAAMRQMNESGWMHNRCRMIVASFLTKDLLINPQLGEKYFMKHLIDGDLSANNGGWQWSASSGMDPKPVRIFNPASQTQKFDPEGEYIRQWVSELRSVDTEYLVTGKIPPLERHAVGYPDPIVDHKIQQNQFKLRYQQQKNTSGGE

SEQ ID NO: 21314 - protein, 128 aa, Brassica napus
MAYSAPISPSLSFFKNPQLTRFSFPFSPLYSRPRVQNPSLLTKNKTWSSSVVVAATAAEKQKKRYPGESKGFVEEMRFVAMRLHTKEQAKEGEKETKAPEERPVAKWEPTVEGYLRFLVDSKLVYDTL

SEQ ID NO: 21315 - protein, 199 aa, Nicotiana tabacum
KGYVFKIMGGCDKQGFPMKQGVLTPGRVRLLLYRGTPCFRGYGRRNGERRRKSVRGCIVSPDLSVLNLVIVKKGENDLPGLTDTEKPRMRGPREPQRSEALYFKEDDVRKYVNTTAEFTTKWKGSKAPKIQRLVTPLTLQRKRARIADKKKRIAKAKSEAAEYQKLLASRLKEQREKRSESLAKKRSRLSAASKPSIAA

SEQ ID NO: 21316 - protein, 774 aa, Treponema pallidum subsp. pallidum str. Nichols
MIPLGKRHGHSAVAVCSRGVSVFRGEKAMDGVRGRLSALRSLMRAQGVDICYISGENAHGQIDGAREYFSGFTGSAGIVVVTAQRAFLWTDGRYFIQAERELSACEVCLFRTGQAGVPRVTELLRTELRAFSSGPGHGGGTLAVDGRTISAAVWEQFQQELVDVSLRLDFDGALLLPQEHRVSVVPSPAFLLDERYTGLSAAQKLTQLRAALSARSCDATVLSTLDDVCWLTNVRAHDVPCTPLLVAYMVVTHTRAFLYVDMRKISSALHQALYAQGVECMPYDTFFDQVCARCADQEPTVHAVGKGRAGVQEVAGRTPVVLLDFERSCAALVDLFRASPQVCRPQVERSAPSGSLSSVLGIEEDGTETSRGGKSACALQSARDALAAGKEKENKEERGQTMCFSVCRGLLPTVALKALKNDTERANVHQAMIQDGIALVKTLQWVYQQLDVGADVDECAVAEFVRAARAVSPSFIEESFHTIAGYGANAAMVHYRPVRFSALHPAAGQTAALLRARGFLLLDSGAHYREGTTDVTRTLALGPLTDVQRADYTLVLQAHSALARARFPAGTSGAVLDGIARAPLWAQGRDYPHGTGHGVGFCLSVHEGPYSISPSAPGRGGTARGIGAEHTGDPPFFSEEAAWQLRPGMLLSNEPGVYVAGSHGVRIENLMWVVQAHESDAQCVWKEGGEGKEENAAARECTGADRMQPSRCRSFYGFQTATLCPIDTRPLVRERLHDEDIAWLNAYHLRVYVTLAPFLDARTRAFLRTCCRAL

SEQ ID NO: 21317 - protein, 493 aa, Arabidopsis thaliana
  misc_feature (322)..(322): Xaa can be any naturally occurring amino acid
MGGDLKSQLSRESHVFGLKVWEVIGIAVALLIIAILSVLSCCLTSKKKSRRSKTGLPVIQTPPVVSKEIREVRVEHVSASNFAPGEGILLTIQDKNSKDSEKVMVHLDMRKKRSSSGRSGSFHHLEIIDKHSESAEEVSASSSLYNIATPSPLSGLPESHLGWGHWFTLRDLETATNRFSKENVIGEGGYGVVYRGELMNGTPVAVKKILNQLGQAEKEFRVEVDAIGHVRHKNLVRLLGYCIEGTHRILVYEYVNNGNLEQWLHGAMRQHGYLTWEARMKVLIGTSKALAYLHEAIEPKVVHRDIKSSNILINDEFNAKVXSDFGLAKLLGAGKSHVTTRVMGTFGYVAPEYANSGLLNEKSDVYSFGVVLLEAITGRDPVDYGRPAHEVNLVDWLKMMVGTRRSEEVVDPNIEVKPPTRSLKRALLTALRCVDPDSDKRPKMSQVVRMLESEEYPIPREDRRRSRTREGSMEINSDTDMSTPVSRSQSKRQ

SEQ ID NO: 21318 - protein, 332 aa, Ehrlichia chaffeensis str. Arkansas
MRTLTVREALCEAIREEMERDHTVLIMGEEVGEYQGAYKVTQGLLEQFGPDRVIDTPITEHGFAGIGVGAAFAGLKPIVEFMTFNFAMQAIDQIINSAAKTSYMSGGQLNCPIVFRGPNGAAARVGAQHSQCYASWYAHIPGLKVVSPYFAADCKGLLKAAIRDLNPVVFLENEIAYGHKHEIPNEVSTSDYITEIGKAAIVKEGTDITITAFSLQVKFALEAAELLAKEGINAEVIDLRTLRPLDTETILRSIKKTNKIISIEEGWPYSGIGSEIAALIMEYAFDDLDAPMIRITGKDVPLPYATNLEKLALPQIEDILEAARALCIRNYR

SEQ ID NO: 21319 - protein, 626 aa, Methylobacillus flagellatus KT
MLEAIRNRSKGWLAKVILAAITIPFALVGVDSYLRDAGSSVAVAKVDGESITVQEYSNALQNLRNRLQSEGKVDQAVIDGPELKQAVIDHLVEGRLLANEVKRAKFVVSDEQLSHYIMQEESFHQDGQFSQALYDQFLAERRRTPSQFENEVRTDLLTMQAREGLSALAFVPNGVANNAIKVAHQSREVSIAEFRTADYLSQVKVTEDEVNAYYKEHQDKFKVPEQVKLEFVLLSANALIPSQQVTEEEAREYYAQNAAQFQGDEQRRASHILIGFGVSPTPETKQKAKEKAEEVLALVKKNPERFEQLAHQYSQDPGSKDKGGDLGLFGPGTMVKPFEDAVFSMKPGTISDLVETDFGYHIIKLTEIHGSGQSFEDVQGQIRAELMYQKALAQFSEQAENFSNMVYEQADSLEPVAKEFGLQVQTSGWLSRADGAKFFKNDKLMNLVFSDEVLKDRRNTEAVEVSPNNLISARVVEHKPAAARAFEEVKAGIEDFLKHEKAANLAREKGEAALAELRAGKAVSLNWTEPVTVDRYNPNTLTELSVSTAFKADASKLPAYNGVADRNGYLIAKVHAVKFAVESEEDQRAAKAQLQAALAAEYRRAYINSLKQKAKVTINTQLLDTE

SEQ ID NO: 21320 - protein, 220 aa, Streptococcus agalactiae 2603V/R
MSTNKIAPSILAADYANFANELKRIEETTAEYVHIDIMDGQFVPNISFGADVVSSMRKHSKLVFDCHLMVVDPERYIEAFAQAGADIMTIHVEATKHIHGALQKIKEAGMKAGVVINPGTPVESLIPILDLVDQILIMTVNPGFGGQAFIPEMMSKVKTVAAWRKEYGHHYDIEVDGGIDNTTIKAAAEAGANVFVAGSYLFKASDLPAQVETLRVALDD

SEQ ID NO: 21321 - protein, 106 aa, Malus x domestica
TDVPAPDMGTNAQTMAWILDEYSKFHGHSPAVVTGKPIDLGGSLGREAATGRGVVFGTEALLAEYGRSCKGLTFVIQGFGNVGSWAAKLIHEKGGKVIAVSDITGA

SEQ ID NO: 21322 - protein, 117 aa, Brassica napus
MAGLVKLSCLVLACMIVAGPIATNAALSCGTVSGNLAACIGYLTQNGPVPTACCSGVTSLNNMARTTPDRQQACRCLVGAANALPTINVARAAGLPKACGVNIPYKISKTTNCNSVK

SEQ ID NO: 21323 - protein, 167 aa, Zea mays
MAMETCFRAWALHAPAGSKDRLLVGNLVLPSKRALAPLSVGRVATRRPRHVCQSKNAVDEVVVADEKNWDGLVMACETPVLVEFWAPWCGPCRMIAPVIDELAKDYAGKITCCKVNTDDSPNVASTYGIRSIPTVLIFKGGEKKESVIGAVPKSTLTTLIDKYIGSS

SEQ ID NO: 21324 - protein, 387 aa, Desulfitobacterium hafniense DCB-2
MEERKLTIVDTTLRDGEQTAGVVFSNQEKLMIARMLDDLGVHQIEAGVPVMGGDEQKAIRDIVKMGLKASIMGWNRAVIADIEKSIECGCDAVAISISTSDIHIEHKLMTTREDVLARMVKAAEFAKRNGLYISVNAEDASRSDLDFLLEFARQAKEAGADRLRYCDTVGILEPFTTFERITKLKETIDIDVEMHTHNDFGMATANALAGVKAGASHIGVTVNGLGERAGNAALEEIVMALKYLAGVDLKFATERFVEVSEFVARASGRSVPAWKAIVGSNMFAHESGIHADGALKNPLTYEVFKPEEVGLERQIVIGKHSGTAAIKAKFRNEYGKEISEEEANELLARVRAFAVDMKRSLFDKELMYIYEDLHREAENRQPNPKWF

SEQ ID NO: 21325 - protein, 125 aa, Triticum aestivum
  misc_feature (90)..(90): Xaa can be any naturally occurring amino acid
  misc_feature (101)..(101): Xaa can be any naturally occurring amino acid
  misc_feature (107)..(107): Xaa can be any naturally occurring amino acid
MAPTVMASSATSVAPFQGLKSTAGLPVSRRSNGASLGSVSNGGRIRCMQVWPIEGIKKFETLSYLPPLSTEALLKQVDYLIRSKWVPCLXFSKVGFIFREXNASPGXYDGRVLGNVGKLNVSGGT

SEQ ID NO: 21326 - protein, 454 aa, Streptococcus pneumoniae R6
MKVVKFGGSSLASASQLEKVLNIVKSDSERRFVVVSAPGKRNAEDTKVTDALIKYYRDYVAGNDISKSQSWIIDRYAAMVSELGLKPAVLEKISKSIHALATLPIEENEFLYDTFLAAGENNNAKLIAAYFNQNGIDARYMHPREAGIVVTSEPGHARIIPSSYDKIEELTNTNEVLVIPGFFGVTKENQICTFSRGGSDITGSIIAAGVKADLYENFTDVDGIFAAHPGIIHQPHSIPELTYREMRELAYAGFSVLHDEALLPAYRGKIPLVIKNTNNPDHPGTRIVLKHSNDEFPVVGIAGDSGFVSINMSKYLMNREVGFGRKVLQILEELNIGWEHMPTGIDDLSIILRSRQLTPIKEEEILRQLVQKAKVDHAEIEHDLSIIMIVGEKMKSHIGVTATATRALSENKINIQMMSQGSSEVSIMFVVNKDQEKAAIKALYNAFFGESKED

SEQ ID NO: 21327 - protein, 180 aa, Phaseolus vulgaris
MASSMISSPAVTTVNRAGAGAGMVAPFTGLKSLGGFPSRKMNNDITSVANNGGRVQCIQVWPTVGKKKFETLSYLPPLTKQQLAKEVDYLLRKGWVPCLEFELEHGFVYREHNKSPGYYDGRYWTMWKLPMFGCTDSSQVLKELYEAQTAHPDGFIRIIGFDNVRQVQCISFIAYKPPGY

SEQ ID NO: 21328 - protein, 335 aa, Streptomyces clavuligerus
MTIRVGINGFGRIGRNYFRALLEQGADIEIVAVNDLGDTATTAHLLKYDTILGRLKAEVTHTADTITVDGHTIKVLSERNPADIPWGELGVDIVIESTGIFTKKADAEKHLAGGAKKVLISAPAKDEDITLVMGVNQDTYDPAQHHVISNASCTTNCVAPMAKVLDENFGIVRGLMTTVHAYTNDQRILDFPHSDLRRARAAAENIIPTTTGAAKATALVLPQLKGKLDGIAMRVPVPTGSATDLVVELSREVTKDEVNAAFKKAAEGELQGILSYTEDPIVSSDIVGDPASCTFDSSLTMVQEGNSVKILGWYDNEWGYSNRLVDLTVFVGEQL

SEQ ID NO: 21329 - protein, 132 aa, Candida albicans SC5314
MSGGKGKAGTSEKASTSRSAKAGLTFPVGRVHRLLRKGNYAQRIGSGAPVYLTSVLEYLAAEILELAGNAARDNKKSRIIPRHLQLAIRNDEELNKLLGDVTIAQGGVLPNIHQNLLPKKSGKGGVKASQEL

SEQ ID NO: 21330 - protein, 507 aa, Staphylococcus aureus subsp. aureus MRSA252
MLNADLKQQLKQLLELMEGNVEFVASLGSDDKSKELKELLTEISDMSPRLSLSEKSLKRTPSFSVNRPGEETGVTFAGIPLGHEFNSLVLAILQVSGRAPKEKQSIIDQIKNLEGSFHFETFISLTCQKCPDVVQALNLMSVINPNITHSMIDGAVFREESENIMAVPAVFLNGEEFGNGRMTIQDILSKLGSTADASEFENKEPYDVLIVGGGPASGSAAIYTARKGLRTGIVADRIGGQVNDTAGIENFITVKETTGSEFSSNLAAHIDQYDIDAMTGIRATDIEKTDEAIKVTLENGAVLESKTVIIATGAGWRKLNIPGEEQLINKGVAFCPHCDGPLFENKDVAVIGGGNSGVEAAIDLAGIVNHVTLFEFASELKADNVLQDRLRSLSNVDIKTNAKTTEVVGENHVTGIRYEDMSTGEEHLLNLDGIFVQIGLLPNTSWLKDAVELNERGEIVIDRNNNTNVPGIFAAGDVTDQKNKQIIISMGAGANAALNAFDYIIRN

SEQ ID NO: 21331 - protein, 135 aa, Brassica napus
  misc_feature (127)..(127): Xaa can be any naturally occurring amino acid
NIIAGSLTYYTRKHLPGLKRRRGGPEASGRFSSSGNVLSEEEQKHLLEEIQDLLSMQKGLVPTKVFVDMLRVAKILKASPTCIANLEKRIGMQLDQAGVEDLVMPSFTHTMETLYDVDSVQRIFDHXLGTDQIMT

SEQ ID NO: 21332 - protein, 532 aa, Rhodopseudomonas palustris CGA009
MSRERLYLYDTTLRDGAQTNGVDFTLHDKKLIASLLDDLGIDYVEGGYPGANPLDTEFFGTEQKLERATFAAFGMTRRPGRSASNDPGIAMLIDAKADAICFVAKSSEYQVRVALETTNEENIASIRDSVSLAKDKGREVLVDCEHFFDGYKANPEFALQCAKAAYESGARWVVLCDTNGGTMPDEVEAIVGEVVKHIPGAHVGIHAHNDTEQAVANSFAAVRAGARQIQGTLNGLGERCGNANLCSMIPTLKLKKEFADKFEIGVSDDKLASLVQVSRALDNILDRAPNPHAPYVGGSAFVTKTGIHASAVLKDPQTYEHVPPESIGNHRKVLVSDQAGKSNVLAELARTNIQFDRDDPRLSRLVEKLKEREAAGYAYESANASFDLLARSTLGTVPEFFRVDKFDVNVEQRYNSHGQRVTVAMAVIKVEVDGETLISAAEGNGPVNALDVALRKDLGKYQKYIEGLKLVDYRVRILNGGTEAVTRVLIESEDEDGRRWTTIGVSPNIIDASFQALMDSVVYKLVQSNAPV

SEQ ID NO: 21333 - protein, 118 aa, Brassica napus
MAGLMKLACLIFACMIVAGPITSNAALSCGTVSGYVAPCIGYLAQNAPALPRACCSGVTSLNNLARTTPDRQQACRCLVGAANALPTINAARAAGLPKACGVNIPYKISKTTNCNSVK

SEQ ID NO: 21334 - protein, 552 aa, Buchnera aphidicola str. Bp (Baizongia pistaciae)
MKKINPNNTESWKMLQNHFYEIKSFHIKELFKKDKNRFKKFSLKFDNRILVDYSKNRITSFTIKLLLKLANEMDLNNSIKSMFSGKIINETENRAVLHTALRNRSNSSIIHNGCNIMFDINKVLEKMKHFSNLVINRKWLGYTGKYITDIVNIGIGGSDLGPKMVIKALNSYRNHLNIHFVSNVDGANIFNVLKKLNPESTLFIIVSKTFTTQETIVNANTAKKWMLNAVNKNEFLDQHFIAVTTNAQEAMNFGIRYKNIFLFWDWVGGRFSLWSSVGLSIVLAVGFKNFEQLLDGAYMMDQHYLHTKFDNNIPVLLALIGVWYNNFFKSETEAIFFYDWNMNYFSSFLQQMNMESNGKNICRSGEFVNWQTGPIIWGEPGTNGQHAFYQLLHQGTKLIPSDFIISIIPKHPFKDHHKYLLSHFFAQTQALAFGKFNQKCNVHINDKKTFDERLSSISFHKVCKGNQPSNSIVLDQLNPYNLGILIALYEHKVFTQGVIFNIFSFDQWGVELGKLLAKEIFLNMNTTGSKNYEYDSSTNGLINFYKIHSNNT

SEQ ID NO: 21335 - protein, 276 aa, Magnetospirillum magnetotacticum MS-1
MSGLCLPAFEAAHLEPFSPFGFSKSVQADGVERGIMAAAAIIFFAFYGFDAIATAAEETRNPGRDLTIGIVGSMLACVLIYVAVAVAAVGAVAYTRFADSPEPLALILRELGRPRVAHYLAASAVIALPTVILAFFYGQSRIFFTMARDGMLPERLARVSSRGTPVRITLFTAAIVVVLAGFIPLSQLAALANAGTLAAFIAVAACMLVMRARAPDAPRTFRAPAPWVIGPVTILGCGYLFFSLPSQTQFWFVIWNALGVAFYLLYGRRRAGIADV

SEQ ID NO: 21336 - protein, 846 aa, Psychrobacter arcticus 273-4
MVKIREGLPLVDGQTTQADSATLAAQLVANQRSHQSANSYAQIPLDIKYQLATRKLHTTFDRSVNYAYYSHDSNLENDYLRDKILDESEAFSQQELEALDLDHINIDVPTWLDNVAKRIGQDSVPNLSAACAFIRKHMNTSASERSGAYVTGIGMTDILTYLYQDEDALVAAMLYRSARQSIISLNDIEKKFGADISTLVKDTLAMGQLSEIIESNKRLEDHFVNNQRDQLSNIYSMLISVTNDVRVVLIKLSERTFAMRELTFSNEDRQTRVAREVMTIYAPLAHRLGIAQLKWELEDLAFRYLAPDRYKEIAKLLSEKRSERESYIQRVQDRLNESLAESGIEGEVSGRVKHIYSIYRKMKLKGLSFDQLYDIRALRVLVTTPSDCYHVLGLVHGLWRYIPEQFDDYITNPKSNGYRSLHTAVIAENKSLEVQIRTQEMHFEAELGMCAHVNYKEGLKNKKDNYLNQRISSLRQLLSINNQPRSSLSTGDELEETEFDDEEQLVDFDELERIYIFSRDGDITELPKGATVLDFAYYVHTQVGNRAQAARVNQRYVPLTYQLKTGEQVEIITKSSREPNRDWLVASLGYIHTNRARSKLRQWFNKQDRDKNIEIGRQMLSKELERLSVHPNSIDLNDYTQHFNVNNTDDIVVGLVTGEIGLNQLTSHISRQLHLEPERSEEDFAPTIDKRESGKLDAYKIQIDGLDNIEVGLAGCCHPVHGEPIAGYITLSRGVSVHNRGCPEYLRLIERDPEREIKAAWKIKSGRYQPVDIHIEAYDRRGLLRDLTQIIDKENVNIRQVQTLSNDDNIAFLKFHIEVSGLAHLSKLLAKLEQQHGILHARRAVA

SEQ ID NO: 21337 - protein, 313 aa, Silicibacter sp. TM1040
MSDTRHTKVLIIGSGPAGYTAAVYASRAMLEPILVQGIEPGGQLTTTTEVENWPGHTEIQGPDLMVNMESHARAMGTEIIGDIITSLDTSSRPFVAKGDSGTTYTADAVILATGARAKWLGLPSEEKFKGFGVSACATCDGFFYRGQEIVVIGGGNTAVEEALFLTNFASKVTLIHRRDELRAEKILIDRLMKNEKIEPLWFHELDEVVGTDAPLGVEAVRVKHTKTGEITEIPAKGVFVAIGHAPATELVKDVLETHNGGYVKVKPGTTETSIPGIFAAGDLTDHKYRQAVTSAGMGCMAALDAERFLAEQE

SEQ ID NO: 21338 - protein, 506 aa, Solanum tuberosum
MKQLAALQQGRRSNSFRGSSALDSSSDGSVKSPATIFWLVLHGVCCLISLVLGFRFSRLVFFLLFTNSSSTPNSIYSATSLFHDPGADVAVKTEMTSFSGGEDQLNRTSVSSSRVVVGRHGILIRPWPHPNASEVMQAHKIMEIVQREQRLQYGVKSPRTVIAVTPTYVRTFQTLHLTGVMHSLMNVPYNVVWIVVEAGSTTNETTSLIAKSGLKTGHIGLREKMPILWEDRHKLEAKMRLRALRYVREEKLDGIVIFADDSNMHSLEIFDEIQKVKWIGALSVGILAHSGGVEEEISTVQKEEDKNLQLPVQGPACNSSDHFVGWHTFDSSQYVEKSARYIGDRAVVLPRKLEWAGFVLNSRLVWKDAEDKPEWVKDLDDVMGDREDVENPLSLLKDLSMVEPLGSCGRKIMLWWLRVEARADSKFPARWIIDPPLDVTVPAKRTPWPDVPPELPSGEKLVTMQEHTEKRPPKTRSRKRSSRGKRKHAAKNIDDHHSTRQSAENQ

SEQ ID NO: 21339 - protein, 339 aa, Flammulina velutipes
MAVKVGINGFGRIGRIVLRNALQVGGIEVVAVNDPFIDLEYMVYMFKYDSVHGRFKDDVHTKDGKLFIAGKPIAVFNERDPANIPWSSAGAEYIVESTGVFTTIDKASAHLKGGAKKVIISAPSADAPMFVCGVNLDKYDPKFKVISNASCTTNCLAPIAKVMHDKFGIVEALMSTIHASTATQKTVDGPSNKDWRGGRAVNNNIIPSSTGAAKAVGKVIPSLNGKLTGLAFRVPTLDVSVVDLVCRTEKSATYEEIKAAMKEASEGSLKDILGYTEDSVVSTDFVSDNRSSIFDAAAGIQLNGNFVKIIAWYDNEWGYSRRVCDLLVYAAQQDAKAQV

SEQ ID NO: 21340 - protein, 155 aa, Cytophaga hutchinsonii
MDNWIAIAAVILVTFLSMEFVAWFAHKYIMHGFLWKLHKDHHQPDPETPVEHNDFFFVIFATPAIILFIIGIKDFTVSFWIAVGITTYGLSYFFIHDLFIHQRIKVLRNADSVYFRAIRKAHKIHHKHLEKEDGECFGMLLVPFKYFKEARKNVR

SEQ ID NO: 21341 - protein, 537 aa, Oryza sativa
  misc_feature (28)..(28): Xaa can be any naturally occurring amino acid
MAVALRFAAVARDSPAAAAPPRVGREQXAAVVLNKDDAASVAAAAASSATGFTVAMKFGGSSVASAERMREVADLILSFPEETPVVVLSAMGKTTNNLLLAGEKAVSCGAPKASEIPELAVIKELHVRTIDELGLDRSIVSGLLEELEQLLKGVAMMKELTPRTRDYLVSFGECMSTRIFAAYLNKLGKKARQYDAFDIGFITTDDFTNADILEATYPAVAKRLQGDWIDDPAIPIVTGFLGKGWKSCAVTTLGRGGSDLTATTIGKALGLREIQVWKDVDGVLTCDPNICANAIPVPYLTFEEAAELAYFGAQVLHPQSMRPAKEGDIPVRVKNSYNRRAPGTVITKTRDLSKSILTSIVLKSNITMLDIVSTRMLGQYGFLAKVFSIFEDLGISVDCVATSEVSISLTLDPSKLWCRELIQQELDHVVEELEKIAVVHLLQHRSIISLIGNVQRSSLILEKAFNVLRRNGVNVQMISQGASKVNISLVVHDSEAKQCIQALHSAFFENGFLSEVEEEDLQHNGSPVSPNGVIYGN

SEQ ID NO: 21342 - protein, 489 aa, Burkholderia mallei ATCC 23344
MSVYGLQRLYIAGAHADATSGKTFDTFDPATGELLARVQQASADDVDRAVASAREGQREWAAMTAMQRSRILRRAVELLRERNDALAELEMRDTGKPIAETRAVDIVTGADVIEYYAGLATAIEGLQVPLRPESFVYTRREPLGVCAGIGAWNYPIQIACWKSAPALAAGNAMIFKPSEVTPLSALKLAEIYTEAGVPAGVFNVVQGDGSVGALLSAHPGIAKVSFTGGVETGKKVMSLAGASSLKEVTMELGGKSPLIVFDDADLDRAADIAVTANFFSAGQVCTNGTRVFVQQAVKDAFVERVLARVARIRAGKPSDPDTNFGPLASAAQLDKVLGYIDSGKAEGAKLLAGGARLVNDHFASGQYVAPTVFGDCRDDMRIVREEIFGPVMSILSFETEDEAIARANATDYGLAAGVVTENLSRAHRAIHRLEAGICWINTWGESPAEMPVGGYKQSGVGRENGITTLEHYTRIKSVQVELGRYQPVF

SEQ ID NO: 21343 - protein, 578 aa, Triticum aestivum
MGGGNGIVDGFRRLFHRRTPSGSVLGSSNQSSAGEDSSDVEAVEDLDLVGLRPIRVPKRKMPLPVESHKKNIMEKEFFTEYGEASQYQIQEVVGKGSYGVVAAAIDTRTGERVAIKKINDVFEHVSDATRILREVKLLRLLRHPDVVEIKHIMLPPSRKEFQDIYVVFELMESDLHHVIRANDDLTAEHYQFFLYQLLRALKYIHGANVFHRDLKPKNILANADCKLKICDFGLARVSFNDAPSAIFWTDYVATRWYRAPELCGSFFSKYTPAIDIWSIGCIFAELLTGRPLFPGKNVVHQLDIITDLLGTPSSETLSRIRNEKARRYLSCMRKKHPVPLTQKFPNADPLAVRLLGRLLAFDPKDRPSAEEALADPYFASLANVEREPSRHPISKLEFEFERRKVTKDDVRELIYREILEYHPQMLEEYMKGGDQISFLYPSGVDRFKRQFAHLEEHYSKGERGSPLQRKHASLPRQRVGASNDGNNEQHISDQEMSAEPDAHGTVSPQKSQDAPSVGPNGLSPTSLSSRTYLKSASISASKCVVVNPNKQPEYDDAISEETEGAVDGLSEKVSKMHA

SEQ ID NO: 21344 - protein, 550 aa, Vibrio parahaemolyticus RIMD 2210633
MLKNINPTQTQAWKALTAHFESAQDMDLKELFAQDAARFDKYSARFGSDILVDYSKNLINEETLKHLFALANETELKSAIEAMFSGEAINQTEGRAVLHTALRNRTNTPVMVDGEDVMPAVNAVLEKMKSFTDRVIGGEWKGYTGKAITDIVNIGIGGSDLGPYMVTEALAPYKNHLNLHFVSNVDGTHIVETLKKVNPETTLFLIASKTFTTQETMTNAHTARDWFLESAGDQAHVAKHFAALSTNATAVSEFGIDTANMFEFWDWVGGRYSLWSAIGLSIALAVGYDNFVELLDGAHEMDKHFVSTDLESNIPVILALIGIWYNNFHGAESEAILPYDQYMHRFAAYFQQGNMESNGKYVDREGNAVTYQTGPIIWGEPGTNGQHAFYQLIHQGTKLIPCDFIAPAISHNPAGDHHQKLMSNFFAQTEALAFGKSEETVKEELVKAGKNAEEVAAIAPFKVFEGNRPTNSILVKQITPRTLGNLIAMYEHKIFVQGVIWNIFSFDQWGVELGKQLANQILPELADASQINSHDSSTNGLINAFKAFKA

SEQ ID NO: 21345 - protein, 183 aa, Zea mays
  misc_feature (74)..(74): Xaa can be any naturally occurring amino acid
  misc_feature (91)..(91): Xaa can be any naturally occurring amino acid
  misc_feature (99)..(99): Xaa can be any naturally occurring amino acid
  misc_feature (102)..(102): Xaa can be any naturally occurring amino acid
  misc_feature (124)..(124): Xaa can be any naturally occurring amino acid
  misc_feature (137)..(137): Xaa can be any naturally occurring amino acid
  misc_feature (167)..(167): Xaa can be any naturally occurring amino acid
MASSMLSSAAVVTSPAQATMVAPFTGLKSSAAFPVTRKANNDITSIASNGGRVSCMKVWPPVGKKKFETLSLPXLTLPKLNWVKEVDYLLXTSGFLCVXFEXEHGFVYREHGSTPEYYDARYWXMGESFPWSGCTDXSRVEGKSKKGKAENLTPFLRIFGFQNNRQXQGIIFIRKKPTSFPGG

SEQ ID NO: 21346 - protein, 235 aa, Streptococcus pyogenes M49 591
MNVTGEEVIALAATYMTKADVAFVAKALAYATAAHFYQVRKSGEPYIVHPIQVAGILADLHLDAVTVACGFLHDVVEDTDITLDEIEADFGQDARDIVDGVTKLGKVEYKSHEEQLAENHRKMLMAMSKDIRVILVKLADRLHNMRTLKHLRKDKQERISRETMEIYAPLAHRLGISRIKWELEDLAFRYLNETEFYKISHMMKEKRREREALVEAIVSKVKTYTTQQGLFGDVY

SEQ ID NO: 21347 - protein, 161 aa, Triticum aestivum
  misc_feature (106)..(106): Xaa can be any naturally occurring amino acid
LAGSADFFRDIVAGPFDKFTQVTLVDTLTGQEYSDKVTENCVNIWKSSEHYSVDEGHGSAATSELKAIFYPASFPTGSTIFFTHSADGVLQASTSNTHTNFNFIAXVAFSDDTKVPEQESARVDSRALSEAVLESIIGDNGVSPSARRSLAFRLCDLINHK

SEQ ID NO: 21348 - protein, 321 aa, Magnaporthe grisea 70-15
MAYGAKTTGSAIVGDYASQIANKTILTTGVSPTTLGAAFVTTIATASPALLILAGRNLAKAEETAEAIRAVAPQVPIRTLELDLADKQSVRKAAATVLAWDDVAGIDVLVNNAAIITDEYGTIEGIERVFAVNHLGPFLFTNLVLPKVLAVKGRVVNVASEGHRFSNVRFMDLNFEDGKIYNKWRAYGQSKTANMLFSLSLARKLGSRGLVANSPHPGTIITPLSEGMDLALEYELTRPYDQFVGYYPKERGVIKTLDEGISTHIYAAFEPSLKDHNGTFLLDCHVADPNVDFVMSWAASEVEAEKLWKLSEELVGEKFEW

SEQ ID NO: 21349 - protein, 394 aa, Legionella pneumophila str. Lens
MHLKRTLSLTLLAFYGLGTILGAGIYALVGEVAKEAAQFTPLSFLIASIIAFFTAISYAELSSRLPLSAGSALYVRRAFQQRWLSGLIGWIVVLTGVISAATLSHGFVKYFQLFLPLPPSLIITILVVILAGVAVWGIRESATLILFMTLMEVGGLLMIIYYGRYSLASIDIQSFSFPHSFDGVLIGAFIAFYAFIGFEDMVNTAEETINPEKTLPKAIFLALISATILYVVVAWVIVSTIPSHTLVKTDMPLIEIIKLQGQSPLLFSIIALISITNGILVQIIMASRLIYGMANQQNAPQIFSFVYSKTQTPANSTLLVSLIILLFAYALPITTLAKLTSSIILCIFIIIHASLIKIKLTEKKSPEAISFPIVFPMISILLTLTFLGIQFFLK

SEQ ID NO: 21350 - protein, 335 aa, Schizosaccharomyces pombe
MQQTYKPNTSALKDGAPKATVDQKQLLPCKYRVGRVLGGGTYATVREAVHIETNKMYAAKIMNKKMMEKKQDFVKNEIAILKRVSYEHPNILHLVDFFETVNNLYLITELATGGELFDRICAKGSFYEADAAALMRTTTSAVKYLHDNGIVHRDLKPENLLYRSKDPNSDLLIADFGLSHFYEDSQYYMLMTACGTPEYMAPEVFRRTGYGKPVDMWAIGVITYFLLSGYTPFARPSQVEVIEAILANEYTFNDPCWSGISETAKDFIKKCLENDPSKRLTAADALKHPFLSEKRPATSNLLPNVRENFNARKTFRTAYNAVRAFNTWKKLENKH

SEQ ID NO: 21351 - protein, 1088 aa, Burkholderia thailandensis E264
MVARASRATARLAGCASGPHGLRQDPERSFGSRRHPASASGSGPPPPHRSPRRPVSSTDAPARAVQRAPPHRLIALAVAGPQFPFTRAFPRKSIVKSSGSARATRRNAVSSSSAPANAELPARRAAKTARKPNGAAARTIAPTNAASAKPHGRTREDKDRPLFEDIRYLGRLLGDVVREQEGDAVFDVVETIRQTAVKFRREDDKTAAQTLEKMLRKLTPEQTVSVVRAFSYFSHLANIAEDRHHNRRRRIHALAGSAPQAGTVAYALDKLRQAGDASSKTIKQFFEGALIVPVLTAHPTEVQRKSILDAQHDIARLLAERDQPLTARERAHNEALLRARVTTLWQTRMLRDARLTVADEIENALSYYRATFLDELPALYTDIEEALAEHGLPARVPAFFQMGSWIGGDRDGNPNVTAATLDEAINRQAAVIFEHYLEQVHKLGAELSVSNLLVGASDALKALAAASPDQSPHRVDEPYRRALIGVYTRLAASARVRLGEGAVPVRSAGRGAAPVRATPYADAEEFVADLRVLTDSLAVHHGESLATPRLAPLMRAAEVYGFHLASIDLRQSSDIHEAVIAELLARGGVEPDYAALPEADKLRVLLAALADPRPLRSPYLDYSDLAKSELGVLERAHAIRAQFGARAVRNYIISHTETVSDLVEVLLLQKETGLFEGTLGAPHANARNGLMVIPLFETIADLRNASDIMREFFALPGVGELLAHQGHEQEVMLGYSDSNKDGGFLTSNWELYRAELALVDLFHERGIKLRLFHGRGGTVGRGGGPTYQAILSQPPGTVNGQIRLTEQGEVIASKFANPEIGRRNLETVVAATLEATLAPHSNAPKQLPAFEAAMQTLSDAAMASYRALVYETPGFTDYFFSSTPITEIAELNIGSRPASRKLQDPKHRKIEDLRAIPWGFSWGQCRLLLTGWYGFGGAVAAYLDGAPDAAERGKRVALLRKMNKTWPFFANLLSNMDMVLAKTDLAVASRYAQLVADKKLRKHVFERIVAEWHRTASALAEITGAQARLAANPLLARSIKNRFPYLDPLNHLQVELIKRHRAGDTNARLRRGIHLTINGIAAGLRNTG

SEQ ID NO: 21352 - protein, 158 aa, Brassica napus
  misc_feature (12)..(12): Xaa can be any naturally occurring amino acid
  misc_feature (14)..(16): Xaa can be any naturally occurring amino acid
  misc_feature (19)..(19): Xaa can be any naturally occurring amino acid
  misc_feature (21)..(22): Xaa can be any naturally occurring amino acid
  misc_feature (26)..(26): Xaa can be any naturally occurring amino acid
  misc_feature (32)..(32): Xaa can be any naturally occurring amino acid
  misc_feature (35)..(35): Xaa can be any naturally occurring amino acid
  misc_feature (50)..(50): Xaa can be any naturally occurring amino acid
  misc_feature (54)..(55): Xaa can be any naturally occurring amino acid
  misc_feature (57)..(57): Xaa can be any naturally occurring amino acid
  misc_feature (60)..(62): Xaa can be any naturally occurring amino acid
  misc_feature (65)..(65): Xaa can be any naturally occurring amino acid
  misc_feature (92)..(92): Xaa can be any naturally occurring amino acid
  misc_feature (94)..(94): Xaa can be any naturally occurring amino acid
  misc_feature (100)..(100): Xaa can be any naturally occurring amino acid
  misc_feature (105)..(105): Xaa can be any naturally occurring amino acid
  misc_feature (114)..(115): Xaa can be any naturally occurring amino acid
  misc_feature (118)..(118): Xaa can be any naturally occurring amino acid
  misc_feature (121)..(121): Xaa can be any naturally occurring amino acid
  misc_feature (126)..(126): Xaa can be any naturally occurring amino acid
  misc_feature (137)..(140): Xaa can be any naturally occurring amino acid
  misc_feature (144)..(144): Xaa can be any naturally occurring amino acid
  misc_feature (149)..(149): Xaa can be any naturally occurring amino acid
MVSSMLSSAAVXTXXXQDXMXXPFTXLKSSAXFPXTRKANNDITSIASPXGRVXXMXVGXXXGKXKFETLSYLPDLTEVELYKEVDYLLRNXWXPCDEFXLQNGXVYREHGSTXXYYXGRXYWTMXKLPLVACADSXXXXNESXECKTXYPNAFIKII

SEQ ID NO: 21353 - protein, 427 aa, Burkholderia xenovorans LB400
MAIVEVKVPQLSESVSEATMLQWKKKPGEAVAQDEILIEIETDKVVLEVPAPSAGVLAQVIANDGDTVTADQVIAKIDTEGTASAAAVEAEVKPAPQAAPAPAAAPAPAAQAASATGANTAASPAAGKLMAEKGLGAGDVAGTGRDGRITKGDVLTAGAPAAKAAAPAPAAAPKAAKPSLPDVKAPASAEQWLKDRPEQRVPMSRLRARIAERLLESQQTNAILTTFNEVNMAPVMDLRNKYKDKFEKEHGVKLGFMSFFVKAAVHALKKFPLVNASIDGNDIVYHGYFDIGIAVGSPRGLVVPILRNADQLSLAEIEKKIAEFGQKAKDGKLSIEEMTGGTFSISNGGVFGSMLSTPIINPPQSAILGVHATKERAVVENGQIVIRPMNYLALSYDHRIIDGREAVLSLVAMKDALEDPARLLLDL

SEQ ID NO: 21354 - protein, 349 aa, Bacillus licheniformis ATCC 14580
MSRNELFDVTVIGGGPAGLYSAFYSGLRGMKAKIIEYQPMLGGKVHVYPEKMIWDVGGLTPISGAKLIEQLVQQGLTFHPEVLLNEKVESIARNEEGLFELHTAASGVHLSKTVIVAVGGGILNPQKLQIEGAERFEVSNLNYTVKSLQHFKDKTVIVSGGGNSAVDWANELEPVAKKVYLAYRKDALSGHEAQVDQLLNSSVSCFFHTEITKLIASEDHEVIERVELTNAQTGEVMELPVDEVVINHGYERDTSLLENSRLDVTRVDDYYIAGTSNCQSSVPGLYAAGDIVHYEGKLHLIAGAFQDAANAVNSAKRFIDPEAHKSAMVSSHNEVFKERNRELVKKMFV

SEQ ID NO: 21355 - protein, 116 aa, Helianthus annuus
MAKMAMMVLCAGVTCMVVGAPYTEALSCGQVSSRLAPCISYLTKGGAVPPACCSGVKSLNSAAKTTPDRQAACGCLKSAYNSISGVNAGNAASFPGKCGVSIPYKISPSTDCSKVQ

SEQ ID NO: 21356 - protein, 106 aa, Populus tomentosa
MAKLVAVFLLALIAISMLQTLVVASHGRGGHHQNKNQYGPGSLKSFQCPSQCTRRCSKTQYHKPCMFFCQKCCRKCLCVPPGYYGNKAVCPCYNNWKTKEGGPKCP

SEQ ID NO: 21357 - protein, 343 aa, Bartonella henselae str. Houston-1
MNERLEDIALTLVGAGKGILAADESTATIGKRFESIGVECTEDNRRAYREMLFTAKEAMESAISGVILFDETLRQKASTGQMLTDLIRDAGAVPGIKVDTGAKPLAAFPQETITEGLDGLRERLKDYYTLGARFAKWRAVIAIDAQTLPTRGAISQNAQALARYAALCQEAGLVPIVEPEVLMDGPSRQHSITRCFEVTKVVLHTVFKELFEARVLFEGMILKPNMVIDGKDARIASVEEVAEKTVHVLKQTVPAAVPGIAFLSGGQTDEEATAHLSAMNALGALPWKLTFSYGRALQAAALKAWAGKNENIVVAQKAFCHRARMNHLAALGQWTKDQEKSCA

SEQ ID NO: 21358 - protein, 379 aa, Anabaena sp.
MNKVLINDTTLRDGEQAAGVVFTLEEKVAIAKFLDTIGVPELEVGIPAMGEEEMRAICAISNLGLKANLLAWNRAVISDIKASVACGMERVHIAIPVSDVKAKFHGQWRVSLPKTQRLYHFAVDQGLWVAVGGEDSSRADENFLLDVALYAQEWGASRFRFCDTVGVLDPFTTYGKVKLLVSALTIPVEVHTHNDFGMATLNALAGIKAGASSVNTTVIGLGERAGNAALEEVVMAIKRIYGVDMGIDTPRLLELSQLVAAAPVLMSHLGRRSLVKIPLLTNQVFMHMVYCKILIPMNHSHLKRSVGNARLVVGKHSGRHSVSNLLEQHGIFLNPEETQSVLDAVRLQSIKKKRQFDYRRTVELGQRTEVFSCSAMKTS

SEQ ID NO: 21359 - protein, 335 aa, Bartonella henselae str. Houston-1
MSVRVAINGFGRIGRNILRAIIESGRQDIEVVALNDLGSVETNAHLLRYDSVHGCFPGTVQVVGDAIDIGSSLIKVFAERDPAQLPWKALDIDIALECTGIFTARDKASAHLDAGAKRVLVSAPSEGADLTVVYGVNHQFLSKEHHVISNASCTTNCLAPVAQVLHNTVGIEKGFMTTIHSYTGDQPVLDTMHRDLYRARAAALSMIPTSTGAAKAVGLVLPELKGLLDGVSIRVPTPNVSVVDLTFTAKRSTTIEEINTAIRTAAQGSLKGILDYTDEKLVSCDFNHNPHSAIFHNDQTKVIDGQLCRVLVWYDNEWGFSNRMCDTAVAFAKTI

SEQ ID NO: 21360 - protein, 212 aa, Ananas comosus
AVPQSIDWRDYGAVTSVKNQNPCGACWAFAAIATVESIYKIKKGILEPLSEQQVLDCAKGYGCKGGWEFRAFEFIISNKGVASGAIYPYKAAKGTCKTDGVPNSAYITGYARVPRNNESSMMYAVSKQPITVAVDANANFQYYKSGVFNGPCGTSLNHAVTAIGYGQDSIIYPKKWGAKWGEAGYIRMARDVSSSSGICGIAIDPLYPTLEE

SEQ ID NO: 21361 - protein, 437 aa, Brassica napus var. napus
  misc_feature (150)..(150): Xaa can be any naturally occurring amino acid
  misc_feature (208)..(208): Xaa can be any naturally occurring amino acid
MKGVRKTYDNSYTLSSLFVFFVLIILRPIFSTTTLSSTESLTISSNRTLVSPGNIFELGFFNTTSSSRWYLGIWYKKISERSYVWVANRDNPLSNAAGTLKISGNNLVLLGHSNRSVWSTNLTRENERSPVVAELLANGNFVMRDTNTTXSSRFLWQSFDYPTDTLLPEMKLGYEPKTGLNRFLTSWRSSDNPSSGDFSYKLEARRLXELYLSSGIFRVHRSGPWNGIRFSGIPDDKKLSYLVYNFTENSEEVAYTFLMTNKSIYSRLTVSFSGYLERQTWNPTLGMWNVSWSLPFDSQCDSYRMCGPYSYCDVNTSPICNCIQGFIPSNVEQWDQRVWANGCIRRTRLSCSGDGFIRMKNMKLPETTMATVDRSIGVKECEKKCLSDCNCTAFANADIRNGWTGCVFWTGRLDDMQNYVTDHGQDLYVRLAAADLV

SEQ ID NO: 21362 - protein, 409 aa, Methylococcus capsulatus str. Bath
MALFVHKYGGTSVGSPERIKNVAKNVIRARSRGDDIIVVVSAMSGETNRLVALAHEMHERPSTREMDVLLATGEQVTIALLSMALEAAGCPACSYTGGQVRILTDDAHTKARILDIDTDRIRSDLAAGRVVVVAGFQGITEAGDITTLGRGGSDTTAVALAAALKADECLIYTDVDGVYTTDPRIEPKARRLDRITFEEMLEMASLGSKVLQIRSVEFAGKYNVPLRVLSSFAAGPGTLITYEEASVEKPLISGIAFNRDEAKLTVKGVPDKPGVAYQILGPVAHANIEVDMIVQNVAEDATTDFTFTVHRNDYRKALDILQATCTALGAREVTGDDKIVKVSLVGVGMRSHAGIAARMFEALAREGINIRMISTSEIKISIVVDEKYLELAVRTLHEAFNLDREPDAV

SEQ ID NO: 21363 - protein, 264 aa, Oceanospirillum sp. MED92
GVQQRIDSGKKAPCLAVILVGLDPASQVYVRNKKNACQEVGFESRSFDLPAETTQDELLNLVDELNNDASVNGILVQLPLPEHLDGNEILERIRPDKDVDGFHAFNLGRLAQRLPVLRPCTPKGVMTLLNSTGRDMHGLEAVVVGASNIVGRPMTLELLLAGCTVTTTHRFTKDLEAHVRRADLVVVGVGIPGLVKGEWIKEGAIVIDVGINRLDDGRLVGDVGYDEAEKRADFITPVPGGVGPMTVATLMENTLEAANKQDAL

SEQ ID NO: 21364 - protein, 314 aa, Gloeobacter violaceus PCC 7421
MQNVYQVPVNPGTGTPMNQGWTYCDRIGPESAGLTVLEYYLLRYRHSGDHEWQARIETGQVLLDHRSTSSTELLRSAQVLTYCRPPWQEPSVPLDIVIIYADEQVLVVAKPGGLPVLPGGGFLEHTLLWQVRRRFAGEEPPVPIHRLGRGTSGLVLLARTHSSRAALSEQMRRQRIGKLYRALASGTGMRDRFTIRQPIGKVPHPLLGTLWAAAADGLPARSDCVVLRRQCTDSLLAVAISTGRPHQIRIHLAAAGYPLVGDPLFGPGGVARLDNDASVPGDGGYFLHAHRLSFLHPTSGRRLVLECPPPPELT

SEQ ID NO: 21365 - protein, 503 aa, Tropaeolum majus
MSGTKATSVSVPLPDFKQSVNLKYVKLGYHYSITHAMYLFLTPLLLIMSAQISTFSIQDFHHLYNHLILHNLSSLILCIALLLFVLTLYFLTRPTPVYLLNFSCYKPDAIHKCDRRRFMDTIRGMGTYTEENIEFQRKVLERSGIGESSYLPPTVFKIPPRVYDAEERAEAEMLMFGAVDGLFEKISVKPNQIGVLVVNCGLFNPIPSLSSMIVNRYKMRGNVFSYNLGGMGCSAGVISIDLAKDLLQVRPNSYALVVSLECISKNLYLGEQRSMLVSNCLFRMGGAAILLSNKMSDRWRSKYRLVHTVRTHKGTEDNCFSCVTRKEDSDGKIGISLSKNLMAVAGDALKTNITTLGPLVLPMSEQLLFFATLVGKKVFKMKLQPYIPDFKLAFEHFCIHAGGRAVLDELEKNLKLSSWHMEPSRMSLYRFGNTSSSSLWYELAYSEAKGRIKKGDRVWQIAFGSGFKCNSAVWKALRNVNPAEEKNPWMDEIHLFPVEVPLN

SEQ ID NO: 21366 - protein, 315 aa, Helianthus tuberosus
MSISCSDCFSDLLCCEDSGILSGDDRPECSYDFEYSGDFDDSIAEFIEQERKFVPGIDYVERFQSQVLDASAREESVAWILKVQRFYGFQPLTAYLSVNYLDRFIYCRGFPVANGWPLQLLSVACLSLAAKMEETLIPSILDLQVEGAKYIFEPKTIRRMEFLVLSVLDWRLRSVTPFSFIGFFSHKIDPSGMYTGFLISRATQIILSNIQEASLLEYWPSCIAAATILCAASDLSKFSLINADHAESWCDGLSKEKITKCYRLVQSPKILPVHVRVMTARVSTESGDSSSSSSSPSPYKKRKLNNYSWIEEDKR

SEQ ID NO: 21367 - protein, 295 aa, Xanthomonas campestris pv. vesicatoria str. 85-10
MMQLLRDAHHDAVPLPPTEGSGAGRVARPLRSAIYTGWVRHRRFMPKALHFRYRLFLMYLDLSELDQVFARRWLWSVGRANLAQFRRSDYLGDASIPLDQAVRDCVHTHTGERPEGAIRLLTHLRYFGHVFNPVSFYYCFDRHDSLRWIVAEITNTPWQQRHTYVLPVAQARTHRDVHAWRFDKRFHVSPFMGMQQRYDWRFSVPDAQLRVHMDVLDVVGDDAGGAIDNSSTRRFDATLVLQRQPLTARNLACTLLAYPLMTVWVVIAIHWQALRLWLRGNPVHDHPHPPVREPR

SEQ ID NO: 21368 - protein, 221 aa, Brassica napus
MVTLSFPSPSLSFVESGTCSKSTHVSRVLFSGPHGESSEPSKILRDVHISERLMEDFTELARENTDKDLETCGTLAAFLERGVFYVTTLIIPKQESTANSCQAMNEVDVFSIQNERELYPVGWIHTHPSQGCFMSSVDLHTHYSYQVMVPEAFAIVVAPTDSSRSYGIFKLTDPGGMEVLRGCSETGFHPHKEPEDGKPVYEQCSNVYKNSNLRFEIFDLR

SEQ ID NO: 21369 - protein, 344 aa, Glycine max
MFFLSLPFSSCFRASQPNHDPTTLSTNLTTYIYHTEYGTVSLTWSRSMLGRSLHVNLHNHSSFHLHVKPWRKKGSKKLSHNTVFLWNLSSARFESGRPEPRSRFYLAIEVEHSLSLLVGDLSPKSKAKKPSKTQQQLLVLKRDHVHVAPHRSRVYQTKARLGGKVREIEIDCDGYNGNGGGYENENESSLRLLFGVDGEKVLEVTRLKWKFRGSERVEIDGVHVQISWDVHDWLFEKDKDNNHCSTNNNNNNNGNEGHAVFVFKFEEDEVRGGGGKEEEQQWSLGSGGEWRNGKSWSSSSLSVSSSVGSFGGSSSVMEWSSRRRMSWWFLLGFLWLFMLGEGEH

SEQ ID NO: 21370 - protein, 482 aa, Pseudomonas aeruginosa UCBPP-PA14
MSLEQTGHAPATSGVDFESVDADYFQHRQLKKGAAGWVLLVGLGVAYVISGDYAGWNFGLAQGGWGGMFLATLLMATMYLCMCFSLAELSSMIPTAGGGYGFARSAFGPWGGFLTGTAILIEYAIAPAAIACFIGAYCESLFGVGGWLIYLVFYIVFIGIHILGAGEALKLMFVITAVAAIALGVFIVAMVPHFDSANLFNIPQTAATGASSFLPFGYVGVWAAIPYAIWFFLAVEGVPLAAEETKNPKRDLPRGLIGAMLVLLAFAALILVVGPGAAGAKELMGSGNPLVEALESAYKGSTWMSQFVNLVGLAGLIASFFSIIYAYSRQIFALSRAGYLPRSLSLTNRKKAPVLALVVPGVIGFGLSLTGQGDLLILVAVFGATISYVLMMAAHITLRIRRPDMQRPYRTPGGILTSGVALALACVAVVAGFLVDPRVVVGAVAIYAVLIGYFALYSRHHLVSGTPEEEFAAIQAAEQDLR

SEQ ID NO: 21371 - protein, 319 aa, Paracoccidioides brasiliensis
MATDPSKYKFNHTMIRVKDPKRSVEFYNFLGLSQINRLDFPENKFSLYFLAYDGPQALSGSRHWTDRNGIIELTHNYGTENDPSYTVSTGNVEPHRGFGHLAISVDNVELACKRLEDANYSFQKKFAEGRMRNIAFVKDPDGYWVEIIRKHQTDAAVAQTNPSTYRMNHTMVRVKDPEASLKFYQEVFGMTLLRTLELAGADCNLYFLAYPSSNPSLKEGDANPVAEWEGLLELTWNHGTEKQEGKVYHDGNSEPQGFGHICVSVDDLDAACARFEAQNVTWKERLTDGRMKNVAVILDPDGYWIEIIQNESFKNRSHW

SEQ ID NO: 21372 - protein, 405 aa, Thermus thermophilus
MALVVQKYGGTSVGDLERIHKVAQRIAHYREKGHRLAVVVSAMGHTTDELIALAKRVNPRPPFRELDLLTTTGEQVSVALLSMQLWAMGIPAKGFVQHQIGITTDGRYGDARILEVNPARIREALDQGFVAVIAGFMGTTPEGEITTLGRGGSDTTAVAIAAALGAKECEIYTDTEGVYTTDPHLIPEARKLSVIGYDQMLEMAALGARVLHPRAVYYAKRYGVVLHVRSSFSYNPGTLVKEVAMEMDKAVTGVALDLDHAQIGLIGIPDQPGIAAKVFQALAERGIAVDMIIQGVPGHDPSRQQMAFTVKKDFAQEALEALEPVLAEIGGEAILRPDIAKVSIVGVGLASTPEVPAKMFQAVASTGANIEMIATSEVRISVIIPAEYAEAALRAVHQAFELDKA

SEQ ID NO: 21373 - protein, 403 aa, Methanocaldococcus jannaschii DSM 2661
MGIDLTLTYWFARLLCVIYEKWEMIYKFNIRNLRMIIMKLVKDALSRSDTTRYLKDEFGEARIVVVGCGGAGNNTINRLMEIGIQGAETIAINTDKQHLEVIQADKKILIGATLTRGLGAGGYPEIGRKAAEMAKNILEEQLKGADLVFVTAGMGGGTGTGSAPVVAEVAKENGAIVVGVVTYPFKIERARMKKADEGIARMSEVCDTVIIIDNNKLLDLVPNLPINDAFKVADEIIAQAVKGITETIAVPSLINIDFADVKAVMSGGGVAMIGVGEVDSSDRGDRVQNVVRETLSCPLLDVDYRGAKGALIHITGGPDLTLKEANDIGEGITKELDPEANVIWGARIDPEMEGCIRVMAIITGVKSPNIVGKDTKPKRIIPKVSKEQSQRKERKIGGIDFIV

SEQ ID NO: 21374 - protein, 260 aa, Bacillus licheniformis ATCC 14580
MEPNVLYSINEQSVAVLTLNRPQAANALSLGLLDDFQRILRDIRSNPAVRCVIITGKGDRTFCAGADLKERARMSQTEAKQAVSLIQRVVSETEKLPQPVIASLNGSALGGGLELALACDIRIAAEHIELGLPETTLAIIPGAGGTQRLPRLIGRGKAKEMIFTGCRISAEEAQKISLVEHVVPLSKLKEASESIAANIAANGPVAVRQAKFAINQGLETAIETGLAIEQKAYELTIPTKDRTEGLKAFAEKRKPDYTGE

SEQ ID NO: 21375 - protein, 382 aa, Solanum tuberosum
MASEVHAVVDAHSPPKTPTVCVTGAAGFIGSWLVMRLLERGYNVHATVRDPENQKKVKHLLELPKADTNLTLWKADLAVEGSFDEAIQGCQGVFHVATPMDFESKDPENEVIKPTVRGVLSIIESCAKANTVKRLVFTSSAGALDVQEDQKLFCDETSWSDLDFIYAKKMTGWMYFVSKILAEKAAMEEAKKNNIDLISIIPPLVVGPFITPTFPPSLITALSLITGNEAHYGIIKQGQYVHLDDLCEAHIFLYEHPKAEGRFICSSHHAIIYDVAKMVRQKWPEYYVPTEFKGIDKDLPIVSFSSKKLMDMGFLFKYTLEDMYKGAIETCRQKQLLPFSTQSTADNGRDKEAIPIPTENYSSGKENAPVANCTGKLTNGEI

SEQ ID NO: 21376 - protein, 382 aa, Solanum tuberosum
MASEVHSVVDAHSPPKTPTVCVTGAAGFIGSWLVMRLLERGYNVHATVRDPENQKKVKHLLELPKADTNLTLWKADLAVEGSFDEAIQGCQGVFHVATPMDFESKDPENEVIKPTVRGMLSIIESCAKANTVKRLVFTSSAGTLDVQEDQKLFYDETSWSDLDFIYAKKMTGWMYFVSKILAEKAAMKEAKKNNINFISIIPPLVVGPFITPTFPPSLITALSLITGNEAHYGIIKQGQYVHLDDLCEAHIFLYEHPKAEGRFICSSHHAIIYDVAKMVRQKWPEYYVPTEFKGIDKDLPIVSFSSKKLMDMGFQFKYTLEDMYKGAIETCRQKQLLPFSTRSSADNGKDKEAIPISTENYSSGKENAPVANCTGKFTNGEI

SEQ ID NO: 21377 - protein, 433 aa, Listeria monocytogenes str. 1/2a F6854
MAQNMTIKDDFIHAFSSNANEPDWFLEIRRNAFKTYGELDLPFVDKTKITRWNFTKFETFIPFKEGVTNETLPEKVANLVDLDNKEANFYVQMDERPARLQLQQELVEQGVIFTDIISAVKNHPELVKKYFMKDAVQVNEHKLTAFHAALVNGGIFLYVPKNVEVKSPIQAVFVQDKAESPLVNHVLLVADDNSAVTYVENYVTVNNEPKGIVSIVEEVIAEKNARITFGGVDNLASEVTAYVNRRGHIGTDSQIEWALGLMNDGDTINENVTNLMGDGSSADVKTVTVGRGKQTQNVTTRVTHYGKASNGTILSHGVMKERATTIFNGIGHIKHGASKSDAQQESRVLMLSPEARGDANPILLIDENDVVAGHAASVGRVDPLQLFYLMSRGISQKEAERLVIHGFLDPVVRQLPIESVKTMLREVIEGKVR

SEQ ID NO: 21378 - protein, 173 aa, Vibrio vulnificus YJ016
MEYNTSALCDIYMDQVDVVEPMFSNFGGRASFAGQITTVKCFEDNALIRETLEQDGVGRVLLVDGGGSLRRALLDGELAAIAEENEWEGIVVYGCVREVDELEDMNIGIQALASIPVSAAMQGVGEVDVPVNFGGVTFLPEDYLYADTTGIILSQEPLSADLEEDEEEPELLD

SEQ ID NO: 21379 - protein, 439 aa, Acidobacteria bacterium Ellin345
MPLLRTLTLRDVVLLIVGTVIGSGIFLVPGPVLRNVHNRVDLALAVWLLGGLLSLMGALTYGELGAMKPQAGGLYVYLRDCFGRPLAFLYGWALFFMMSSGSVATLAVAFSTYLRQIVPLNDIEAKIVASAMIVVVGVINVIGTRKSANVQNVATALKVAAILAMTVVLFALGGHSSATVTATTTQTGTLYSGFGLAMISVLWAYEGWQYCTFSAGEIADPQKTFPRALLVGSLVLVSVYVLANLGYLAALGAGGAAASNRVASDAIGAVLGPGFAKLISLAILVSMFSAANGLILTSPRVYYAMAQDGVFFRKLAEVHPRYQTPAFAVIAGCAWSIVLAVSGTFEQLLTYVIFTGWIFYAFGALAVFVYRRREPDAERPYRVPGYPVTPILFVLAATALVVNTVIAQPARAAVGLGLVLAGAPVYFIWNARSKRQAKD

SEQ ID NO: 21380 - protein, 277 aa, Zea mays
  misc_feature (255)..(255): Xaa can be any naturally occurring amino acid
  misc_feature (262)..(262): Xaa can be any naturally occurring amino acid
IGTSSRRDFTLPLNSHAVHYLTTVTLSSLIPLTWAQSSSPSNSASGTVLTSTVASRSRASAGVTSTYSQSNVPTGTPIAGNYDGAYRPQVHFSPPNGFMNDPNGMFVDDNGTYHLYYQYNPTANVAGNQHWGHATSDDLYTWVNQQIAIFPGGPTEGVFSGSAVVDVNNTSGFFANQTNGVVAIYTINVPDNQTQHIAYSRDGGYTFTKYSGNPVLKPGGINPTQFRDPKVIWYEGTQKWVMVVAYPVDFKVGIXSSPNLIXLDAESNFSHYGVTGL

SEQ ID NO: 21381 - protein, 849 aa, Brassica oleracea var. acephala
MRTVSTYYHTYTVVLMFIFLVLILFHAFPVSANTFSATESLTISSNKTILSRSEIFELGFFNPPSSSRWYLGIWYKKVSTRTYVWVANRDNPLLSSNGTLNISDSNLVIFDQSDTPVWSTNLTEGEVRSPVVAELLDNGNFVLRHLNNNNDPDGYLWQSFDFPTDTLLPEMRLGWDHKTGRDRFLRSWKTPDDPSSGDFFTKLKTKGFPEFYVCSKDSIIYRSGPWNGIRFSSSPETKPLDYIVYNFTATNEEVSYSYLITKTNIYERVRLSSAGLLERLTWIETAQSWKQLWYSPKDLCDNYKECGSYGYCDSNTSPICNCIKGFGPGNQQPWTLRDDSAGCVRKTRLSCDGRDGFVRLKKMKLPDTTATTVDRGIGLKECEERCLKDCNCTAFANTDIRNGGSGCVIWTGEIFDIKNFAKGGQDLFVRLAAADLEDKRTKKRNIILGLSIGVSILLLLSFIIFRFWKRKQKQSVAIPKPIVTSQDSLMNEVVISSKRHLSGDMKTEDLELPLMDFEAIATATHNFSSTNKLGQGGFGIVYKGRLLDGKEIAVKRLSKMSLQGTDEFKNEVRLIARLQHINLVRLLGCCVDKGEKMLIYEYLENLSLDSHLFDKSRRSNLNWQLRFDIANGIARGLLYLHQDSRFRIIHRDLKVSNILLDKNMIPKISDFGMARIFRRDETEANTRKVVGTYGYMSPEYAMNGIFSVKSDVFSFGVLLLEIISGKRSTGFYNSSGDLSLLGCVWRNWKERKGLDIIDPIIIDSLSSTFKTHEILRCIHIGLLCVQERAEDRPAMSSVMVMLGSETTTLPEPKQPAFCVGRGPLEAELSKLGDDEWTVNQITLSVIDAR

SEQ ID NO: 21382 - protein, 255 aa, Magnetospirillum magnetotacticum MS-1
MSFSVLNTARRGAVFVVTLASPPVNALSRALIKDLHGAMDVVEADKTIRVLHLRSEQKAFCAGADLSEMRENLANPDLVDTQIAFVRDLQNVLKRIETLALATVAEVGGAAMGGGLELALACDFRMAANEAKLALPEVNLGLIPGAGGTQRLTRLCGPAIAKRLILGAEILDGQSAAALGIVHWSAPRAELADKAANLADRLATLPRAAVAASKSCIEASLDPSRDGYEEELTATRDLLLHEPETRHRVEAFLSK

SEQ ID NO: 21383 - protein, 677 aa, Bacillus licheniformis ATCC 14580
MKKRMIQMGIIGAMMFPEAFSAAAADPDYYNEDHRPKYHFTPEANWMNDPNGMVYYAGEYHLFYQYHPYGLRWGPMHWGHAVSKDLVKWEHLPVALYPDEKGTIFSGSAVADRHNTTGFQTGTEKPLVAIYTQDRSGEQVQSIAYSNDKGRTWTKYSGNPVIPNPGKRDFRDPKVIWHEQTKKWVMLLAGGDRILIYTSPDLKRWTYASEFGEGEGSHGGVWECPDLFELPVEGRPNETKWVMQVSVGDGAVSGGSGMQYFVGSFDGTTFKNENPPNRVLWTDYGKDFYAAVSWSDIPKSDGRRLWLGWMSNWQYANDVPTSPWRSAMSIPREVKLKAFSEGLRMIQAPVAELQSIRGASQTWKNKIISPRNGNLLKGLSGDAYEINAEFQVNTGAAAEFGFKVRTGENEYTKIGYSKNSASLFVDRSQSGNVSFNPNFNTGKHAAPLEPVAGKVKMRIYVDRSSVEVFGNDGRQVITDIILPDQSSKGLEVYASNGFVKLNSMTVHPLKKVWGASPFQSNLTGWTTVNGVWADTIDGKQGRSEGDSFILSSAKATDFTYEADVAIKDGNGRGAGALVFRADQDVKNGYLANVDAKHDVVKFFKFEDGSASVIAEHRTPIETGRKYHLKTVARGANFYIYLDDQLVISARDSTFADGAFGLNAWDATAVFQHVYAKR

SEQ ID NO: 21384 - protein, 426 aa, Rhodopseudomonas palustris CGA009
MTVTRDKFGRPIVVVTGMGVVTSLGAGKNDNWAKLTAGESGIRTITRFPIDGLKSTMAGTVDFVPVEPFSSVVLGEKLADLATEEAIAQSGIGRKGDFPGPLFLAVAPVELEWLPRQELARATGANTAIDYDALLRVSGGGTFTQYHRRFLFGSVADHLADTFGTKGSPISLSTACASGASAIQLGVEAIRRGEADAALCVATDGSVNAEALIRFSLLSALSTQNDPPQASSKPFAKNRDGFVMAEGAGALVLESYESAVARGASILGVIAGCGELADNFHRTRSSPDGKPIIGCINKTLADAGMSVDQIDYINAHGTGTPENDKMEYLGISSVFGERASSLPVSSNKSMVGHTLSAAGAVEAIFSLLTLEHQRIPPTINYDVPDPAIPLDVVPNQARDARVTAVMSNSFGFGGQNASLILTREPA

SEQ ID NO: 21385 - protein, 309 aa, Tagetes erecta
MAAAIAVPCSSRPFGLGRMRLLGHKPTTITCHFPFSFSIKSFTPIVRGRRCTVCFVAGGDSNSNSNNNSDSNSNNPGLDLNPAVMNRNRLVEEKMERKKSERFTYLVAAIMSTFGITSMAVMAVYYRFSWQMEGGEIPYVEMFGTFALSVGAAVGMEYWARWAHEALWHASLWHMHESHHKPREGPFELNDVFAITNAVPAIALLSYGFFHKGIIPGLCFGAGLGITVFGMAYMFVHDGLVHRRFQVGPIANVPYLRRVAAAHQLHHTEKFNGVPYGLFLGPKELEEVGGTEELDKEIQRRIKLYNNTK

SEQ ID NO: 21386 - protein, 685 aa, Triticum aestivum
THSSPSSSSQESPRLKQRREAGAGASSTGRPAHRPPPAVSRGSSSVPAMALEEAAPGGGGGGGIRVLLRRKQVDSDRARAAGGQQLAKELSITQLIAIGVGSTVGAGVYVLVGTVAREHSGPALTLSFLIAGIAAALSAFCYAELASRCPSAGSAYHYSYICVGEGVAWLIGWALILEYTIGGSAVARGISPNLALFFGGPNSLPWILARHEPPLGRCCWLNPWCWLALGFPVTALLCVGIKESTFVQGIVTVLNCCVMLFVIIAGSYIGFQTGWVGYKVSGGFLPYGVNGMLAGSATVFFAYIGFDSVASTAEEVRNPQRDLPLGIATSLTICCSLYMLVSVVIVGLVPYFAMDPDTPISSAFARHGMQWAMYLVTSGAVLALCSTLMGSLLPQPRILMAMARDGLLPSFFSDVSEKTQVPVKSTIITGICAASLAFFMDVSQLAGMVSVGTLLAFTIVAVSILILRYVPPDEVPLPSSLQTSFRLSQECDEEKVGSPLGDGNHEQGTSEIKDVIVVESINDPLIEKQLYANKLDELNRRKTAARSIASVCVGVLILTASASVTFLPFLVMCLFCVFGGLLLLAGLGMLSWIDQDDGRHSFGHSGGFICPFVPLLPVMCILINTYLLINLGGGTWMRVGVWLVMGVFVYIFYGRTHSSLTDVVYVSLAQANEIYGSSSSSAFVA

SEQ ID NO: 21387 - protein, 443 aa, Picrophilus torridus DSM 9790
MKRGHGSGVISVPVATAVGLGAIIGAGIFVLSGTAIALAGANALFSFILVGILAVIIAVQFGELGSIMPNAKGASFSYTYNAFGSELGFIIGILLYFSFATAISAIALGFGSYLSSVLLLHGNNYPIMFAILLIFILSIVNIIGIKKAARLDSFLVLIKLLILTVFIISAVLLAHFSGTLNLNNFHGSARQSGVLPVLSASIAVFFAYSGFQSISTITSNVRGGASGAARAIVLSVVISMIFYILVIFALMLMVPASKFVISADPLSFALKYVRAPYSIFILVDAGALMATASATLAMILTSSRVIYQISENKLLPGFFRKYDRKRDVPVNGVILSALIGVAMLFSGNIYIIAAISNFGLLISYLVSSLALIHFRRNNKTGSFKTPFYPYITVISIVMLLVFILGMPREVLDIGMILIIILLMLYYFLVEFKRDRVIHEELFK

SEQ ID NO: 21388 - protein, 256 aa, Magnetospirillum magnetotacticum MS-1
MTEVLLEKPFDSVVLLRINRPEAKNALNGEVRRQLAEHMTALGADPSVRAIVMTGNQEAFAAGADIKDMAEVGAIELMQRNNHLLWRAIANCPKPVIAAVNGYAWGGGCELVMHADIIVAGENASFSQPEVKVGIMPGAGGTQRLTRAVGKFKAMLMVMTGQAISGVEAGQMGLASLVVPDEQVLDKALEIAKTISRMPPVAIAQIKEVLLAGQDASLDTALMLERKAFQLLFASRDQKEGMKAFIEKRKPAYEGK

SEQ ID NO: 21389 - protein, 225 aa, Mycoplasma mycoides subsp. mycoides SC str. PG1
MKKYIIAPSVLSANFMDLKNELELCKKNNINWIHYDVMDFDFVPNLTFGSKILHDIKKNIDINVDVHFMVSVKTKQFEDFFSDYIKAKPEMMTMHIESLKDNNTIIKFIDLCKKNNILASLAISPKTDVSLVYPYLDKLDNVLVMSVEPGFGGQKFISSSLEKIQILDQLRKEKKYKYIIEVDGGINEQTSVLVKQAGVDMIVAGSYLFGSGDFTKRAKGLFDEL

SEQ ID NO: 21390 - protein, 383 aa, Arabidopsis thaliana
MTTLKTSSFSSLPWDLVEDILARVPATSLKRLRSTCKQWNFLFNDQIFTKMHFDKAEKQFLVLILRLYTVCSMSLDLRGLHDNIDPSIEVKGELSLIDPHCSSRKTFVSKVFHCNGLLLCTTMTGLVVWNPCTDQTRWIKTEVPHNRNDKYALGYGNYKSCYNYKIMKFLDLESFDLEIYEVNSNSWRVLGTVTPDFTIPLDAEGVSLRGNSYWIASHKREEIEEEEEEENEYFINDFLISFDFTTERFGPRVSLPFKCESSWDTISLSCVREERLSLFFQDDGTLKMEIWMTNNITETKTTTMSWSPFLKIDLYTYGHRFGNEVSFLVDEENKVIVCCDEEEDDINDTVYIIGENEYWRKEDIVQRSYRPRMFSYVPSLVQI

SEQ ID NO: 21391 - protein, 431 aa, Brucella melitensis 16M
MAHFAIKLPDVGEGVAEAELVEWHVKVGDIVREDDLLAAVMTDKATVEIPSSRAGKVIAINGEVGEKIAVGSELVRLEIEGGATEKAEEPQPQAAEPTAPAAAVPEAPVLLQTPVPEKPAAPKRENAGRPFTGAGPLRPEGEKPLATPSVRLRARDAGIDLRRVRGTGPAGRITHEDLDAFFQMESGAAPALSGYAADTSINEIKVIGLRRKIAERMAEAKRHIPHITIVEEVDVTQLEELRNGLNHEKKEGHPRLTLLPFIIRTIVKAVKEQPGLNAHFDDEADIIRQFGGVHVGIATQTPNGLIVPVVRHAESMSVFAAATELSRVTEAARNGTAKREELTGSTITITSLGPLGAIATTPIINRPEVAIVGINKMAVRPMWDGTQFVPRKMMNLSCSFDHRVIDGWDAAVFVQKLKSLLETPAMIFVEG

SEQ ID NO: 21392 - protein, 112 aa, Gluconacetobacter diazotrophicus
MKKIEAIIKPFKLDEVKDALHEIGLMGITVTEAKGFGRQKGHTELYRGAEYIVDFLPKVKLEIVCADNLVDRAVETIMAAARTGRIGDGKIFILPVEDVIRIRTGEHGEEAI

SEQ ID NO: 21393 - protein, 241 aa, Gibberella zeae PH-1
MGESRQELVAWLNSLLQLNITKVEQCGTGAALCQVFDSIYMDVPMSKVKFNVNSEYLYIQNFKVLQNTFAKHQIDKPIPVPSLIKCKMQDNLEFLQWTKRFWDLNFPDHEYDAVSRRKGGSMPPSAAAPKPVSATTGAARRGGSTPSGGPRVAKAAGPATAALQQENATLKETVVGLERERDFYFSKLRDIELLVQTAVDEDPELEKLEDGLVKQIQTILYSTEEGFEIPAEGEVDDQETF

SEQ ID NO: 21394 - protein, 106 aa, Thermosynechococcus elongatus BP-1
MTMATTRQFSSFSDLLATTDKPLLVDFYADWCGPCRMMAPILEQVKKYLKSEVEVVKIDSERYPQLTSQHHVQALPTLILFHRGRELQRWEGVQPPEVLIDAIRRL

SEQ ID NO: 21395 - protein, 400 aa, Thermobifida fusca YX
MQTIVIAGAGMAGLTTAEALREAGFDGTITLVGDEPHRPYERPPLSKEVLTSQNSGKGVWLRTDDELAALSLDLRLGVRAMALRPSDRAVELSDGTSLVADAVVVATGARARRPRTDLPGVHVLRTLDDAEALRADLLRYGRVAVVGAGFLGAEVAASARALGAEVTLLEAADTLLPRVVDPRISAVFAELHRDHGVDLRLGVPVTSFAGTHRVERIELADGTSVAAPVVVAGIGVHPNTEWLSGSGVLLDPEVGGVSCDPYLATSIPHVYAVGDLAAWPHPRYGGRIRLEHWANAEEQARLAAHNLLAGEGARRPYTPVPYFWSDQYGRKIQLLGQASPADTVEIVHGSVADRKFVAFVGRQDRLVGVLGMRSTPRVMRYRPLLEEPTSWADALAAAQQ

SEQ ID NO: 21396 - protein, 486 aa, Corynebacterium efficiens YS-314
MAMSEVPAAAQPGAAPGSSETTSDPNRRQELGTGLRTRHLTMMGLGSAIGAGLFLGTGVGIRAAGPAVLLAYIAAGVIVVLVMQMLGEMAAARPHSGSFSKYAEDAFGHWAGFSLGWLYWFMLIMVMGAEMTGAAAIMGAWFGVDPWIPALVCVVFFAIVNLAAVRGFGEFEYWFAFIKVAVIVVFLIVGVGLIFGLLPGSTFVGTSNFIGDHGFMPNGLSGVAAGLLAVAFAFGGIEIVTIAAAESDQPRRAISLAVRAVIWRISLFYLGSVLVITFLMPYESIDNAETAAESPFTRILDMANIPGAVGLMEAVIVLALLSAFNAQIYATSRLVFAMSRNQDAPRVFSVLSRSGVPTAAVLLSMFFAFVSVALQYFNPAGLLDFLLNAVGGCLLVVWAMIALSQLRLRPKLEHNGEISTVRMWGHPWLGILTLVLLAGLVLLMLGNEGSRSQVFSVAVVYGFLVALSFTTTRSPLRGKRTGLIDR

SEQ ID NO: 21397 - protein, 535 aa, Magnaporthe grisea 70-15
MGLVEVVLEHVSVKAAVLWIVGSWVLYLVVKNVLEERKINKLGARAARMPSRLPLSLDNIIRAVRANIQNRNLQMWRSHMSHSITYTVEGRLLFQRIILTADPENIKAILATQFTDYGKGEPFHQEWKPFLGDSIFATDGEKWHTSRQMLRPQFVKDRVSDLECFESHIKTLFKAMANGGALEGEHQHVELSAINGKRFEITDLFFRFSLDVATDFLLGYDVKSLSTPHAEFAEAFNEVQHVQSTITRSGPAQALVPKGSYYRGLKVMDNFINPFIDRALRLSPDELASKTKSDHGYTFLHELASFTRDRKVLRDQIVAVLLAGRDTTAATLSWTIYELGRHPECVKRLRQEIAEVVGFGRTPTYADLKSMKYLQNVMHETLRLYPAVPFNVRLALHDTTLPRGGGPDGTLPVPVLKDTPIGYSTLLMQRRRDLYPPVSENFADPDVFSPERWFHWQPRPWQYVPFNGGPRICIGQQFALTEMGYVLVRMFQQYERVVSYMDEIDGGNPTIKADIVMQPGDGVIVAFWEGDNEKI

SEQ ID NO: 21398 - protein, 502 aa, Arabidopsis thaliana
MDSVLTNKNPIIYPKRTRRYRTDQSSTDEFSSTNRIRDIKDPEHPELSLEDLNVLTEESVEVDDHKSYVRITFTPTLPHCHLPTHIGLCILVKLVQSLPARFKVDVRVAPGSHDKETTVNKQLGDKERVTAALENPELVALLNKMMQIIMVANPGRGDRRRGVGTMDDFETTKGVDPIESFEDMGLKEDVLRGLYEYGYEKPSAIQQRAIMPILQGRDVIAQAQSDKTHACIGGKSLGEDIRKLEHGVHVVSGTPGRVYDMIKRRSLGTRAINLLILDESDEMLSRGFKEQIYDVYRYLPPDIQVCLVSATLPHEILEMTSKFMTDPVKILVKRDELTLEGIKNFFISVEKEEWKFETICDLYDTLIITKAVIFCNTKRKVDYISEKMRSSNFTVSSMHGDMPQKERDEIMNQFRTGESRVLITTDMFARGIDVDQVSLVINYDLPNNRELYIHRIGRSGRFGRKGVAINFVKIDEIKILRDIEQYYSTQIDELPKNIADLI

SEQ ID NO: 21399 - protein, 726 aa, Triticum aestivum
MGNPGAFHHSITLQSFTVFSLVAVFVADHHVQGGDDGCSLFSCGHLRDISYPFRRRGDPRECGVEAYELGCTSSKATIHINTGTYYVTAINYTGSYFWVMDPNFNTSSSCPLPLWNHLPYFGSGDHSTTDSASPVFHYLATQSYNRACFANCSRAVTNKSAYKPVACLSAKNSHVYVWVSDFLCMVDDLEPYCGYLAEIPSDSGQLQNASYADITQFISKGFTVQFPVGTRYSYRPSASVKLRKNINLCRNNSISYFKEQASCASIVNWTHAFLWSEVHFLECVTQNSYDHYYTTKLVLIVATIVSAIVIPKFFFVLCRFLLAPVAVWIFVAYKYWKTRIIIDAVEKFLRIQQMIGPTRYAYTDIVAVTSHFRDKLGQGGYGSVYKGVLLPGDVHVAVKMLEGNTNCNGEDFISEVSTIGRIHHVNVVRLVGFCSEEMRRAIVYEYMPHGSLDKYIFSPEKSFSWDKLNQIALGIARGINYLHQGCDMQILHFDIKPHNILLDSNFVPKVADFGLAKLYPRGDSFVPLSAMRGTVGYIAPEMISRSFGVISSKSDVYSFGMLLLEMAGGRRNADPNMGSSSQAYYPSWVYDQLTQEEAGEEISPVAADMHELEKKLCVVGLWCIQMRSHDRPMMSEVIEILEAGVDGLQMPSRPFFCDEGHIHVEDSYHFTSELMSMPAHSSFSSLLLGNRHVTEMYLYICLQEPDPSYLSWIQSRTKLIFNSSNN

SEQ ID NO: 21400 - protein, 123 aa, Arabidopsis thaliana
MRSLLLAVCLVLALHCGEAAVSCNTVIADLYPCLSYVTQGGPVPTLCCNGLTTLKSQAQTSVDRQGVCRCIKSAIGGLTLSPRTIQNALELPSKCGVDLPYKFSPSTDCDSIRVDKPLSLCDY

SEQ ID NO: 21401 - protein, 180 aa, Arabidopsis thaliana
  misc_feature (35)..(35): Xaa can be any naturally occurring amino acid
  misc_feature (87)..(87): Xaa can be any naturally occurring amino acid
  misc_feature (96)..(96): Xaa can be any naturally occurring amino acid
  misc_feature (101)..(101): Xaa can be any naturally occurring amino acid
  misc_feature (144)..(144): Xaa can be any naturally occurring amino acid
MASSMLSSATMTASPDQATMNTPFDGLKSSDAFHXTRKANNDITSITSNDERVNCMQVWPPIGKKKFETLSYLPDLTDSELPKECDXLIRNKWIPXDEFEXEHGFVYRGHAKSPGYYEGRYWTMRKLHLFGSTDSARVLEEVQXCNNEYHNACIMIIGLDNTRQVQCIMIIAYKPPSFTG

SEQ ID NO: 21402 - protein, 967 aa, Glycine max
MATRNLEKMASIDAQLRQLAPAKVSEDDKLIEYDALLLDRFLDILQDLHGEDLKETVQEVYELSAEYEGKHDPKKLEELGNLITSLDAGDSILVAKSFSHMLNLANLAEEVQISRRRRNKLKKGDFADENNATTESDIEETLKKLVFDLKKSPQEVFDALKNQTVDLVLTAHPTQSIRRSLLQKHGRIRNCLSQLYAKDITPDDKQELDEALQREIQAAFRTDEIRRTPPTPQDEMRAGMSYFHETIWNGVPRFLRRVDTALNNIGIKERVPYNAPLIQFSSWMGGDRDGNPRVTPEVTRDVCLLARMMAANLYYSQIEDLMFELSMWRCNDELRVRAEELHRSSKKDEVAKHYIEFWKKVPPNEPYRVVLGEVRDRLYQTRERSRHLLSNGYSDIPEEATFTNVEEFLESLELCYRSLCACGDRAIADGSLLDFMRQVSTFGLSLVRLDIRQESDRHTDVLDAITKHLEIGSYQEWSEEKRQEWLLSELSGKRPLFGPDLPQTEEIRDVLDTFHVIAELPPDNFGAYIISMATAPSDVLAVELLQRECHIKHPLRVVPLFEKLADLEAAPAALARLFSIDWYRNRINGKQEVMIGYSDSGKDAGRFSAAWQLYKAQEELINVAKKFGVKLTMFHGRGGTVGRGGGPTHLAILSQPPDTIHGSLRVTVQGEVIEQSFGEQHLCFRTLQRFTAATLEHGMHPPISPKPEWRALMDQMAVIATEEYRSIVFKEPRFVEYFRLATPELEYGRMNIGSRPAKRRPSGGIETLRAIPWIFAWTQTRFHLPVWLGFGAAFKKVIEENVKNLNMLQEMYNQWPFFRVTLDLVEMVFAKGDPKIAALNDRLLVSKDLWPFGDQLRNKYEETRKLLLQVAGHKEILEGDPYLKQRLRLRHAPITTLNIVQAYTLKRIRDPNYNVKVRPRISKESAEASKSADELVKLNPTSEYAPGLEDTLILTMKGIAAGMQNTG

SEQ ID NO: 21403 - protein, 159 aa, Nicotiana tabacum
MSDEEHHFESKADAGASKTYPQQAGTIRKNGHIVIKNRPCKVVEVSTSKTGKHGHAKCHFVAIDIFTGKKLEDIVPSSHNCDVPHVNRTDYQLIDISEDGFVSLLTENGNTKDDLRLPTDDNLLALIKDGFAEGKDLVLSVMSAMGEEQICGIKDVGPK

SEQ ID NO: 21404 - protein, 841 aa, Brassica oleracea var. acephala
MRSMSNYDRLYTLVLIMLPALSISTNTLSSTESLTVGSNETIVSSGEIFELGFFNLPSSSRWYLGIWYKKIPARAYVWVANRDNPLSNSNGTLRISDNNLVMFDQSGTPVWSTNRTRGDAGSPLVAELLDNGNFVLRHLNNSDQDVFLWQSFDFLTDTLLPEMKLGWDRKTGLNRYLRSWRNPDDPSSGDFSTKLETTRGFPEFYAWNKDEIIYRSGPWSGNRFGSDVLDMKPIDYLGFNFTADNEHVTYSYRITKPDVYSRVILSSAGLLQRFTWFETEQSWRQLWYLPRDLCDDYRECGDYGYCDLNTSPVCNCIQGFETRNNQTAGCARKTRLSCGGKDGFVRLKKMKLPDTTVTVVESGVGLKECEERCLKDCNCTAFANMDIRNGGSGCVIWKGDIFDIRNFPNGGQDLYVRLAAADLVDKRGKRGKIIALSIGVTIFLLLCFIIFRFWKKKQKRSIAIQTPIVDQGRIEDSLMNELAITSRRYISRENKTDDDLELSLMEFEVVALATNNFSSANKLGRGGFGTVYKGRLLDGKEIAVKRLSKMSLQGTDEFKNEVKLIARLQHINLVRLIGCCIDKGEKMLIYEYLENLSLDSHIFDITRRSNLNWQMRFDITNGIARGLVYLHRDSRFMIIHRDLKASNVLLDKNMTPKISDFGMARIFGRDDAEANTRKVVGTYGYMSPEYAMDGIFSMKSDVFSFGVLLLEIISGKKNNGFYNSNQDLNLLALVWRKWKEGKWLEILDPIIIDSSSSTGQAHEILRCIQIGLLCVQERAEDRPVMASVMVMIGSETMAIPDRKRPGFCVGRNPLEIDSSSSTQGNDECTVNQVTLSVIDAR

SEQ ID NO: 21405 - protein, 448 aa, Bifidobacterium longum DJO10A
MLTDEYIKRVYDQVVARDGDQPEFLQAVREVFETLQPVVEKHPEYEKAGVLERIVEPERTIKFRVAWVDDEGKVQVNRGYRIQFNSAIGPYKGGLRFHPTVTESVVKFLGFEQILKNSLTTLPMGGGKGGSDFNPKGKSDAEVMRFCQAFMTELSRHIGQFTDVPAGDINVGGREIGYLFGQYKRIRDEYSGVLTGKGLEFGGSLARTEATGYGVCYYTQEALRVLRNDSFEGKTVVISGSGNVATYAAQKAEQLGAKVVTVSDSNGYIYDPNGINVEVVKQIKEVERGRIKEYAERVPGSEYHEGSKGVWTVKGDIALPCATQNEVDGESAQKLVDNGVTVVVEGANMPSTPEAIEVYQKNGVLYGPAKAANAGGVAVSGLEMSQNSYRLSWTFEEVDAKLKSIMEEIVANSLAAAKEYGHEGDLMLGANAAGFVKVANAMVAQGVL

SEQ ID NO: 21406 - protein, 417 aa, Alkaliphilus metalliredigenes QYMF
MSEKTLNPFEIAQQQVKGACDKLGVEDAVYEILKNPMRVMEVAIPVKMDDGSLKSFVGYRSQHNDAVGPFKGGVRFHQDVNRDEVKALSTWMTFKCGVVGVPYGGGKGGITVDPRDLSQGELQRLSRGYARAIAPIIGEKVDIPAPDVGTNGQVMSWFIDEYQKTTGEFAPGVFTGKPVDFYGSLARNEATGFGVAIMARDAAKKIGLSLNGATVAIQGFGNVGSFAAIYMVGMGAKVTAISDHTACIFDENGLDIDALIEYVKGNKQVQGFPGAQKELHRDELFGMDVDILMPCALENQITLKNVNDIKAKIVSEGANGPTTPEADKIMYDKGIIVVPDILANAGGVTVSYFEWVQNLMRYSWSFEEVQEKQEKLMVKSFDDIWTLMHEHNVDMRTAGYMMSIKRIATAMKYRGWY

SEQ ID NO: 21407 - protein, 301 aa, Burkholderia pseudomallei K96243
MKKRPRSPIVHTSNIDEDAMDTTLATFERDVIEASLAAPVLVDFWAPWCGPCKTLGPLLEKLEQEYEGRWKLVKVNVDENQELAAHFQTRSIPHVIAFAGGQPVDQFVGVLPEGQLRAFLDRLVPAPDEAERYAAQTALAEERIDDALSHLENALALNPGYDDARLDLVELLLALNRIDDARAEAARLSPQTTGGADARYQAIKTRFDALDATADLPPTDALEARIASHPADLDARFDLAQSLIARRAYEGALEQLLEIVLRDRTFGDDVGRKTMISVFELAADQPELVSAWRRKLSAALN

SEQ ID NO: 21408 - protein, 329 aa, Gibberella zeae PH-1
MSPHSASTTVNELVNEYADIIKGKVILTTGVTLNSLGGLFIQETASKSPELLILAGRNASKLQELAEAIAKGYPSVKTRNLVVDLSSLASVRKAAEGVNSWEDVPVIDVLVNNAGIMAVPYAKSVDGFESQFAICHLSHFLLTNLIMDKILASKSPRIVNISSNVHSLGPVRFADPHFSNGETYNEWSAYGQAKTSNALFSISLAQKLGGRGLQSYSVHPGLILTTGLGTHLDFASMEGDLGAIIKAHRERGNTEGWKFLDPVPVEVGAATHAFAAFDPNLRANNGAYLLETRVSDPFVDTYKSWARDPVDAEKLWRLSEELVGQKFGY

SEQ ID NO: 21409 - protein, 577 aa, Candida albicans SC5314
MTDTSDLKPEHTEKATGLSTSKEVPESTLTQRKQPSTPATQTSKRPTPAKKKRAFINVAPLNTPLSHRLETLGVVWHCISIPFFICLFFFMISLGLFGWIVIVLPYFIWWYGFDLHTPTNGKVAYRYRNSMKNFIIWDWFVRYFPIKVYKSVELEPTFKEVLVEETESSEDDDEQDLVSERSRTLVDKVFKFFGLKKRLNDTSSGKSETYKTVSTGPRYIFGYHPHGVISMGGVGLFATNSLRNEPYTPFLKFLKPFFHDSSKGERLFPGLGNIFLLTITTQFAIPFYRDYLMGLGVTSASAKNIRSLISNGDNSVCIVVGGAEESLLNNMVAKHARVGYGYKENQDINGSDAEDDQPEEEEQQQQQQPNGSVEVDKKTTKEVGEKTSSQPSKREVKLILNKRKGFVKLAIELGNVALVPTFAFGEADVYRLVQPSPTSMMYKFQKWMKGIFSFTIPLFSARGVFIYDYGLLPFRNPINICVGKPIYIPAGALQEYKQQHPEEFTEEETKPPMKKSGSFTDIFKMNGETPKVSTIKTKIPPALLDKYHKLYVDELRNVYEENKHKFGYGDVEFSIVE

SEQ ID NO: 21410 - protein, 112 aa, Idiomarina loihiensis L2TR
MKKVEAIIKPFKLDDVREALSEVGIAGMTVSEVKGFGRQKGHTELYRGAEYMVDFLPKVKLEVVVADSEVERCIEAIMETAQTGKIGDGKIFITEIERVIRIRTGEENEDAV

SEQ ID NO: 21411 - protein, 594 aa, Silicibacter sp. TM1040
MFQNFDVTARPEQGPARLAALRAEMERDKIDGFLVPRADAHQGEYVAPRDERLAWLTGFTGSAGFCAVLPHIAGVFIDGRYRTQVKGQVADVYTPVPWPDVTLGDWLVEQLPEGGIVAYDPWLHSLQEIRDLTERLVSSDISLVESDNLVDRIWPDQPAPPMQPARAHSEDYAGESAEKKAQRLAEGLRKSGQSAAVITLPDSIMWLLNIRGSDIPRNPVAHAFAILHDDARVDLFMAAEKLSELVLGAHVTLHAPDRFLEATAGLNGQVAVDARSLPQAVARVLGDRLAAVGDPCALPKARKNAAEIAGSAAAHLRDGAAVVETLAWLDTQEPGTITEIDVVKTLEGFRAADPALRDISFETIAGTGANGAIMHYRVTHDTNATLQEGHLLVLDSGGQYLDGTTDITRTIAIGSPGREEAEAFTRVLQGMIAVSRLRWPEGRSGRELEAIGRLPLWMAGQDFNHGLGHGVGAFLSVHEGPQGLSRINTVPLEPGMILSNEPGYYREGAFGIRIENLVVVEEAPALDTADPDRKMLAWRTLTFAPIDRRLVVPEMLSSGEREWLNSYHAEVNRTIAPRVSAAAAEWLNAACAPL

SEQ ID NO: 21412 - protein, 112 aa, Gluconacetobacter diazotrophicus
MKLVTAIIKPFKLDDVRESLTPLGIQGLTVSEVKGFGRQKGQTEIYRGAEYHVSFLPKVKIEVAVSDDIVDQVVDVILQSAHTGKIGDGKIFVSSLDSVIRIRTRETGEDAL

SEQ ID NO: 21413 - protein, 483 aa, Saccharophagus degradans 2-40
MRILLWLSNNLRLSDNPALHAAVDSADANGEVLPAYIKDTANPWPIQGAAAWWLHHSLAAFTNSIKNKGGVLSLFEGDPATLVPELISQNKIDAVYLSQGFEPYEVQLQANIHKWCKQHNIECKRFAGHLLLNPDTHLNKQGKPFQVFTPYYKAALATHTIPRAKPIPSNLAKVWAAKKLPKSVALNKLKLLPNLNWADQFNSQWQPGEEGAHKNLREAIEDKIASYTRDRDFPAVDGTSLLSAHLRFGEISPRQIWQQVATQMDGEQCAPFLRQLMWRDFSYALLHHWPHIPQQAFKQQFEKFPWQKASNKNVAKQLHAWQTGTTGYPIVDAGMRQLWQTGWMHNRVRMIVASFLTKHLRIHWHEGAKWFWDTLVDADLANNTAGWQWVAGCGADAAPYFRIFNPVLQGEKFDKQGEYIKTWVPELAALPAKFIHAPWLAPQDILQTAGISLGNNSTYPLPIVDHKYAREAALAAYQQLKGD

SEQ ID NO: 21414 - protein, 92 aa, Glycine max
MAKRTKKVGIVGKYGTRYGASIRKQIKKMEVSQHSKYFCEFCGKYRVKRKAVGIWGCKDCGKVKAGGAYTMNTASAVTVRSTIRRLREQIEG

SEQ ID NO: 21415 - protein, 112 aa, Gluconacetobacter diazotrophicus
MKFIIAIIKPFKLDDVREALGTIGIQGLTVTEVKGYGRQKGQTEIYRGAEYQIQFVAKVKIEVAVADSMLDQALDTIRAAAHTGTIGDGKMFVLELQQAIRIRTNETGEIAL

SEQ ID NO: 21416 - protein, 328 aa, Oryza sativa
MAASLVHAAAASASPAPAARVGAFHPLASSSPFLRLACATASSPSTRRRRCLDAPLRALSAGSRLAAGWGAPRTRRVIATFAGEESVGSESGDDKEKGKGEMKPEEAQEVWKEMLKQFKDEAQRMHGLTLQAYGVYSQRAREVLLEASEKLKIHADKAQKDLSVIATEVGEEGQEYLKLAAQNSLDSIKDIIETFNSLGKLKISEYEDYHVGIPFGTFLTVGGFLNFMLTGRTSAIRFGIILGFALLAMGISSLRSQRAGGRRPRLLLKGQAAIASVIFFRELLIFFHYGWFPNIFVVLLSGAVTAFYTHRIMTGGHKGPSSESTAEN

SEQ ID NO: 21417 - protein, 339 aa, Psychrobacter arcticus 273-4
MKPDLPPRIAVLLVNLGTPDEPTAPAVRRYLKQFLSDPRVIEIPKFLWAIILNLFVLPSRPKRVAEAYASIWDGDSPMRNILNTQVEMLDKRLAERAAPFRVSVHAAMSYGNPGLPDVMDKLRSEGVDHFVMLPVFPQYSATSTGAVYDAMTKWSLKQRNLPNMTIVKDYFAHPLYIKALADSIRRFQAIHGKPEKLMFSFHGIPQPYADKGDPYPKRCKCTAAQVAHELGLKPDEWIISFQSRFGKQEWIKPYTDVVLEDWGKSGIRSVQILSPAFSADCLETLEELAIENRETFLKAGGEEYHYIPALNADEAHIDLLEAMSAPLVKGWAGTLDGWA

SEQ ID NO: 21418 - protein, 444 aa, Bacteroides fragilis NCTC 9343
MNAAKVLEDLKRRFPNEPEYHQAVEEVLSTIEEEYNKHPEFDKANLIERLCIPDRVYQFRVTWVDDKGNVQTNMGYRVQHNNAIGPYKGGIRFHASVNLGILKFLAFEQTFKNSLTTLPMGGGKGGSDFSPRGKSNAEVMRFTQAFMLELWRHIGPETDVPAGDIGVGGREVGFMFGMYKKLSHEFTGTFTGKGREFGGSLIRPEATGYGNIYFLMEMLKTKETDLKGKVCLISGSGNVAQYTAEKVLELGGKVVTMSDSDGYIYDPDGIDRAKLDYIMELKNLYRGRIREYAETYGCKYVEGARPWGEKGDIALPSATQNELNGDDARKLVANGVIAVSEGANMPSTPEAIKVFQDAKILYAPGKAANAGGVSVSGLEMTQNSIKLSWSSEEVDEKLKSIMKNIHEACVQYGTEPDGYVNYVKGANVAGFMKVAKAMMAQGIV

SEQ ID NO: 21419 - protein, 343 aa, Bartonella quintana str. Toulouse
MNECLGDIAQALVCAGKGILAADESTATIGKRFESIGVESNEDNRRAYREMLFTAKEAMESAISGVILFDETVRQRASTGQMLTDLIRNAGALPGIKVDTGAKPLAAFPQEMITEGLDGLRERLKDYYALGARFAKWRAVIAIDAYALPTKGAISQNAQALARYAALCQEAGLVPIVEPEVLMDGASRQHSITRCFEVTQAVLNMVFKELFEARVLFEGMILKPNMVIDGKDARTASVEEVAEKTVRVLKQTVPAAVPGIAFLSGGQSDEEATAHLSAMNALGPLPWKLTFSYGRALQAAALKAWGSHHQNIALAQKAFCHRARMNHLAALGKWTKEQERSCA

SEQ ID NO: 21420 - protein, 203 aa, Medicago truncatula
MYIETKFSTPKPHLLKLYELIESKVDGDGNCQFRALSDQLYRSPNLHKFVREQVVQQLKSDPDLYAGYVPMAYSEYLKKMSRSGEWGDHVTLQAAADWYGVKIFVITSFKDTCYIEILPQIQKSTRIIFLSFWAEVHYNSIYPEGGNKFILYTNHRNAFILFKEKEEMVELWRLGSAHKWMQLFHASVADNLTKFLALKPLVH

SEQ ID NO: 21421 - protein, 312 aa, Chlamydia trachomatis
MTHAKLVIIGSGPAGYTAAIYASRALLTPVLFEGFFSGIAGGQLMTTTEVENFPGFPEGVLGHQLMDLMKTQAQRFGTQVLSKDITAVDFSVRPFVLKSGKETFTCDACIIATGASAKRLSIPGAGDNEFWQKGVTACAVCDGASPIFRDKDLFVVGGGDSALEEAMFLTRYGKRVFVVHRRDTLRASKVMVNKAQANEKIFFLWNSEIVKISGDTLVRSIDIYNNVDETTTTMEAAGVFFAIGHQPNTAFLGGQVALDENGYIITEKGSSRTSVPGVFAAGDVQDKYYRQAITSAGSGCMAALDAERFLEN

SEQ ID NO: 21422 - protein, 340 aa, Bartonella quintana str. Toulouse
MTVRVAINGFGRIGRNILRAIVESGRQDIQVVAVNDLGSVETNAHLLRYDSVHGHFPGSVQVLGDAIDVGCGLIKVTSERDPAQLPWKALDIDIALECTGIFTARDKASAHLSAGAKRVLVSAPSEGADFTVVYGVNHQSLSKEHRVVSNASCTTNCLAPVAQVLHNTVGIEKGFMTTIHSYTGDQPVLDTMHRDLYRARAAALSMIPTSTGAAKAVGLVLPELKGLLDGVSIRVPTPNVSVVDLTFTAKRSTMVEEINTAICTAARGELKGILDYTEEKLVSCDFNHNPHSAIFHNDQTKVIDGKLCRVLVWYDNEWGFSNRMADTAVAFAKTVDEERT

SEQ ID NO: 21423 - protein, 888 aa, Vibrio parahaemolyticus RIMD 2210633
MDVVFLRGRTTMNEKYAALKSNVRMLGHLLGNTIRDAHGEEIFEKVETIRKLSKSAQAGNQADRESLIEEIKHLPDEQLTPVTRAFNQFLNLTNIAEQYHTISRHCEEHICEPDAINSLFSKLVQNDVSKLDTAQAVRDLNIELVLTAHPTEITRRTMINKLVKINECLSKLELSDLSSKERKKTERRLEQLIAQSWHSDVIRQQRPTPLDEAKWGFAVVENSLWEAVPDFLREMNDRLKSYLGEGLPIDARPVHFSSWMGGDRDGNPFVTHSVTREVLLLSRWKAADLYLNDINELISELSMTVSNDQVRELAGEDQHEPYRAILKQLRALLNETKDILDAKIHGQKLAVKAPLQKVEQLWDPLYACYQSLHECGMGVIADGSLLDTLRRVKAFGVHLVRLDIRQESTRHADVLSELTRYLGIGDYEQWSEQDKIAFLTNELASKRPLLPRDWEPSEPVKEVLDTCKIIALQPREAFGAYVISMARTASDVLAVHLLLQEAGCPYRMDVCPLFETLDDLNNAESVIKQLMSIDLYRGFIQNHQMVMIGYSDSAKDAGVMSAGWAQYHAMESLVKVAEDEGVELTLFHGRGGTVGRGGAPAHAALLSQPPKSLKGGLRVTEQGEMIRFKLGLPDVAVNSFNLYASAILEANLLPPPEPKQEWRDLMEVLSEVSCEAYRGVVRGEPDFVPYFRQATPELELGKLPLGSRPAKRNPNGGVESLRAIPWIFSWSQNRLVLPAWLGAGEAIQYSVDKGHQALLEEMCREWPFFSTRLGMLEMVYTKCNMEISRYYDQRLVEPQLQPLGDRLREQLQRDIKSVLNVENNENLMQSDPWGQESIRLRNIYVEPLNMLQAELLYRTRQTEEASANLEEALMVTIAGIAAGMRNTG

SEQ ID NO: 21424 - protein, 330 aa, Streptococcus pyogenes M49 591
MKDKAYDITIIGGGPIGLFAAFYAGLRGVTVKIIESLSELGGQPAILYPEKMIYDIPAYPSLTGAELTENLIKQLSRFEDRTTICLKEEVLTFDKVKGGFSIRTNKAEHFSKAIIIACGNGAFAPRTLGLESEENFADHNLFYNVHQLDQFAGQKVVICGGGDSAVDWALALEDIAESVTVVHRRDAFRAHEHSVELLKTSTVNLLTPYVPKALKGIGNLAEKLVIQKVKEDEVLELELDSLIVSFGFSTSNKNLKNWNLDYKRSSITVSPLFQTSQEGIFAIGDAAAYNGKVDLIATGFGEAPTAVNQAINYIYPDRDNRVVHSTSLID

SEQ ID NO: 21425 - protein, 432 aa, Xanthomonas oryzae pv. oryzae KACC10331
MFFKRHPQPPSTVRYVVRRSAMSRRVVVTGMGIVSPLGNDLATSWDGIVHGRSGIGPITQIDASQFTTKIAGEIKNFDPTLFVSAKDVKKMDSFIHYGLGASFMALDDSGLEIDDSNAERVGAILGSGIGGLLGIEEQTIKFHEGGARKISPFYVPSTIINMLPGQVSLIKGLKGPTFSAVSACATSNHSIGTAMRMIQHGDADVMLAGGAERGSSPGSVGGFCAMKAMSTRNDDPTGASRPWDKQRDGFVLGDGAGVLVLEEYEHAKARGARIYAELVGFGASSDAFHMTAPSEDGEGAARSMAAAMRDAKLNPEQIGYLNAHGTSTPLGDLAETIAMKRALGDHAYKTMVSSTKSMTGHLLGAAGGVEAIFSVMALHTGIIPPTINLEEPSEGCDLDYVPNVAREVQVDAVMSNGFGFGGTNGTLVFKRV

SEQ ID NO: 21426 - protein, 139 aa, Triticum aestivum
MLIKLSAPSQLHGFQQASRSTRSSMARVALVAVFAVLAALAVAEMASGAVTCGDVTSAVAPCMSYATGKASAPSGACCSGVRTLNAKASTPADRKAACNCLKNLAGSGISMGNAANIPGKCGVSVSFPISTKTNCNNLH

SEQ ID NO: 21427 - protein, 644 aa, Arabidopsis thaliana
MSEILSSLRSLMASHSPPLDALVVPSEDYHQSEYVSARDKRREFVSGFSGSAGLALITKKEARLWTDGRYFLQALQQLSDEWTLMRMGEDPLVEVWMSDNLPEEANIGVDSWCVSVDTANRWGKSFAKKNQKLITTTTDLVDEVWKSRPPSEMSPVVVHPLEFAGRSVSHKFEDLRAKLKQEGARGLVIAALDEVAWLYNIRGTDVAYCPVVHAFAILTTDSAFLYVDKKKVSDEANSYFNGLGVEVREYTDVISDVALLASDRLISSFASKTVQHEAAKDMEIDSDQPDRLWVDPASCCYALYSKLDAEKVLLQPSPISLSKALKNPVELEGIKNAHVRDGAAVVQYLVWLDNQMQELYGASGYFLEAEASKKKPSETSKLTEVTVSDKLESRASKEHFRGLSFPTISSVGSNAAVIHYSPEPEACAEMDPDKIYLCDSGAQYLDGTTDITRTVHFGKPSAHEKECYTAVFKGHVALGNARFPKGTNGYTLDILARAPLWKYGLDYRHGTGHGVGSYLCVHEGPHQVSFRPSARNVPLQATMTVTDEPGYYEDGNFGIRLENVLVVNDAETEFNFGDKGYLQFEHITWAPYQVKLIDLDELTREEIDWLNTYHSKCKDILAPFMNQTEMEWLKKATEPVSVSA

SEQ ID NO: 21428 - protein, 121 aa, Oryza sativa
  misc_feature (16)..(16): Xaa can be any naturally occurring amino acid
  misc_feature (26)..(26): Xaa can be any naturally occurring amino acid
  misc_feature (88)..(88): Xaa can be any naturally occurring amino acid
  misc_feature (90)..(90): Xaa can be any naturally occurring amino acid
  misc_feature (92)..(92): Xaa can be any naturally occurring amino acid
  misc_feature (95)..(95): Xaa can be any naturally occurring amino acid
  misc_feature (103)..(103): Xaa can be any naturally occurring amino acid
  misc_feature (105)..(105): Xaa can be any naturally occurring amino acid
  misc_feature (107)..(107): Xaa can be any naturally occurring amino acid
  misc_feature (109)..(109): Xaa can be any naturally occurring amino acid
  misc_feature (112)..(113): Xaa can be any naturally occurring amino acid
  misc_feature (115)..(115): Xaa can be any naturally occurring amino acid
  misc_feature (119)..(119): Xaa can be any naturally occurring amino acid
MASKKFACVVVVMCIXWCWVHSCQRXAISCGEISTRLAPCLPFLLGGVGPSGLCCDGVKTVNDTGQQPPLNLQATCNCLKDLAAGVSXLXTXGNXEALPSKCXVXVXYXKIXXSXDCSXIR

SEQ ID NO: 21429 - protein, 558 aa, Bacteroides fragilis YCH46
MCGIAGIFNIKIQSRELRNKALRMARKIRHRGPDWSGMYCGGSAILAHERLSIVDPQSGGQPLYSSDRKQVLAVNGEIYNHRDIRAQYAGRYEFRTGSDCEVILALYRDKGIHFLEELNGIFAFALYDEEKDEYLIARDPIGVIPLYIGKDAEGHVYFGSELKALEGFCDEYEPFLPGHYYHSKERTMKRWYTRDWMEYKEENDKQADSRSPTRQIQDALENAVHRQLMSDVPYGVLLSGGLDSSVISAIAKKYAAKRIETDGASDAWWPQLHSFAIGLKGAPDLIKAREVAEYIGTVHHEINYTLQEGLDAIRDVIYFIETYDVTTVRASTPMYLLARVIKSMGIKMVLSGEGADEIFGGYLYFHKAPDARAFHEETVRKLSKLHLYDCLRANKSLAAWGVEGRVPFLDKEFLDVAMQLDPEIKMAPGKVIEKKVLREAFADMLPSGIAWRQKEQFSDGVGYSWIDTLKEITATAVSDEQMAHAAERFPIHTPMNKEEYYYRSIFEEHFPSESAARSVPSIPSVACSTAEALAWDTTFKNLNDPSGRAVKGVHEEAY

SEQ ID NO: 21430 - protein, 420 aa, delta proteobacterium MLMS-1
MFRQSELANGVRIVTEQAPSKVVAVGIWIEVGARDEHDLTSGFAHFVEHMLFKGTERRSAHQIAREFDVMGGMANAFTSTETTCVQATVLADRLPQVADLLADIVLAPAFVPAEVENEREVIGQEIAMVEDTPDDLIHDLFNRQLWGRHPLGNPVLGSARVIGALNSEHLRSFHRRHYIPQRILIAAAGQLEHEQFCQLWADSFGALSAPEGTRAGAGRQPPRFAEPERRVFDRGLEQLHLMLGTYGPAENDPDRYAFHLLNTILGGNMSSRLFQEIREKRGLAYAVFSYLNCHSDSGNFGLYLGVDPLAAEEAAGLAAREIRRLRREPVTAGELDEARDYARALIMLAEENMEARMSRLARNTLAFGRELPVTEILAKLDRVSVDDIMAVADQTFTRPLNGVALGPLDDELLDWDVLDA

SEQ ID NO: 21431 - protein, 378 aa, Arabidopsis thaliana
LVYCTGRSFSSYSSLRKKRPLLTPDIAVTSVGSEIVYGGGESTVSDVVWTARLDYKWNRDIVVEETLKFPKLEPQPDKSQEEHKVSFFVGREDAVEIMKVLPGILEERGVDVKLVYSNGYAFDVLPRGAGKQGALTYLLDKLDIEGKQPSNTLVCGDSGNDAELFNISDVYGVMVSNSHEELLQWYEENAKDNPKIFHASERCGAGMIEAIQRFNLGPNVSPRDVMDTENFHGESLNPAHEVVQFYLFYERWRCGEVEKSDKYLQNLKSLSSPLGIFVHPSGVEKPIHEWIDEMENLYGDGKEKKFRIWLDNVTSSHISSDTWLAKFVKHELSEGKVRSCSTKVLLSYKEEKQRLTWMHIHQSWLDESSSDDQEKWIF

SEQ ID NO: 21432 - protein, 567 aa, Solanum ptychanthum
PRKGCDVLVEALEREGVTDVFAYPGGASMEIHQALTRSNIIRNVLPRHEQGGVFAAEGYARATGFPGVCIATSGPGATNLVSGLADALLDSIPIVAITGQVPRRMIGTDAFQETPIVEVTRSITKHNYLVMDVEDIPRIVREAFFLAKSGRPGPVLIDVPKDIQQQLVIPNWDQPMRLPGYMSRLPKLPNEMLLEQIVRLISESKKPVLYVGGGCSQSSEELRRFVELTGIPVASTLMGLGAFPTGDELSLQMLGMHGTVYANYAVDSSDLLLAFGVRFDDRVTGKLEAFASRAKIVHIDIDSAEIGKNKLPHASICADIKLALQGLNSILEGKEGKLKLDFSAWRQELNEQKVKYPLNFKTFGEAIPPQYAIQVLDELTNGNAIISTGVGQHQMWAAQFYKYKKPRQWLTSGGLGAMGFGLPAAMGAAVGRPGEIVVDIDGDGSFMMNVQELATIKVENLPVKIMLLNNQHLGMVVQWEDRFYKANRAHTYLGDPANEEEIFPNMLKFAEACGVPAARVTHRDELRAAIQKMLDTPGPYLLDVIVPHQEHVLPMIPSGGAFKDVIT

SEQ ID NO: 21433 - protein, 548 aa, Picrophilus torridus DSM 9790
MATVADVIVKTLVNFGVKRIYAIPGDSLNPIIDAIRRNRDIKYIQVRHEEGGALSASFESKYSGNLSACMGTSGPGSIHLLNGLYDAKMQHVPVIALTGQIETDLLYHDYFQEVDLVKLFDDVSVFNARITNPDNANYIIWRACREALIKKGVAHVDMPVDVLRMNSREIDLSYNIEKPDYKPDLKGAEELINKSKRPLIFIGSGARDAGEKINKLAERIGAPIIYALNGKGIISDGDKKVLGGIGLLGTRPSIKAMSKTDLIIFLGTVFPYSAFINNVKNIQVNNNIEDLNKIMKADVSCLCDVSYFLDNLNVSEKSDKFYDEMDSEISKWKKDIESRAFKRDNIISAEALSYEISKRIEDDAIIVGDTGNVTLWVNRYINAKKNNKFFFSSWLGTMGAGIPGTIGISLASGRKVYGIIGDGSFAMTSMELITIKKYNIPVKLIIYDNHILGMIKLEEEIMGYPEYGVDLYNPDFARLAESVGIKGIRIENYNELNEKLDEFFNYDGPAVLDVITETNETPMPPKLEFRVAERYITSILREKLEPRE

SEQ ID NO: 21434 - protein, 396 aa, Magnetospirillum magnetotacticum MS-1
MAKAKFERNKPHCNIGTIGHVDHGKTSLTAAITKILAETGGATFTAYDQIDKAPEEKARGITISTAHVEYETTNRHYAHVDCPGHADYVKNMITGAAQMDGAILVVSAADGPMPQTREHILLARQVGVPALVVFMNKCDMVDDPELLDLVELEVRELLSSYDFPGDDIPIVRGSALCALEDKQPEIGREAILSLMAEVDKYIPQPERPKDKPFLMPIEDVFSISGRGTVVTGRVERGVVKVGEEVEIVGIKATVKTTCTGVEMFRKLLDQGEAGDNIGALLRGTKREDVERGQVLAAPGSITPHTDFEAEAYILNKEEGGRHTPFFTNYRPQFYFRTTDVTGVVALPEGTEMVMPGDNVKMIVTLIAPIAMDQGLRFAIREGGRTVGAGVVAKIIK

SEQ ID NO: 21435 - protein, 287 aa, Chlamydia muridarum Nigg
MLLKGAPAADGILATVKDNIRSQSGSPGLAVVLIGNNPASEIYVNMKVKRARDLGMISRSYRKPSDATLSDILSLIHELNCDENIHGVLVQLPLPKHLDTQTILSSISPNKDVDGLHPVNMGKLLLGETDGFIPCTPSGIVELFKYYEIPLYGKHVVILGRSNIVGKPLSALLMQKHADTNASVTVLHSQSEHLKEITKTADILVSAIGVPLFVTKEMISEKCIVIDVGTSRVPADNPKGYSLVGDVDFNNVVPVCQAITPVPGGVGPMTVAMLMRNTWESFLRHTL

SEQ ID NO: 21436 - protein, 258 aa, Acinetobacter sp. SE19
MENEILNLDIQSNGVAIVELHRPDTRNALNLELRQQLAAMFEQLAASDTVRAIVITGGEKVFAAGADIRDFTTAKTVDMYLRHTEQYWRAIIDCPKPIVAAVNGYALGGGCELAMHADIIIAGKSAQFGQPEVKLGLMPGAGGTQRLLRAVGKFKAMQIVLTGKIFSAEEADKMGLVSEVVEDDQTLAKAVEIATQIAQLSPIAVEQIKEVTTLGANMPLDGALALERKAFQILFDTQDQKEGVNAFFEKRSPQYQGK

SEQ ID NO: 21437 - protein, 474 aa, Mycoplasma mycoides subsp. mycoides SC str. PG1
MKKQLDKITPRNIDFSQWYTDIVLNTKLASYGPVKGTMIFRPYGYRIWELIQKYLDEEFKKVNVDNVYFPLLIPESLFNKEKDHIEGFSPEIATVTRVGQKKLEENLFIRPTSEVVMMDYFSNEINSYRDLPLIYNQWCNVMRWEKTTRPFLRTSEFLWQEGHTIHSSYNEAENFCLKILNIYEKFAKEILLLPVICGKKTEKEKFAGAKDTYTIESLMFDGQALQCGTSHFFADNFTKVYDIKFQNKENKLEHAYSTSWGVSTRLIGALIMTHSDDNGLVLPSKISPIQIQIIQIKNTEQIDQVVENIKDKLSDYRIDVDNSDKSFGFKISEAEIKGIPIRIEIGPRDLENNQITISRRDQQENKIKIDYKDVKKVVDQMIKDYDLSLYNSALENRKNRTFKANTIEEYIEILKQNQGFVLVPFCGRVECEQDIKTKTATNSRCIPFDQKEVKAKCFNCKKDTCLQVIFARAY

SEQ ID NO: 21438 - protein, 340 aa, Psychrobacter arcticus 273-4
MATDNTAPRHEKLIILGSGPAGYSAAVYAARANLKPVMVTGMEVGGQLTTTTEVDNWPGDAHDLTGPALMERMKAHAERFGTELVYDHINAVNLNVRPFELTGNNGSYTCDALIISTGASAQYLGLESETKFRGLGVSACATCDGFFYKDKKVAVIGGGNTAVEEALYLSNIASEVTLVHRRDSLRSEKILQDKLFEKAKNGNVKIEWNHSVKEVVGDDMGVNGVVIESMLDGSTKQLDVFGMFVAIGHKPNTDLFKGQLEMKDGYLIVNSGLNGNATQTSIEGVFAAGDVADHVYRQAITSAGTGCMAALDAEKYLDAIGEAVAKDHTYASTLTADKEA

SEQ ID NO: 21439 - protein, 445 aa, Picrophilus torridus DSM 9790
MELKRSITLTGAIMINLGAIIGAGIFVIIGIAAYRAGPGVIISIVLSGIIAILTGLSFSEIARHVAKEGGAYEYAKDTLSPSAGFVAGWMWTSGNIIAIAAVATSFGSYFDVLFNINVNPFFIAVICILAFMTLNILGIKNSTKTITGLVILNVLVLLVFIFSGITRFNSNNYVNFMPHGISGIITGTALIFFAFTGFSRVTTVSDEVINPEKTIPLAIIVSIIISSILYILIAVVLIGLKPYYAYQGSTSPLSLAVSSLHNRYIDIIVSIGGVTSTAGVTLTGILGTSRVLFAMGRDKELPEKLSYIDRFSTPVFAIILSSILGIIFLIFVSFGTIVEASNSSVLISYIIINVAAGFLYLKLRKRETKRLAGRPFFIIIPALGIATILLIISHINIGSLEITGVILLICIIYYIIRRIALNIEGRRVPRHSDVRLFGKSRSRTN

SEQ ID NO: 21440 - protein, 497 aa, Aspergillus nidulans FGSC A4
MTPSLQRQLFYDGKPQHASSGRTFQSINPADATLLAEIPVASQSDIDAAITAAERAFPSWAQTPPIARARILQKAAALLRERNDEIARVETLDSGKAYSETSTVDVVTGADVLEYYANLVGGGGLNGETTQLREEAWVYSKKAPLGVCVGIGAWNYPIQIALWKSAPCLAAGNTMVYKPSEFTSLHGQTLAEIYKEAGLPDGVFNVVYGAGDVGSYLTSHPTVAKVSFTGQVSTGMKVSGAAAGNMKYVTMELGGKSPLLILPDADLENAVDGAMMANFYSTGQVCTNGTRVFIPKSMKKDFESRLVEKMQYIRPGPLFDENTNFGPLSSAVHQEKVTAYIRHGIEQDKATLLYGGLGKPSLPKDLEAGFWVRPTIFTDCTDDMRIVKEEIFGPVMSILTYDSVEEAVKRANTTELGLAAGVFTKDLNLAHRIIDQLEAGITWVNTWGESPAEMAVGGWKKSGLGVENGRRGIEAWVRNKSTLVDMGNAVATVFAKL

SEQ ID NO: 21441 - protein, 498 aa, Acinetobacter sp. SE19
MGGIPHIPFCLTSVICQGCLIMNYPNIPLYINGEFLDHTNRDVKEVFNPVNHECIGLMACASQADLDYALESSQQAFLRWKKTSPITRSEILRTFAKLAREKAAEIGRNITLDQGKPLKEAIAEVTVCAEHAEWHAEECRRIYGRVIPPRNPNVQQLVVREPLGVCLAFSPWNFPFNQAIRKISAAIAAGCTIIVKGSGDTPSAVYAIAQLFHEAGLPNGVLNVIWGDSNFISDYMIKSPIIQKISFTGSTPVGKKLASQASLYMKPCTMELGGHAPVIVCDDADIDAAVEHLVGYKFRNAGQVCVSPTRFYVQEGIYKEFSEKVVLRAKQIKVGCGLDASSDMGPLAQARRMHAMQQIVEDAVHKGSKLLLGGNKISDKGNFFEPTVLGDLCNDTQFMNDEPFGPIIGLIPFDTIDHVLEEANRLPFGLASYAFTTSSKNAHQISYGLEAGMVSINHMGLALAETPFGGIKDSGFGSEGGIETFDGYLRTKFITQLN

SEQ ID NO: 21442 - protein, 388 aa, Bartonella henselae str. Houston-1
MTTEIRVPTLGESVTEATVGKWFKKLGEAVAVDEPLIELETDKVTVEVPSPVAGKLSEIIAKEGDTVEVKALLGLVEAGAAGISQSFSPSATPIPEVPSELKQSSSSGAMQKDTMPPSPSAAKLMAENNIAKSNISGSGKRGQILKEDVLGVLEQEVKAPSVSAASSSASLVQEKHEERVRMTKLRQTIARRLKDAQNTAAMLTTFNEVDMSAVMDLRKRYKDLFEKKHGVKLGFMGFFTKAVCHALKELPAVNAEIDGTDIVYKNYVNVGIAVGTDKGLVVPVVRHADQMSLAEIEKEIGRLGRLARDGKLAVSDMQGGTFTITNGGVYGSLMSTPILNAPQSGILGMHAIKERAMVVGGQIVIRPMMYLALSYDLEEHHKKLFVLH

SEQ ID NO: 21443 - protein, 237 aa, Triticum aestivum
MPSRPAPFVHRFRLLRSAAVSPSSAPLPCSRPRLAIPFAQPTLRAPAFAAASSPLLRPVGARFSLFSSMAAAASSASSVHDFTVKDASGKDVDLSTYKGKVLLIVNVASQCGLTNSNYTELAQLYEKYKDQGFEILAFPCNQFGGQEPGTNEEIVQFACTRFKAEYPIFDKVDVNGDNVAPVYKFLKSSKGSLFGDNIKWNFSKFLVDKEGRVVDRYAPTTSPLSIEKDIKKLLASS

SEQ ID NO: 21444 - protein, 164 aa, Nocardia farcinica IFM 10152
MAEMSIRDIPLRTLSGADTTLAELVGDKAVLLVNVASKCGLTPQYSGLVELHRSYGERGFSVVGVPCNQFMGQEPGTAEEIEQFCSTTYGVDFPLLEKTEVNGENRHPLYAELTQVADAEGTAGDIQWNFEKFLIDRDGKVAGRFRPRTEPQDPALVAALEGVL

SEQ ID NO: 21445 - protein, 463 aa, Methanocaldococcus jannaschii DSM 2661
MVNRKPNNPNKNGEEMRAIIIGSGAAGLTTASTIRKYNKDMEIVVITKEKEIAYSPCAIPYVIEGAIKSFDDIIMHTPEDYKRERNIDILTETTVIDVDSKNNKIKCVDKDGNEFEMNYDYLVLATGAEPFIPPIEGKDLDGVFKVRTIEDGRAILKYIEENGCKKVAVVGAGAIGLEMAYGLKCRGLDVLVVEMAPQVLPRFLDPDMAEIVQKYLEKEGIKVMLSKPLEKIVGKEKVEAVYVDGKLYDVDMVIMATGVRPNIELAKKAGCKIGKFAIEVNEKMQTSIPNIYAVGDCVEVIDFITGEKTLSPFGTAAVRQGKVAGKNIAGVEAKFYPVLNSAVSKIGDLEIGGTGLTAFSANLKRIPIVIGRAKALTRARYYPGGKEIEIKMIFNEDGKVVGCQIVGGERVAERIDAMSIAIFKKVSAEELANMEFCYAPPVSMVHEPLSLAAEDALKKLSNK

SEQ ID NO: 21446 - protein, 601 aa, Novosphingobium aromaticivorans DSM 12444
MLMHTHEARLDALRKQLAKDGLDGFVIPISDEHMSEYVGAYAQRLEWLTGFGGSAGTAVVLANEAAIFVDGRYTLQVRDQVDGSLWSYQSVPQTSVAAWLGEHAPKGARIGYDAWLHSKGWAQAAQKALADRGATLVPVSANPVDAVWQDRPAPSLAPAIPHADEHAGKSASEKRAEVAEWLAARGLDAAVVTALDSVAWLLNIRGSDVDRTPVALSFVLAHADGTADLFIAPEKVTPALLAHLGNAVRVQPREAFVPALRALAGRKVAVDPERAVAAIFHALEDSGAEIVAETDPVVLPKALKNPVEQAGHRAAQARDGAAIARFLRWVAVEAPKGGVTELSAANRLQAFRAEGGLLRDLSFDTISGAGPNGAVVHYRVSEETSRVLEPNSVYLVDSGGQYVDGTTDITRTVWIGPGEPPALVKDRFTRVLKGHIALARAVFPKGTAGSQLDSFARQFLWAAGLDYAHGTGHGVGSFLAVHEGPQRIAKASGGQAGTGQELMPGMILSNEPGYYKTGEYGIRIENLVLVERREIEGAEGEFYGFETLTFAPIDRALVDVALLSGEEREWLNAYHASVRAVLAPQLGGEDREWLVRACAPL

SEQ ID NO: 21447 - protein, 416 aa, Ralstonia eutropha JMP134
MALIVHKYGGTSMGSTERIKNVAKRVAKWHRAGHRVVVVPSAMSGETNRLLGLAKEISAQPDPRELDMLASTGEQASVALLAIALHGENIDAVSYTGWQVPVKTDSSYTKARIESIDDERILGDLDAGRVVVITGFQGIDDDGNITTLGRGGSDTSAVAIAAAIEADECLIYTDVDGVYTTDPRVVEDARRLDKITFEEMLEMASLGSKVLQIRSVEFAGKYRVKTRVLSSLTDPLMPLENEINSGTLITFEEDSNMEAAVISGIAFARDEAKITVLGVPDKPGIAYQILGPVADANIDVDMIIQNQSVDGKTDFTFTVPRGDYQRTLTLLTDSVKPHVGAANVSGDPKVSKVSVVGVGMRSHVGVASKMFRTLSEEGINIQMISTSEIKISVLIDEKYMELAVRALHKAFELEQA

SEQ ID NO: 21448 - protein, 540 aa, Medicago truncatula
METCTALLLLTAITAYLLWFTFISRSLRGPRVWPLLGSLPGLIENCERMHDWICDNLRACGGTYQTCICAIPFLAKKQGLVTVTCDPRNLEHILKTRFDNYPKGPTWQAVFHDLLGDGIFNSDGNTWVFQRKTAALEFTTRTLRQAMARWVSRAIKDRLCTILKKAEVQGEPVDLQDVMLRLTFDNICGLAFGRDPQTCATGLPENGFAAAFDRATEATLQRFILPEVFWKVKKWLGLGMEVGLSRSLAFVDQHLSSVIEKRKVELLSQQKDGSLLHDDLLTRFMRKKESYSDKFLQHVALNFILAGRDTSSVALSWFFWLVIQNPKVEEKILREICTVLMETRGADMEKWTDEPLGFEEVDRLVYLKAALSETLRLYPSVPEDSKHVVKDDVLPDGTFVPAGSSVTYSIYSAGRLKSTWGEDCMEFRPERWLSLDGTTFIMHDSFKFVAFNAGPRICLGKDLAYLQMKSIAAAVLLRHRLAVVPGHRVEQKMSLTLFMKNGLRVNVYNRDLKGVFATIQNEKEGEIQGKVLNDLKCNGT

SEQ ID NO: 21449 - protein, 267 aa, Rhodopseudomonas palustris CGA009
MLADLIEAPTPEQHFSSPPLRMAVASSEGIRIDQHFGQTELFRVYDVSASGAVAVETRDVNQHAAGDEDRRDTICRMLKDCRILLVAKIGITPQEKLAGHGIEAIDRFAGKAVEAALTEVYVSKSAAKADLPLDASTFRLMHTMLRVTDLARSIDFYTRLLGMIVLEQREHKKNQFTQTYLGYAAGFSGMTLELVFNWSDDQAYTHGTSYGHIAIGVTGIAALCDRLAAQGVKMPRPPRAQRHGEAIVAFIEDPDGHRIKLVQAPNA

SEQ ID NO: 21450 - protein, 422 aa, Rhizobium sp. NGR234
MRRVVVTGMGAVSPLGANVSSTWSRLLAGKSGIHRLPDEVVGDLPAKVGGVVPFLEEDAEAGFDPDRVLPPKDQRKVDRFILFAMAAADEALAQARWRPVSEEDRLRTATIIASGIGGFPAITDAVRTVDQKGPRRLSPFTIPSFLVNLAAGQVSIRHGLKGPLGAPVTACAAGVQAIGDAARMIRANEADIAVCGGTEACMNTVSLGGFAAARALSTGFNESPALASRPFDMMRDGFVMGEGAGVLVLESLSHALARGAEPLAELVGYGTTADAYHVTSGPEDGSGAARAMQIAIGQAGISPHEIQHLNAHATSTPLGDRGEIGAIKTVFGSTAGIAVSGTKSATGHLLGAAGGLEAIFTILALRDQVAPPTLNLNAPDPAGDGIDFVASKSRPLQMDYAITNGFGFGGVNASALFRRWSE

SEQ ID NO: 21451 - protein, 312 aa, Candida albicans SC5314
MSLVAIKNGISKLVSSKDASDAELERVERLIDSNQIPYGSTDSNDERAQQLAREEAIIQAAASISAASSSENKEEEGVDSITAFFNTFDPRVMSDIIIGLSDGLTVPFALTAGLSSLGDSKLVITGGMAELVSGAISMGLGGYLAAKSESEYYFSQVKKEKLEFFKKPEAINQDAAEIMFELGASEQTIISFLKDLDAKPKNLIDFVIRYGKGLEEPAAGRELTSALTIGASYFLGGFVPLLPYFFTKEVGTGLIISVVAMLVVLMLFGYFKCSISMGEGCPNHKKFAAGFEMVVVGSIAAGAAWGLVFLIE

SEQ ID NO: 21452 - protein, 104 aa, Streptococcus pyogenes MGAS8232
MALEVTDATFVEETKEGLVLIDFWATWCGPCRMQTPILEQLSQEIDEDELKILKMDVDENPETARQFGIMSIPTLMFKKDGEVVKQVAGVHTKDQLKAIIAELS

SEQ ID NO: 21453 - protein, 106 aa, Sorghum arundinaceum
VETQQLLLQIAGHKDILEGDPYLKQGLRLRNPYITTLNVFQAYTLKRIRDPSFKVTPQPPLSKEFADENKPAGLVKLNPASEYPPGLEDTLILTMKGIAAGMQNTG

SEQ ID NO: 21454 - protein, 228 aa, Saccharophagus degradans 2-40
MSIPQAKRDFKIAPSILSADFARLGEEVDAVLKAGADFVHFDVMDNHYVPNLTFGPMVCKALRNYGITAPIDVHLMVDPVDDLVKTFADAGATYISFHPDASRHADRTVKLIRDLGCKPGVVLNPAVTLESVKHLLDQVDMLLLMSVNPGFGGQKFIPYTLDKLKEARARLDDAGLEARLEVDGGVSTANIADVARAGADTFVAGSAIFGAQNYESVIKQMRDTLAQL

SEQ ID NO: 21455 - protein, 118 aa, Arabidopsis thaliana
MAGVMKLACLLLACMIVAGPITSNAALSCGSVNSNLAACIGYVLQGGVIPPACCSGVKNLNSIAKTTPDRQQACNCIQGAARALGSGLNAGRAAGIPKACGVNIPYKISTSTNCKTVR

SEQ ID NO: 21456 - protein, 77 aa, Triticum aestivum
DYGNQVLTLRLGGLVFACLLHRSPNRQIWLSSPVSGPARFDWDAATDSWVYRRTGVNLMRLLEKEIGELCGTPVDLS

SEQ ID NO: 21457 - protein, 383 aa, Citrus sinensis x Poncirus trifoliata
MAIDCIKNIPTMLHQPKEEYKDEQKPLVFDASVLKHQTQIPKQFIWPDDEKPCVNAPELQVPLIDLGGFLSDDPVAAKEASRLVGEACRKHGFFLVVNHGVDSSLIADAHRYMDHFFELPLNEKQRARRKLGEHCGYASSFTGRFSSKLPWKETLSFRYSAEKSLSNNIVEDYLLNTMGDEFKQFGRVYQDYCESMSRLSLGIMELLAISLGVGRAHFKEFFEENDSIMRLNYYPPCQKPELTLGTGPHCDPTSLTILHQDQVGGLQVFVDNEWRSISPNFEAFVVNIGDTFMALSNGRYKSCLHRAVVNSQTTRKSLAFFLCPKNDKVVSPPSELVDTYSSPRIYPDFTWPMLLEFTQKHYRADMKTLEAFTNWLQQKKQLK

SEQ ID NO: 21458 - protein, 344 aa, Idiomarina loihiensis L2TR
MSSVNTINRIAIITSGGDAPGMNAALRAVVLAAENYGIEVMGFRHGYEGLLTNDFVKLDREDVEHILQYSGTIIKSARSERFKSEEGGREAATNLDAHQIDAFIVIGGDGSFRGAEHLANFWKGPIIGIPGTIDNDLFGTDNTIGYDTAVETAMDALDKIRDTAEAMDRVFIVEVMGRNAGYIGISSAMACGAERMILPELQKDKPLTVDALVKHIESVQRVRGDSSYVMVLCENQWPGGAVRLAEQLEDRLNLPCRPCLLGHVQRGGRPTAMDRILGTRLGVHAVELVRQGKTAVMAGVTANELSETPLIDTWTKRKKLSEELINIQQSLFNPIKKDRNKSTQ

SEQ ID NO: 21459 - protein, 421 aa, Bradyrhizobium japonicum USDA 110
MRRVVVTGLGMVSPLGCGVEPTWKRILNGESGARRIESFDVSDLQTKIACTVVRGDGSNDTFNPDKWMEPKDQRKVDDFIIFGMAAAGQALDDANWHPETEEDKCATGTMIGSGIGGLNGIAETAILLKERGPRRVSPFFIPGRLINLASGYVSIAHGLKGPNHSVVTACSTGAHAVGDAARLIALGDADVMVAGGAESPISRIGIAGFNAARALSTGFNDTPEKASRPYDKDRDGFVMGEGAGVLVLEELEHARRRGAKIYAEVIGYGLSGDAYHITSPSPDGDGGFRSMQAALKRAGLTASDLDYINAHGTSTPLGDEIELGAVERLLGNAASKVAMSSTKSSTGHLLGAAGAIEAIFAILAIRDNVVPPTINLDNPSVETTIDLVPHTAKKREVNVALSNSFGFGGTNASVIVRRLAN

SEQ ID NO: 21460 - protein, 435 aa, Bdellovibrio bacteriovorus HD100
MSKVTLFWFRRDLRLDDNAGLYHALKERSAVLPLFIFDSEILENLDDPADARVTFIYEQIQDMKQQLNAKKSDLIVRHGKPLEVLKTLSDEMAVEAIYANHDYEPAARKRDEKVAAWAAKAGIEFLTFKDQCLFEKDEILTDARKPYTVYTPYRNKVLANLSEFYLKSYPNDLYESSYAKVKKAEPLLTLKSLGFERSNIEFPPMDLSTKMLKTYHATRDFPADEKGTSHLGLHLRFGTLSVRELAREAKKYSPVWLSELIWRDFFMQILWHFPQVENQSFRPEYDKIAWRKSKADFQKWCEGRTGYPLVDAGMRELNATGYMHNRVRMVVASFLCKHLLIHWYEGERYFAKKLLDYDLSANNGNWQWAAGSGCDAAPYFRIFNPQTQFEKFDPDGKYVQKWVPEYGTDEYPQPMVDHNEARGRCLQAFTKVLKK

SEQ ID NO: 21461 - protein, 316 aa, Nocardia farcinica IFM 10152
MSGQAVLRDVTLRDGLQLTGKPLPTARKIEIVRALLALGVPELEIGSMARPDLVPPMADTLDLVAALTPAELARCWVWVATPRHVEKAAAAGVRNFQYCFSVSDAHNRANIGRDTEASVAAMPDALRLAERVGGRVQLCLATSFTCPFDGDIDPERVLAIAADPRTDGATDIVLADTLGQAHPAQVRSLITAVREHSPARRIVFHGHDTWGMGVANTLAAIEAGATMVDGSLGGLGGCPFAPGASGNTSTEDILFATRPGWLTPAALAELVDLAGGLLTDLDEPNRSRTAEGARTESTPFAWTTRVATGRPVQSNT

SEQ ID NO: 21462 - protein, 319 aa, Lactobacillus casei
MKRIGILTSGGDAPGMNAAVRAVARKAMHEGLEVYGINYGFAGLVAGDIFKMNESTVGDKIQRGGTMLYSARYPQFAQEEGQLRGVEQLNKFGIEALVVIGGDGSYHGALALTRHGFNTIGLPGTIDNDIPYTDFTIGFDTAVNTVVEAVDRLRDTAASHERTFVIEVMGREAGDIALWSGVAGGAEDVIIPEHDFDVKKIASKLQSSRERGQKHAVILLAEGVMHADQFAKELAAHGDFQLRSTVLGHIVRGGAPSARDRVLASQMGSYAVELLLQGKGALAVGIENNKITAHDVRTLFDAKHHAELSLYTLAEELTF

SEQ ID NO: 21463 - protein, 336 aa, Schizosaccharomyces pombe
MPSCTSFPIGTRKSKLAVIQSEIIREELEKHYPHLEFPIISRDTIGDEILSKALFEFKRQLAKSLWTRELEALLVTNQCRILVHSLKDLPSEMPDGMVIACIPKRSCPLDAIVFKAGSHYKTVADLPPGSVVGTSSIRRRALLARNFPHLRFVDIRGNVGTRLAKLDAPDSQFDCLVLAAAGLFRLGLKDRIAQMLTAPFVYYAVGQGALAVEVRADDKEMIEMLKPLQHQETLYACLAERALMKRLQGGCAIPIGVQTDVLAISNSSYRISLLGTVLSADGLRAAFGNAEAVVSSEEEAEELGITVALALLKNGAGPILEEHQRSSDSEESLKNY

SEQ ID NO: 21464 - protein, 462 aa, Halobacterium sp. NRC-1
MHLYWHQRDLRVPDNRGLHAATDGDTVVPVYVFDDTVLSQVGRPKRAFLAAGVRALRAAYRERGSDLLVREGDAESVLPALADEFDADTVFHAAHYDAARRNRRTRVADALAAAGVDTAGHVDHTLVDPATLDDAYPSHSQFYDDWQQAPKPDPVPAPDADALADVHDDHTLSVPAPEPPLPDAGHAAATDRLAAFLDDGIASYNDTRDDLAAAVDAPASAVSRLSPYLAAGNIGVREVWAAVADAYDDATGNAARNIGKYRYELSWREQNYHLLYHTPRLQTENYVSFDAPIAWQNSDDHFEAWTRGETGYPLVDAGMRQLRAEGYVHNRPRQVVASFLTKHLLVDWRRGERHFADRLVDYDPANNAANWQWTASTGTDTVAVRIFDPVSQMAKYDSDAAFVTEYVPELRGVDPETIVDWPTLRHSQRERLAPDYHHPIVDRDHAYERAQRVFEAALDGDA

SEQ ID NO: 21465 - protein, 173 aa, Glycine max
HHGDVVPKLSPPNTYEAVVNGGTFDRLHDGHRLFLTASAELARRRIVIGVCDGPMLAKKQFAELIQPIEERINNVKTFIKSIKPELEVQAVPITDPFGPSITDENLEAVIVSKETLPGGLAINRRRAERDLSQLKIEVVDLVSGESGEIKLSSSMLRKIEAERAKQQNTIPQT

SEQ ID NO: 21466 - protein, 478 aa, Lycopersicon esculentum
MSSYSELSNLPIREIPGDYGFPIISAIKDRYDYFYNQGEDAWFHNKAEKYKSTVVKINMAPGPFTSNDYKLVAFLDANSFVCMFDNSLIDKTDTLGGTFKPGKEYYGGYRPVAFIDTKDPNHAALKGYILSSFAKRHNLFIPLFRNTLSDHLFNNLEKQVTEQGKADFNALLPTMTFDFIFRLLCDQKNPSDTVLGAQGPEHLRKWLFPQLIPSLSAKKLPNIIEDMLFHNFLIPFGFIKSDYNKLVDAFSKSAVSMLDEAEKLGIKREEAVQNILFLVGINMFAGLNAFFPHLFRFVGEAGASLHTQLAKEIRSVIKEEGGAITLSAINKMSLVKSVVYETLRLRPPVPLQYGKAKKEFMVQSHDASYKINKGQFVVGYQPMASRDPKIFANPDEFVPDRFMNDGEKMLKHVLWSNGRETESPAPDNKQCPGKDLVHLLGRLILVEFFIRYDTFTLEITPLFRAPNVAFNTLTKASK

SEQ ID NO: 21467 - protein, 621 aa, Listeria monocytogenes str. 4b F2365
MCGFVGCVHDRITEITGADKETFRQMNSMITHRGPDDEGYFTDDHVQFGFRRLSIIDVENGHQPLTYENERYWIIFNGEVYNYVELREQLVAEGMTFETESDTEVIIATYAKYKEKTAERLRGMFGFVIWDKQEELVYGARDPFGIKPFFYAEEDGKLFMGSEKKSILHALKEKELDEVSLQNYMTYQFVPEPDSLTKNVKRLEPGHQFTKKIGQPMEITTYWKASFAPVTKSEDAWIKEVRDVMYDSVKMHMRSDVPVGSFLSGGIDSSIIAAIAKEYHPAIKTFSVGFERDGFSEIDVAKETADKLGVENISYVISPEEYMKELPKIVWHMDDPLADPAAIPLYFLSREARKQVTVALSGEGADELFGGYNIYNEPNSLAMFNKMPSVFKSMLNSVARIMPEGMRGKSFLERGTTPMEERYIGNAKMFTEKEKQILLPKYQAGHDYTNITDPFYAETTNYHPVERMQYIDIHTWLRGDILLKADRMTMANSLEVRVPFLDKEVYNVARNIPDTMKTTNGTTKYILRKAAATFVPEHVLNRRKLGFPVPIRHWLKDEMNAWVKNIIKESPTDHLINKQYVLGLLDDHCAGKFDYSRKIWTVVIFMIWYDVYVADKYDFGK

SEQ ID NO: 21468 - protein, 385 aa, Brassica napus
  misc_feature (150)..(150): Xaa can be any naturally occurring amino acid
MVAHKETVCVTGASGFIGSWLVMRLLERGYFVRATVRDPGNLKKVQHLLDLPNAKTQLTLWKADLSDEGSYDDAINGCDGVFHIATPMDFESKDPENEVIKPTVNGVLGIMKACDKAKTVRRIVFTSSAGTVNVEEHQKNVYDENDWSDXDFIMSKKMTGWMYFMSKTLAEKAAWDYAKEKGIDFISIIPTLVIGPFITTSMPPSLITALSPITRNEAHYSIIRQGQYVHLDDLCNAHIFLYEQAAAKGRYVCSSHDATILTISEFLRQKYPEYNVPSTFEGVDENLKSIMFSSKKLIDMGFNFKYSLEDMLVESIETCRQKGFLPVTLPEHLKSEDKVPGSDDNKEIKNGSAGLTDGMVACKKTEPGMAGEKADSHMSAQQICA

SEQ ID NO: 21469 - protein, 318 aa, Triticum aestivum
  misc_feature (200)..(200): Xaa can be any naturally occurring amino acid
MVVLVVATASDPASIGPAAAFLAMPGWSPGPPIPEGMESFTNGNVRLLKHERSIVAEDDLDRRWQEATGEAVSEVIFLSKHTAVSNRPALTVHPIGVPHLREDETPPQGGRPGWAAVPNPRIGPWFRLMQKVAADQGLVPEFEITLEATHHGPLTSTPTMFVEIGSTQEYWGRQDAAQAIALVLWKGLGLEEGNAVGTCXGSGEKVLLGIGGGHYAPRHTDIVIKDGVWVGHLLSGYSLPMDAPPQVNGKSSGEVGGMWKHSIKVSYEATKAGFPGGEVIAHLDQKSFKGWQKNAITSYLQEQNIRIGKPNDFLCTKT

SEQ ID NO: 21470 - protein, 394 aa, Vibrio vulnificus YJ016
MLSENTINIVKSTAPLLAETGPKLTAHFYQRMFEHNPELKDIFNMSNQRNGDQREALFNAICAYASNIDNLPALLGAVEKIAHKHSSFLITADQYQIVGSHLLATIDELFSPGQAVLDAWAEAYGVLANVFIQREEQIYQANQSQTGGWRGLREFELVEKQYESAHICSFVFKPVDGGSVVSFKPGQYLGIYINDEQFENQEIRQYSLSSSVRPDCYRISVKREEGGRVSNYLHDHLDVGSKVKLAAPAGDFFLDAAPTAPVVLISAGVGLTPTLSMLESLTEHQAPVTWIHATENGQQHAFKQHVKQLVETHPHFNSLVWYNQPNSDDKIGDDFQFSGWVNLHEIETVLKQADVQVYFCGPVGFMQFIAKQLLEMGVPEQQFHYECFGPHKVV

SEQ ID NO: 21471 - protein, 672 aa, Trichodesmium erythraeum IMS101
MPVVNPSTIINFPLAAVVGQEAIKLALLLAAVDPGLGGVAIAGRRGTAKSVMARAIHSLLPPIEIVKGSISNCNPNYPEEWDEQVLQESPNATGEEISTEVIPAPFIQIPLGVTEDRLLGSVDVEKSVKQGETVFQPGLLAAAHRGVLYVDEINLLDDNIANLLLTVLTEGKNQIEREGISFQHPCQPLFIATYNPEEGPLREHLLDRIAIALSADMVLGLDQRVEAVGQALDYANSPQAFLERYTEDIDNLKTQILLAREWVKEVVITHEQILYLVEEAVRGGVQGHRAELFAVRVAKASAALDGRTTVNADDLRRAVELVIVPRATIVPTPPEEEQQPPPPPPPPPEDQSEQEQDEQEDEEKPEPPEEEEASIPEEFLFDPEGVVLDDSVLYFAQMANRQGKSGSRSIIFSEDRGRYVKPMLPKGKVRRIAVDATLRAAAPYQKSRRERQPNRRVIVEQGDMRAKRLARKAGALVVFVVDASGSMALNRMQSAKGAVMQLLTEAYQSRDQVSLIPFRGEQAEVLLPPTRSITSARRRLEKMPCGGGSPLAHGLTQAVRVGVNAKQSGDVGQVVIVAITDGRGNIPLARSLGEPMLDAEKPNIKEELLEIAGKIRGLGIQLLMIDTENKFVSTGFAKELAKQSGGKYYHLPKASDQAIAAMTQNALKDAIG

SEQ ID NO: 21472 - protein, 456 aa, Gibberella zeae PH-1
MLSAALRRRVLAPTHSALRTGFAAHVVRHYASFPEHQVIKMPALSPTMQAGNIGAWQKKIGDSIAPGDVLVEIETDKAQMDFEFQEEGVIAKILKDAGEKDIPVGSPIAVLVEEGTDVAAFEKFSVEDAGGAAKPAAPKEEKSESKSESASTPEPSSEPQQYESQGRLQTALDREPNIAAPAKRLAREKGISIDGIKGTGKNGQITEADVKKAVSSPAASAASSAASYEDIPISGMRKTIANRLVESTQTNPHFYVTSSLSVSKLLKLRQALNASADGKYKLSVNDFLIKAIAVASRKVPQVNSSWRDGNIRQFNTVDVSVAVSTPTGLITPIVTGVEGRGLEAISAQVKSLAKKARDGKLKPEEYQGGTISISNMGMNPAVDHFTAVINPPQAAILAVGTTKKVAIPSDNEAGVEFDDQITLTASFDHKVVDGAVGAEWLKEVKKVIENPLELLL

SEQ ID NO: 21473 - protein, 1413 aa, Aspergillus nidulans FGSC A4
MADLKPPFTEEAARAKVKIAQNLWNAQDPVRVSQAYTPGCIWRNRTSFFSGTEAIVDFLTAKWKRERNYRLRKELFSFTDNRIAVQFWYEFQDANDSMRWKRCYGLEDWTFDRESGKMCKRMMSGNDILLGPDGNGEGRCDYRLLTQRWDHPTYHPYNRNRRLQQLDLNHFCRARISLAMEETSPFPDSKTMRSPLTDASNRINNCHTPTTERRLMREEHALTSPVPMSIVDSPLSPRNNAENNGPPPVGDSRACSKRNSAVSAASIVSAKGKRKTHVGPWQLGRTLGSGATGRVRLAKHAVTGQTAAVKIVSKKCAAISQSDSIAAMDRNAGTFIGAGGRQMPSGIEREVVIMKLIEHPNVISLYDVWENRGELYLVLEYVEGGELFDYVSNHGPLPEEEAVRLFRQIIAGLGYCHRFNICHRDLKPENILLDGEHNIKLADFGMAALQPAGHWLNTSCGSPHYAAPEIIYGRKYRGDKADLWSCGIILFALLTGFLPFDGEDLHATLQLVRKGDYMIPPHVSAEAADLIQRILQKKPDDRISMKDIWKHPLLKKYEKFHQAICNHYLGPPPPLSPQDCGPPVVRQDIDVDLLRNLQTLWHDVKPERLIEKLISLEPTQERLFYHALVKFRNEQLENYEGQPLRYSTSDYHHISRGQARLSKHLRSRSQNGSQRRSRAPSVKETGKRRPSTRELKPSASVETYDPYRSPFNRVPDKSPQYAHVTIHREAPETSPKPAEVEVDSSNPFLDDEQEIECQQSPPFTLVRKRKQNFNSVKSFQSKTSLISSRRALNSASTPRSVSYKRNVTFHHNRNRSQSSASAKAKRAHCNRQPSEASLISGFDDDPFSDSRSSSLLPAQPAVVRGAGIAVKNSVQRRVQHSDFVWRDEARKVSHELSQICEEAFNGSSLSTGCTDTTCVSPETPATSVSLASPGVSNHQMDSSSSTVCLAATPPADSPKTSHVRRELEETRRRLIEHSMKDGSKEIPQCLAPVIDHLDRLIEQEKTRRPGKVSTKEDYSSMSDLFCGSPVEPTQLSVLSEELNTGRRSDDTPSSKKDRQVSGSTAASSQISRGKRSIRMVPHSSYQSISNTEPRAVHRPAAALIDRPENDRGNALASRVGSNHRHNRTPCELDPIDEHPASPRRSAVRSTDHKKWSWFRKSQNIEEDFVKAPTVVKPLHPSSATVIVHEVHPARNTAENQPKLGKPPSDSQKVSFWSFIKRKKGKNADPESTATNPVLESRRDDERQRAHPGPKLSENKTATKPRRSIRSSGISNNWFARVFQFKPATRVVALNASKIKGRKEIYKMLRDWKQYGMEDIYLDKPNSIIYGRVGESNFLHLRPVDFSADFYTVIEDGRQANLSVVRFRQERGAASSFNRVVDTLCMVMKQRGLLVEDPARAKRMAQVLDAFPNA

SEQ ID NO: 21474 - protein, 268 aa, Oryza sativa
KSGRRLPEERHLPHFYSRRPPNTPPPNTIGIGSGAGQAGGMAAAAAAKIAPSMLSSDFANLAAEADRMVRLGADWLHMDIMDGHFVPNLTIGAPVIQSLRKHTKAYLDCHLMVTNPSDYVEPLAKAGASGFTFHIEVSRDNWQELIQSIKAKGMRPGVSLRPGTPVEEVFPLVEAENPVELVLVMTVEPGFGGQKFMPEMMEKVRALRKKYPSLDIEVDGGLGPSTIDVAASAGANCIVAGSSIFGAAEPGEVISALRKSVEGSQNKS

SEQ ID NO: 21475 - protein, 411 aa, Triticum aestivum
MGNEMSPLQKHRAEYRPELPPWLQGTAVKVEYGDAAIAADGADAHVIRRAFPHTYGQRLAHFLPKTANAPDATVITEHPAVRVGVVFSGRQSPGGHNVVWGLYNAINSHNPSSELIGFLGGTDGLFAQKTLEITEEVFSSYKNQGGYYMLGRTRDQIRTTEQVKAAMTTCQALKLDALVIIGGVTSNTDAAQLAETFAESKCSTKVVGVPVTLNGDLKNQFVETTVGFDTICKVNSQLISNVCTDALSAEKYYYFIRLMGRKASHVALECALQSHPNMVLLGEEVAASKLTISDITKQICDAVQARAEKDKYHGVVLIPEGLVESIPELYALLQEIHGLHDKGVSIENISSHLSPWASALFDFLPPFIRKQLLLHPESDDSAQLSQMETEKLLAQLVETEMNKRLEEGLTT

SEQ ID NO: 21476 - protein, 445 aa, Bacteroides fragilis NCTC 9343
MNIEKIMSSLEAKHPGESEYLQAVKEVLLSIEDIYNQHPEFEKAKIIERLVEPDRIFTFRVTWVDDKGEVQTNLGYRVQFNNAIGPYKGGIRFHASVNLSILKFLGFEQTFKNALTTLPMGGGKGGSDFSPRGKSDAEIMRFCQAFMLELWRHLGPDMDVPAGDIGVGGREVGYMFGMYKKLTREFTGTFTGKGLEFGGSLIRPEATGFGGLYFVNQMLQTKGIDIKGKTVAISGFGNVAWGAATKATELGAKVVTISGPDGYIYDPNGISGEKIDYMLELRASGNDIVAPYADEFPGSTFVAGKRPWEVKADIALPCATQNELNGEDAKNLIDNNVLCVGEISNMGCTPEAIDLFIEHKTMYAPGKAVNAGGVATSGLEMSQNAMHLSWSAAEVDEKLHSIMHGIHAQCVKYGTEPDGYINYVKGANIAGFMKVAHAMMGQGII

SEQ ID NO: 21477 - protein, 464 aa, Listeria monocytogenes
MLYSKENKESYLEPVFGSSAEDRDIPKYTLGKEPLEPRIAYRLVKDELLDEGSARQNLATFCQTYMEDEATKLMSETLEKNAIDKSEYPRTAELENRCVNIIADLWHAPKDQKFMGTSTIGSSEACMLGGMAMKFAWRKRAEKLGLDIYAKKPNLVISSGYQVCWEKFCVYWDIDMRVVPMDKEHMQLNTDQVLDYVDEYTIGVVGILGITYTGRYDDIYALNEKLEEYNSKTDYKVYIHVDAASGGFFTPFVEPDIIWDFRLKNVISINTSGHKYGLVYPGIGWVLWKDESYLPEELIFKVSYLGGEMPTMQINFSRSASHIIGQYYNFLRYGFEGYRTIHQKTSDVAQYLAHAVEQTGYFDIFNDGSHLPIVCYKLKDDANVNWTLYDLADRLQMRGWQVPAYPLPKSLENIIIQRYVCRADLGFNMAEEFIQDFQASIQELNNAHILFHDTQQSGVHGFTH

SEQ ID NO: 21478 - protein, 498 aa, Nostoc sp. PCC 7120
MKTPLNCQNYINGQWLNAATETTLNSHNPADKSEIVATFPRSQADDVDRAVAAARQAYGSWRKVPAPARAEYIFRVGELLLQHKEELAQLISREMGKPLTEARGDVQEGVDCAFYSAGEGRRLFGQTTPSEMPNKFAMTMRMPIGVCALITPWNFPVAIPCWKAMPALVCGNTVILKPAEDTPACATKLIEIFAAAGLPPGVINLVHGVGEEVGKALVEHPNIDLVSFTGSSATGAYVGETCGRTHKRVCLEMGGKNAQVVMEDADLELALDGALWGAFGTTGQRCTATSRLILHRDIKEKFTTMLRERTSQLRLGAGTEPETDIGPIINNRQLQRVHEYMNIAREEGAKILIGGEIATEGQLQQGYFFQPTILDNVTPQMRVAREEIFGPVVALIEVSTFEEAIAILNDTKYGLSSSVYTRDINRAFVAMRDIEAGITYINGPTIGAEVHLPFGGVKQTGNGHREAGTTALDVFTEWKSVYVDFSGSLQRAQIDNRS

SEQ ID NO: 21479 - protein, 229 aa, Capsella rubella
MLKSLQNTFESIHQDSSARVVMIRSLVPGVFCAGADLKERRTMSPSEVHTYVNSLRYMFSFIEALSIPTIAAIEGVALGGGLEMALACDLRICGENAVFGLPETGLAIIPGAGGTQRLSRLVGRSISKELIFTGRKIDAREAANKGLVNICVTAGEAHEKAIEMAQQINEKGPLAIKMAKKAIDEGIETNMASGLEVEEMCYQNLLNTQDRLEGLAAFAEKRKPLYTGK

SEQ ID NO: 21480 - protein, 450 aa, Caulobacter crescentus CB15
MTDILMPALSPTMEEGTLAKWLVKEGDTIKAGDVIAEIETDKATMEVEAVDEGVIEAILVPAGSENVKVNTLIARLKGDGEAAAPAVAAPVAEAATVVVAAPAAGGPISAASTFADPEIPTGTALKKITVRDALRDAMAEEMRRDDRVFLMGEEVAQYQGAYKVSRELLQEFGDRRVIDTPITEHGFAGMGVGAAMAGLKPIVEFMTWNFAMQAIDHIINSAAKTLYMSGGQIKSSIVFRGPNGAASRVGAQHSQDYAAWYGNVPGLKVIAPYDAADAKGLLKAAIRDPNPVVFLEHEMMYGHEFDIPDVEDWVVPIGKAKVRRQGSDVTLVAYSRMVGFALKAAEELEKEGIAAEVVDLRTIRPMDHATILESVKKTNRLVTVEEGWGPMGVGAEIVARITEFGFDYLDAPPLRVCQEDVPLPYAANLEALSLPSVEKIVKAAKAVCYK

SEQ ID NO: 21481 - protein, 780 aa, Coccidioides immitis RS
MAAAFDDEDLSISLPSFDRDGKDDRTPHSRPSMPPPSRPFTVPPEQSPATARDMQRLEQYKTVRILGEGSFGKVKLAIHQATGREVALKIISRRKLLSRDMVGRVEREIQYLQLLRHPHIIKLYTVITTKTDIVMVLEYAERELFDYLVSRGKCNDDEARTFFQQIICAVEYCHRHKIVHRDLKPENLLMDREKNVKIADFGLSNIMTDGNFLRTSCGSPNYAAPEVISGKLYAGPEVDVWSCGVILYVLLVGKLPFDDEYIPNLFRKISAGNFYMPSYISTGAANLIRRMLQVHPVHRITIPEIRRDSWFKKDLPQYLQHPAEEFVATGADPNKAIDLRSIAPGKPAAVRERIRENAVSKLERRMGYGKEDIQEALRKPEPSAIKDAFFIVVENEMMQTNSPTELDGCPSSPQPREGQDASSQGPGTAARPGFSTPRDTPITPLTPYRVTPINTPESRVSHVRILPTSLPYVHDQIMDQRTKDMTARAASPPQDYSQHIEVADLSGTPRERSPEEQAATARALKPHSRSVVDLEKLQYEPPEMLTQVPSQPKRSRKWQFGIRSRNLPYEAMLCLYKAIQAEGGVWEIQPAEPDNHDDDRVPEMTSEIPGPLQRKYRDVPSEYYIPKDLWFIRARLLKQGVLAPGPASSAHSSRSDLEELRRRVSLKGGVLHQEDRSVSGSAGFGAGLSAASSLSSHSATLSYGVWVFIDIQLYQLERDNYMVDFKCDGYQNVVRIEGDGSATEWRPISKRFRNKEKEITSPYPFLDVASDLVAQLAAAT

SEQ ID NO: 21482 - protein, 309 aa, Legionella pneumophila str. Paris
MSAKIIRIATRQSPLALWQANHVREMLVKQWPNLSIELLPMITSGDRFLKDKLLSAGGKGLFVKELEEALLDKRADLAVHSTKDMPAQLPDGLSLAAICKRDNPFDALISPRFKSLDALPKNAIIGTSSLRRQSQLLAYNPNLQIKTLRGNIHTRLSKLESGEYQAIILAAAGLERMGLAHHITQLIPDDIMLPTCAQGALCIECRTDDLEIQELIHGLNDPISALCVHTERRVNAKLGGNCHIPFAVYCTITAEKLLLLRAKVLNLDGSQMIDDEQQGKIEEAEIIADRCTESLMTKGAMSLLSTIPS

SEQ ID NO: 21483 - protein, 636 aa, Arabidopsis thaliana
MGKSSKKSVTEVETPASMTKPLKKGKRDAEEDLDMQVTKKQKKELIDVVQKEKAEKTVPKKVESSSSDASDSDEEEKTKETPSKLKDESSSEEEDDSSSDEEIAPAKKRPEPIKKAKVESSSSDDDSTSDEETAPVKKQPAVLEKAKVESSSSDDDSSSDEETVPVKKQPAVLEKAKIESSSSDDDSSSDEETVPMKKQTAVLEKAKAESSSSDDGSSSDEEPTPAKKEPIVVKKDSSDESSSDEETPVVKKKPTTVVKDAKAESSSSEEESSSDDEPTPAKKPTVVKNAKPAAKDSSSSEEDSDEEESDDEKPPTKKAKVSSKTSKQESSSDESSDESDKEESKDEKVTPKKKDSDVEMVDAEQKSNAKQPKTPTNQTQGGSKTLFAGNLSYQIARSDIENFFKEAGEVVDVRLSSFDDGSFKGYGHIEFASPEEAQKALEMNGKLLLGRDVRLDLANERGTPRNSNPGRKGEGSQSRTIYVRGFSSSLGEDEIKKELRSHFSKCGEVTRVHVPTDRETGASRGFAYIDLTSGFDEALQLSGSEIGGGNIHVEESRPRDSDEGRSSNRAPARGAPRGRHSDRAPRGGRFSDRAPRGRHSDRGAPRGRFSTRGRGPSKPSVMESSKGTKTVFNDEE

SEQ ID NO: 21484 - protein, 143 aa, Brassica napus
  misc_feature (124)..(124): Xaa can be any naturally occurring amino acid
EGHTAFATKEEADKEVLEILELYRRIYEEYLAVPVVKGMKSENEKFAGGLYTTSVEAFIPNTGRGVQGATSHCLGQNFAKMFEINFENEKGETEMVWQNSWAYSTRTIGVMIMTHGDDKGLILXPKVASVQVVVIPVPYKDAN

SEQ ID NO: 21485 - protein, 428 aa, Caulobacter crescentus CB15
MSIDILMPALSPTMEEGTLAKWHVKVGDTVKAGDVIAEIETDKATMEVEAVDEGVVEAILVPAGTENVKVNALIAKLAGEGDSPAPAPKVEAPKAAAAAPVPAAAPAPAVPAPAAPVAADGSRVLASPLARRLASAAGLDLKALKGTGPHGRVVKSDVEAAKSGAPAAKAAPASAPAAVAPTAAAPRQIQSLEQMGIPAGSYDLVPLDGMRKTIARRMTESFRDVPHFPLTIDLEIDALLAARAKINSLLEKQGVKVSVNDIVIKAAAVALKQVPEANASYTPEGIAMHHHADIAVAVAVDGGLITPIIRKAETKGLAQISAEMKDLAQRAKDKKLKPEEFQGGTFSISNLGMFGIKSFASIINEPQGAIMSVGAGEQRPVVKNGEIKVATVMTVTLTCDHRVVDGSVGAKFLAAFRPLIEEPLTLIV

SEQ ID NO: 21486 - protein, 478 aa, Mycoplasma penetrans HF-2
MENTFYKGSAYINGKFVDSEKTIPVISTIDGSTIGSVAALSKKDIDMAFEGAHLAFNLWRNLTPEMRIKKIKEFAEYFIAEKEFLATLMSYEIGKSYNDALKEVERSYENIFETIEVYEKEFVNPSVIGPEVNKIKGKTGYFYNVPVGVVLAIAPFNYPINLGLAKIIPTLLVGNTIVFKPATQGSLVSSQLAKYFDQANFIAGVFNLVTGKGSEIGDYILENKRIQGATFTGSSDIGFKLASKLPMKPLVLELGGKDAAIVTNNADVELAAKEIIKGAFGYSGQRCTAIKRVLVTKEIADDLLIHLIKEAQKLKVGNPLNNPDITPLIDRKAVDFNIDLIDDAINHGANLVYGGNIEGYNLLRHTILDNVSTKSKLAWEEPFGPVLPIIRVSTINEAIAIANASEYGLQGSVFTKDLEEARTIAKYLDTGTVNINRGSSRGPDIFPFIGIKKSGFGVQGIRDSLKAMTRVKGIVENE

SEQ ID NO: 21487 - protein, 160 aa, Caulobacter crescentus CB15
MAMSIYDYSAKTLDGQDVSLADYRGQVLLIVNTASKCGFTPQYEGLEALYKAHKDRGFTVLAFPCNQFGAQEPGNAEEIANFCSLTYDVSFPVMSKIDVNGADAHPLYKFLKKEQKGVLGTEAIKWNFTKFLIGKDGQVVDRFAPTVKPEDLKVAVEALL

SEQ ID NO: 21488 - protein, 552 aa, Burkholderia mallei ATCC 23344
MRSAPARRTRPDRRRSASIRAVRVPRARAGAGSATHPTQHTNSGNTAMKHDSNVTPPLGHLIDGKRVDGGERVQPVFDPATGASTKRVRMADRPSVEAAIAAAQAAYPAWRNTPPLKRARVMSRFKTLLEEHANELCALITAEHGKVLADAMGELQRGIENVEYASYAPELLKGEHSKNVGPAIDSWSEFQALGVVAGITPFNFPIMVPLWMWPMAVACGNTFVLKPSERTPSSTLRMAELALEAGLPPGVLNVVNGDKEAVDTILTDSRVKAVSFVGSTPIAESIYATGCAHGKRVQALGGAKNFAIVMPDADIGNAVNALMGAAYGSCGERCMAIPLVVAIGDDTAEQVVDGLKAEIAKMKVGPGTGEQVDMGPLVTRQHFEKVTGFVEAGIAAGATLVVDGRGVKVDGHEGGYYLGPCLFDHVKPGMPIYQHEIFGPVLGVVRVASLAEAMALVDAHEYGNGTCLFTRDGEAARFFSDNIQVGMVGINVPLPVPVAYHSFGGWKRSLFGDLHAYGPDAVRFYTKRKTITQRWPSAGVREGTVFSFPSSR

SEQ ID NO: 21489 - protein, 575 aa, Clostridium acetobutylicum ATCC 824
MSYKEKFKAWLDSEYVDVETKKELEAIKDEKEIEDRFYKDLEFGTGGLRGVIAAGSNRINIYTVGKATQGLADYLNKNYNNASIAIAHDSRIMSREFAERAASVLCANGIKTYLFDSLRPTPMLSFTVRHLNCKAGIVITASHNPKQYNGYKVYNEDGNQLTDNAAAEVLDFIEKTEDFSGVKLIDIKKAEKDGILDIIGEEVDKVYIDKVKDLTIRKDMVKESAKDLKIIYTPIHGSGNIPVRRVLKELGYENLTVVKEQEKPDGNFPTAPYPNPEQPSVFNIALELAKKVDPDVIFGTDPDCDRIGVLVKNKSGEYKVLTGNQTGVLLTHYIISSLKDTGKLPANGAVIKTIVTSEMTRKITEDYDMKLIDVLTGFKYIGEKIKEFEETNSNTYLFGFEESYGCLAGTFVRDKDAVVAATLVCEMALYYKNKGLSLDDALNELYEKYGFYKEKLVSIELQGKEGQEKIQKALNYLRENMSDNVAGVKIVKKFDYKSSVEKDIPKNEEKKIELPKSNVLRFILEDGSWFVVRPSGTEPKMKVYLAVAGTNKEDSEARMNKFNNDVMDIINQACK

SEQ ID NO: 21490 - protein, 522 aa, Candida tropicalis
MSIQDIVETYSTKWYVVVLVALIVYKVFDFFYARYLMYKLGAKPFLQSQTDGYLGFRVPFELMGKKSEGTLIDFTYQRTLELDNPDIPTFTFPIFSVLIISTLEPDNIKAILATQFNDFSLGTRHSHFAPLLGDGIFTLDGAGWKHSRSMLRPQFAREQVSHVKLLEPHMQVFFKHIRKHHGQTFDIQELFFRLTVDSATEFLFGESVESLRDESIGMLNDALDFDGKAGFADAFNYSQNYLASRALMQQMYWILNGKKFKECNAKVHKFADYYVEKALELTPDQLEKQDGYVFLYELVKQTRDRQVLRDQLLNILVAGRDTTAGLLSFVFFELARTPRVANKLREEIEDKFGLGQDARVEEISFESLKSCEYLKAVLNECLRLYPSVPQNFRVATRNTTLPRGGGKDGLSPVLVRKGQTVMYSVYAAHRNKQIYGEDALEFRPERWFEPETKKLGWAFLPFNGGPRICLGQQFALTEASYVTVRLLQEFSHLTMDPNTEYSPKKMSHLTMSLFDGANIQMY

SEQ ID NO: 21491 - protein, 364 aa, Streptococcus pneumoniae TIGR4
MNFQLAKYSLLKRFLENIGFTTLEEYGAIFKYLIENVKTDRQIIYSPHCHDDLGMAVANSLAAVKNGAGRVEGTINGIRERAENAALEEIAVALNIRQDYYQVETSIVLNETINTSEMVSRFSGIPVPKNKAVVGGNTFSHESGIHQDGVLKNPLTYEIITPELVGVKILLGKLSGRHAFVEKLRELALDFTEEDIKPLFAKFKALVDKKQEITDADIRALVAGTMVENPEGFHFDDLQLQTHADNDIEALVSLANMDGEKVEFNATGQGSVEAIFNAIDKFFNQSVRLVSYTIDAVTDGIDTQDRVLVTVENRDTETIFNAAGLDFDVLKASAIVYINANTFVQKENAGEMGRSVSYHDMPSV

SEQ ID NO: 21492 - protein, 948 aa, Rhodopseudomonas palustris CGA009
MALVHETDFGTPPSLSENMVTLTIDGRSVSVPEGTSIMRAAMEIGTAIPKLCATDMVDAFGSCRLCLVEIDGRSGTPASCTTPVADGLVVHTQTERLKQIRKGVMELYISDHPLDCLTCSANGDCELQDMAGAVGLRDVRYGYSGEKHPNPGLDESNPYFTYDASKCIVCSRCVRACEEVQGTFALTIAGRGFDSVVSPGMQESFLGSECVSCGACVQACPTATLNEKSVIEIGTPERSVVTTCAYCGVGCTFKAEMRGEELVRMVPYKDGKANRGHSCVKGRFAWGYANHKERILKPMIRGKITEPWREVSWDEAFAYAASELKRIQAKYGRDSVGGITSSRCTNEETFLVQKLIRAGFGNNNVDTCARVCHSPTGYGLSTAFGTSAGTQDFDSVEHADVVMIIGANPTDGHPVFGSRLKKRLRQGAKLIVVDPRRIDLVRSAHVEAAQHLPLKPGTNVAVLTALAHVIVTEGLANEAFVRERCDWSEYEHWAAFVSDEKHSPEATAAFTGVDPQAVREAARLYATGGNGAIYYGLGVTEHSQGSTTVMAIANLAMATGNLGRPGVGVNPLRGQNNVQGSCDMGSFPHELPGYRHISTDAVRESFEALWNVKLDNEPGLRIPNMLDAAVEGSFKALYVQGEDILQSDPNTKHVAAGLEAMECVIVHDLFLNETANYAHIFLPGSTFLEKNGTFTNAERRIQRVRKVMTPKNGLEDWEVTLRLAEAVGYKMNYTHPSQIMDEIAALTPTFTGVSYDRLEELGSIQWPCNERAPEGTPVMHIDHFVRGKGKFVITEYVATDERTGPRFPLLLTTGRILSQYNVGAQTRRTANTVWHDEDRLEIHPHDAEQRGVRDGDWVRLASRAGETTLRALITDRVAPGVVYTTFHHPDTQANVVTTEYSDWATNCPEYKVTAVQIAPSNGPSEWQRSYEQQAAAARRIAVPAEAAE

SEQ ID NO: 21493 - protein, 310 aa, Thermoplasma acidophilum
MDRKELLSRPVRDLSITADTRLGDLMDQFSSIGGFTAAKIHEAYEIIKDMFSEDNTTFLSFPADIISTGLRGLINEVVKRKLVDVIITTSGTLDHDIARTYRNYYCGSFSYSDIELRDLGINRLGNVLVPDESYGEIIEEKVMESLEKLYAKKKEWATVDLIHEVGLDINSESSIIYNAAKNNIPVFVPGITDGSFGSQLWSFYEQHHDFKINLLEDEHRLSDIIFDAKKTGAIMIGGGISKHHTIWWNQFRDGLDYAVYVTTAQEYDGSLSGAKLEEAISWKKVRPDARYVNVYGDATVIMPVLLAPFL

SEQ ID NO: 21494 - protein, 305 aa, Xylella fastidiosa Ann-1
MPLLRIATRKSLLAMWQSEYVAARLRMLCPDLDVVLVPMSTRGDEILDRSLAAIGGKGLFLKELELAMLRGDADCAVHSLKDVPMDLEPPFMLAAVLSRDDPADALISNVYLSLESLPIGARVATSSLRRQAQLRFYRPDLRLFDLRGNVNTRLAKLDNGDYDAIVLACAGLRRLGLEQRMTARLAPPEWLPAPGQGAIAVESLTEDARIATLLAGLDDLPTRQCVVAERTMNRALHGSCHVPVGAYASYEVGGMRLQGLVGCVADGRLVRAELCSAKDEGDMLGRAVAQCLLDAGAAELLAATA

SEQ ID NO: 21495 - protein, 701 aa, Synechococcus sp. CC9605
MVSSGLAIKDDQATRAFPLAAITGHGTLKLALLLAAVDPGLGGVVIAGGRGTGKSVLARGLHALLPPIDVLDAEGGVGRNLDPQNPEEWDDATRESVSGEAPSTVIPAPFVQIPLGITEDRLVGAVDVAASLSSGSAVFQPGLLADAHRGVLYVDELNLLDDGIVNLMLAAVGSGENRVEREGLSLSHPCRPLLIATYNPEEGNVRDHLLDRFAIALSANQLVSTEQRVEITNAVISHGQCSRSFAEKWGEETDALATQLLLARQWLPDVQISGEQIEYLVTEAIRGGVEGHRSELYAVRVAKAHAALSGRDQVEADDLQVAVALVIAPRASQMPPPDQQMEPPPPQDQEPPPPPQDQGDQQQDNPPPPEGSGEEENEPPEDNSEDDSTDDDEGDDEEDQAPPAVPEEFMLDPEAIEVDPDLLLFNAAKAKSGNSGSRSVVLSDSRGRYVKPMLPRGPVRRIAVDATLRAAAPYQKIRREREPGRSVIVEEGDLRAKLLQRKAGALVVFLVDASGSMALNRMQSAKGAVIRLLTEAYENRDEVALIPFRGDQAEVLLPPTRSITAARRRLESMPCGGGSPLAHGLTQAARVGANALATGDLGQVVVVAITDGRGNVPLSTSLGQPELEGEEKPDLKQEVLDVAARYRMLGIKLLVIDTERKFIGSGMGKDLAEAAGGKYVQLPKASDQAIAAVAMDAISNI

SEQ ID NO: 21496 - protein, 134 aa, Alcanivorax borkumensis
MRLVRKLDFPEMKFSLYFLGYLSEEEAGDVPKNDAQRLTFTFGREAMLELTHNWGSEEDPDFSYHDGNAEPQGFGHIGITVPDVYAAAERFEKMDVTFVKRPDDGKMKGLAFIKDPDGYWIEILQADMMEQQQS

SEQ ID NO: 21497 - protein, 458 aa, Desulfitobacterium hafniense DCB-2
MAERRKIRQHTTLCGKFGQAKREIKQSLRGEVKGMYQKTVLPNGVRIITEEIDYVRSVAVGIWVGAGSRDEREGYEGISHFIEHMFFKGTKNRTARDIAESLEAVGGQLNAFTTKEYTCYYAKVLDEDMDLAMDVLNDMFFESLFDENEIEKEKKVVIEEIKMYEDSPDELIHDLFSDHVWNDHPLGRPILGTEESVKGLSREKILDFMDHHYAPDNLVIAVAGKIKHDEVLKKLAPLYGEFKRGGRRILEETPKGQQVQEMILKDTEQMHLILGVPGLGQEDEDLYPMHILNNILGGGLSSRLFQEIREQRGMAYTVFSYHSTYVDTGLFAIYAGTTPSNSQEVVECVLAEILDIKKNGISQSELQRTKSQIKGGLYLGLESASSRMSRLGKTELTYNRVISPEEVVEKLERVTVEDTKRVINRLWKRDKISLLMLGPAGNEVDMDALFEKIGWDEE

SEQ ID NO: 21498 - protein, 505 aa, Limnanthes douglasii
MSETKPEKPLIATVKNTLPDLKLSINLKHVKLGYHYLITHGMYLCLPPLALVLFAQISTLSLKDFNDIWEQLQFNLISVVVSSTLLVSLLILYFMTRPRPVYLMDFACYKPDETRKSTREHFMKCGESLGSFTEDNIDFQRKLVARSGLGDATYLPEAIGTIPAHPSMKAARREAELVMFGAIDQLLEKTKVNPKDIGILVVNCSLFSPTPSLSSMIVNHYKLRGNIISYNLGGMGCSAGLISVDLAKRLLETNPNTYALVMSTENITLNWYMGNDRSKLVSNCLFRMGGAAVLLSNKTSDKKRSKYQLVTTVRSHKGADDNCYGCIFQEEDSNGKIGVSLSKNLMAVAGDALKTNITTLGPLVLPMSEQLLFFATLVARKVFKKKIKPYIPDFKLAFDHFCIHAGGRAVLDELEKNLQLSSWHLEPSRMTLYRFGNTSSSSLWYELAYSEAKGRIRKGERVWQIGFGSGFKCNSAVWKALKSVDPKKEKNPWMDEIHQFPVAVV

SEQ ID NO: 21499 - protein, 374 aa, Desulfitobacterium hafniense DCB-2
MKKYTIAVIPLDGVGKDVIPLGAKAMQKAQEILGGFELDCRYYEAGVEYAVKTGKMCEDNLGEDIAKADAMLCGSAGHYDADMSKSEYPGYKTGMQVLQFLRSGMGNSIGLRPLRLRKGIDCPLRNREEIDVLLVRQLAEGFYIRPGHMIGEDAAYDTIVVTRNVTEKFADTCFRLARGRHGRRQDGKKMVTLGNKHGNVTCFDFYRKIFTEVSAGYPDIGLQFTQVDALAEHLIKDPDRFDVIACENMIGDIIGDIGAYITGGMGITPTADVGGVTPQFRPNHGTFPRAVGKGFANPLASILTAGLLLDTLGNERGDDNLRRGARLIEKAVEYNLTTGGPRTKDLGGTANTFATAEAVFKAMEVVKICSKGER

SEQ ID NO: 21500 - protein, 477 aa, Synechococcus sp. CC9605
MPTSRVLFWHRRDLRLADNLGLVVAAQISPAVTGVYVLDPAVINPPPELPPMAPARLWFLIESLVELQQRWREAGSRLLVVEGDPVAVLPQVAQQISAEAVVWNRDVEPYARKRDRQVAKTLQADGRRVVADWDQLLIAPELLKTGAGDPYRVYGPFLRNWRGQVLAQKPATVAAPTGLVDLPPELMPAGDPLPALRESHGFQGSEICPCRPGEAAALEQLTTFCNGPLLGYEPDRNFPGTAGTSYLSAALSVGTLSPRQAWCAAQDSREQARSEEQLQAIAVWEQELGWREFYQQALFYFPELADGPYREQWRRFPWENNEDWFDFWKEGQTGMPIIDAAMRQLNQTGWMHNRCRMIVASYLVKDLICDWRWGERAFMELEVDGDLAANNGGWQWSASSGMDTKPLRIFNPATQASKFDSAGDYIRRWVPELRHVNTKDLLSGEIGALERRDYPEPLVDHKNQQARFKALYATIRS

SEQ ID NO: 21501 - protein, 69 aa, Triticum aestivum
MADWGPVVVATVLFVLLTPGLLFQLPAQGRIVAFGSMHTGGLAILVHAVIYFALITIFLIAIGVHIYAG

SEQ ID NO: 21502 - protein, 172 aa, Triticum aestivum
MGRPTAFRDWSTRTLTWTEASRKSPQAPSPHKLIKVSAPSELHDFQQASRSTRSSMARMALLAVFAVLAALAVAEMASGAVTCGDVTSAIAPCMSYATGKASAPSAGCCSGVRTLNGKASTSADRQAACRCLKNLAGSFKGISMGNAATIPGKCGVSVSFPINTNVNCNNIH

SEQ ID NO: 21503 - protein, 159 aa, Arabidopsis thaliana
MSDDEHHFEASESGASKTYPQSAGNIRKGGHIVIKNRPCKVVEVSTSKTGKHGHAKCHFVAIDIFTAKKLEDIVPSSHNCDVPHVNRVDYQLIDITEDGFVSLLTDSGGTKDDLKLPTDDGLTAQLLLGFDEGKDIVVSVMSSMGEEQICAVKEVGGGK

SEQ ID NO: 21504 - protein, 58 aa, Yersinia pestis
MSQQVIIFDTTLRDGEQALQASLSVKEKLQIALALERMGVDIMEVGFPVSSPGDFESV

SEQ ID NO: 21505 - protein, 591 aa, Populus trichocarpa
MESTLKEMRDGASVLDMDPKSTVGGGVEDVYGEDRATEDQLVTPWTISVASGYTLLRDPHHNKGLAFTEKERDAHYLRGLLPPTTISQQLQEKKLMNTIRQYQLPLQKYTAMMELEERNERLFYKLLIDNVEELLPVVYTPTVGEACQKYGSIFKRPQGLYISLKEKGKVLDVLKNWPQKSIQVIVVTDGERILGLGDLGCQGIGIPVGKLSLYTALGGVRPSACLPVTIDVGTNNEQLLKDEFYIGLRQRRATGQEYSELLHEFMTAVKQNYGEKVLIQFEDFANHNAFDLLAKYGTTHLVFNDDIQGTAAVVLAGLISALKLLGGSLADHTFLFLGAGEAGTGIAELIALEMSRRSKTPLEETRKKIWLTDSKGLIVSSRKESLQHFKKPWAHEHEPVKGLLEVVKAIKPIVLIGTSGVGKTFTKEVIEAMASFNEKPLILALSNPTSQSECTAQEAYTWTKGKAIFASGSPFDPVEYEGKVFVPGQSNNAYIFPGLGLGLVISGAIRVHDDMLLAAAEALAGQIKEEYLAKGLIYPPLSNIRKISVQIAANVAAKAYELGLATRLPRPENLVKHAESCMYSPAYRYYR

SEQ ID NO: 21506 - protein, 393 aa, Neisseria gonorrhoeae
MIIDVKVPMLSESVSEGTLLEWKKKVGDAVARDEILIDIETDKVVLEVPSPQAGVLVEIVAQDGETVVAGQVLARIDTAATVAAEAPAAAPAEAAPAAVPAAAQNNAAMPAAAKLAAETGVDVNVLQGSGRDGRVLKEDVQNAAAKPAAAVAPAVALPAGARPEERVPMSRLRARVAERLLASQQENAILTTFNEVNMKPIMDLRAKYKEKFEKEHGVKLGFMSFFVKAAVAALKKYPVVNASVDGKDIVYHGYFDIGIAIGSPRGLVVPILRDADQMSIADIEQAIVDYAKKAKDGKIAIEDLTGGTFSITNGGTFGSMMSTPIINPPQSAILGMHATKERAVVENGQVVVRPMMYLALSYDHRIIDGREAVLTLVAIKDALEDPVRLLLDL

SEQ ID NO: 21507 - protein, 265 aa, Zea mays
MSTSVNGGRALPSLQAVRPAPYPRLPLPSSSSSSAGYRHSKSVSVKTLALFGKSKVKTAPAKKAAAPKPKPKVEDGIFGTSGGIGFTKENELFVGRVAMLGFAASLLGEAITGKGILAQLNLETGIPIYEAEPLLLFFILFTLLGAIGALGDRGRFVDEEVTGLDKAVIQPGKGFRGALGLSEGGPLFGFTKSNELFVGRMAQLGVAFSIIGEIITGKGALAQLNIETGVPINEIEPLVIFNVLFFFIAAINPGNGRFIIGEEEE

SEQ ID NO: 21508 - protein, 415 aa, Fusarium oxysporum
MALTAAQVAIVKSTAPILKEHGKTITTTFYRNMLGAHPELKNYFSLRNQQTGAQQAALANSVLAYATYIDDLGKLSHAVERIAHKHVSLFIKPEHYPIVGTHLIGAIGEVLGSALTTEIKDAWVAAYGQLADIFIQREGQMYEAAGEWNSWRKFKIVKKEAENDSVTSFYLEPTDGKPLPKFLPGQYVSVQIPIPELDGLLQSRQFSLSEAPGTNHYRISVKLQGPTEEPAVEDLAAGKIAGLLSTRLHNRYNVGDEVELSPPAGEFSLDPADTSAAKKPLVLLSAGVGATPLVSILDSVLQSPTASRPITWIHGARYSGSTCFVPHVLDSAKKHENITAKIFLEDVKEGDQYDFKGEIDLAKLQKEQLLQLDNADAEYYICGPEDWMVNVRAFLEENGVPRERQHLELFKTGDI

SEQ ID NO: 21509 - protein, 169 aa, Picrophilus torridus DSM 9790
MIIQYLYYAAGIVSGLIGMEFIARLTHKYLMHGILWPIHKDHHIPSGRRFQRNNLFALFFAFISMSLFIASFETKDFIYMSFGIGMLFYGILYLIIHDMIIHNYYLHLRNRKHSRYINKLIEVHELHHINDGRGKGMNWGFLLYIPGIDKTRADLERINSKKNLDTLKQ

SEQ ID NO: 21510 - protein, 256 aa, Bradyrhizobium japonicum USDA 110
MSGDIVTLEVSDHIALVTLNRPPVNALDRAMRDRIVSVFDEISERSDVRVAILTGAGKVFCSGADLKDRPDPTKIGAFHSHNRITREAGNCIRECSKPVIAAINGVALGAGVGLMASCDIFYACEEAVFGMPEINVGLAGGAAMLNTLFGRSLMRRMFFTGYRVPATELYRLGIIEACTTKENLIPEVMKLAREIASKSPIAMEYAKNAANMVELMPPRDAYRFEQNITMALSKTEDAKEARMAFLEKRTPVFKGR

SEQ ID NO: 21511 - protein, 670 aa, Oceanospirillum sp. MED92
MISAQLPGNEEQRLEELYSYDILDSADEKEFDDLTQLASEICDTPIALISLIDPERQWFKSRVGLDATETSRDIAFCSHAILQEDVFEVEDTLKDARFADNPLVTGSPNIRFYAGAPLITPSGLALGTICTISNEPKTLTDWQRNALVVLRNEVISRLELRKKIKQLESANQYKSIFVSNVSHEIRTPMNGVMGLIDLLLETPLNDKQLRYAQAIKRSGDSLLRVINDVLDLSKVEAGKLTIEKAEFNLGEVVDDLTECFSPLATEKKLELRTDIQLKSDRFIGDHYRLKQILNNLLSNAIKFTDKGWTALRIKVVSETDDQATLKFSVSDTGLGLSEKQQSQLFKRFQQANETITREFGGSGLGLSICKQLLALMDGDIGVKSEPGKGSTFWFTLPLQVVREEPAVEELTETPDNFAGKVLVVEDNRVNQIVAKGVLEKLGLEVELAENGAVGMTKLRDNYYDLVFMDCHMPVMSGFEATKGIRSPNSLVHNPGIPIIAMSANAMDTDIEQCYEVGMDGFTAKPLEREKIKEVLSKYLSPVQAKESPSASEDIFTSLDSYPVLNKRTVKGLKLSTNHLKVMFRTFLDTTPQEINRLSQALIENDVETVRSIAHSIKGSARMLGGEQLGALAQFIESNADLGNELPVRKIIGQLDSCFDAFEDSLNIPDA

SEQ ID NO: 21512 - protein, 453 aa, Listeria monocytogenes
MKVIKFGGSSLASGIQLNKVFQLVAEDPDRKIIVVSAPGKRFKEDTKVTDLLIDCAAKALLGEDTSELFESVIARYAGIALDTGMSDEIINQIRADLQATISSDKSDPDKFLDRMKASGEDNNAKLIAAYFKFKGLNANYINPKDAGLLVTDEHASAQVLPESYDRLFALREREGIIVFPGFFGYTKDGEISTFSRSGSDITGAIVANGAQAELYENFTDVDAVYAVNPTIVKNPKKVLELTYREMRELSYAGFSVFHDEALIPAFHAGIPVHIKNTNNPDSCGTRVVHERENNNGPVVGIASDDGFCSIYISKYLMNREIGFGRKVLQILEDAGLNYEHMPSGIDDLTIIIRENQFGEDTERTIMSRLKEELNADQVIMQHGISLIMVVGETMRHNVGITSRASKALSDAKVNIEMINQGSSEVSIMFGVKEEQENTAVRALYNEFFSEVFV

SEQ ID NO: 21513 - protein, 465 aa, Rubrobacter xylanophilus DSM 9941
MAIATVNPATGEELKRFEALDREQIDEKIERAVGAFRGWRETPVQERCRLMARAAEVLEERAEEFGRLITTEMGKPLAAAVAEVRKSARGCRYYAQNAARFLADEEVELEGARAFVRYQPLGPVLAVMPWNFPFWQVFRFAAPALTAGNVGLLKHASNVPQSALAIEEVFRQAGFPEGVFQTLLIGASQVRDVISDPRVRAATLTGSTPAGRDVGGEAGRNIKPSVLELGGSDPFIVMPSADLDRALDTAVTSRTLNNGQSCINAKRIIVHRQIAEEFTRRFVEKMASLKVGDPMDETTDMGPLAMPSILEGVDEQVRRSVEAGAKVLTGGKPLDGPGYFYPPTVLAEIPEGAPAREEEIFGPVASLFTARDIDEAIRLANETPFGLGSSAWTNDPEEQERFVDEIEAGMVYINRLVESTPEVPFGGVKSSGYGRELSHFGIREFVNVKTVWIDASGGERGRGVE

SEQ ID NO: 21514 - protein, 341 aa, Staphylococcus aureus
MSTNIAINGMGRIGRMVLRIALQNKNLNVVAINASYPPETIAHLINYDTTHGKYNLKVEPIENGLQVGDHKIKLVADRNPESLPWKELDIDIAIDATGKFNHGDKAIAHIKAGAKKVLLTGPSKGGHVQMVVKGVNDNQLDIEAFDIFSNASCTTNCIGPVAKVLNNQFGIVNGLMTTVHAITNDQKNIDNPHKDLRRARSCNESIIPTSTGAAKALKEVLPELEGKLHGMALRVPTKNVSLVDLVVDLEKEVTAEEVNQAFENAGLEGIIEVEHQPLVSVDFNTNPNSAIIDAKSAMVMSGNKVKVIAWYDNEWGYSNRVVDVAEQIGALLTSKETVSAS

SEQ ID NO: 21515 - protein, 304 aa, Klebsiella oxytoca
MIHTLTLNTAIDMNMFCDPLKPSAVNRTRHTEYCPNGKGVNVSLILNHYQQPTHIIGIFGGFTGRYIVEELRQKKIKVTPAWVSEPPRINIFINDGAEEYKLVNPGAKIDDECKQQVIHHLQCVASGDYLAISGSLPPGIESRFYAEIIELCQQKRCEVILDISHPVLRQLLELRPLLIKPNDDELAGNLGLDVSNHQQVREAMRTLHQLGARNVLLTMGAELPYFSDGEGVWFCSARKIALVSSACAGDAALGAFLSKWLNKEDVAHALALASATGADVAGSAGLGKLQRTEELLQQIQVVQL

SEQ ID NO: 21516 - protein, 107 aa, Brassica napus
  misc_feature (89)..(89): Xaa can be any naturally occurring amino acid
MAKSYGPLFLLALIVFSLLQTMVMASSGSRVKYNPKRYGPGSWKRSQCPKECDRRCSQTQYHNACILFCNKCCRKCLCVPPGYYGNKQXVCSCYKNWKTQEGGPKCP

SEQ ID NO: 21517 - protein, 159 aa, Exiguobacterium sibiricum 255-15
MLQEQTFQRIDGTEATLKDYPGQAWLIVNTASKCGLTPQFEGLEQLHQDYRKQGLVVLGFPCNQFAGQDPGTDEEIQSFCQMNYGVTFPVFSKIEVNGKGTHPLFAELKALAPNTTGEQDVEWNFTKFLVTRDGEVTRFAPKTNPTDLVAAIERIVVPV

SEQ ID NO: 21518 - protein, 338 aa, Anabaena variabilis
DPKIGGVMIMGDRGTGKSTTIRALADLLPEIPVVANDPFNSDPSDPDLMSDEVRQKSGTGAEIPIEFKKVQMVDLPLGATEDRVCGTIDIEKALSEGVKAFEPGLLAKANRGILYVDEVNLLDDHLVDVLLDSAASGWNTVEREGISIRHPARFVLVGSGNPEEGELRPQLLDRFGMHAEIHTVKEPALRVQIVEQRSEFDQNPPTFLEKYNPEQTALQKKIVEAQKLLPEVKLDYDLRVKISEVCSELDVDGLRGDIVTNRAAKALTAYEGRTEVTVDDIRRVITLCLRHRLRKDPLESIDSGYKVEKVFARIFGVELLEDDSSQKNGAGQIKTGVR

SEQ ID NO: 21519 - protein, 219 aa, uncultured bacterium
NSRLCMSSAVAGYTRSLGSDGPPCSYEDLDHCTVAFLIGTNTAECHPVLFQRLLKRKKRHPGSVTIVVIDPRQTDTARAADIHLAVAPGSDLALLHGIAHLVMRENGQDPTFIDNCTDNYDSFFDVVARWTPRRVALFCGIPEKRLREVAQLFHRREKVLSLWSMGVNQRREGTAVVGGIINLHLLTGQIGKEGAGPFSLTGQPNAMGGREAGGLSHLL

SEQ ID NO: 21520 - protein, 608 aa, Mesorhizobium sp. BNC1
MFQSFDSKSDPTQAGPRLERLRALMATAGHDIVLVPHSDEHQSEYLPSSAERLAWLTGFTGSAGAALILRDRAILFVDGRYTLQAREQVDPNLFEIENLVENPPREWLKANPSRGSRVGFDPWLHTIDDVTGLRKVADKIGVELVPLDRNPIDTIWEDRPAPPAEPVRIHPLEFAGEPAEEKLKRLASRLAEEAVDHTVLTNAASLAWAFNIRGGDVAHTPLSLGFAVLSASARPKLFLDARKLDGEAKTYLASLADLHTPSELEPALSSLAGEKVKFGLDFGLASERLRLLIEENGGSVVDFTDPTTLPRAIKNETELRGARAAHLRDGAALARFLAWVDAQKPETLDEITIVKQLEEFRRRMGEETQMPLRDISFDTISGSGPNGAIVHYRVTEKTNRRLSAGELLLVDSGAQFQDGTTDVTRTIALGSPSEEMRNRFTLVLKGMIAISMLRFPPGTRGLDIDAFARANLWKAGLDYGHGTGHGVGSYLGVHEGPQRIARTGKEKLLSGMIISNEPGYYRQGHYGIRIENLIVVSSPEPIPGGEIDMHGFETLTLVPIDRRLIDPALLTEQERDWLNTYHRRVWEEIGPLVDGETADWLEQATSPV

SEQ ID NO: 21521 - protein, 219 aa, uncultured bacterium
NSRLCMSSAVAGYTRSLGSDGPPCSYEDLDHCTVAFLIGTNTAECHPVLFQRLLKRKKRHPGSVTIVVIDPRQTDTAKAADIHLAVAPGSDLALLHGIAHLVMRENGQDPTFIDNCTDNYDSFFDVVARWTPRRVALFCGIPEKRLREVAQLFHRREKVLSLWSMGVSQRREGTAVVGGIINLHLLTGQIGKEGAGPFSLTGQPNAMGGREAGGLSHLL

SEQ ID NO: 21522 - protein, 219 aa, uncultured bacterium
NSRLCMSSAVAGYTRSLGSDGPPCSYEDLDHCTVAFLIGTNTAECHPVLYQRLLKRKKRHPGSVTIVVIDPRQTDTAKAADIHLAVAPGSDLALLHGIAHLVMRENGQDPTFIDNCTENYDSFFDVVARWTPRRVALFCGIPEKRLREVAQLFHRREKVLSLWSMRVNQRREGTAVVGGIINLHLLTGQIGKEGAGPFSLTGQPDAMGGREAGGLSHLL

SEQ ID NO: 21523 - protein, 536 aa, Neurospora africana
MTLLALKEDRPTPKAVYNWRVYTCAAIASFASCMIGYDSSFIGTTLALPSFTKEFDFASYTPGALALLQSNIVSVYQAGAFFGSLFAFATSYFLGRRRSLIAFSVVFIIGAAIMLAADGQRRGVDPIIAGRVLAGIGVGGASNMVPIYISELAPPAVRGRLVGIYELGWQIGGLVGFWINYGVNTTMAPTRSQWLIPFAVQLIPAGLLFLGSFWIPESPRWLFANGRREEAIKVLCWIRNLEPTDRYIVEEISYIDADLQRYAREVGKGFWKPFLSLKQPKVRWRFFLGGMLFLWQNGSGINAINYYSPTVFRSIGITGTNTGFLTTGIFGVVKMVLTIIWLLWLVDLVGRRRILFVGATGGSLCMWFIGAYIKIAGPGTTKTEEAKLTSGGIAAIFFFYLWTAFYTPSWNGTPWVINSEMFDQNTRSLGQASAAANNWFWNFIISRFTPQMFIKMEYGVYFFFASLMLLSVVFIYFFIPETKSIPLEAMDRLFAIKSVHNANKILMDELNFDRNPEREQSSLDEKDRVTQTENAV

SEQ ID NO: 21524 - protein, 552 aa, Mesorhizobium sp. BNC1
MTINLKKPDITELKPRITVFGVGGGGGNAVNNMITAGLRGVEFVVANTDAQALTMSKAERIIQLGANVTEGLGAGSQPEVGQAAAEECIDEIMDHLSHTHMCFVTAGMGGGTGTGAAPVVARAAREKGILTVGVVTKPFHFEGQRRMRIADLGIEELQKCVDTLIVIPNQNLFRIANDKTTFADAFAMADQVLYSGVACITDLMVKEGLINLDFADVRSVMREMGKAMMGTGEASGEGRAMAAAEAAIANPLLDETSMRGARGLLISITGGRDLTLFEVDEAATRIREEVDQDANIILGATFDEELEGVIRVSVVATGIDKAAHDISAPPSATRQPPRPQGLSKPTAGFETRAPAPQPAPQPAREIQPEPQADAHHEMVADALRVAQGGGAPAAQSAGFQPQSKLFRPAAPAPEPAPMRAAAVAQHQPQPQPVHAEPAPAPRMPRVEDFPPVVQAEIQAGAAHAAPEQEDRGPMGLLKRLTTGLSRRDEDSHAGQAPEPRLRQADPRRTAPESNIYAPRRGQLDEQGRVVQPRASQEDDQLDIPAFLRRQAN

SEQ ID NO: 21525 - protein, 219 aa, uncultured bacterium
NSRLCMSSAVAGYTRSLGSDGPPCCYEDLDHCSVAFLIGTNTAECHPVLFQRLLKRKKHDPKSLTIVVVDPRCTDTAKIADHHLAVAPGTDLALLHGLARLVIEDNGFDSDFIDAATEGFSAYAKTINAWTAEETAKLCGINEQELREVGRLWSRREGILSLWSMGVNQRREGTAIVSGLINLHLLTGEIGKPGAGPFSLTGQPNAMGGREAGGLAHLL

SEQ ID NO: 21526 - protein, 340 aa, Lactococcus lactis subsp. lactis Il1403
MKRIAVLTSGGDAPGMNAAIRAVVRKAISEGIEVYGINHGYAGMVAGDIFPLTSASVGDKIGRGGTFLYSARYPEFAQVEGQLAGIEQLKKFGIEGVVVIGGDGSYHGAMRLTEHGFPAVGLPGTIDNDIVGTDFTIGFDTAVSTVVDALDKIRDTSSSHNRTFVVEVMGRNAGDIALNAGIAAGADDICIPEKEFKFENVVNNINKGYEKGKNHHIIVLAEGVMTGEEFATKLKEAGYKGDLRVSVLGHIQRGGSPTARDRVLASRMGARAVELLRDGIGGVAVGIRNEELVESPILGTAEEGALFSLTTEGGIKVNNPHKAGLELYRLNSALNNLNLN

SEQ ID NO: 21527 - protein, 383 aa, Bacillus licheniformis ATCC 14580
MKNETALKRSLTLGPLVVIGLAYMDPLVVFDSYGVVAQLTKGHVPAAYVFTVAALLLTALSYGSMVKAYPKAGSVYTYAYESIHPHAGFLAGWTIMLDYLFLPMVNFAIGSAYLTAAFPEVPHGFWVVLLALSITVVNVLGIRLTANITGLFVAFQVIVALTFAGFMIAGLAGGLGTGELISADPFFHSDIEPSLIVSGATILCFSFLGFDAISTMSEETVNPKKNIPLAIFLTVAIGGTLFTAISYLMQQIYPSYDNFRHADSASLEIALYTGGAFLKSFFLAGTMVAVISSSLSSHASASRLLYAMGRDSSLPKRFFGYVHPTLKTPVFNILFIGLISLTAMIGELEVIYSFISFGALIGLFLSICLSSAITTFGGRKKAF

SEQ ID NO: 21528 - protein, 339 aa, Mycobacterium avium
MTVRVGINGFGRIGRNFYRALLAQQEQGTADIEVVAVNDITDNSTLAHLLKFDSILGRLPYDVSLEGEDTIVVGPAKIKALEVREGPAALPWGDLGVDVVVESTGLFTNAAKAKGHLDAGAKKVIISAPATDEDITVVLGVNDDKYDGSQNIISNASCTTNCLAPLTKVLDDEFGIVRGLMTTIHAYTQDQNLQDGPHKDLRRARAAALNIVPTSTGAAKAIGLVMPNLKGKLDGYALRVPIPTGSVTDLTAELKKPASVEDINAAFKAAAEGRLKGILKYYDAPIVSSDIVTDPHSSIFDSGLTKVIDNQAKVVSWYDNEWGYSNRLVDLVALVGKSL

SEQ ID NO: 21529 - protein, 388 aa, Synechococcus sp. WH 8103
TTAFHSPTSRRRKTLQEANLLEGPLMLIKSIRGFSSNRAMTWLACAPLALMGLGIFTLSAKAEELPDLNAAFLANNLWLLVATILVIFMNAGFAMVEAGMCRQKNAVNILAKNLFVFALAVTAYWFVGYSFMYGDAAIDGWLYFGGLFFDPTVTAETISDAGLVPTVDFLFQAAFAGTAATIVSGLVAERIKFGEFVVFALILTAFIYPVAGSWEWNGGWLNSVGNAEFIDFAGSSIVHSVGAWAGLVGAALLGPRIGKYVGGKVQAIPGHNMSIATLGALILWIGWYGFNPGSQLAMDQWVPYVAVTTTLGAAGGAIGATVISTITSKKPDLTMIINGILAGLVSVTAGCGNLTLTGSWVAGLVGGIIVVFSVSALDSAGIDDPVGA

SEQ ID NO: 21530 - protein, 487 aa, Synechococcus sp. CC9605
MASAPLPLSPAPIKFGTDGWRGITGVDITVERLLPVAAAAAQELAHRAPEGLSSRTVVIGYDRRFLAPELAEAIAAAVRGCELEPLLTDTAVPTPACSWAVVERKALGALVITASHNPPEWLGLKIKGPFGGSVEGDFTAAVERRLAAGGITAPIKAQVPRFDGRGEHLEGLRRKLDLNALVEGLKAINLKVIVDPMHGSAAGCVTELLGPEAAGVVEEIRSERDPLFGGHPPEPLAPYLGGLITAVKASTAAGTPAVGLVFDGDGDRIAAVDETGRFCSTQLLMPLLIDHLARARQLPGAVVKTVSGSDLMRLVAEAQGRKVLELAVGFKYIAAEMLAGDVLIGGEESGGVGFGMHLPERDALFAAMLVLEALVEGKQPLGARLDALQQQHGGSSHYDRLDLRLADMEARRRLETLLAQSTPSSVAGAEVLEVISTDGIKLRMGPNHWLMLRFSGTEPLLRLYCEGPDASRVNEVLAWARQFAEAA

SEQ ID NO: 21531 - protein, 681 aa, Oryza sativa
MAIPGSFCHPTALQVFVSVQFVFAVLVPHAAGRHHRHGCAPFSCGHLSDVSPPFRRRGDPPECGVASYELTCTDDKPATIQIDNGTYLVMDIKYKDSTFWVIDANISDSRNNCPLPRWNRDFGYYDQMLYERHGEDSRRRSIQAELMPPYQSTTATFVTCSQEILKSNGKYRPVACMSTNSSFVYVLTGMNSDSIGSLEPSCGYLAMTPLGAGDRPLVLENASYADVVKLMRGGFAIRFPYTSRFYVYSSKIKQCIAQSFQNIVQEERPTSFRIFYTVIFDYHFWGCLLPHPVVQLIVGVIPLAMWTLKWIAVFCRFILVPLVILTFLARNYWKIRITTDAVEKFLRMQLMNGPTRYAYTDLIAITGHFREKLGQGGYGSVYKGVLLPGNAHVAVKVLGNSNCNGEEFISEVSTIGRIHHINVVHLVGFCSEEIRRALVYEYMPRGSLDKYIFSSERSFSWDKLNEIALGIARGINYLHQGCDMQILHFDIKPHNILLDVNFVPKVADFGLAKLCPRDQSFVPLSALRGTIGYIAPEMISRSFGIISSKSDVYSFGMLLLEMAGGRRNSDMYAENSNQTYFPSWVYDQLTEQQVGVGEIPAGTVANMHELERKLCIIGLHCIQMKSHDRPTMSEVIEMLEGGVVGLQMPPRPFFCDDEPVSLAVNSHQFSSELSEILEEDE

SEQ ID NO: 21532 - protein, 149 aa, Glycine max
  misc_feature (26)..(26): Xaa can be any naturally occurring amino acid
  misc_feature (52)..(52): Xaa can be any naturally occurring amino acid
KKIAPWNLLKENVFQFFEPPKALRRXKPFHDHVFVFSIVDDHIWFRNYQISXVPHNESDKLPRGGLDKMSMIEVGPRFCLNPIKIFGGSFGGPTLYENPFYVSPNQIRTLDKRKKTGKFAKKVKAKTRRKMHEMSNPLEPDEFADMWKD

SEQ ID NO: 21533 - protein, 104 aa, Prosthecochloris aestuarii DSM 271
MAKKTLDELIGESTMPVFIDFYADWCGPCHSIAPSIIKLAQEFSGRLTVVKINVDEQPEAAARYQVQGIPALMLFDKGSVIWRTSGALAYPRLKAEVSKALGWG

SEQ ID NO: 21534 - protein, 572 aa, Saccharomyces cerevisiae
MCGIFAAFKHEDIHNFKPKALQLSKKIRHRGPDWSGNAVMNSTIFVHERLAIVGLDSGAQPITSADGEYMLGVNGEIYNHIQLREMCSDYKFQTFSDCEPIIPLYLEHDIDAPKYLDGMFAFCLYDSKKDRIVAARDPIGVVTLYMGRSSQSPETVYFASELKCLTDVCDSIISFPPGHVYDSETDKITRYFTPDWLDEKRIPSTPVDYHAIRHSLEKAVRKRLMAEVPYGVLLSGGLDSSLIAAIAARETEKANADANEDNNVDEKQLAGIDDQGHLHTSGWSRLHSFAIGLPNAPDLQAARKVAKFIGSIHHEHTFTLQEGLDALDDVIYHLETYDVTTIRASTPMFLLSRKIKAQGVKMVLSGEGSDEIFGGYLYFAQAPSAAEFHTESVQRVKNLHLADCLRANKSTMAWGLEARVPFLDKDFLQLCMNIDPNEKMIKPKEGRIEKYILRKAFDTTDEPDVKPYLPEEILWRQKEQFSDGVGYSWIDGLRDTAERAISDAMFANPKADWGDDIPTTKEAYWYRLKFDAWFPQKTAADTVMRWIPKADWGCAEDPSSRYAKIHEKHVSA

SEQ ID NO: 21535 - protein, 234 aa, Thiomicrospira crunogena XCL-2
MAKKENWIAPSILSADFAQLGTDVKDVIAAGADVVHFDVMDNHYVPNLTIGPLVCESLKNFMVKEDVKAPIDVHLMVKPVDRLIGDFASAGADIITFHPEASEHIDRSLQLIKAEGCQAGLVFNPGTSLSYLEHVMDKIDMILIMSVNPGFGGQAFIPQALEKLKAARKMIDESGRDIRLEIDGGVKVENIAEVAAAGCDTFVSGSGIFGKASASDANRYDTVIQQMRDELAKV

SEQ ID NO: 21536 - protein, 453 aa, Methylococcus capsulatus str. Bath
MPFIPHTEAEVRDMLAAIGAGSIDELFAEIPPDLRCGELKDLPEALSEMEVCKLMEERAAENRSALCFAGAGAYEHYIPAAVWEIALRGEFYSAYTPYQAEASQGSLQVFYEYQSMMAGLMAMDVSNASLYDGASALGEAILMALRTNPESRSRKILLPRSLNPVYKRVVRTLTRNQRVELVDLDYDRSLGRIAENALETFEGGEFAAVVIPQPNHFGVLEEVDVLADWAHRHGARSIAVVNPTAMALLKPPGEWGEHGADLACGEGQPLGIPLSAGGPYFGFLCSRQDFVHQLPGRLVGRTVDVDGREGFTLTLQPREQHIRRGKATSNICTNQGLMVTAATLYMALMGPKGLRNVAAACHANASALLERLTRIDGVEPVFPAPFFHEAAIRLPRAADRVLAGLAERGILGGHVLSADYPELGDALLICATETRGPEDMDRYAAALAEVLEC

SEQ ID NO: 21537 - protein, 1870 aa, Gibberella zeae PH-1
MKGSDSLRRANRPAANFDLPPVALAQAQQQTQVQAQAQAQSFQSQSQPQESITNTVTSTSPEITNASLHGQAQAKAQALTTARFRSSSRPSLQDLALVDGTSTSNNHDLPPAYALSSSSSSTGPSSFSYPPAHVHPRPSTANAAATTHTHTRPRPLGPSSSDIATAEQAQFLRIHPVSSTSSLRPRSSTTSASAVASASASTSPSHTPNSLLRQHTSPPSAVDNNSAHFVPRGGLPPAPSIMYQANQRHVSGTDPSRPYQVPPPPPPPMGGPNNGHMPNMMNLPPPPPLPRYNTAPGSNGLSLPPPPGPPPASALGQQPPWHGAFGRMYDSRSGFNIPPPPPSSQHQPYNPKLHAQIAAGQTVSIPPPPPPNEAMSATYIPQGDTYGEGVGIPAFGLEDPTLTVNSQTLRPVTTPQSGTDTNATTPMDEATRERLYAANNAQPRGTSNSSNPTPPGSIPPEIAAQWPLDTVLLWLAQNQFSKDWQETFRALNLHGAQFLELGSGHGGRGNFGMMHQQVYPRLAQECTNSRTGWDQPREREEGKRMRRLIRSIVTGRPADVSKVSTSHGRKESLNGGHGNNLPSAGTDPMDSPNTPLTAPGPGFSSRRFSQTRSTTLPNSISASNINSESNHRNILKHVDTDGARRHSPNVSESSEATFRAPAVHSASPTGSPGIPPALYTSTTTPTIAQSPSAIKAGHRSRSSMDSVASVAAIYGSGVPSDAASLLNRNMNLGDIVHGRSHDARSRHSPSDGGDRSAGGETPSSAKDSNRLLSFLSRKKKQTKDDGAYPSPEDMNGSPTSPHGSFRPVGLGVRGSNGSDTNIDLSGSTLGDDRNGSTLNMRWNKISPVRTYVLATMDYWNYRMCDITEAETATEIRQVICMHLGLGDYENSHIYLTEAGKFEHVDPLDDPSLITVRRAKGDPLGTLKFFVTPPGVAPISSLSVKAEVPIILSPSYLSPGTPVEDAQQMSRQRSSSSPPTSRSNTLTNEKNEDKIAREAKQYRAEIERKQQEYLAKRKQAAMKGSPSETLGPGIVGRNVDFDQPRESPYEDKRPEPLFPQRRPPAPPSDPSATLIKANSLSRKTGASMRASSSSLEGYPSKRYPENEMAEKTKKANKQAPPAPGIGAALAGMGRNLSAIGQSAKNGRASSPSRSSTHSIPGGKDTFSTVEPSQGRGSPSTTSSSKLTTGNVTWNKKNLGFIVPDYSPSDSSFLLSPSPTVDAKFNATVPRAMSPAEMSPNSSRSRTSFPPNQQSPTHRRASHGPEPEFEDTDVHFSKPAPAPPADDDSDDSDDGLFAIPIANQNKGKAAAANADANGHSKRPSLHVNTERSRKGLSVAFKSPKSFGSGMDSNEDSGRQNPTTPHSETWEPEEKDKESKLGRRKSFIEKDVWANRPPTDALINNLDDFFPNLDLDQPVLDEPGESGMPPSPIAESSETNIDQQAQNVAPPQPSYPQHVPPAIPPTRQPSLYNENDTLGSDESTLKALDQHRPTSVAQRSIRRSGGLGRMKSIREVARGAHEANKRTTSTNQGQAATTNIMRRKSTKMFNANIVQIRPDRRGSVVMPQIPQDTVPKRQTTFRWFKGQLIGKGTYGRVYLGMNATTGEFLAVKEVEVNPKAAGGDKNKMKELVAALDQEIDTMQHLDHINIVQYLGCERKETSISIFLEYISGGSIGSCLRKHGKFEESVVSSLTRQTLSGLAYLHREGILHRDLKADNILLDLDGTCKISDFGISKKTDNIYGNDKTNSMQGSVFWMAPEVIRSQGEGYSAKVDIWSLGCVVLEMFAGKRPWAKEEAVGAIYKIANGERPPIPEDIQDTLGPLAVAFMMDCFQVNPFDRPTADVLLSQHPFCEVDPHYQFYDTALYHRIKSFK

SEQ ID NO: 21538 - protein, 488 aa, Methylococcus capsulatus str. Bath
MLIFDRSREGRACASLFPQTPADIRGLPGHLLRQTPPPLPEVTELDVVRHYTRLSQKNFSIDTHFYPLGSCTMKYNPKAANVLARQPGFAALHPLGTERFGQGTLSCLYELQEYLKTLTGMTAVSLSPAAGAQGEFCGVAMIRAYHDARNDHERNEILVPDAAHGTNPASAAMCGYQVREIPTNADGDVDLEALKQAVGPKTAGIMLTNPSTLGVFEHRIPEIAALVHEAGGLLYYDGANLNAILGKVRPGDMGFDVIHLNLHKTFSTPHGGGGPGAGPVGVNARLQPFLPLPMVARSGNGYRWLAESDRPQSIGRLSAFAGNVGVLLRAYVYIRLLGYPGLRRVAEYATLNANYLQKRLVEAGFDTAFPARRAAHEFILSVQRQKKEHHVTALDFAKRLLDYGFHAPTVYFPLLIPECLMIEPTETENKETLDAFVDAMAAILKEAAEEPERLGQAPHCTPVRRLDEARAARHPDLAWKPAAPVPPR

SEQ ID NO: 21539 - protein, 107 aa, Synechocystis sp. PCC 6803
MSATPQVSDASFKEDVLDSELPVLVDFWAPWCGPCRMVAPVVDEISQQYEGKVKVVKLNTDENPNTASQYGIRSIPTLMIFKGGQRVDMVVGAVPKTTLASTLEKYL

SEQ ID NO: 21540 - protein, 541 aa, Psychrobacter arcticus 273-4
MSKTAAAIENNANNNDGNNHQPHYLMWFRRDLRVHDNTALAAICERANTDNAKLSAVFFLTPEQWQTHDMSLTQLDHIARTLPILAQKLQALNITLTVQICPSFTDCIAALSALCESNNISCVMANHEYEGNEIARDEQLTKQLAKTDIEFIRWHDQCILPPQTITTNDNSMYQVFTPFYKKWRHTLEVGDIQIHTAPAITNNEQINLISSEFSANTIQAIEALCKETVHDYQQYLQTHECYQYIDTDKQISQARTAYPAGEAEACHRLTQFISDDINHYDVSRDVPSLHATSHLSAYLTIGALSPRLCYLQATKALGELHRNDGDNFDSGDNNDINRWISELAWRDFYRHVLDYKPELIRHQAYKHETDKKINWSYDEDAFAAWREGKTGVPLVDAAMRCLNATGFMHNRLRMVTAMFLTKDLLIDWRWGERYFMQQLIDGDFASNNGGWQWSASTGTDSAPYFRIMNPFSQAKTHDSDGIFLKTWLPELEPIPASILHSEDKMRKALSKNGAFADIDYPIPMVEHKLARQLAIAEFKKE

SEQ ID NO: 21541 - protein, 343 aa, Saussurea medusa
MALLVSSWSNGVQSVPKDYVMPPERRPGDFVSACNEIPVIDLQENPKIDRSDIVQQILKACQEFGLFQVINHGVSEKMMEDMRVLYHEFFNMPVDDKLRGYFEPWSTTGCSLYTSGVNYAKEDVHYWKDTLRHPCHPLEEHTPSWPEKPARYREEVGRYAVEVRKMGFKILDLIGEGLGLNEGYFNGVNQYQTMAINHYPLCPDPGLAMGIDGHTDPNLITFLQQDQYGLQMCKDGKWMGIDPIPNAFVVNIGYQLEIISNGKLKSAEHRVVTSSTTARTSIVTFFGPNAGLPIVVEPAKELVTSTSPKMFKSYQYNNFIADYLAYIRKPFPPSGTPLDPYRV

SEQ ID NO: 21542 - protein, 546 aa, Caulobacter crescentus CB15
MPDRRRFAGRWGNAHMAGNRLFLKKSIASIQKEAAHSQLKRTLGPINLMSLGVGAIIGAGIFVLTGQVASANAGPAIMLSFIVAGIACALAGLCYAELASTMPVSGSAYTYAYGTLGEVFAWIMGWLLVLEYGVAASTVAVGWSGYVVSTLHALGINFPMIQVAGADAPMWATPLIQAVAAPGGGTMFAMTGTLNLVAAIGIAMVSALLVVGVSESANVNNAIVVIKVIVLVTFIAVGAQYINPANWHPFIPEPTGQPGEFGIGGIFRGAAIIFFAYVGFEAVSTAAAEAKNPSRDVPIGILGALIICTLIYMAVAAVMTGVVPFRELASPAPIAVAIDRMGLEWADIPYAAAEGGKLNLLSFAIKIGAITGLSSVMLVLCYGQTRIFYTMARDGLLPKVFAEIHPKFRTPWLGTILLGVVIAIAASFLPISLLGDLVSLGTAVAFSIVCLSVIYLRIKHPDLPRPFKVPGGIFTAAAGIAACLFLPYQNFQPMIVHAMNDNPLPLMILGGYAAVGAIIYIAYGYWHSKLAKGIDITEETDPNSPA

SEQ ID NO: 21543 - protein, 657 aa, Chlorobium tepidum TLS
MAATFLSMTRKETMNEPTMSEQQDNSVNFRSLELAEPLLRALEAVGYENPTPIQASTIPLLLEGRDVLGQAQTGTGKTAAFALPVLSNIDLSATDPQALVLAPTRELAIQVAEAFHTYAEFMPGFHVLPIYGGQDYGVQIRNLKRGVHVVVGTPGRVMDHMRKGTLNLDNLKCLVLDEADEMLRMGFIDDVEWILDQTPESRQVALFSATMPQPIVRIARKYLKAPAEITIQTKTTTVETIRQRYWMVGGHHKLDALTRILEVEPFDGIIIFVRTKTETVALAEKLQARGYAAAALNGDMVQSARERTIEQLKDGTLNIVIATDVAARGLDVERISHVINYDIPTDTESYVHRIGRTGRAGRSGEAILFVSPRERGMLFAIERATRKRIELMELPSTEIVNDKRIAKFKQRITDTVGAEDLEFYIGLIGQYCQEHDVSELEAAAALAKLLQGDEPFLLSAKPERERPVRREEREPRYDREHGRDSFRDDFRKEREPRRQSKGGLYSDEKRETYRLEVGKVHDVKPGNIAGAIINEIGLDPEAVGKIVINDQYSTVELPAGMPNDVFQELKKVRVCGRQLRVSKMDEHQGGYGDRHDRGFGGDRSGNRSFGKDRSGDRGFGGDKKKSFGKPSGGGKRKKDDGAFFTGFTGTKKKRMKD

SEQ ID NO: 21544 - protein, 268 aa, Chlorobium tepidum TLS
MQSRIPFDFQNDVIERSKTVPVLVDFWAQWCGPCRILAPVLEKLAERHAGKWVLVKVNTEEFPEISAQYGIRSIPNVKLFSNGVVIDEFTGALPEYQIEQWLAKALPSPWAEEVARAAAEMAAGNDAVAITLLEGVLAKEPENRDAAAMLARLILFSRPEEALRLAETLEAEPDYADLSESVRTLGALLVRPASAFPDGEGREAYGEAVESLRKGDMDSALEHFISVLRTNRYYDDDGSRKACIAIFRFLGEEHEITMKYRRAFDRAF

SEQ ID NO: 21545 - protein, 219 aa, uncultured bacterium
NSRLCMSSAVAGYTRSLGSDGPPCSYEDLDHCTVAFLIGTNTAECHPVLFQRLLKRKKRHPGSVTIVVVDPRQTDTAKAADIHLAVAPGSDLALLHGIAHLVMHENGQDPAFIDDCTDNYDTFFDVVARWTPRRVALFCGIPEKRLREVAQLFHRREKVLSLWSMGVNQRREGTAVVGGIINLHLLTGQIGKEGAGPFSLTRQPNAMGGREAGGLSHLL

SEQ ID NO: 21546 - protein, 219 aa, uncultured bacterium
NSRLCMSSAVAGYTRSLGSDGPPCSYEDLDHCTVAFLIGTNTAECHPVLFQRLLKRKKRHPGSVTIVVIDPRQTDTAKAADIHLAVAPGSDLALLHGIAHLVMRENGQDPTFTDNCTDNYDSFFDVVARWTPRRVALFCGIPEKRLREVAQLFHRREKVLSLWSMGVNQRREGTAVVGGIINLHLLTGQIGKEGAGPFSLTGQPNAMGGREAGGLSHLL

SEQ ID NO: 21547 - protein, 135 aa, Ralstonia eutropha JMP134
MRLLHTMLRVGDLQRSIDFYTRVLGMQLLRQSDNPEYKYRLAFVGYGPESETAVLELTYNYGVDKYDLGTAYGHIALETDNAAAACDRIRVAGGKVAREAGPVKGGTTVIAFVEDPDGYKIELIERHSTRDASRP

SEQ ID NO: 21548 - protein, 219 aa, uncultured bacterium
NSRLCMSSAVTGYTRSLGSDGPPCCYEDLDHCSVAFLIGTNTAECHPVLFQRLLKRKKRNPGSVTIVVVDPRRTDTAKAADIHLPIAPGSDLALLHGIAHLVLRENGQDPAFIDDHTDNYEAFFDVVARWTPRRVARFCNLPEKRLREVAQLFHRRERVLSLWSMGVNQRREGTAVVCGLINLHLLTGQIGKEGTGPFSLTGQPNAMGGREAGGLSHLL

SEQ ID NO: 21549 - protein, 260 aa, Desulfitobacterium hafniense DCB-2
MPENRVVELTVCNGVGVITINKPPVNALTLEVRGQLKETLNEVEKNTGIRVLVITGAGPKCFVAGADIKDFPNQFKEGPRENATIYKEMFSYLENTPRPVICALNGLALGGGLELALACDIRIADEKAKLGLTEVLLGLLPGLGGTQRLARLVGPAKAKELLFSGKIVKADEALRIGLVNEVVPAGESLNEALKLAEKLAKGAGIAMGYDKLLINKGLELSLADALEMEMHYVEKVFETEDLREGLDAFINKREAVFKNR

SEQ ID NO: 21550 - protein, 219 aa, uncultured bacterium
NSRLCMSSAVAGYTRSLGSDGPPCSYEDLDHCSVAFLIGTNTAECRPVLFQRLLKRKKRNPGSITIVVVDPRRTDTAKAADIHLPIAPGSDLALLHGIAHLVMRENGQDPAFIDDHTEHYDAFFDVVARWTPRRVALFCNIPEKRLRDVAALFHRREKVLSLWSMGVNQRREGTAVVQGLINLHLLTGQIGKEGAGPFSLTGQPNAMGGREAGGLAHLL

SEQ ID NO: 21551 - protein, 219 aa, uncultured bacterium
NSRLCMSSAVAGYTRSLGSDGPPCCYDDLDHCSVAFLIGTNTAECHPVLFQRLLKRKKRYPGSVTIVVVDPRRTDTAKAADIHLPIAPGSDLALPHGIAHLVLRENGQDPAFIDDHTENYEAFFDVVARWTPRRVARFCNLPEKRLREVAQLFHRRENVLSLWSMGVNQRQEGTAVVCGLINLHLLTGQIGKEGAGPFSLTGQPNAMGGREAGGLSHLL

SEQ ID NO: 21552 - protein, 346 aa, Corynebacterium glutamicum ATCC 13032
MEDMRIATLTSGGDCPGLNAVIRGIVRTASNEFGSTVVGYQDGWEGLLGDRRVQLYDDEDIDRILLRGGTILGTGRLHPDKFKAGIDQIKANLEDAGIDALIPIGGEGTLKGAKWLSDNGIPVVGVPKTIDNDVNGTDFTFGFDTAVAVATDAVDRLHTTAESHNRVMIVEVMGRHVGWIALHAGMAGGAHYTVIPEVPFDIAEICKAMERRFQMGEKYGIIVVAEGALPREGTMELREGHIDQFGHKTFTGIGQQIADEIHVRLGHDVRTTVLGHIQRGGTPTAFDRVLATRYGVRAARACHEGSFDKVVALKGESIEMITFEEAVGTLKEVPFERWVTAQAMFG

SEQ ID NO: 21553 - protein, 482 aa, Solibacter usitatus Ellin6076
MSDSTNTIETFANQEYKWGFVTDIEADAIPRGLNEDVVRLISAKKNEPEWLLEWRLKAYRHWLTLKEPDWANVHYPKIDYQDIIYYSSPKAKADGPKSLDEVDPELLKTYEKLGIPLQERAILAGVAVDAVFDSVSVATTFKEKLKEQGIIFGSFSEAVQEHPELVRQYLGSVVPTSDNFFAALNSAVFSDGSFCYIPKGVKCPMELSTYFRINAKDTGQFERTLIVADEGATVSYLEGCTAPMRDTNQLHAAVVELVALDNAQIKYSTVQNWYPGDKDGKGGIYNFVTKRGACRGVNSKISWTQVETGSAITWKYPSCLLIGDNSVGEFYSVALTNNWQQADTGTKMIHIGKNTTSTIVSKGISAGHGQNTYRGGVKILKSATGARNYSQCDSLLLGDKCGAHTFPYLEVRNTSAQVEHEASTSKIGEDQIFYCRQRGISTEDAVSMIVHGFCKEVFRELPMEFAVEAQKLLGVSLEGSVG

SEQ ID NO: 21554 - protein, 512 aa, Arabidopsis thaliana
MDHSSNRFGNNGVESILPNYKLGKTLGIGSFGKVKIAEHVVTGHKVAIKILNRRKIKNMEMEEKVRREIKILRLFMHPHIIRQYEVIETTSDIYVVMEYVKSGELFDYIVEKGRLQEDEARNFFQQIISGVEYCHRNMVVHRDLKPENLLLDSRCNIKIADFGLSNVMRDGHFLKTSCGSPNYAAPEVISGKLYAGPEVDVWSCGVILYALLCGTLPFDDENIPNLFKKIKGGIYTLPSHLSSEARDLIPRMLIVDPVKRITIPEIRQHRWFQTHLPRYLAVSPPDTVEQTKKINEEIVQEVVNMGFDRNQVLESLRNRTQNDATVTYYLLLDNRFRVPSGYLESEFQETTDSGSNPMRTPEAGASPVGHWIPAHVDHYGLGARSQVPVDRKWALGLQSHAHPREIMNEVLKALQELNVCWKKIGHYNMKCRWVPGLADGQNTMVNNQLHFRDESSIIEDDCAMTSPTVIKFELQLYKAREEKYLLDIQRVNGPQFLFLDLCAAFLTELRVI

SEQ ID NO: 21555 - protein, 536 aa, Neurospora terricola
MTLLALKEDRPTPKAVYNWRVYTCAAIASFASCMIGYDSAFIGTTLALPSFKKEFDFASYTPGALALLQSNIVSVYQAGAFFGSLFAFATSYFLGRRKSLIAFSVVFIIGAAIMLAADGQGRGIAPIIAGRVLAGIGVGGASNMVPIYISELAPPAVRGRLVGIYELGWQIGGLVGFWINYGVNTTMAPTRSQWLIPFAVQLIPAGLLFLGSFWIPESPRWLFANGKREEAMKVLCWMRNLEPTDRYIVEEVSYIDADLERYAREVGKGFWKPFLSLKQRKVQWRFFLGGMLFLWQNGSGINAINYYSPTVFRSIGITGTNTGFLTTGIFGVVKMVLTIVWLLWLVDLVGRRRMLFIGATGGSLCMWFIGAYIKIAGPGSTKAEDAKLTSGGIAAIFFFYLWTAFYTPSWNGTPWVINSEMFDQNTRSLGQASAAANNWFWNFIISRFTPQMFIKMEYGVYFFFASLMLLSIVFIYFFIPETKSIPLEAMDRLFEIKPVHNANKILMAELNFDRNPEREESSLDEKDRVTQTENAV

SEQ ID NO: 21556 - protein, 452 aa, Bacillus clausii KSM-K16
MKVAKFGGSSVANAEQIKKVAAIIKADNKRKIVVVSAPGKRYADDAKMTDLLIALAEAKVADQPVEAAFNAVMNRYESIANDLELNRDVIAEIEADLKNRLEQTVTGKGRFLDIMKASGEDNNAKLIAAYLSKIGLKATYINPKDAGLLVSDEPGNAQVLPEAYEALAKLAEIDGIVVFPGFFGFSKLGNLVTFPRGGSDITGAILAAAVQAELYENFTDVDSVYAANPFIVEDPVEIKRMTYREMRELSYAGFSVFHDEALIPAFRNDIPVCVKNTNNPKCSGTLILAERERSLNPIIGIASDEGFATIYVRKYLMNREVGFGRHLLQILEDAGISYEHIPSGIDDTSVIIRQTQLSDQLENAIIERIKEELNVDDVHIEHDFAMVMLVGEGMHNTVGVTARASSALAKAGVNIEMINQGSSEVSLVFGIHSKDTKQAVRVLYEEFFGQKQ

SEQ ID NO: 21557 - protein, 166 aa, Triticum aestivum
MVAGCFITDECALAVSTERMWKAVFSGEDTAVLPKACAGFIDAVDVEGDGGPGSVSTMTLSPAAAELAGSGVMRSRLVARDNAARVIKTELLEGSKVSAQLKSQVAEVKLEAAGEGACVAKLRVEYERLDGGGALSAEDQATLAAGYLDVLKMVEAYLVAHPAEYA

SEQ ID NO: 21558 - protein, 225 aa, Zea mays
MAAAKIAPSMLSSDFANLASEAERMVRLGADWLHMDIMDGHFVPNLTIGAPVIQSLRKHTKAYLDCHLMVTKPSDYVEPFGKAGASGFTFHIEVARDNWQDLIQSIKSKGMRPGVSLRPGTPVEEVFPLVEAENPVELVLVMTVEPGFGGQKFMPEMMDKVRTLRKKYPSLDIEVDGGLGPSTIDVAASAGANCIVAGSSIFGAADPGAIISVLRKSVEGSQNKN

SEQ ID NO: 21559 - protein, 229 aa, Pseudomonas fluorescens
PRVVPKAQRLDKITFEEMLEMASLGSKVLQIRAVEFAGKYNVPLRVLHSFQEGPGTLITIDEEESMEQPIISGIAFNRDEAKLTIRGVPDNPGVAFKILGPISAANIEVDMIVQNVSHDNTTDFTFTVHRNDYLAAQTVLENTAREIGAREVVGDTDIAKVSIVGVGMRSHAGVASRMFEALAKESINIQMISTSEIKVSVVIEEKYLELAVRALHTAFELDAPARQGE

SEQ ID NO: 21560 - protein, 616 aa, Bacillus clausii KSM-K16
MCGITGWVDWQRNLRTETKQMKNMANTLNRRGPDALETWTSDHAAFGHARLVVVDPEGGKQPMTRTAKGNTCTIVYNGELYNTEELRKELLAHGHTFAGHSDTEVLLKAYMEWGAACLEKLNGIFAFAVWDEQEQTLFMARDRLGVKPLFYTEKDGMLLFGSELKALLAHSQIEAVVDRSGLADVMGLSPSRTPGHGIFKGIVELRPAHYLQFSKNGSAVKRYWQLQSNIHTETAHETAAHIRELLEDIVERQLFADVPVGMFLSGGVDSSALTAIAARIYEKQGNAPIFSYSIDYEENEKYFKASTFQPNADADWVEKVAAHCGTNHKNCIIGNDVLANLLKESVLVRDTPGMADVDSSLLWFCKQIKNDVTVGLSGECADEIFGGYPWFHKAEVMAIDGFPWMRSLDERIQLLQPDWQKRLNLQEYVYDRYKETIQETPRFDGDSPEEARRREISYLNMIWFMTNLLDRKDRMSMGASLEVRVPFSDHRLVEYVWNIPWEMKTYGGREKGILRKALQGLLPDDVLFRKKSPYPKTHHPLYTAAVTKAIQEVVRQKDAPLFTFINRDRLKEIADKGGFDTGKPYFGQLMAGPQLLAHFVQIDYWMKAYNIQIDES

SEQ ID NO: 21561 - protein, 418 aa, Bradyrhizobium japonicum USDA 110
MALRRRPPNRRCLVSEPLVIVGNGMAAARLVDELAKTSLGRYAVAVIGDEPRLAYNRVLLSSVLAGETGSHEIELRPADWWRHRGVTVRYGYRVTEIDTGRRELKIEGEESMEYSKLVLATGSTPLRLNVPGADLAGVHTFRDTRDVDLLLTLAAAKKRVVVVGGGLLGLEAAYGLAKAGAPVTLLHLMDRLMERQLDGPAADLLKTLVERKGIRILLNASTKCIHGDGHVEAVELADGSRIEADAVIFAAGIRPNIALAKDAGIAVNRGIVVNDVMQTASPDIFALGECAEHRGTCYGLVEPAYEQARVLARHLAGRPAAYQGSVVSTNLKVSGVSVFSAGDFIGGEGSESLVLSDRRRGTYKKLVIADGRLTGAVLIGDTVDALWYLELIRNRDKVAAIRTDMMFGRALARPSKAA

SEQ ID NO: 21562 - protein, 507 aa, Synechocystis sp. PCC 6803
MSNSILSKLNVGERSPVNRTHSSRTEAEKSSLFRFVRRKINSPWLACVPLTALIVAIWNAAAIAQDTEIVNITVETVNENVATLQGTLNAIWILIAAILVIFMNAGFGMLETGLCRQKNAVNILTKNLIVFALATIAYWAIGFSLMFGSSGNPFVGFGGFFLSGDHTNYGLSPFPEGLPVAVFFLFQVAFSATAATIVSGAVAERIKFNEFLIFSVLLVGIAYPITGHWVWDAGGWLYTMGFMDFAGSTVVHSVGGWAALAGAFLLGPRLGKFVDGRPGAIPGHNMGFAMLGCLILWIGWFGFNPGSQLAADQACAYIAVTTNLAASAGGLTATFTSWLKDGKPDLTMVINGVLAGLVGITAGCAGVSYWGSVIIGGIAGILVVYSVAFFDKIKIDDPVGAISVHLVNGVWGTLAVGFFNMEKGLFYGGGINQLIIQIVGILAIGAFTAIFSFVVWAILKQTMGIRVSGEEEMIGLDIGEHGMEAYTGFVKETDSFGSAVSGATVPE

SEQ ID NO: 21563 - protein, 397 aa, Picrophilus torridus DSM 9790
MEVNYDVLVIGAGPAGSSAARFAARKGLKTLLIEKRPDIGSPVRCGEGVSKSWMPEVELKPEDHWISDEVKGARIYGPSEKKPIMLTAENAGNEVGYVVERDKFDKHIAALAASEGADVWVKSPALSVIKDGNRIVGAKVRHNSEIVDVRAKMVIAADGFESEFGRWAGLKSLILAKNDIISCVEYRMINVDSDEDYTDFYLGSCAPAGYIWVFPKGKHEANVGIGVTISKMRDRFDVKNYLDAFIKSHPGYSKGKTIQLITGGVSVSKVRDKFTLPGLLTVGDAARLIDPITGGGIANGMISGKYAAEVSKKAIDNEDYSQEMMNNYERMVKDKFERKHLRNWFAKEKLGTLSDETLDKLVDVIADVKINEISVEEILKAVQLKYPELVEELESLI

SEQ ID NO: 21564 - protein, 437 aa, Deinococcus radiodurans R1
MMQNVFLPVVIILALVVLNGLFVAAEFALVGAKRSRLQTLAEGGNGAARWLLGVFDRPTGKDGYIAVAQLGITLASIGLGMYGEPAVARWLYGPFEKWGLSHDTAHTVGFVVALSSITFMHVVFGEMIPKALALQAPEQMSLSVNPLMRVFGLIFRPFVAVLNFLALGLMRLLRIPEPDKSATLYTSKELAIVTEEVADSGQLGDVQRDLIHNIFELEERTAEELMTSRSRMEVLSVRALSQDVATRIAASPRSRYPVFEDNLDHIIGVLHIKDFMRAQASGRVPDLSRLVRPLPSVAATAKAEELLSMFKRERVHAALVADEFGGTLGFVTMDDLIADVMDEEEESDGFWIQENGDGSLTLDGEVTLSELRDDYGLPLGSMDVSTVAGLILAQTGTVPASGVTVHVQGVDLTVEEVSELKITRVRLRRIGDSTPLH

SEQ ID NO: 21565 - protein, 541 aa, Methanocaldococcus jannaschii
MCSISGIIVKDNQISAKYSIDMMKILKHRGRDNSGLLLDDEVIYFNDFEDVEDLEEEMIGNLSLAHNRLAIVGRYGVQPIPNEDETIWLVCNGEIYNYIELREYLKQNHEFRTDSDNEVIIHLYEEEKLEELDGDYAFAIYDKSKNVVRLARDMFGVKPLFYVDRDKYFAFASERKALWHLLINIDGCERDLDELNSKIKTLKPNSQLIYYLDDNRFEIIEGFKKLELNYMKERSYEEAKEYLDRALKNSVLKRVRGLDKVGIICSGGVDSSLIAKLASLYCEVILYAVGTENSEDLIYAERLAKDLNLKLRKKIISEEEYEEYVFKVAKAIDEVDLMKIGVGIPIYVASEMANEDGLKVVLSGQGADELFGGYARHERIYRERGEEELKKELLKDVYNLYKVNLERDDHCTMANGVELRVPFLDEEVVEIALSIPIEYKMSELSNRPYAESNISLKSEPINGLKNTNLNIKCVRSVRKKILRDVASQYLPDYIAYRPKKAAQYGSGGEKMIYKVAKKYGFSKKRINEFLDMLKRKIVSEF

SEQ ID NO: 21566 - protein, 535 aa, Oryza sativa (japonica cultivar-group)
MAVSLKSSGSFCSTPPQWLHSTRDRILYGYSHSNAKECTCKKTKRPAPLCVKATSTKVELDFNDPSWKQKFQEDWDKRFNLPRITDIYDLKPRPTTFSLKKNRSPAGDENGTPMDKWNGYVNSDDRALLKVIKYSSPNSAGAECIDPDCSWVEQWVHRAGPRKEIYYEPEEVKAAIVTCGGLCPGLNDVIRQIVFTLETYGVKNIVGIPFGYRGFFEKGLKEMPLSRHLVENINLAGGSFLGVSRGGAKTSEIVDSIQARRIDMLFVLGGNGTHAGANAIHEECRKRKLKVSVVAVPKTIDNDILLMDKTFGFDTAVEEAQRAINSAYIEARSAYHGIGLVKLMGRSSGFIAMHASLSSGQVDVCLIPEVPFTLDGEYGVLRHLEHLLKTKGFCVVCVAEAAGQLFYVHYRSLQKSGATDASGNVILSDIGVHMQQKIKMHFKDIGVPADVKYIDPTYMVRACRANASDAILCTVLGQNAVHGAFAGFSGITSCICNTHYVYLPITEVITVPKRVNPNSRMWHRCLTSTGQPDFH

SEQ ID NO: 21567 - protein, 226 aa, Wolbachia endosymbiont of Drosophila ananassae
MSIKIAPSILSADFAKLGEEVRKISDLGVDYIHIDVMDGNFVPNITIGPSVVSAIRKYSNLPFDVHLMVTSPGNHIESFINAGADIITVHAEAEIHLERLIRKIKSYKNVNDEKKPIQVGVSIVPSTSPSVLEYIIHELDIVLIMTVNPGFGGQEFIHSQLNKISTIKKMIQERNLKTQISVDGGINFSNAADIIKAGADILVAGSAIFKAEDIKKAVNDLKNLLL

SEQ ID NO: 21568 - protein, 183 aa, Citrus unshiu
MRDGSLKGLFCTAPKSIRSVRRNSGSFNVTAFTEEQEALVVKSWNAMKKNSGELALKFFLRIFEIAPSAKKLFTFLKDSDIPVEQNPKLKPHATTVFVMTCESAVQLRKAGKVTVRESNLKDLGATHFKYGVADEHFEVTKYALLEPIKEPVPEMWSPELKNAWAEAYDQLAAAIKIEMKPPS

SEQ ID NO: 21569 - protein, 161 aa, Marchantia polymorpha
DSATHSVTFFAKIFEIAPGAKALFSFLKDSDIPFDKNPKLKAHALTVFRLTGDSACMLGEKGAIDALHPKLKELGKKHVGYGVIAAHFDVVKAALLSTIESLLPEDWPAEKKVATCGAWSQAYDELAGVMINEMQAIRDAEKAPAAEEAPEAPAAESKALP

SEQ ID NO: 21570 - protein, 354 aa, Arabidopsis thaliana
MASLLRPTPLLSTPRKLTHSHLHTSISFPFQISTQRKPQKHLLNLCRSTPTPSQQKASQRKRTRYRKQYPGENIGITEEMRFVAMRLRNVNGKKLDLSEDKTDTEKEEEEEEEDDDDDDEVKEETWKPSKEGFLKYLVDSKLVFDTIERIVDESENVSYAYFRRTGLERCESIEKDLQWLREQDLVIPEPSNVGVSYAKYLEEQAGESAPLFLSHFYSIYFSHIAGGQVLVRQESSIYREFCWFLVYFSHIAGGQVICKTASLIELEIDIDIVDSGELGLSGVLRLWWVSEKLLEGKELEFNRWEGDAQDLLKGVREKLNVLGEHWSRDEKNKCLKETAKAFKYMGQIVRLIIL

SEQ ID NO: 21571 - protein, 425 aa, Agrobacterium tumefaciens str. C58
MAEFVITMPDVGEGVAEAELVEWNVKPGDIVHEDMVLAAVMTDKATVEIPSPVAGIITWLAVTVGNTVPVKAPLVRIETDVAAAAPNGSAPEAEAPSRMTEEEAPADMTEAPPPVETQPAARQTEEAPSAPVAEPHHKPLASPAVRQRADDLDIDLIKVKGTGPDGHITHADLDGFLTVRARPERPEPMTPHDSAVEEVKVTGLRRKIAEKMVLSVSRIPHITYVEEIDVTELEDLRATMNGNRRSGQPKLTILPFLMRALVKAVADHPGMNAIFDDEKGVVSHYEAVHIGIATQTPAGLTVPVVRHAETLGLWDCAEEVARVAEAARTGTAHREELMGSTITISSLGALGGVVSTPIINHPEVAIIGVNKIMTRPVWDGNRFVPRKMMNLSSSFDHRVVDGWDAAVFIQAVKALLEKPALIFIE

SEQ ID NO: 21572 - protein, 156 aa, Lycopersicon esculentum
MGFTDKQEALVRDSWEFMKQDIPQLSLRFFSLILEIAPVAKNMFSFLKDSDELPENNPKLRAHAVKVFKMTCESAIQLREKGEVVVGETTLKYLGSIHLQKRVADPHFEVVKEALLRTVKEATGNKWKDEMKEAWSEAYDQLASAIKAEMHAEAAA

SEQ ID NO: 21573 - protein, 288 aa, Aspergillus nidulans FGSC A4
MSLSSLSSLKGLLSPTTESEYDVEKDSHDLSRSEDVGSTNGEIKPREAKESKLIDGRVISDAIIGLSDGMTVPFALTAGLSALGDTKVVVFGGFAELIAGAISMGLGGYLVRESYHATLKETTKQTLTSPATVSDTIHEIFTPYDLPDHLLAQLTTHLTSSPHLPSFLMTFHHTLPEPSGSRALTCALTIALSYFLGGFVPLLPYFFVGPDQAFLALKWSIATMAIALFVFGYGKTCFVSGWAGSKNIKKGAWGGLQMVIVGGVAAGCAMGLVRGFQALGESDPGQNT

SEQ ID NO: 21574 - protein, 293 aa, Ralstonia eutropha JMP134
MNDPYPSSKPAHFKQSDRPRSLLERLTDLISPEPESRAELLAVLQDAHERNLIDADSLSMIEGVFQVSELTARDIMVQRSQMDMVNIADAPQAFIPFMQLTAHSRFPVYEGSRDNIIGILLAKDLLRYYTDEQFDLRETLRPAVFIPESKRLNILLREFRNNRNHIAIVVDEYGGVAGLVTIEDVLEQIVGDIEDEFDLDEDQDNILPLPDGGWRVHGLTEISQFNEAFGTAFSDHDVDTVGGLLTNHLGHVPHRGEIITLPPVSFEVLRADARQVHLLLVHRESSTNHLTDA

SEQ ID NO: 21575 - protein, 520 aa, Xanthomonas oryzae pv. oryzae KACC10331
MNTTISNQTPHIRIFDTTLRDGEQSPGCSMTPQQKLVMARALDALGVDIIETGFPASSHSDREAVAMMGRELRRPTLAVLSRCLQADIETSARALETVANPRLHVFLSTSPLHREHKLRMSREQVLESVHRHVTLARGYIDDVEFSAEDATRTEEDFLAEVTRVAVAAGATTINLPDTVGFTTPEEIRGMFSRLIASVEGADKVIFSAHCHNDLGLAVANSLAAIEGGARQVECTINGIGERAGNCALEEITMALKVRGAFYNIDSAINTPRIVSTSQLLQRLVGMPVQRNKAVVGGNAFAHESGIHQHGMLRHRGTYEIMRPEDVGWESSQMVLGRHSGRAAVERRLRALGYLLEEEEVKLMFEQFKALCEKQRLVTDADLQALMQDATVQEGYRLASMTISDVGSRANALVELSDPEGNRVAETAQGNGPVDALFGALASATGVKLELDSYQVHSVGIGADARGEASLSVRHDGVEYEGTGTSKDIIEASALAWLDVANRLLRQRERGVIAGKTAAVA

SEQ ID NO: 21576 - protein, 657 aa, Legionella pneumophila subsp. pneumophila str. Philadelphia 1
MEICYRIWDKLIRGRKTNNLSLFSALWRERMLFQYIKKFFLFLWVQAVSISFLLAMASVSFAQLTAQDHAAHHQGEKESEGMGGMMKNIGTPSKELYPSLMNLPTLSPEKRLAIQQKAHQRITSGMALMKGGLNELLLASNNNDYAKMQEALEKLREGIAQYESALAALRALSEGKNPRDIALQWFKREMNLLPSTPQAKNVLGGPFFHLTIIALFGLFFLVMIWMYFFKMRRAAALLDRLTKQNATVSSETPPQFSKAPEPTPSLTSVEPIKSSQVSKVPSETAPTTPPTCPAHKCPVPQFPVMRSLTEPEEKWEGQLRVCRIFQEAPGIKTFHLASTHEVALPFTYYPGQFITLTALINGKTVRRSYTMASTPTQLHYCAITVKREEQGVFSRYLHDEIKEGDLLEVMGPNGKFTFTGEEAKSIVLICGGVGITPMMSIIRYLTDIGWHNDIYLLYCCRTTSEFLFREELEQLQERYLNLHVYASMLRSEGTIWMGLQGLFTKNIISHLVPDIASHRIHVCGPPAMMAAILGILKELKVPADLILTEAFGPEKKPEIIQEDLEAIKADTRSMISFRKSEKMVPILPDRTLLEIAEANGIAIDNACRTGQCGLCKVKLLSGEVTMACEDALSKEDKQQRLILACQAKATQNIEVDA

SEQ ID NO: 21577 - protein, 621 aa, Triticum aestivum
MGSHGKPPLPYAYKPLPSGAAAADADGERTGWTRWRVCATVLTASAMVVVVVGATLLAGFRVDQAVDEEAAGGFPWSNEMLQWQRSGYHFQTAKNYMSDPNGLMYYRGWYHMFFQYNPVGTDWDDGMEWGHAVSRNLVTWRTLPIAMVADQWYDILGVLSGSMTVLPNGTVIMIYTGATNASAIEVQCIATPADPNDPFLRRWTKHPANPVIWSPPGIGTKDFRDPMTAWYDESDDTWRTLLGSKDDQDGHHDGIAMMYKTKDFLNYELIPGILHRVERTGEWECIDFYPVGRRSSDNSSEMLHVLKASMDDERHDYYSLGTYDSAANTWTPIDPDLDLGIGLRYDWGKFYASTSFYDPAKKRRVLMGYVGEVDSKRADVVKGWASIQSVPRTIALDEKTRTNLLLWPVEEIETLRLNATELSDVTMNTGSVIHIPLRQGTQLDIEATFHLDASAVAALNEADVGYNCSSSGGAVNRGALGPFGLLVLAAGDRRGEQTAVYFYVSRGLDGGLHTSFCQDELRSSRAKDVTKRVIGSTVPVLDGEAFSMRVLVDHSIVQGFAMGGRTTMTSRVYPMEAYQEAKVYLFNNATGASVMAERLVVHEMDSAHNQLSNMDDYSYVQ

SEQ ID NO: 21578 - protein, 219 aa, uncultured bacterium
NSRLCMSSAVAGYTRSLGSDGPPCSYEDLDHCTVAFLIGTNTAECHPVLFQRLLKRKKRHPGSVTIVVIDPRQTDTAKAADIHLAVAPGSDLALLHGIAHLVMRENGQDPTFIDNCTDNYDSFFDVVARWTPRRVALFCGIPEKRLREVAQLFHRREKVLSLWSMGVNQRREGTAVVGGIINLHLLTGQIGKEGAGPFSLTGQPNAMGGREAGGLSHLL

SEQ ID NO: 21579 - protein, 221 aa, Kineococcus radiotolerans SRS30216
MSRSVQVNPSILSADFANLEAELRRISTADAAHVDVMDGHFVPNLTLGLPIVEALQRVSPIPLDCHLMIEAPDRWAPAYAEAGAAGVTFHAEAAMAPVKLAREIRAAGGRAGIALRPATPLEPFVDLLAEFDMLLVMTVEPGFGGQSFLDVTLPKIARARAAIGDLDVRLQVDGGVSASTIERAAEAGADVFVAGSAVYGAEDAAAAIGTLRELAAGACRH

SEQ ID NO: 21580 - protein, 219 aa, uncultured bacterium
NSRLCMSSAVAGYTRSLGSDGPPCSYEDLDHCTVAFLIGTNTAECHPVLFQRLLKRKKKHPGSVTIVVVDPRQTDTAKAADIHLAVAPGSDLALLHGIAHLVMRENGQDPTFIDNCTDNYDSFFDVVARWTPRRVALFCGIPEKRLREVAQLFHRREKVLSLWSMGVNQRREGTAVVGGIINLHLLTGQIGKEGAGPFSLTGQPNAMGGREAGGLSHLL

SEQ ID NO: 21581 - protein, 861 aa, Klebsiella pneumoniae
MTETRTTCPYCGVGCGVIASRAPHGQVSVRGDEQHPANFGRLCVKGAALGETVGLEDRMLFPEVDGERATWPQAGGGRFAPAGDYRSARGQAVRFTSGQLLTEDYYAANKLMKGFIGAANIDTNSRLCMSSAVTGYKRARWGTVVPCSYEDVENSDLVVLVGSNAAWAHPVLYQRLAQAKRDNPQMRVVVIDPRRTATCDIADRHLALAPGSDGGLFVGLLNAIAASRRISDDFNDAQRALTIAQDWDLDKVAQFCGLPRQQIADFYREFIAAPRAITLYTMGINQSASGSDKCNAIINVHLACGKYGRPGCGPFSLTGQPNAMGGREVGGLATMLAAHMNFEPDDLRRPARFWGSERLAQTGGLTGLELFAAIGRGEVKAVWIMGTNAMVSLPGTSHAVTEPWPVSLVIISDVADTDTGRFAHIRFPALAWGEKSGTVTNSERRISLQRAFMPPPGEARAAGGLSPAGRGLASALPGSIRTRCSANTPRFQGMKTMASGRLISADWRISAATWIALEPVRWPVSRSEAAWSVHKGWHRDGKLRMVPVAPQPTRATTVASIALLNADPQQRADPRSMAHHDPHPAVRLMQHINEPVVEVPPAEPQRYHLLEGELARVRSPKGVMVAKVTIGEANGPGSLFVPMHWNNQFARQGRVNNLLAAVTDPHSGQPESKQTAVAIATWLPAWKGELFSRQPVPLPCRCTGGGGRPRALSIFRWPGDTPSRDWLVEWCQRQGWQMQVAEGGKVWNLLAWRAGELMLGWWSDASEPAISASWIHARFVPPQNAARAHALLSGRKGGVEMPRGRIICSCFSVGERAIGEAIAGGCRSPGGRLGGKLKCGTNCGSCIPELKALLAANVAQA

SEQ ID NO: 21582 - protein, 207 aa, Pinus sylvestris
MEVHSTVNHASAKRFWNILRIALFMIRKGLISKRKMLMDMHLMMERGKVYGRSLRNLVFHHSRGNNHGGFGLQDYEFSCSNSPAIFHMTKRKHHYFPTHILHFPCIHPHQVEDKEEPSTPVFPQLDYSNEYFSKDCLDQNDLPVLQKLSPLLSPLCRRISNSGEDQAYDHQVDRRADEFIAKFYEQLRLQNRMSLLQYQEMLERGTA

SEQ ID NO: 21583 - protein, 219 aa, uncultured bacterium
NSRLCMSSAVAGYTKSLGSDGPPCCYDDLDHCSVAFLIGTNTAECHPVLFQRLLKRKKRNPGSVTIVVVDPRRTDTAKAADIHLPIAPGSDLALLHGIAHLVLRENGQDPAFIDEHTDNYEAFFDVVARWTPRRVARFCNLPEKRLREVAQLFHRRERVLSLWSMGVNQRREGTAVVCGLINLHLLTGQIGKEGTGPFSLTGQPNAMGGREAGGLSHLL

SEQ ID NO: 21584 - protein, 260 aa, Kineococcus radiotolerans SRS30216
MAGGVPHPHHPRPHHAGERPGGHHGQPRGRRAGQVRGTAQRVRPRGRGVGVSAPAVPAGTAVAAALDALRAGRPVLVSDAADRENEGDVVLSAQLATAEWVGWAVRHTSGMLCAPMPAERADALGLPRMVERNEDSYRTDYTVSCDAASGVTTGISAADRARTARVLAEPSSGPGDLIRPGHVFPLRARPGGVLERPGHTEAAVDLCRLAGLAPVGLISELVEDDGSMSRWDQIVALGEQYDLPVLTIADLRTHLSAAAD

SEQ ID NO: 21585 - protein, 364 aa, Arabidopsis thaliana
MSDLSPDLVGEILTRVPMTSLISVRCTCKMWNALSKEGIFFKAARKQFMGFTMMDSRVCSMKFDLQGIRNNEHDFVDPCIKQIAKLDQIEVSKVLQCDGLLLCVGQTRFIKPRKRFNKLEWYALGYDNNHNYKILMNYDTGHLFGYEIYDFSSDSWRVLDVSPDCHIPFHQQSVSLNGNTYFLAQEKIIVEGEEEEVVDEIEKFLLCFDFTTERFGPRLPLPFHSDVLETVAISCVRDDQLAVLYQRFETWEIWVTTKIDPTAVSWSMFLSVDMEPPTGCQFDDEAGSFFIDEENKVAVFFNSDLFNPRVENRNRRYPTAYIIGQDGYFKSATLREAPDLVKPDPYVYCCPLVWSSYAPSLVQL

SEQ ID NO: 21586 - protein, 219 aa, uncultured bacterium
NSRLCMSSAVAGYTRSLGSDGPPCSYEDLDHCTVAFLIGTSTAECHPVLFQRLLKRKKRHPGSVTIVVVDPRQTDTAKAADIHLAVAPGSDLALLHGIAHLVMRENGQDPTFIDNCTDNYDSFFDVVARWTPRRVALFCGIPERRLREVAQLFHRREKVLSLWSMGVNQRREGTAVVGGIINLHLLTGQIGKEGAGPFSLTGQPNAMGGREAGGLSHLL

SEQ ID NO: 21587 - protein, 719 aa, Bradyrhizobium japonicum
MATKAKTLQAKDKEKDDKAADAPEKDSQDAPSPLLDLSDAAVKKMIKQAKKRGFVTFDQLNEVLPSDQTSPEQIEDIMSMLSDMGINVTEADDSEGEEDKDEGGEDETDNELVEVTQKAVTEVKKSEPGERTDDPVRMYLREMGTVELLSREGEIAIAKRIEAGREAMIAGLCESPLSFQAIIIWRDELNEGKIFLRDIIDLEATYAGPEAKGGMNTAMIGGPTGENGEATAEGGEAVAVTGAAPAHVAPPAAPPAPTPFRAAPAAGNGAEAEKDPGEAAAEADMDEDDEFENQMSLAAIEAELKPKVVEIFDKIAESYKKLRKLQEQDIQNQLESTSHGPSLSPHQERKYRKLKDEIIVEVKSLRLNQARIDSLVEQLYDINKRLVSHEGRLMRLADSHGVAREDFLRNYTGSELDPRWLNRVSKLSAKGWKNFVHHEKDRIKDLRHEVHQLAALTGLEIVEFRKIVHSVQKGEREARQAKKEMVEANLRLVISIAKKYTNRGLQFLDLIQEGNIGLMKAVDKFEYRRGYKFSTYATWWIRQAITRSIADQARTIRIPVHMIETINKIVRTSRQMLNEIGREPTPEELAEKLGMPLEKVRKVLKIAKEPLSLETPVGDEEDSHLGDFIEDKNAILPIDAAIQSNLRETTTRVLASLTPREERVLRMRFGIGMNTDHTLEEVGQQFSVTRERIRQIEAKALRKLKHPSRSRKLRSFLDN

SEQ ID NO: 21588 - protein, 180 aa, Petunia x hybrida
MASSVISSAAVATRTNVAQASMVAPFNGLKSAVSFPVSSKQNLDITSIASNGGRVQCMQVWPPYGKKKYETLSYLPDLTDEQLLKEIEYLLNKGWVPCLEFETEHGFVYREYHASPRYYDGRYWTMWKLPMFGCTDATQVLGELQEAKKAYPNAWIRIIGFDNVRQVQCISFIAYKPPGF

SEQ ID NO: 21589 - protein, 532 aa, Burkholderia vietnamiensis G4
MLDANLKNQLKAYLEKITRPIELVASLDDGAKSQELLALLNEIASLTSRVTVIERRDDAERKPSFSIGEPGKPAGIRFAGIPMGHEFTSLVLALLQTGGHPIKLDDDVIEQIRALDGDFAFETYFSLSCQNCPEVVQALNVMALINPRIRHVAIDGALFQDEVDARQIMAVPTMFLNGATFGQGRSSVKEILAKLDTGASARAAKSLENKPVFDTLIVGGGPAGAAAAIYSARKGIATGVVAERFGGQVLDTMAIENFVSVQETEGPKFAAALEQHVKQYDVDIMDVQRAEALIPGDVHQIRLANGAVLKAKTIVLATGARWREINVPGEREYRNRGVAYCPHCDGPLFKGKRVAVVGGGNSGVEAAIDLAGIVKEVTLLEYGAQLRADEVLQRKLRSLPNVTIVTQAQTTELTGDGNKLNALVYKDLQSGETKRIALEGVFVQIGLVPNTEWLKGTVELSKHGEIVVDARGGTSVPGVFAAGDVTTVPFKQIVIAVGEGAKASLGAFDHLIRQDATPVTTAAPQPAEALAA

SEQ ID NO: 21590 - protein, 180 aa, Petunia x hybrida
MASSVMSSAAVATSTNAAQASMVAPFTGLKSAASFPVSRKQNLDITSIASNGGRVQCMQVWPPYGKKKYETLSYLPDLTDEQLLKEIEYLLNKGWVPCLEFETEHGFVYREYHASPRYYDGRYWTMWKLPMFGCTDATQVLGELQEAKKAYPNAWIRIIGFDNVRQVQCISFIAYKPPGY

SEQ ID NO: 21591 - protein, 964 aa, Oceanobacter sp. RED65
MSTRATLTELENRDEFVNRHISNDQSDLQDMLNTVGAESLDDLTQQIVPPSILREPFLEMGEALPEHEALANLRAIANKNKVYKSYIGMGYHDTRLPNVILRNVLENPGWYTAYTPYQPEIAQGRLEALLNYQQMVIDLTGMELANASLLDEATAAAEAMALIKRQVRKNKSNVFFVDELCLPQTIDVLKTRADGFGWELHIGPAETATDVECFGALLQYPAVDGNIDDFEELIAQMHEKNAMVAMATDLMALTLLKSPGELGADVALGNSQRFGVPMGFGGPHAAFFATKDAFKRAIPGRLIGVSIDSNGNRALRMALQTREQHIRREKATSNICTAQVLLSNLASFYAVYHGRDGIKRIANRIHRMTEIMAAAITDADIEDLVIVNQSAFDTLTIEVPNKAEVLARADEAQVNLRTQSQVDFDNVVGFSIGETTSRADLETLYYVITGRRDIDIEMLDQEVESSIPESLKRTSDFLTHPVFNSYQTEHEMLRYMKRLESKDLAMNHSMITLGSCTMKLNATAEMIPVTWPEIGGIHPFAPKEQTPGYEELIQNLDTWLRDITGFDAICMQPNSGAQGEYAGLMAIKHYHESRGEGHRNVCLIPASAHGTNPASAQMAGMRVVLTKCDEQGNIDFDDLKAKAEELSESLSCLMMTYPSTHGVYEDGAKAICELIHEHGGQVYMDGANLNAQVGITSPGYIGADVSHMNLHKTFAIPHGGGGPGMGPIGVAKHLAPFVANHSLRPIEDASKGQSAVSAAPYGSASILPISYMYIHMMGAKGLRKATQMALLNGNYLAKKLGEHYPILYAGQNGRVAHECIVDLRPIKAETGITEVDIAKRLMDYGFHAPTMSFPVAGTFMIEPTESEAKAELDRFIEAMVSIKAEINAVKAGELDETNNPLTNAPHTVKDITGNWDRPYDREQGAFPVAAVYENKFWPSVNRIDDVYGDRNLICSCPAIEEYQD

SEQ ID NO: 21592 - protein, 568 aa, Clarkia arcuata
MASPALISETEAWKDLKAHLEGIKRTHLRELMGDTERCQSMMVEFDNIFLDYSRQQASSDTINKLYKLADAAHLKQKIDRMYNGDHINSTENRSVLHVALRAPRNSAICSDGKNVVPDVWNVLDKIKDFSDRVRNGSWIGATGKKLKDVIAVGIGGSFLGPLFVHTALQTDPEASKNARGRELRFLANVDPIDVARNISGLNPESTLVVVVSKTFTTAETMLNARTLREWISSALGPSAVAKHMVAVSTNLPLVEKFGIDPINAFAFWDWVGGRYSVCSAVGVLPLSLQYGFAVVEKFLQGAHSIDQHFSSASFEKNIPVLLGLLSVWNVSFLGYPARAILPYSQALEKLAPHIQQVSMESNGKGVSIDGLPLPFESGEIDFGEPGTNGQHSFYQLIHQGRVIPCDFIGVVKSQQPVYLKGEVVNNHDELMSNFFAQPDALAYGKTPEQLKKENVSEHLIPHKTFTGNRPSISILLPTLDGYRIGQLLAIYEHRVAVQGFVWGINSFDQWGVELGKSLATQVRKQLHASRVKGEPVEGFNFSTKTLLERYLEATSDVPADPSTLLPNI

SEQ ID NO: 21593 - protein, 105 aa, Alkaliphilus metalliredigenes QYMF
MLAVDKETFEQEVLKAEGYVLVDFWSDGCEPCKALMPDVEALEAQYGDKVKFVKLNTTQARRLAIKEKVLGLPTISMYKDGVKVEEVTKDAANKENIEAMITKSL

SEQ ID NO: 21594 - protein, 490 aa, Synechococcus sp. CC9605
MTTAFHAPPQKRRKTLQEASLLEGPMLLLKSIRGFSSNRAMTWLACAPLALMGLGIFTLSAKAEELPELSAAFLANNLWLLVATILVIFMNAGFAMVEAGMCRQKNAVNILAKNLFVFALAVTAYWFVGYSLMYGDSVIDGWLYFGGLFFDPTVTAETISDAGLVPTVDFLFQAAFAGTAATIVSGLVAERIKFGEFVIFALVLTAFIYPVAGSWEWNGGWLNSVGSVEFIDFAGSSIVHSVGAWAGLVGAMLLGPRIGKYVDGKVQAIPGHNMSIATLGALILWIGWYGFNPGSQLAMDQWVPYVAVTTTLGAAGGAIGATVISTMTSKKPDLTMIINGILAGLVSVTAGCGNLTLTGSWVAGVVGGIIVVFSVAALDASGIDDPVGAFSVHGVCGVWGTIVIGLWGYDVQGDGSGLGLLVGGGVEQLGIQALGAAAYAIWTVVTCFIAWSIIGSLFGGIRVTEQEESEGLDIGEHGMEAYAGFSTTNN

SEQ ID NO: 21595 - protein, 896 aa, Oceanobacter sp. RED65
MSLNQLQHIIRRTLWSYISAIVLIAFISTLSYWTTQSAIQEQEADSQLINMAGRQRMLSQRIALYAQKHFTLTNSEAAVKANAEVLRVSAHLMLENHQALIKLTQNENIKSMYFGGEKPSLNELVIRFTDEAKYLSGLSRDQFPISENLSILSTDHSDQLLERLDGVVTAYEYNAEQKVTVLKNLQLSLWFLMLAALVLIGMFILKPSLQLIKNSLLQEKQKQHRIQLAADSAKLGIWEYQLSNGKLTWDKTMWRIFNAGKPANADEALATFKARLHPLDKSRVMDLFYQAVNQQTPFHTQFRIQTDDSEIKTIKADAIIEYDVDGNATAIVGTNQDISAQQQQEQALIDARMAAEHAARVKGDFLASMSHEIRTPMNGIMGMLELLKNTELTTLQAQRVNIALSSSKSLLVLINDILDFSKIEADRLILEEIDFNLRSLLGELTEALSQLAESKNIELVLDTVEVHQDMVKGDPSRIRQIITNLISNAIKFTHQGEVLIRVSLQEYSLDQWQVNFSVKDSGIGITQGQQKKLFDAFSQADSSTTREYGGTGLGLAIVKKLCEAMDGQIRVKSKMNIGSEFYGHLFVKKSERSRIIAPNYDISQLSILVVDDNKINREVLSQQLTTWGASVVQADSAEMAWKVMDSHFTEKKQAFDVALLDMQMPHTSGTELGQKIQADPRYKGVRLVLMTSMLLNSDHKAIAKMGFCGYFSKPVTTDDLFMILNVIGDDGEALQQASPLLTHDYLSSLQKEPATSDAEVRLGLASAKHKHVLLVEDNPINQLVAQDTLEELGLIVDIAQNGQEAISRLQEHRSKGYSLIFMDCQMPVMDGYEASRAIRNGEAGDEHRKTPIIALTANAMKEDRDHCIEAGMDDFISKPMDIEVLKTTIKTWLIDR

SEQ ID NO: 21596 - protein, 569 aa, Clarkia concinna
MASPALISETEAWKDLKSHLEGIKKTHLRELMGDTERCQSMMVEFDNIFLDYSRQQASPDTISKLYKLADEAHLKQKIDRMYNGDHINSTENRSVLHVALRASRNSAISSDGKNVVPDVWNVLDKIKDFSDRARNGSWVGATGKELKDVIAVGIGGSFLGPLFVHTALQTDPEASKNARGRELRFLANVDPIDVARNISGLNPETTLVVVVSKTFTTAETMLNARTLREWISSALGPSAVAKHMVAVSTNLPLVEKFGIDPNNAFAFWDWVGGRYSVCSAVGVLPLSLQYGFAVVEKFLQGAHSIDQHFSSAPFEKNIPVLLGLLSVWNVSFLGYPARAILPYSQALEKLAPHIQQVSMESNGKGVSIDGLPLPFESGEIDFGEPGTNGQHSFYQLIHQGRVIPCDFIGVVKSQQPVYLKGEVVNNHDELMSNFFAQPDALAYGKTPEQLKKENVSEHLIPHKTFTGNRPSLSILLPTLDAYRIGQLLAIYEHRVAVQGFVWGINSFDQWGVELGKSLATQVRKQLHASRVKGEPVEEGFNFSTKTLLTRYLEATSDVPADPSTLLPNI

SEQ ID NO: 21597 - protein, 444 aa, delta proteobacterium MLMS-1
MEKVTEFMKVVTDKNPGESEFHQAVLEVVETLMPFIEDNPKYRETKILERMVEPERVIIFRVPWVDDKGEVQINRGYRIQMNSAIGPYKGGLRFHPSVNLSILKFLAFEQVFKNSLTTLPMGGGKGGSDFDPKGKSDNEVMRFCQSFMTELYRHIGAETDVPAGDIGVGGREIGFMFGQYRKITNEFTGVLTGKSRNWGGSLIRPEATGYGAVFFAEEMFKVRGDSLAGKTCIVSGSGNVAQYTIEKVNQLGGKCVTLSDSAGFIHDPEGIDDEKLAYVMELKNVKRGRISEYAEKYGCKYYPGERPWKIPGDVAFPSATQNEIDAQDAETLVAGGCTCVSEGANMPSTSEAVRIFLKAKIMYGPGKAANAGGVATSGLEMSQNSLKLSWPREEVEERLRQIMEGIHEACYKYGKEGDFVNYVKGANIAGFVKVADAMIEQGVI

SEQ ID NO: 21598 - protein, 220 aa, Alkaliphilus metalliredigenes QYMF
MENVYDVVIIGGGPAGLSAGLYAARGKMTTLILEKEKTGGQIATTEEVANYPGSITDATGPALVARMVEQCNEFGAKIEKDTIKEVKLEGKIKILVGEKNTYHAKSIIVAPGASPRLLGVPGEKELTGKGVSYCATCDGDFFTDFEVFVIGGGDSAVEEAMFITKFARKVTIVHRREELRAAKSIQEKAFKHPKIDFIWNTTIKEIKGDGLVESVVFENL

SEQ ID NO: 21599 - protein, 569 aa, Clarkia concinna
MATPSLISETEAWKDLKAHLEGIKRTHLRELMGDTERCQSMMVEFDNIFLDYSRQQASPDTINKLFKLADAAHLKRKIDRMYNGDHINSTENRSVLHVALRAPRNSAICSDGKNVVPDVWSVLDKIKDFSERVRNGSWVGATGKELKDVIAVGIGGSFLGPLFVHTALQTDPEASKNAIGRELRFLANVDPIDAAKNISGLNPETTLVVVVSKTFTTAETMLNARTLREWISSALGASAVAKHMVAVSTNLPLVEKFGIDPNNAFAFWDWVGGRYSVCSAVGVLPLSLQYGFAVVEKFLQGAHSIDQHFSSAPFEKNIPVLLGLLSVWNVSFLGYPARAILPYSQALEKLAPHIQQVSMESNGKGVSVDGLPLPFESGEIDFGEPGTNGQHSFYQLIHQGRVIPCDFIGVVKSQQPVYLKGEVVNNHDELMSNFFAQPDALAYGKTPEQLKKENVSEHLIPHKTFNGNRPSLSILLPTLDAYRIGQLLAVYEHRVAVQGFVWGINSFDQWGVELGKSLATQVRKQLHASRVKGEAVEEGFNFSTKTLLTRYLEASSDVPADPSTLLPKI

SEQ ID NO: 21600 - protein, 562 aa, Idiomarina loihiensis L2TR
MPQTQRPLYIPYSGPNLLETPLLNKGSAFSKEERAAFNLTGLLPPRYESIEEQAERAYMQYRSFETPINKHIYLRAIQDNNETLFYRLLTDHLEEMMPIIYTPTVGDACEKFSDIYRSSRGLFISYSERDQIDDILRNATKQKVKVIVVTDGERILGLGDQGIGGMGIPIGKLSLYTACGGISPAYTLPVMLDVGTNNEKLLEDPMYMGARHKRIEQDEYDEFLDKFIKAVTRRWPGVMLQFEDFAQPNAMPLLRRYRDEVCCFNDDIQGTASVTVGTLLAACRQKGKKLSEQKVVFVGAGSAGCGIAEQIMIQMTAEGLTEEQAKRQIFMVDRFGLVMDTMDGLRDFQQALAQKTSDLNAWEYSGEYPSLLDVMHCAEPDILIGVSGQAGLFTEQVISTMAKNVERPIIFPLSNPSKHVEAHPADVLKWSEGKAIVATGSPFGEVEYDGRIYPIAQCNNSYIFPGIGLGVLSVKSERVSDEMLRVASKTLANASPSANGKGEALLPAFNDLTQLSKDIAFAVGKVAQQEGLALEIDDDTLRERIDNNFWKPEYRFYKRVSI

SEQ ID NO: 21601 - protein, 105 aa, Spinacia oleracea
EVQDVNDSSWKEFVLESEVPVMVDFWAPWCGPCKLIAPVIDELAKEYSGKIAVYKLNTDEAPGIATQYNIRSIPTVLFFKNGERKESIIGAVPKSTLTDSIEKYL

SEQ ID NO: 21602 - protein, 390 aa, Nocardioides aromaticivorans
MRRHYEYLVVGGGVAGGRAVEALSKRADSVALVSAEHWRPYARPPLSKEALVEGRSIEDLCLRDSAWYDDNGAELWLGERVVGLDPTDSVVRLASGSEIGFDRLLLAPGVEPIRLPVPGSELAGVHYLRTYDDAVQLRHAVEVRGRPCRVVVVGGGFIGSELAASLGAMGALVTVVEATSQLMVQALGEEVGALLTRRHRQAGIDVRLDARVERLSGETTVQGVQLADGSELPCDLVVVGIGAKPRLEWLEGSGVELADGIVVDEHCRTSRENVFGAGDATVMYSPRLGRHRRVEHEANAQAQGVVAARNMLGGNAVHDPVDYCWSIQHDLDIWTLGETGRGGEVSVEIGDGGKHALATYRLAGNVVGVVGINRPDDLAPARELLTSLIA

SEQ ID NO: 21603 - protein, 143 aa, Glycine max
VAFTEKQDALVSSSFEAFKANIPQYSVVFYTSILEKAPAAKDLFSFLANGVDPTNPKLTGHAEKLFALVRDSAGQLKASGTVVADAALGSVHAQKAVTDPQFVVVKEALLKTIKAAVGDKWSDELSRAWEVAYDELAAAIKKA

SEQ ID NO: 21604 - protein, 122 aa, Glycine max
RVENMEGKGFTEEQEALVVKSWNEMKKNSQELGLKFFKKILEIAPAAQQLFSFLKDSTVPLEENPKLKPHAMAVFVMVTKLALLETIKEAVPEMWSPAMKNAWEEAHDQLAEAIKSEMKPSD

SEQ ID NO: 21605 - protein, 510 aa, Medicago truncatula
MATSHFSTQSNPLKVPNLIGGKFIESKSLTFIDVINPATQEVLSQVPLTTNEEFKAAVAAAKKAFPSWRNTPITKRQRVMLKFQELIRRDMDKLALNVTTEQGKTLKDAQGDVFRGLEVVEHACGMATLQMGEYVSNVSHGIDTFSIREPLGVCAGICPFNFPAMIPLWMFPVAVTCGNTFILKPSEKDPGASMLLSQLAMEAGLPEGVLNIVHGAHDTVNAICDHDDIKAISFVGSNVAGMHIYARAAAKGKRVQSNMGAKNHAVVMPDASVDATINALIAAGFGAAGQRCMALSTVVFVGGSKPWESILVERAKALKVNAGTEADADLGPVISIQAKERIHRLIQSGFESGARLLLDGRSIVVPGYESGNFIGPTILADVRSDMECYKEEIFGPVLLLTEADSLEEAISFVNENKYGNGATIFTRSGVAARKFQTEIEAGQVGINVPIPVPLPFFSFTGNKASFAGDLNFYGKAGVNFYTQIKTITQNWKDSDSDDKINMAMPTSQKS

SEQ ID NO: 21606 - protein, 757 aa, Burkholderia mallei ATCC 23344
MREFDYLLVGGGIASVTAARTLRGEDASASIAILCGEPVLPYQRPPLSQEWLMGAVQPASITLHDAAFYAAQRIDIALGVRAEQLDRAKRIVRTSSGATFRYGKLLIATGASAKAPALPGFGLDGVHVLHTFAQAQALKDAAAHARRATVLGGGFLGVEIAATLQALGLQVTLVERAPGVMPSLRAPALGGHFEALCRARGIDVLTRCEVRRVLGAQCVEAVETSDGGTRPCDLFVAAVGVTPNCGWLDGSGLALGDGVEVDAFLQTADPDVFAAGDVAHFDDPIFGVRRRIEHWDNAVRQGRIAARNMLGHRLPYRDVSIFYGSVFGLSYNLLGYPVGATETIERGAFDEASYMQLYLADDVLRAAFTIDRPAVEIAALNDAIRLHVNVAAHKMKLSDPNYPLDKLPVQTILILQGGGALGAFECGAVKALEQHGVRPDVISAVSIGAFNGAIVASHPKGATKALEAFWRELSIALPLPYESQWREAWLSSYVLSFGVPNFLKPQWSQLGFDADRLRAKWTSFFDATAIEQLIARYVDFDSLGMSPTRLLIGAVDVETGEPRIFDSYVDRLSPAHVLASGSLPPGMPWTVVDGRPYWDGGVVSNSPLDLVIARCGQIGGRVFIVDLFSGSKALPTNLVEVMLRREEIAYMDRVRNDLRFEEYASDFRDLVDGILAHVDAPSANEIRQQPLYIRLMGNRAAIDIARITLNREGRLSFIEDYDFSSDAIAQLQQQGYDAALVALANGRSRRRRGRRRA

SEQ ID NO: 21607 - protein, 500 aa, Triticum aestivum
  misc_feature (360)..(360): Xaa can be any naturally occurring amino acid
YLLGGLHSKNCSKKAWCFMCEFERLIVEGKQGKTALSPTGILSHLHEIGSSFGPGKQEDAHEFLRHSIDAMQSVCIKEARKGGAHCLAEETTLVQLIFGGYLRSKIKCTRCHISSEQYERMLDLTVEIDGDISSLEEALQRFTSTEVLDGDNRYQCSRCNSYERAKKKLTISEAPNVLTIALKRYQSGKFGKISKAIRFPETLNLSCYMNSTDDNSPVYSLYGMVVHHDVMNAAFSGHYVCYVKDTHGKWYKIDDSQVKPVSLENVMSKCAYMLLYARCSPRAPNSVRHAMMVNDPSYAKKARHKPYLEQAPLQRGSLNRHQGDEWHRDHMTDNLTRRFDEFGDAPYPAAESPSPSESSXSLFSNSDAGSHSTVSTDSSESTRNSTSTDDYEQYFFGSSDQMYQGGPRGAHEEIGYTSYYRSRSALGTSSSGQEVDEERSVEQRFEVSGSSPLSYTDQSKQHLLTEQYRQFGGSEHDPGEARGSVLLRRSAREKTAQTFY

SEQ ID NO: 21608 - protein, 262 aa, Gibberella zeae PH-1
MDNLTDLKLSVNEETGVATIQFNRPAKRNAFAQKTIDEMVATLAYLDSVDTVRAVVLTGGPEGHFCAGMDLNELVELSTSKAHQIAFLKDLTDALDRFTKPIIAAVVGYALGGGFEISLACDIIYAAEDAMFGLPEVKIGTIPGAGGTQRLARALGKHKAMEFVLTGEPASGAEFERLGVVTKVFPKADVLSSATALAEKIARLSGPVIKTAKQAVLTVENSTLSAGMTHEKALYYSTFGLNDFQEGIQSFLQKRAPTFKHS

SEQ ID NO: 21609 - protein, 112 aa, Bradyrhizobium sp. BTAi1
MKIVMAIIKPFKLEEVRDALTAIGVHGLTVTEVKGYGRQKGHTEIYRGAEYAVSFLPKIKIEVAIPSDQVDKTIDAISSAAKTGQIGDGKIFVISLDHAVRIRTGEADAAAL

SEQ ID NO: 21610 - protein, 534 aa, Chlorobium tepidum TLS
MVIELYDTTLRDGTQGEHINLSVQDKLLIAERLDEFGVDFIEGGWPSSNPKDEEFFLKARKLNLKHARLTAFGSTARSLDNVENDPNLVGLVRCEAPVLTIFGKTWKAHSVKSLGISDDENAELIYRSVKFLVESGREVFFDAEHFFDGWKDNAGFAERMIAAAVDGGASRVVLCDTNGGTLPHEIAAIVTRVREIIGVSVGIHAHNDSDLAVANSIEAVRAGATQVQGTINGIGERCGNANLVSIIPNLMLKLGAEFSHVQDLKSLTSMSKFVYEILNLPPDSKAPFVGKSAFAHKGGIHVSAVMKESSLYEHIDPMLVGNRQRVLVSELAGQSNIRYKAQELGISLPEKGEVFKNLVNHVKKLEHQGYQFDGAEASFELILRRELGQFKPYFEVLESKVVIQNGQEIKAVDQAVMKVMVGDETEQTVADGDGPVNALDKALRKALLHFYPDIRMIRLIDYKVRVLEEKSGTSAKVRVLIESSDGQNSWGTVGVSTNIIEASLQALNDSINYYLFYNQSKAAATAPASEALNS

SEQ ID NO: 21611 - protein, 112 aa, Methanocaldococcus jannaschii
MKKVEAIIRPEKLEIVKKALSDAGYVGMTVSEVKGRGVQGGIVERYRGREYIVDLIPKVKIELVVKEEDVDNVIDIICENARTGNPGDGKIFVIPVERVVRVRTKEEGKEAL

SEQ ID NO: 21612 - protein, 112 aa, Bradyrhizobium sp. BTAi1
MKLVVAIIKPFKLDEVRQALTAIGVHGMTVTEVKGYGRQKGHTEIYRGAEYIVNFLPKLRIEIAVNSDIADKAVEVITTHARTGQIGDGKIFVTPIDHARRIRTGETDSDAL

SEQ ID NO: 21613 - protein, 352 aa, Chlorobium tepidum TLS
MMYKIVSIPGDGIGPEVVAGALDVLNAVAKKHGFEVSVEEHLFGGASYDVHGSMLTDETLEACKNCDAVLLGAVGGYKWENLPHDKKPEAALLKIRKELGLFANLRPARVYDALVASSTLKTEVVQGTDFMVFRELTGGIYFGQPRGYDETRGWNTMVYERYEVERIARLAFEYAQKRGNAKVTSIDKANVLEVSQFWRNIVHEVHQDFPEIELVDMYVDNAAMQVVRNPKQFEVIVTSNLFGDILSDISGMITGSLGMLPSASIGSEHALYEPIHGSAPDIAGQNKANPIATIASVAMMFENSFNRPEVAADIYAAIEGALAAGFRTGDIAAAGEAISSTTEMTAAIVARI

SEQ ID NO: 21614 - protein, 586 aa, Prochlorococcus marinus str. MIT 9312
MALLVKKFGGTSVGDIKKIQNIATSICQSKEAGNEIVVVVSAMGHTTDNLNSIAESISKNPNRRELDMLLSTGEQVTIALLSMALNEYGIPAISMTGSQVGIITESIHGKARILDIQTGRIQNYIDQGFVVVVAGFQGTTLSHTGSMEITTLGRGGSDTSAVALSTALGAETCEIYTDVPGVLTTDPRIVPNAKLLDSISCEEMLELASVGASVLHPRAVEIARNYGIKLCVKSSQSNSSGTLLESQIQPLPLKRGSLELTKTVNSLEVLENQAVFSLSNIPDRPGIAAQIFEKLSEASINVDLIIQATNDGNNNDITFTVSALEAQKTAEQCELITSQLGGEYNLKTNMTKLSIQGAGIMGRPSVSADLFDTLSQANINVRLIATSEIKVSCVIEINNIPKAIRFVAEKFKLSDTQIFVNPIYEKQDQPEVRGIALDKNQVQVSFRKLPDRPGVAASICLALAENNLLFDTIVQSERISSLKAKDISLTMNKQDREKAKLVFEALTKKLPGSYIEDGPAIAKVSTVGAGMAFKVGTAGKIFRALANQNINIEMIATSEIRTSCIVLEKDCDKAVNAIHNHFELEK

SEQ ID NO: 21615 - protein, 333 aa, Mycoplasma penetrans HF-2
MSNKTILVNNIEAVTNALELNMEKDPSIIVYGEDAGFEGGVFRATQGLQAKFGEKRVFDTPIAEAAIMGTAVGAALAGLKPVVEIQFSGFSFPAAQNLFTHAARYRNRSRGRFTCPLVVRMPMGGGVKALEHHSEALEAIFAHVPGVKVVMAATPYDAKGLLTAAINDPDPVVFFEPKRIYRAFKQEIPEGLYEVEIGKANIVIPGNDVTVVSYGANLHDCLAAVNQLKETNPNISVELIDLRTIKPWDRETVINSVKKTGRLMVVHEAVKSFSVSAEIIATVNEKAFYSLKAAPVRLTGWDITVPYALGEHLQMVSPERIAKEIISLASIKE

SEQ ID NO: 21616 - protein, 573 aa, Chlorobium tepidum TLS
MHNNGEKLIGSEIFFECLRRENVEYIFGYPGGALLKVYETLHDVEDIEHILARHEQGATHMAEGYARATGRPGVVLVTSGPGATNTVTGITNAYMDSTPLVVFTGQVPSSLIGNDAFQEADIVGITRPITKHNFLVKDVRELATTIRKAFYLATNGRPGPVLVDMPKDVLNAECTFEWPENVDIRGFKPTIKCHANQVSKAAKMIAKAKRPLFYVGGGVISAEASAELRKLAIDQQIPVTMTLQGLGAFPGDHPLSMGMLGMHGTYWANQAVSNCDLLIAVGARFDDRVTGKVDTFATHAYKIHNDIDPTNVDKNIKVDLPVVGDSKDFLASLIEAMPKSREDRSAWLAEIEKWRKQCPLDYEIEPDSLKTEFVIDEVSRQTKGHAVVVTDVGQHQMWTSQYYKFTEPRSIITSGGLGTMGFGLPSAIGAAFGVTDRPVLLFSGDGGLMMNIQEMVTAVYNKLPIKIFLINNSYLGMVRQWQELFHQEKYTFTDLASSNPDFVKVAEAFGCKAMSASNPEAARAAITEALAYNDGPVLVDFRVIRKDMVFPMVPAGGSISDMLLARLNPKTMV

SEQ ID NO: 21617 - protein, 219 aa, uncultured bacterium
NSRLCMSSAVAGYTRSLGSDGPPCSYEDLDLCTVAFLIGTNTAECHPVLFQRLLKRKKRHPGSVTIVVIDPRQTDTAKAADIHLAVAPGSDLALLHGIAHLVMRENGQDPTFIDNCTDNYDSFFDVVARWTPRRVALFCGIPEKRLREVAQLVHRREKVLSLWSMGVNQRREGTAVVGGIINLHLLTGQIGKEGAGPFSLTGQPNAMGGREAGGLSHLL

SEQ ID NO: 21618 - protein, 247 aa, Medicago truncatula
IIEVSLDRPEAKNAIGKEMLRGLSNVFELINQNSNANVALIRSLVPGVFCAGADLKERRIMDLSEAKFFVNSLRSTLTFLEAIRVPTIAVMEGVALGGGLEMALACDIRICGANALMGLPETGLAIIPGAGGTQRLPRLVGKAVAKDIIFTGRKINGIEALSMGLVNYCVAAGEAHSKALEIARDINQKGPVAVRMAKRAINEGVETDLTSALVLEEDCYDQVLNTKDRLEGLAAFAEKRKPRFTGE

SEQ ID NO: 21619 - protein, 164 aa, Mycoplasma penetrans HF-2
MFKMSDFYKFKVNKINGKEIELSEYKNKVVLVVNVASKCGFVKQYENLENMYQKYKDQGLVILGFPCNQFFFQEPKTNQEILSFCTTKYNVTFDMFEKINVNGKEANPLYTWLKEQMPWTARAKNVKWNFEKFLLDKNGNVKYRFESKKIPEEFEQEVVNLINE

SEQ ID NO: 21620 - protein, 219 aa, uncultured bacterium
NSRLCMSSAVAGYTRSLGSDGPPCSYEDLDHCAVAFLIGTNTAECHPVLFQRLLKRKKRHPGSVTIVVIDPRQTDTAKAADIHLAVAPGSDLALLHGIAHLVMRENGQDPTFIDNCTDNYDSFFDVVARWTPRRVALFCGIPEKRLREVAQLFHRREKVLSLWSMGVNQRREGTAVVGGIINLHLLTGQIGKEGAGPFSLTGQPNAMGGREAGGLSHLL

SEQ ID NO: 21621 - protein, 657 aa, Glycine max
MEDTVSALRSLMVSHSPPLDALVVPSEDYHLSEYVSARDKRREFVSGFTGSAGLALITKKEALLWTDGRYFLQAEKELSAGWKLMRIGEDPAVDIWMADNLPKEASVGVDPWCISIDTAQRWERAFAEKQQKLVPTSKNLVDEVWINRPPAEINAVIVHPVKFAGRSVADKLKDLRKKLVHEQTRGIIFTALDEVAWLYNIRGSDVAYCPVVHAFAIVTSNSAFIYVDKQKVSVEVQTHLVENGIEIQEYTAVSSDATLLATDELDAVSTAKAALAETEARKIPSEIDKSVNGEHQAEENSNDLIWADPVSCCYALYAKLNPDTVLLQQSPLALAKALKNSVELDGLKKAHIRDGAAVVQYLVWLDKKMQDIYGASGYFLEKDSVKKEKHLQSLKLTEVTVSDQLEGFRASKEHFKGLSFPTISSVGSNAAIIHYFPKAETCAELDPDKIYLFDSGAQYLDGTTDITRTVHFGKPSTHEKACYTAVLKGHIALGNARFPNGTNGHSLDILARIPLWKDGLDYRHGTGHGIGSYLNVHEGPHLISFRPQARNVPLQSSMTVTDEPGYYEDGEFGIRLENVLIVKEADTTFNFGDRGYLSFEHITWAPYQTKLIDLNLLSPEEINWLNSYHATCRNILAPYLDEVENAWLKKATEPVGA

SEQ ID NO: 21622 - protein, 419 aa, Desulfitobacterium hafniense DCB-2
MHYVIIGNSAAGVFAAEALRGLDSSGKITMISEENNRPYSRCLTSYYIGEEIDQDRIYIRDANFYAATGIDFIPQKVEQVNDTEKSITLQSGEIVGYDKLLIATGASPYSLPVEGLDLEGVCELRTLEDARRIMDFAPHVKEAVVMGAGLVGLKGAHALHELGIKVSIIVNSRIMSRSVDPHTGQIITELLEQDGYEVIYNTKLSKILGQDKVEGVCLSSGKEIPCQLVLMAAGVSPNVDLVKNTGIEVNKGIIVDKHMQTTVSHIYAAGDVAEAYHAVWDEKRVISIWPVATAQGTVAGSNMAGVERIYEGSVGSNSAVFCGVGVVSAGIPYLPTGEGQELSTYDKATKRYRKFIVKDDILVGMIMVGDIDGAGILTAMIKQKTKVSLDTLNYWLNHPVRFQGYCTAEAKGGIVCGIC

SEQ ID NO: 21623 - protein, 305 aa, Arabidopsis thaliana
MEIDFMVELSKSIRDLKLILYGNSEAEPVAEACAQLTQEFFKADTLRRLLTSLPNLNLEARKDATQVVANLQRQQVNSRLIAADYLESNIDLMDFLVDGFENTDMALHYGTMFRECIRHQIVAKYVLDSEHVKKFFYYIQLPNFDIAADAAATFKELLTRHKSTVAEFLIKNEDWFFADYNSKLLESTNYITRRQAIKLLGDILLDRSNSAVMTKYVSSMDNLRILMNLLRESSKTIQIEAFHVFKLFVANQNKPSDIANILVANRNKLLRLLADIKPDKEDERFDADKAQVVREIANLKLRELA

SEQ ID NO: 21624 - protein, 219 aa, uncultured bacterium
NSRLCMSSAVAGYTQSLGSDGPPCCYDDLDHCKVAFLIGTNTAECHPVLFQRLLKRKKRNPGSLKIVVVDPRRTDTAKAADIHLPIAPGSDLALLHGIAHLILRENGQDPAFIDNHTENYEAFFDVVARWTPRRVARFCNLPEKRLREVAQLFHHRETVLSLWSMGVNQRREGTAVVSGLINLHLLTGQIGKEGAGPFSLTGQPNAMGGREAGGLSHLL

SEQ ID NO: 21625 - protein, 210 aa, Rosa roxburghii
NWGFFELVNHGLPIELLDTVEKMTKGHYKNCLEQRFKELVASKGLEAVNTEVKDMDWESTFHLKHLPHSNISEVPDLEDEYRKVMKEFALKLEKLAEELLDLFCENLGLEKGYLKKVFYGSQGSPTFGTKVSNYPPCPTPDLIKGLRSHTDAGGIILLFQDDKVSGLQLLKDGKWVDVPPMRHSIVINLGDQLEVITNGKYKSVEHRVIA

SEQ ID NO: 21626 - protein, 219 aa, uncultured bacterium
NSRLCMSSAVAGYTRSLGSDGPPCSYEDLDHCIVAFLIGTNTAECHPVLCQRLLKRKKRHPGSVTIVVIDPRQTDTAKAADIHLAVAPGSDLALLHGIAHLVMRENGQDPTFIDNCTDNYDSFFDVVARWTPRRVALFCGIPEKRLREVAQLFHRREKVLSLWSMGVNQRREGTAVVGGIINLHLLTGQIGKEGAGPFSLTGQPNAMGGREAGGLSHLL

SEQ ID NO: 21627 - protein, 292 aa, Silicibacter pomeroyi DSS-3
MSTVADTRLLPGKPVRARILSEVSAYVNQVGRIGKLVSISIGNVPEVAVYVRNQARAASAVGVPFDQQLWDRSISQEVCQSLIREMNDDPDVLGIILQRPVPDHINVRALQAAIHPLKDVEGMNPASIGNIVYNDVAMAPCTAAAAIELIRETGLSMAGLEVVMVGHSEIVGKPVAMMLMAEGATVTVCHHMTRSDAMHSRRADVVVVAVGKAHLIGPDMIKPGAVVIDIGINHVPGPDGPVVVGDVQTDAVKDVAGWITPVPGGVGLVTVAILLRNAIRAHQQQRAAGWIH

SEQ ID NO: 21628 - protein, 326 aa, Bacteroides thetaiotaomicron VPI-5482
MGTVKCIGILTSGGDAPGMNAAIRAVTRAAIYNGLQVKGIYRGYKGLVTGEIKEFKSQNVSNIIQLGGTILKTARCKEFTTPEGRQLAYDNMKREGIDALVIIGGDGSLTGARIFAQEFDVPCIGLPGTIDNDLYGTDTTIGYDTALNTILDAVDKIRDTATSHERLFFVEVMGRDAGFLALNGAIASGAEAAIIPEFSTEVDQLEEFIKNGFRKSKNSSIVLVAESELTGGAMHYAERVKNEYPQYDVRVTILGHLQRGGSPTAHDRILASRLGAAAIDAIMEDQRNVMIGIEHDEIVYVPFSKAIKNDKPVKRDLVNVLKELSI

SEQ ID NO: 21629 - protein, 271 aa, uncultured bacterium
NSRLCMSSAVAGYTQSLGSDGPPCCYDDLDHCNVAFLIGTNTAECHPVLFQRLLKRKKRNPGSLKIVVVDPRRTDTAKAADIHLPIAPGSDLALLHGIAHLILRENGQDPTFIDEHTENYEAFFDVVARWTPRRVARFCNLPEKRLREVAQLFHHRETVLSLWSMGVSQRREGTAVVSGLINLHLLTGQIGKEGAGPFSLTGQPNAMGGREAGGLSHLLPGYRLVANDQHRQVVEQAWNLPAGSIAAKPGLAAWQQIEAMERGELDLWWVA

SEQ ID NO: 21630 - protein, 258 aa, Triticum aestivum
PYAYLGDLQHRGVQKSSLVPVRNSRDIVDPRVRHSTALAPTVMASSATSVAPFQGLKSTAGLPVSRRSNGASLGSVSNGGRIRCMQVWPIEGIKKFETLSYLPPLSTEALLKQVDYLIRSKWVPCLEFSKVGFIFREHNASPGYYDGRYWTMWKLPMFGCTDATQVINEVEEVKKEYPDAYVRIIGFDNMRQVQCVSFIAFKPPGCEESGKALNRLTHHGPQYKPICSFCQLLKLAFGVFPFPQFGPSLTWFPKKILW

SEQ ID NO: 21631 - protein, 283 aa, Bacteroides thetaiotaomicron VPI-5482
MSEEKWAIITGADGGMGTEITRAVAEAGYHIIMACYRPSKAEPIRQRLVNETGNANMEVMAVDLSSMASTASFADRIVERHLPVSLLMNNAGTMETGLHITDDGFERTVSVNYLGPYLLTRKLLPALTCGARIVNMVSCTYAIGHLDFPDFFRQGRKGSFWRIPVYSNTKLALMLFTIELSERLREKGITVNAADPGIVSTDIITMHQWFDPLTDIFFRPFIRTPKKGASTAVGLLLDEAVAGVSGQLYASSHRKQLSEKYLCHVQQKQLWQETEQALERWLK

SEQ ID NO: 21632 - protein, 147 aa, Lactococcus lactis subsp. lactis Il1403
MNGETVSMSDFKGKVVIVVNTASKCGFTPQFEGLEKLYENYKDQGLEILGFPCNQFVNQDAGENSEINEFCQLNYGVTFPMFQKIKVNGKEAHPLYQFLKKEAKGALSGTIKWNFTKFLIDREGNVIERFAPKTEPKEMEEEIQKLL

SEQ ID NO: 21633 - protein, 272 aa, Triticum aestivum
  misc_feature (186)..(186): Xaa can be any naturally occurring amino acid
  misc_feature (198)..(198): Xaa can be any naturally occurring amino acid
NKFVQKSRLVPVRNSRDIVDPRVRELEVDGVVFPPLARPPGSEHAHFLAGAGVRGMEIGGNFIKFTVIGVYLQADAAVSALAAKWAGKPAADLASDAAFFRDVVTGEFEKFTRVTMILPLTGAQYSDKVTENCVAYWKATGVYTDAEAAAVDKFKEAFGPHSFAPGASILFTHSPAGLPHVAFSRXSSVPESGGVAIXHARLCEAVLESIIGEHGVSPGGKLSLATQVAELAEGGRLRGGEPAAEAVSVSVGTNRGHAPRVRPGVVPWVAGV

SEQ ID NO: 21634 - protein, 601 aa, Pseudomonas syringae pv. syringae B728a
MHWVDHSRRGRALRAFYRTHYHCLDKEPRMSKTIADHLAQTLAAAGVSHIWGVSGDSLNGLTDSLERTDSIRWMHTRHEEVAAFAAGAQAASSGKLAVCAGSCGPGNLHLINGLYDCHRNRVPVLAIAAHIPSSEIGLDYFQETHPQELFKECSHFVELVSNPEQFPRVLERAMRAAISQKGVAVIVLPGDVALSDAPDVAAKWIEATAPKVVPAENDLQSMADMLNASKAVTLLCGAGCEGAHEQLLALADTLGAPIVHALRGKQHVEYDNPFDVGMTGLIGFSSGYHAMLSCDTLVILGSSFPYRNFYPEKADIIQIDLDPTQIGRRTPVALGLVGGVRDTLEALQPKLKPHTDRRFLDKALKHYAKAREELDELATPTPDGAPIHPQYLTRLVDEQADADAIFTVDVGTPTLWAARYLHMNGKRSLLGSFNHGSMANALPQALGAKAEHPDRQVIALCGDGGLSMLLGDLLSIRQLNLPIKMVVFNNSSLGFVDMEMKASGYVPHGTDLHETNFAGIALGAGILGLRVENAEELPAALRKAFDHPGPVLIDVVTAKQELGIPPKIKLAQARGFSLYMMRAIMSGRGSEVLELAKTNLR

SEQ ID NO: 21635 - protein, 334 aa, Parvularcula bermudensis HTCC2503
MAEGKITARHPLWSALFLSQNPYTVLGVSRQATADDIRSAYRRLAKQFHPDKNQGNAAAEDRFKAVNAAFDILGDTEKRRRFDRGEIDADGNERVRVNPGAAYGARPRGQSGPFKGSGPSTRQPPPGGFDDISDIFSDIFGRSAQGRARQGSPSRGADIRYRLTVDFLEAARGTTKRVVLQGGQSLDVGIPEGLRDGQTLRLRGKGKPGANGGPAGDVLVEVSVRPHPVYSLKGDDVTMELPITLKEAVMGGKIELPTLRGTVMIRLPANTSSGVSFRLREKGMKNPKTGTIGDLYAKTSIVLPEEPNEALKSFVEAWKEGDDQPREDLFGAAD

SEQ ID NO: 21636 - protein, 355 aa, Moorella thermoacetica ATCC 39073
MLEFEDGDLNQFAAIKVVGVGGGGSNAVNRMIAAGLRGVEFISVNTDAQALRLCQAEQKIQIGAKLTKGLGAGANPEIGKKAAEESREELAQRLQGADMVFVTAGMGGGTGTGAAPVVAQIAKEAGALTVGVVTRPFSFEGRKRAKQAEAGVEELKTKVDTLIIIPNDRLLQVADKQTSILEAFRIADDVLRQGVQGISDLIAVPGLINLDFADVKTIMTDTGSALMGIGRATGEKRAVEAARMAISSPLLETSIEGARGVLLNITGGSNLGLLEVNEAAEIVAAAADPEANIIFGAVIDESLKDEIRVTVIATGFEGKTAEPAADQAAATREAELDVKPFNIDDLDIPAFLRRR

SEQ ID NO: 21637 - protein, 322 aa, Vibrio vulnificus YJ016
MSMIKKIGVLTSGGDAPGMNAAIRGVVRTALGAGLEVYGIYDGYLGLYEGRIKQLDRSSVSDVINRGGTFLGSARFPEFKEVAVREKAIENLKAHGIDALVVIGGDGSYMGAKKLTEMGYPCIGLPGTIDNDIAGTDYTIGYLTALNTVIESIDRLRDTSSSHQRISIVEIMGRHCGDLTLMSAIAGGCEYIITPETGLDKEKLIGNIQDGISKGKKHAIIALTELMMDANELAKEIEAGTGRETRATVLGHIQRGGRPTAFDRVLASRMGNYAVHLLMEGHGGRCVGIVKEQLVHHDIIDAIENMKRPVRNDLFKVAEELF

SEQ ID NO: 21638 - protein, 437 aa, Triticum aestivum
  misc_feature (240)..(240): Xaa can be any naturally occurring amino acid
MDDDDAGGGGDASPQHEGGGGAVVIERGAGATAPARDAAAASPTSSRSVTETVNGSHRFVIQGYSLAKGMGVGKHIASETFAVGGYQWAIYFYPDGKNPEDNSAYVSVFIALASEGTDVRALFELTLQDQSGRGKHKVHSHFDRALDAGPYTLKYRGSMWGYKRFFRRTALETSDFLKDDCLKINCTVGVVTSTMEYSRPHSLEVPDSDIGYHFGTLLDSQEGADVIFSVAGEKFHAHKXVWGARSSFFRSEFLDPESDEENSEVDTSNEIKEIVIDDMEPKVFQAVLHFMYRDNLVGDDELSASSSDCPIFDTLAGKLLAAADKYELPRLRVLCESYLCKQISVKSVATTLALADRHHATELKSVCLKFAAENLSAVIRTDGFDYLKDNCPALQSEILRTVAGCEEECSSGGKSQSVWGQISDGGDTSGRRVRPRV

SEQ ID NO: 21639 - protein, 179 aa, Zea mays
  misc_feature (65)..(65): Xaa can be any naturally occurring amino acid
PRVRDVVGKLHLGMPFAQGAFEQLYRGTYNGMDVAIKLLERPEADPEKAQLLEQQFVQEVMMLAXTRHPNIVKFIGACRKPLVWCIVTEYAKGGSLKNFLSKRQNRSVPLKLAVKQALDVARGMAYVHGLGFIHRDLKSDNLLISGDKSIKIADFGVARIEVKTEGMTPETGTYRWMAP

SEQ ID NO: 21640 - protein, 335 aa, Picrophilus torridus DSM 9790
MVDVALIPGDGIGREIMPGVAAAISSISDINFVTFDISSERYIKTGIIIKDDELEELKNYRAILFGAIGDPRVRPGIMEQGVILRLRRELELYMNIRPVRSFDDKIKITILRENTQDFYTDISGIIPGKRSFNVNGTRIEIDGSSCDEVYYTMGMLSYRYLKKFFNKAFSICDSTVTVTDKANAVKMYNLWRSTAMEAAIEKNINISFEYADALAYNMILNPKKYRYIIAPNLYGDIISDMGAALVGGLGYAPSANIGDKNALFEPVHGSAPDIAGRDMANPAASIMAGSMLLEYLGYRDESRIINDMVRNLYINGVFNSERTSKIIERFMTITK

SEQ ID NO: 21641 - protein, 390 aa, Yarrowia lipolytica CLIB122
MSFLFNRNKQKPPQDVVRSLCDALPKLESPSGDKRKVTEEVSRNLQQMKLILTGDEDEDPQPALVAALASEMHQTELFTQLVTSLRALDFASRKDVVLIFNTLLRRRIGDRSPTVDYLVQHPRIFEILILSYDNHDSALTAGEILRDCNKWEQLSKIIIWSPQLWKFFEYVDHQIFQNATDAFGSLSDIVTVHQQVAGEFLAANKEKFIANINKLMQSSNYVTRRQSLKLMGQLIRQRANYPFMTTYVNEVENLKLIMMLLKDKSKNIVIEAFNIFKLFAANPKKPRPVADVLLKNKTKLIAFLTNLETDKKDDDEKDFVIKAISSLQPIVTPGSSPSPSPQSHSPTHTSGHHHQAHTQPGSGLSMLTPAPSLPPPVVHSEPVLRQNYPE

SEQ ID NO: 21642 - protein, 406 aa, Oryza sativa (japonica cultivar-group)
MPSAIAACFRCAPSAAAAASAASGPAGPSLATSVYETHLGLAALSWTRTSLGLSLRAVLRLSSPATAASVGTCFDEDADEETLAFRVRPWLLWRRRGTRRFRAAGDRRVDLAWDLTRARFPGSGSPEPSSGFFVAVVVDGEMVLAAGDLSDAAYRRTRARRPAGPRPVLLSRREHVAMRDAGRGGRGHRSWVTVRGKEREISVDLVSRGRGRDTGSSGSSSREKDRADVGLSVSIDGERVLHVRRLRWKFRGSERVDLGGGDRVQLSWDLHNWLFPQREPPTTDAAAHAHAHAVFVFRFDLGGGGEEASEHAKALCDKAPRRDAAGILRGYFARWGQKDWSETGSERRKRGRGRRLAKASSSSSASVASSTASWASGSTVMDWASPEEAEMQRGDGFSLLIYAWKS

SEQ ID NO: 21643 - protein, 386 aa, Picrophilus torridus DSM 9790
MGCFGGGYARFFHTGMHSRLGLNSVKKRIRIFDTTLRDGEQSPGVSFNINQKARIAGMLVDLGVDMIETGFAAVSSEESMAIRKIHEMDGNFISLARCNRHDIDSVIDTGIDNIHLFIATSDIHIKYKLKTSRENIMEKIVDSIDYARSHGLNVLFSPEDATRTDMNFLIDVINTAISSGAYEINIPDTIGIMNPISMYNFIHEIKNRTKSCISVHCHNDFGMATANTLAAIMAGADGAQVTVNGIGERAGNAALEEVVLSVHAFTDCSTGINMRMIPKISKYVSMASKMYIQKNKAIVGENAFSHESGIHVHGLINNPETYEPIDPGILGLNRRIVLGKHSGTTSLKYILESHGIKKSDDEISGILVRIKDMNIYDENEILKMVR

SEQ ID NO: 21644 - protein, 350 aa, Chlorobium tepidum TLS
MEERSMQKAGFLKEPIKHIGITKHNVVPMVEEMADMAFQARNLARAAFIVDLMQKDKECAVILTLAGSLISAGLKQVIIDMLEHNMVDVIVSTGANIVDQDFFEALGFKHWKGSQFVDDSELRELAIDRIYDTYIDEDELRVCDDTIAIIANSMQPGAYSSREFIVEMGKYIEEKGLDKNSIVYKAYEKGVPIFCPAFSDCSAGFGLVHHQWHNPDQHVSIDSVKDFRELTKIKIENDKTGIFMIGGGVPKNFTQDIVVAAEVLGYENVSMHTYAVQITVADERDGALSGSTLKEASSWGKVDTVYEQMVFAEATVAMPLIAGYAYHKRNWEGRPARNFNAMLDAKPVNA

SEQ ID NO: 21645 - protein, 531 aa, Anabaena variabilis ATCC 29413
MTTKPERIIIFDTTLRDGEQCPGATLNIDEKLAIAKQLARLGVDIIEAGFAFASPGDFEAVHKIAQTVGTENGPVICSLARARHDDIKAAAEAIKPAAKGRIHTFIATSDIHLQYKLKKTRPEVIAIAEEMVAYAKSFTDDVEFSPEDAGRSDPEFLYQVLERAIAAGATTINIPDTVGYTTPSEFGAIIKGIKENVPNIDQAIISVHGHNDLGLAVANFLEAVKNGARQLECTINGIGERAGNAALEELVMAMHVRRQYFNPFLGRHPDSEEPLTNIDTKQIYKTSRLVSNLTGMLVQPNKAIVGANAFAHESGIHQDGVLKNKLTYEIMDAQLIGLTDNQIVLGKHSGRNAFRTRLKELGFELSETELNKAFVKFKEVADKKKEISDWDLEAIVNDEIQQAPDLFRVELVQVSCGSNARPTATVTLRTPDGEELTDAAIGTGPVDAVYKAINRVVNVPNQLIEFSVQSVTAGIDAIGEVTIRLRYESRVFSGHAANTDIIVASAQAYVNALNRLYASLQTQDKQTEVTA

SEQ ID NO: 21646 - protein, 347 aa, Prosthecochloris aestuarii DSM 271
MTISAMRDLSMTPATENGLRRKPILRKIGVFTSGGDAPGMNAAIRAVTRAAIANKLKVTGIRRGYQGMIEGDFIPLRSSDVSGIIQLGGTILRTARSKEFRTPEGREKAWQQLQNAGIDAVVVIGGDGSFTGALTMSQEYNISFVGIPGTIDNDIYGTDYTIGYETALNSVVCAVDKIRDTAVSHGRIFMVEVMGREAGLLALNSGIACGAEVILIPESKEQHDALKRFLDKGYKRKERSGIVIVAEGDEPGGALKLAENVRCEHPELDVRVSILGHIQRGGSPTANDRINATRMGVAAVDALLDDQKSIMIGIDNGRIVQVPFNKAVKLNHSFDRELLEIQKMLNI

SEQ ID NO: 21647 - protein, 340 aa, Prosthecochloris aestuarii DSM 271
MDSQTLSSVAKAIVAPGKGVLAADESTPTIRKRFDSIQVESTEENRQQYREILFTAQNIERSIGGVILFDETLRQSAKDGTPFPTLLSKRGIVPGIKVDKGAKALALYAGEKITEGLDGLRERLLEYKELGAQFAKWRAVIGIDERDIPSPFGIRANAHALARYAALCQELDIVPIVEPEVLMDGSHDIERCEVVTSQVLEAVFAELDAHHVLFEGMLLKPNMVIAGMQCSRQAGVEEVAEATMRCMTRYVPAAVPGIVFLSGGQSAEKATAHLNAMNATGPYPWEVSFSYGRALQAPVLAAWKGEENNAFAAQHALSKRCRLNGLARDGAYAQEMEQEA

SEQ ID NO: 21648 - protein, 163 aa, Chlamydomonas sp. W80
MASPFYALAATDIAGKEFPFAQLQGKVVLVVNVASQCGFTPQYKGLQELYDKYKDEGLVIIGFPCDQFGHQEPGQESEIASFCQKNFGVTFPMMAKIEVNGDNTHPVYQFLKSEKKQLFMERIKWNFEKFLINKQGEVVERFSSAGDPMRNIAPAVAKLLAEA

SEQ ID NO: 21649 - protein, 571 aa, Neurospora crassa
MSGLDVEALLDSTASSKEQQMDVDPPTTNGGADQNGSKSERRDRDSDRDKERERDRDRGRDSSRDRGRRYRDRSSGRLRNSSSEAGRDTPRSDAGSHRSRRRSRSRDSGRHSRRHRDGDYYRGRRGRSRSRSPNRYYRPRGDDRRDRGDSYRRRDDDRRSGRNTPRARDGTPQPLTEDERDRRTVFVQQLAARLRTRELKEFFEKVGPVAEAQIVKDRVSNRSKGVGYVEFKNEDSVQAALQLTGQKLLGIPVIVQLTEAEKNRQVRTTETSGHHPNSIPFHRLYVGNIHFSITEQDLQNVFEPFGELEFVQLQKDDNGRSRGYGFVQFRDAGQAREALEKMNGFDLAGRPIRVGLGNDKFTPESTANLLQRFQGQNHHQQFQGSAFSGAGGRGPATSNFDRAGARDNEKGTGASALDDTDVAGVNFNNYSRDALMRKLARTDEPPASVIPERQILKPKTETKPLPVNVNMASRCVVLHNMFDPAEEEGENWIKELEDDVREEAEAKYGHVVHISLDPNSAGDIYLKFDKVQGGENAIKGLNGRYFGGRMITAAPVVDAVYSSLFSRSKAI

SEQ ID NO: 21650 - protein, 327 aa, Bradyrhizobium sp. BTAi1
MRHGGGRFRPAGHPSIFGRGIPVTIVEQGGGTAQVPDLIKDTTTQSFVKDVIEESKRQPVLIDFWAPWCGPCKQLTPILEKAVKAAKGKVKLVKMNIDEHPAIPGQMGIQSIPAVIAFVGGRPADGFMGAVPESQVSAFIEKLTKGVPGVGEPDIGEILKEAEAVLAEGDPTGAAQIYAEILSFDAANIAALAGLAKCYVETGAIEQARETLAQVPEAKRGDSAVSAVQAAIDLAEQAQSLGPIGELEQKVAANPLDHQARFDLATALNAAGKRKEATDQLLEIVKRDRKWNEDGARKQLVQFFEAWGGADEATIEGRKRLSTILFS

SEQ ID NO: 21651 - protein, 271 aa, uncultured bacterium
NSRLCMSSAVAGYARSLGSDGPPCCYDDLDHCSVAFLIGTNTAECHPVLFQRLLKRKKRNPGSLKIVVVDPRRTDTAKAADIHLPIAPGSNLALLHGIAHLILRENGQDPAFIDNHTENYEAFFDVVARWTPRRVARFCNLPEKRLREVAQLFHHRETVLSLWSMGVNQRREGTAVVSGLINLHLLTGQIGKEGAGPFSLTGQPNAMGGREAGGLSHLLPGYRLVTNDQHRQDVEQAWKFPAGSIAATPGLAAWQQIEAMERCEIDLWWVA

SEQ ID NO: 21652 - protein, 293 aa, Ralstonia eutropha JMP134
MSILINKDTKVITQGITGKTGQFHTRGCRDYANGKNCFVAGVNPKKAGEDFEGIPIYASVKDAKAQTGATVSVIYVPPAGAAAAIWEAVDADLDLVVCITEGIPVRDMMEVKDRMRRENKKTLLLGPNCPGLITPDEIKIGIMPGHIHRKGRIGVVSRSGTLTYEAVGQLTALGLGQSSAVGIGGDPINGLKHIDVMKMFNDDPETDAVVMIGEIGGPDEANAAYWIKDNMKKPVVGFIAGVTAPPGKRMGHAGALISGGADTAQAKLEIMEACGITVTKNPSEMARLLKAKL

SEQ ID NO: 21653 - protein, 277 aa, Brassica napus
  misc_feature (264)..(264): Xaa can be any naturally occurring amino acid
MSPAKKKSRSFPPISECKRGEYDSIAADLDGTMLLSRSSFPYFMLVAIEAGSLFRGLILLLSLPIVIIAYLFVSEALGIQILIYISFAGIKIRDIELVSRAVLPRFYAADVRKDSFEVFDKCKRKVVVTANPIVMVEPFVKDYLGGDKVLGTEIEVNPKTMKATGFVKKPGVLVGDLKRLAILKEFGDESPDLGLGDRTSDHDFMSICKEGYMVHETKSATTVPIERLKNRIIFHDGRLVQRPTPLNALIIYLWLPFGFMLSIXRVYFNLPLPERFV

SEQ ID NO: 21654 - protein, 172 aa, Narcissus pseudonarcissus
QAEFGFAAHWRYKEGDSQHSSFVLQMVEWARWVVTWQCETMNADRPMSFGDADLLRRSCPFPSHYNECPYSSTPWCDHSGPIYIILLENEKMSVQELAPNSTVMDLLERVGRGSPRWSHYNFPLKEELRPRLNHEPVNDPKQKLSMGDVVQLTPSIPDESLTGVSGGNPTGC

SEQ ID NO: 21655 - protein, 271 aa, uncultured bacterium
NSRLCMSSAVAGYTRSLGSDGPPCSYEDLDHCTVAFLIGTNTAECHPVLFQRLLKRKKKHPGSVTIVVVDPRQTDTAKAADTHLAVAPGSDLALLHGIAHLVMRENGQDPTFIDDCTDNYDSFFDVVARWTPRRVALFCGIPEKRLREVAQLFHRREKVLSLWSMGVNQRREGTAVVGGIINLHLLTGQIGKEGAGPFSLTGQPNAMGGREAGGLSHLLPGYRQVTNPAHRAEVEQTWGFPQGKIAPEPGLTAWQQVEAMERGELDLWWVA

SEQ ID NO: 21656 - protein, 264 aa, Burkholderia vietnamiensis G4
MDTNCASAAPILLHDVRDGVVTLRLNRPQQFNALSEELLASLQAVFDSIAADPQARCVVLAAEGRAFCAGHDLRQMRGKPELDYYRALFAQCSRVMLAMRALPVPVIARVQGIATAAGCQLVAACDLAIAADTARFAVSGINVGLFCSTPAVALSRNVGAKRAFDMLVTGRFVDAATAAAWGLVNEAVPEDALDAAVARKVAEIVAKSPAAVRYGKQMFYRQRELPLDDAYAYAGDVMARNMMEEDAGEGIDAFLEKREPIWRS

SEQ ID NO: 21657 - protein, 271 aa, uncultured bacterium
NSRLCMSSAVAGYTQSLGSDGPPCCYDDLDHCKVAFLIGTNTAECHPVLFQRLLKRKKRNPGSLKIVVVDPRRTDTAKAADIHLPIAPGSDLALLHGIAHLILRENGQDPTFIDEHTENYEAFFDVVARWTPRRVARFCNLPEKRLREVAQLFHHRETVLSLWSMGVNQRREGTAVVSGLINLHLLTGQIGKEGAGPFSLTGQPNAMGGREAGGLSHLLPGYRLVANDQHRQVVEQAWNLPAGSIAAKPGLAAWQQIEAMERGELDLWWVA

SEQ ID NO: 21658 - protein, 448 aa, Streptococcus pneumoniae TIGR4
MTSAKEYIQSVFETVKARNGHEAEFLQAVEEFFNTLEPVFEKHPEYIEENILARITEPERVVSFRVPWVDRDGKIQVNRGYRVQFNSAVGPYKGGLRFHPTVNQGILKFLGFEQIFKNVLTGLPIGGGKGGSDFDPKGKTDAEVMRFCQSFMTELQKHIGPSLDVPAGDIGVGGREIGYLYGQYKRLNQFDAGVLTGKPLGFGGSLIRPEATGYGLVYYTEEMLKANGNSFAGKKVVISGSGNVAQYALQKATELGATVISVSDSNGYVIDENGIDFDLLVDVKEKRRARLTEYAAEKATATYHEGTVWTYAGNYDIALPCATQNEINGEAAKRLVAQGVICVSEGANMPSDLDAIKVYKENGIFYGPAKAANAGGVAVSALEMSQNSLRLSWTREEVDGRLKDIMTNIFNTAKTTSETYGLDKDYLAGANIAAFENVANAMIAQGIV

SEQ ID NO: 21659 - protein, 348 aa, Shewanella oneidensis MR-1
MLACRGIWLIKGSTLTSPSPAFGVLLVNLGTPDEPTPKAVKRFLKQFLSDPRVVDLSPWLWQPILQGIILNTRPKKVAKLYQSVWTEQGSPLMVISQCQAQKLATDLSATFNQTIPVELGMSYGNPSIESGFAKLKAQGAERIVVLPLYPQYSCSTVASVFDAVAHYLTRVRDIPELRFNKQYFAHEAYIAALAHSVKRHWKTHGQAEKLILSFHGIPLRYATEGDPYPEQCRTTAKLLAQALGLTDGQWQVCFQSRFGKEEWLTPYADELLADLPRQGVKSVDVICPAFATDCLETLEEISIGAKETFLHAGGEAYHFIPCLNDDELHIELLRLLVQEQTQSWISAE

SEQ ID NO: 21660 - protein, 459 aa, Rhodopseudomonas palustris CGA009
MSIQVADSSLVARLSPPKPSALAHVPGDEGWPIIGRTLAVLADPKGEVEKMARTYGPVYRSRVLGETSITLLGPEANELVLFDNTKLFSSTHGWGPILGRLFPRGLMMLDFDEHRLHRRTLSVAFKAGPMQSYLAELNAGIAHRVAEWRARPGEMLCYPAMKQLTLDLAATSFLGTAIGAETEEVNRAFIDMVAASVAPIRKPWPGTAMARGVKGRQRIVAYFAEQIPIRRAKGGDDLFSQLCRATHDDGALLSNQAIIDHMSFLMMAAHDTLTSSLTSFVAALAAHPEWQQKLREEIAGLGLKPGEPISFEQLDALPLTEMAFKEAMRLRPPVPSLPRRATRAFSFKGYTIPAGTMVAVNPLFTHHMPEIWPNPDQFDPLRFTDEASRGRHRFAWIPYGGGAHMCLGLNFAYMQAKCFAVHLLQHLDLSLPPNYQASWQMWPIPKPKDGLRVNVAPLN

SEQ ID NO: 21661 - protein, 296 aa, Silicibacter pomeroyi DSS-3
MSIFIDRETPVIVQGITGKMARFHTADMIAYGTNVVGGVVPGKGGQTVEGVPVFDTVEEAVERTGAEASLVFVPPPFAADSIMEAADAGIRYCVCITDGIPAQDMIRVKRYMYRYPRERRMVLTGPNCAGTISPGKALLGIMPGHIYLPGPVGIIGRSGTLGYEAAAQLKEHGIGVSTSVGIGGDPINGSSFKDILHRFEQDDETHVICMIGEIGGPQEAEAAAYIRDHVSKPVIAYVAGLTAPKGRTMGHAGAIISAFGESASEKVEILTAAGVTVAPNPAVIGDTIARVMREAA

SEQ ID NO: 21662 - protein, 271 aa, uncultured bacterium
NSRLCMSSAVAGYTQSLGSDGPPCCYDDLDHCKVAFLIGTNTAECHPVLFQRLLKRKKRNPGSLKIVVVDPRRTDTAKAADIHLPIAPGSDLALLHGIAHLILRENGQDPAFIDDHTENYEAFFDVVARWTPRRVARFCNLPEKRLREVAQPFHHRETVLSLWSMGVNQRREGTAVVSGLINLHLLTGQIGKEGAGPFSLTGQPNAMGGREAGGLSHLLPGYRLVANEQHRQVVEQAWNLPAGSIAAKPGLAAWQQIEAMERGELDLWWVA

SEQ ID NO: 21663 - protein, 465 aa, Corynebacterium efficiens YS-314
MNASPTVTDQLVQTRKFKGLRARHIHFIALGSAIGTGLFYGSAGAIQAAGPSVLLVYLLGGAVVYFMLRALGEMSVRHPVRGSFAVYTRAHLGGWAGYITGWMFAFEMLIVCLADLTAIGIYMKFWFPDTAQWVWVAATLLIVGGANLASVRWFGELEFVFTLIKVTAVIAMIVGGAAILAFGLGNSPEVSGISNLWEHGGFFPNGIEGMIAAFILVLFAFGGTEIIGVAGSEAEDPEKSIPKAVNTVPARILLFYVGAILVILALNPWQTITGEESPFVQIFSTLGVNWAAGLLNLVVITAALSAINADLFGAGRVLTGLAKENLAPKIMGRVAGNGVPIMTTVIMIIVLILGVVLNVILPERVFEIVASLATFATVYVWLMILLAQVASRRQMSAQEVAGLKFPVPFYPFGQYFAILFIAFTFGIMVWYDNYHLALGVGVGFLVVMTILYYATGRPKAIAPAQ

SEQ ID NO: 21664 - protein, 879 aa, Silicibacter pomeroyi DSS-3
MPAAAETAPSADATVYAAEVHARLRLAWLRVLRRRAPVVARAIEGGAEFWDAAAYAEHLQAATIWFHLQQIMDENLAIREARQAERSGAARDVPGSFARALADADPDARREMRRLLAEAKLSVGPTITAHPTEAKRVSVMEIHRRIYRHLVQFESRRWSPQEETRLEQRLEMEIDLLWLTGELRMERPSLAAEIDWGLQFYRTSLIAAVPRLYERYRSAVEAEFGPGFPGTACLKFHSWIGGDRDGNPNVTAQVTRLALERSRDMMRGVYVTALDEIVQRLSLSDRLVPVPPAERAALERIVTRRADDPAACAQRNPNELFRQAAAAIAQSVEGSRYAHVADFIADLETLDRGLQAIDAGLLADLLVRPLIWQVNVFGFRAHTLDIRQNSEVVTRALHDLWQVTGEAPEPLSPAWSARLRAELGKPDLPYVNRARLGPEAAELMALLELMREIRTGADPQAIGPFILSMTRSADDLLAVYLLARYAGFGAERLPLKVVPLFETIEDLRAAPAILRDVLEVPVAARSLRDGSGQIEIMLGYSDSNKDGGFLCSTWSLDRAQRAITRALARSGLKPVFFHGRGGSVSRGGAPTERAIAAQPRGTLNGTLRLTEQGEVVTAKYANTGTAAAQLELLASSVLRHSAQPAFEAVDPEAEDVMETLSSLSQTRYQTLLQHPAFLDYFNQASPVNELALLRIGSRPARRFGAQSLADLRAIPWVFAWSQNRHMISSWYGFGSAVEDFCTVRGERGRAQLRRLFERVPLFRLIVDEVEKSLVLARLDIAEGYAALVSDRAGAEAIFARIGAEHGCSRQAIEMLTGQGNGVRFPNFLGRVARNDATLRAAHAAQIGLLGALRADPGQDRRIRLMQTMNCISAGLGWTG

SEQ ID NO: 21665 - protein, 271 aa, uncultured bacterium
NSRLCMSSAVAGYTQSLGSDGPPCCYDDLDHCKVAFLIGTNTAECHPVLFQRLLKRKKRNPGSVAIVVVDPRRTDTAKAADIHLPIAPGSDLALLHGIAHLVLRENGQDPTFIDDHTENYEAFFDVVARWTPRRVARFCNLPEKRLREVAQLFHRRENVLSLWSMGVNQRQEGTAVVCGLINLHLLTGQIGKEGAGPFSLTGQPNAMGGREAGGLSHLLPGYRLVANDQHRQDVEQAWKFPAGSIAATPGLAAWQQIEAMERGEIDLWWVA

SEQ ID NO: 21666 - protein, 589 aa, Pseudomonas aeruginosa PAO1
MCGISGEFRFDNQAADLAAVERITHHLAPRGPDAWGFHAQGPIALGHRRLKIMDLAEASGQPMIDPDLGLAMVFNGAIYNYPELRGELESLGYRFFSGGDTEVLLKGYHAWGADLLPRLNGMFAFAVWERDRQRLFLARDRLGIKPLYYSLDRSRLRFASSLPALLKGGDIASDLDPQALNFYLNFHAVVPAPHTLLEGVKKLPPATWMSVDLDGSCEQRTWWTLDYGPRPDERELTLDDWQERVLDGLREAVAIRQRAAREVGVLLSGGVDSSLLVGLLHEAGVDNLLTFSIGFEDAGGERGDEFQYSDLIAERYHTRHHRLRIGEHEVIEQLPAAFRAMSEPMVSHDCIAFYLLAREVSKHCKVVQSGQGADELFAGYHWYPKVDGADDAFAAYRAAFFDRDHEEYLATVGERFRVEDVAGRFVRDHFASPGAEAAVDKALRLDSTIMLVDDPVKRVDNMTMAWGLEARVPFLDYRLAELSARIPARFKLGDGGKQVLKGAARKVIPSEVIDRPKGYFPVPGLKHLQGRTREWVRELLLDPSQDRGLFQPAIFDRLLSDPDGDLTPLRGSKLWQLAALNLWLSEQGL

SEQ ID NO: 21667 - protein, 401 aa, Staphylococcus aureus subsp. aureus Mu50
MVTRSVLKFGGSSVSDFTKIKRIAEMLKERVNQDEQLIVVVSAMGNTTDQLMTNVSTLTKAPKQQELALLLTTGEQQTVSYLSMVLNDIGVNAKAMTGYQAGIKTIGHHLKSKIAQINPQTFEQAFQENDILVVAGFQGINEHQELTTLGRGGSDTTAVALAVSNQIPCEIYTDVDGVYATDPRLLPKAKRLDIVSYEEMMEMSALGAGVLETRSVELAKNYNIPLYLGKTLSNVKGTWIMSNEEILEKKAVTGVALDKHMMHVTISYPLPDNQLLTQLFTELEEGAVNVDMISQIVNLDGLQLSFTIKDSDFHQISMILETLKNQYEALAYKINEHYVKISLIGSGMRDMSGVASKAFLTLIENNIPFYQTTTSEISISYVIDDFNGQQAVEKLYDAFNI

SEQ ID NO: 21668 - protein, 368 aa, Triticum aestivum
MALASPVDYAGIITSSQRQLSSVMPRCNGLQCTIGYGNKSRATGHLVVRAMSMDRPKLDFSNPNWKNQFQEDFDRRFSLPHLTDIIDVESRPTTFSLKSRTPLENVDGSLEESWNGYVNDDDRALLKVIKFASPTSAGAECIDPDCSWVEQWVHRAGPRKQIYFEPQCVKAGIVTCGGLCPGLNDVIRQIVLTLEKYGVKNIVGIQHGFRGFFEDHLAEVPLNRHVVQNINLAGGGASISDIVDSIQARRLDMLFVLGGNGTHAGADAIHGECRKRKLKVSIIGVPKTIDNDILLMDKTFGFDTAVEAAQRAINSAYIEAHSAFHGIGLVKLMGRSSGFITMHASLSSGQVDICLIPEVPFTLDGPNG

SEQ ID NO: 21669 - protein, 120 aa, Borrelia burgdorferi
MEEALMKDYNMIDSHTRRFDSTTNPTILKVIGAGGGGSNAVNRMIEYGVRDVEFIVANTDLQALQTSIAPIKIALGAKVTAGLGAGGKPEIGQAAAEEDIDVIRNHLSGADMVFITAGMA

SEQ ID NO: 21670 - protein, 112 aa, Ralstonia metallidurans CH34
MKQITAIIKPFKLDEVREAMADVGVTGLTVTEVKGFGRQKGHTELYRGAEYVVDFLPKIKIEVVVAENQLDTVLDAIVKAAHTGKIGDGKIFVTEIERVIRIRTGEQDEAAV

SEQ ID NO: 21671 - protein, 406 aa, Bradyrhizobium japonicum USDA 110
MTGGPVIIVGAGHGGYQVAASLRQAGFSDRVCLINDEAHLPYQRPPLSKAYIKGSAGPESLMFRPEKFYADQKIELIAGRAVSIDRAGRRLHLASGEMLDYGHLVLATGARNRLLDLPNANLPDVKYLRILDDSEALRKIMPSRTRVVVIGAGFIGLEFAATARIKGLEVDVLELAPRVMARAVTSEVSAYFQARHREAGIRIHLGVQATSIEAEDGRVTGVSLSDGRHLPADLVVVGVGVLPNIELAAEAGLPVAAGIIVDEYLSTADPDISAIGDCALFASPRFGGSLRLESVQNATDHARCLAARLTGDRKPYDSHPWFWSDQGDDKLQIAGLTTGYDRVVLRGDPAKKAFSAFCYRGDKLVGIESINRAGDHMFGRRLQGMDRSITPEQAADESFDLKSALA

SEQ ID NO: 21672 - protein, 731 aa, Debaryomyces hansenii CBS767
MWPFLDRIMYDHSTEEEYYKKMQQKSSSSSAITVGLVAAVGGFLYGYDTGLINDIMEMTYVKDNFPANGHSFSVHERALITAILSLGTFFGALIAPLISDTWGRKFSIIVSSALIFNVGNILQVSSTEVVLLCVGRAVSGLSVGILSAIVPLYQAEASPKWVRGSIVYTYQWAITWGLLIASAICQGAKNIMNSGSYRIPVGIQFLWAIILSVGMLFLPESPRFHVQKDNIQEALKCLARLRKVPTDDPDLIEELVEIKANYDYELSFGKASYIDCFKSGGGRNKQLTRMLTGIGVQAFQQSSGINFIFYYGVNFFASSGIKNYYLMSFVTYAVNTLFTIPGIILIEVIGRRKLLLFGGIGMAVSNFIIAIVGVSMSDESISSIICVSFSCVFIAFFASSWGGAVWALSSDIFGIGIRQKAISLTAATNWLVNFTFAFITPYLIDTGKHTAALGNKIFFIWGGCNALGVVFVYFMVYETKGLKLEEIDFMYKNCVNARASTKFKSQKIVYANQISTPISELLNPNRSHIAIEKSSGSNNNGDDDENSEENHHDFGLENGNVLHNNLDNRNITLIPYKNIISPLRSFSSDSSSDSDSSSPLNDYERYLHSLQKEGSHHDTSQTSTSLITDNKLSHLNSMHNAHSRGNFTEEDLKYLNDEYDLAMSQKYPGTTTAPLKPSTNMTVIAAPFFDAPPSDSDTDDESDDDEVGDEDSETEPETTKGSPVDTKDSSS

SEQ ID NO: 21673 - protein, 317 aa, Ralstonia metallidurans CH34
MSAKHAKVLILGSGPAGYTAAVYAARANLNPVLITGLAQGGQLMTTTDVENWPADPNGVQGPDLMQRFLAHAERFNTEIIFDHIHTAKLTEKPIRLIGDSGEYTCDALIIATGASAQYLGLPSEEAFMGRGVSACATCDGFFYKNQEVAVIGGGNTAVEEALYLSHIASKVTLIHRRDKFRAEPILVDRLMQRVEEGRIDLRYDSTLDEVLGDESGVTGLRIRDTKDAAKTEDLKLAGVFVAIGHKPNTDLFEGQLEMKNGYIVTKSGLSGDATATNIPGVFAAGDVQDHVYRQAITSAGTGCMAALDAQRYVEALK

SEQ ID NO: 21674 - protein, 158 aa, Triticum aestivum
MQFLRGVGGGGGGGATLGSTAREAFRRHFSRKRAVDIRRINPKVPKEEAVAISGRLLQILADHGPLTVGSTWNHAKDAAIDGLNSKTHMKILLKWMWGRRIIKLSCTQAGNTKKFLYSPFTAEDTEAAEEPAEEQPKRKGWKGKHPKYQTKKQPATAA

SEQ ID NO: 21675 - protein, 428 aa, Yarrowia lipolytica CLIB122
MFFKTLASVRPAAQRVATSVASNKVLFARGYAAFDRSKPHVNIGTIGHVDHGKTTLTAAITKVLAEKGGAKFLDYNSIDRAPEERARGITISTSHVEYETANRHYAHVDCPGHADYIKNMITGAAQMDGAIIVVAAGDGSKPQTREHLLLARQVGVQNLVVFVNKVDQIEDKEILELVDMEMRDLLTQYGFDGDNTPVIMGSALCALEGKQKDIGEDAIVSLMEAVDEHIPTPNRDLEKPFLMPVEEIYSISGRGTVVTGRVERGNLKKGEEIELVGYNKKPVKAVVTGIEMFKKDLDSAMAGDNAGILLRGIKRDEIKRGMVISKPGTVSAHTKFLASLYVIPTEEGGRATSFGSNYRPQMYIRTSSVTAILTFPEGTDESQTVNPGDNTEMVFELVHPTPVEVNQRFNIREGGKTVGTGLVTRVIQ

SEQ ID NO: 21676 - protein, 240 aa, Oryza sativa
PLSAALPPLRRRSPSPHHRRRRRSPSPPRPSRKPAVEAMSSSSSSFPTSRSPFPAGAGAGTSGGGGGGGGGSGGGGGGGRWSGVRPWGSSGGTSVSSSGKRIQKELMDLNASDCSAGPKGDNLYHWLSTIIGPQGSPYEGGIFFLDIVFPIDYPFKPPMVTFKTRIYHCNVDSTGNLSMDILREGWSPALTISKVLLAIKAIITNPDPYCPLVPSIGHLYLTDRTKHDEIAAEWTMRFAR

SEQ ID NO: 21677 - protein, 115 aa, Triticum aestivum
MARVALVAVFAVLAALAVADMASGAVTCGDVTSAVAPCMSYASGKASAPSGACCSGVRTLNAKASTPADRKAACNCLKNLAGSGISMGNAASIPGKCGVSVSIPISTKTNCNNLH

SEQ ID NO: 21678 - protein, 309 aa, Streptococcus pyogenes MGAS8232
MILTVTLNPAIDVSYPLDELKCDTVNRVVDVTKTPGGKGLNVCRVLNDFGETVKATGCIGGESGDFIINHLPDSILSRFYKISGDTRTCIAILHEGNQTEILEKGPLLSVEEIDGFTHHFKYLLNDVDVVTLSGSLPAGMPDDYYQKLIGIANLNGKKTVLDCSGNALEAVLKGDSKPTVIKPNLEELSQLLGKEMTKDFEALKEVLQDELFEGIEWIIVSLGADGVFAKHNDTFYNVDIPKIEIVSAVGSGDSTVAGIASGLANDEDDRALLTKANVLGMLNAQEKTTGHVNMANYDKLYQSIKVKEV

SEQ ID NO: 21679 - protein, 868 aa, Xylella fastidiosa 9a5c
MSASPTAERWIVLKFGGTSVSRRHRWDTIAMVVRKRLEEHGTRVLIVVSALSGVTNELTAIAQGVVDSAQRVAALEQRHRDFLAELGLDAQAVLGTRFTVLWDLLQDARAVTRSLDWQAELLGQGELLSSTLGAAYLGASGVDIGWMDARDWLTALPPQPNQSEWSQRLSVSCQWKSDVEWRTRFDAQRAQVLITQGFISRHQDGGTAILGRGGSDTSAAYFGALLGAACVEIWTDVPGMFSANPKEVPDARLLTRLDYYEAQEIATTGAKVLHPRSIKPCRDTGVPMLILDTERPDVLGTRIDAEVEPVLGVKAISRRDGIVLVSMEGIGMWQQVGFLADVFTLFKKHGLSVDLIGSAETNVTVSLDPSENLVNTDVLTALSTDLSQVCKVKIIVPCAAITLVGRGMRSLLHKLSEVWATFGKERVHMISQSSNDLNLTFVIDETDADGLLAVLHFKLIESGAMPVQERAVFGSPWREIIGHVRTRVMPWWHSARMRLLAMRDEEGIGPCYVYHLPTVRERARQLNAVAAVDQRYYAIKANPHPAILRTLIEEGFGLECVSLGELRHVFAVVPHLVPSRVLFTPSFASRVEYEQAFLLGVNVTLDNVEALRLWPEVFRDRTLWLRIDLGYGDGHHEKVTTGGKTSKFGLSVTRIDEFIDVAKTLNIIVTGLHAHLGSGVERGDHWSRMYDELAGFASRIGSVSTLDIGGGLPIPYRPDDEPFDVEAWGVSLAEVKALHPKLQLVIEPGRFLVAEAGVLLTRVTQVIEKDGIRRVGLEAGMHTLIRPALYDAWHDVENLSRLDEIPHVLCDVVGPICESSDVFGRCRHLPAATASGDLMLIADAGAYGFSMASTYNLRGLPAEVVLDA

SEQ ID NO: 21680 - protein, 344 aa, Caulobacter crescentus CB15
MGGGSREDLCHGARTRRGGEAVKSPGGRAPLRVSRPEARDGQRRRTPMAQAKLIDGKAFAADLRAKIAEEVAALKAEHGVTPGLAVVLVGEDPASQVYVRNKGEQTTAAGMYSETHRLPETTTQDELLAVVAKLNADPKIHGVLVQFPVPPHISQMDVVAALSPDKDVDGLTVTNAGRLASGLPALAPCTPTGCMMLIRDAIGDLKGKTAVVIGRSNLMGKPMAQMLLAADCTVTIAHSRSQDLPSIVRQADIVVAAVGRAEMVKADWVKPGAVVIDVGITRFPARDPEAAAAGKTRLVGDVAFDEVREVAGAITPVPGGVGPMTIACLLANTLTAAKRLSGIA

SEQ ID NO: 21681 - protein, 305 aa, Desulfovibrio vulgaris subsp. vulgaris str. Hildenborough
MSHAFDLIILGGGVAGMTSAIYAARANLRVLILDENACGGLVNWTKVVENMPSYTSIGGMELAQRMQEQVNNLGVTVEEAVCIDSMDLTGPEKRVEADGEVYTAKAVIVATGRKPVPLEAAGECEQVHFCAICDGAPYIGKRVLVVGGGNSGFDESLALLDQGIAELTLVERMDRFFAAQKAQDLLAARPNATLMRSTEVVSVDYDETLRSVTLRDVATGEVFTREFDGIFVFMGQKPGTEVFRGQFDMDAQGYIVTDENMATSLSGVYAAGDVRQKKYRQLTTAMADGTMAALEAERFIHSAPA

SEQ ID NO: 21682 - protein, 847 aa, Escherichia coli O157:H7 EDL933
  misc_feature (399)..(399): Xaa can be any naturally occurring amino acid
  misc_feature (721)..(721): Xaa can be any naturally occurring amino acid
MSKVRLAIIGNGMVGHRFIEDLLDKSDAANFDITVFCEEPRIAYDRVHLSSYFSHHTAEELSLVREGFYEKHGIKVLVGERAITINRQEKVIHSSAGRTVFYDKLIMATGSYPWIPPIKGSDTQDCFVYRTIEDLNAIESCARRSKRGAVVGGGLLGLEAAGALKNLGIETHVIEFAPMLMAEQLDQMGGEQLRRKIESMGVRVHTSKNTLEIVQEGVEARKTMRFADGSELEVDFIVFSTGIRPRDKLATQCGLDVAPRGGIVINDSCQTSDPDIYAIGECASWNNRVFGLVAPGYKMAQVAVDHILGSENAFEGADLSAKLKLLGVDVGGIGDAHGRTPGARSYVYLDESKEIYKRLIVSEDNKTLLGAVLVGDTSDYGNLLQLVLNAIELPENPDXLILPAHSGSGKPSIGVDKLPDSAQICSCFDVTKGDLIAAINKGCHTVAALKAETKAGTGCGGCIPLVTQVLNAELAKQGIEVNNNLCEHFAYSRQELFHLIRVEGIKTFEELLAKHGKGYGCEVCKPTVGSLLASCWNEYILKPEHTPLQDSNDNFLANIQKDGTYSVIPRSPGGEITPEGLMAVGRIAREFNLYTKITGSQRLAMFGAQKDDLPEIWRQLIEAGFETGHAYAKALRMAKTCVGSTWCRYGVGDSVGLGVELENRYKGIRTPHKMKFGVSGCTRECSEAQGKDVGIIATEKGWNLYVCGNGGMKPRHADLLXADIDRETLIKYLDRFMMFYIRTADKLTRTAPWLENLEGGIDYLKAVIIDDKLGLNAHLEEEMARLREAVVCEWTETVNTPSAQTRFKHFINSDKRDPNVQMVPEREQHRPATPYERIPVTLVEDNA

SEQ ID NO: 21683 - protein, 468 aa, Medicago truncatula
MEENTSSWLRRAKYSQTVCHRLDTSRLNNIPIREQSEQNSRPSSNVKNNLLANKQRSLSPLPETFLNDVFREARHEQKRFSTPGPRRDKRIMGKVSNKDTRESPKVSSTKFLSSSPNGQKMFKDISKDGSWGKYFENGGGGGGKVTALETAEEWTIDMSKLFLGHKFAHGAHSRLYHGVYKEESVAVKIIRVPDDDENGELASKLENQFVREVTLLSRLHHRNVIKFIAASRNPPVYCIITEYLSEGSLRAYLHKLEHKAIPLQKLIAFALDISRGMAYIHSQGVIHRDLKPENVLIDEDFRLKLADFGIACEEAVCDLLADDPGTYRWMAPEMIKRKSYGRKVDVYSFGLILWEMLTGTIPYEDMNPIQAAFAVVNKKLRPVIPSNCPPAMRALIEQCWSLQPDKRPDFWQIVKVLEQFESSLARDGTLTLVQNPRCPDQKKGLLHWIQKLGPVHQNNGPKLKPKFT

SEQ ID NO: 21684 - protein, 547 aa, Thermosynechococcus elongatus BP-1
MPVFDSIESALEALRRGEVIVVVDDENRENEGDLIGAAERVTPAMINFMAVHARGLICLAMEGDRLDELDLPLMVTTNTDSNQTAFTVSVDAGARWGVTTGISAEDRARTIQALIDPSTQPQDLRRPGHVFPLRSRPGGVLKRAGHTEAAVDLTRLAGLYPAGVICEIQNPDGTMSRLPQLMEYARTHQLKIISIADLISYRLQHERFVRREAVAKLPTEFGEFQIYGYRNSLDQSEHVAIVKGDPATFGEQPVLVRVHSECLTGDALGSLRCDCRMQLQAALKMINAAGRGVVVYLRQEGRGIGLVNKLRAYSLQDLGMDTVEANEHLGFPADLRNYGVGAQILNDLGVKQIRLITNNPRKIAGLKGYGLEVVDRVPLLIEATPYNTPYLTTKAEKLGHLLLQTYLITVAFRWQGSQLAAGDRYERLEKLRHLAAGVHLLVREEARPVAQAIFGHPDLIVHFGFDQPHVADRQWYKQPEHPYVLAVQTLLRQFCQWPTLKGFEFLVATGTDPMLNLPMDLDRQAYTQQSPSEWRPHLIYSWSAAAG

SEQ ID NO: 21685 - protein, 283 aa, Nocardia farcinica IFM 10152
MDTVSLTGKELAAALNADTKQRAEALTAGGVAARLALIVANDDPASAWYVNSLRKAAERLGIACERIDLGADATADGIRAELRERSADPAFDAIMLQTPLPASVALDDVSSAIAADKDVDGVSPLSLGLLAAGLAGFVPATAQAVVELLKHHEIALSGRHVAVVGRSNVVGKPLAQLLLAENATVTVCHSRTTDLAAITSTADVVVAAVGRAGLVTGDHVRAGAVVVDVGTNEAEDGGIVGDVDAESVRGKAAGLSPVPGGVGPVTTALLMRHVVEAAERHRG

SEQ ID NO: 21686 - protein, 514 aa, Clostridium acetobutylicum ATCC 824
MKRKKLKLLTILMIFTVIILIVLLSLYIQNNSTIKSTTTKKQNYREVYHFTVPNKWKNDPQRPVFFDGEYHYYYLYNKDYPNGNGTEWRQATSKDLVTWKDEGVCIPKYTNENGDIWSGSFVVDAQNTAGFGKGAIVAIVTQPSASMDKQEQFLWYSTDRGRTFKPYSNQPIIPNPCTKDFRDPKIIWDFKNNKWVMVLAEGTKIGFYESYNLKNWQHTGDFFTNNIGIVECPDIFMMQSNDGNYKWILGTSANGKVSGEPNTYAYWVGNYDGKKFIADISTPKWLDYGFDWYAAVTFESENQSKNLKKRYALAWMNNWDYANNTPTIQNRFNGMDSIVREITLSKQKDNTYSLLSKPIKRIENITTSIDQFKQISVKGLKHLKVQGKAYQLDTDINWVDAKNVGIRLRESLDKKRHIDVGIFTEGKYSYVNRAYTGNPDKSKKYVESRAPFDINNKKVHLRIFVDKVSVEVFIDDGKITYSNEVFPRPEDKGITLFSIKGKAVFKNITIKHID

SEQ ID NO: 21687 - protein, 713 aa, Mycoplasma penetrans HF-2
MRINNMTTTNIKKRFLFLTGLLKQNNFSADQIKLVKKAFEFANLKHGSQIRKSGEPYMIHPLETAIYLAEWKMDVSTIITGLLHDVLEDTDCTREDMEKRFGKTILEMVETVTKVSKVSQETRSKETYDKENSEYIIRVIMSVSSNLRSVIVKIADRMHNMETINHLKKEKQIRIASETFNIYANIAGRLGLYHQKTRLLDLSFQVLEPEKYESIKNMIDTSLKNCRESLNNVSQQIKDILTSKGIDFTVVERIKGIYSTYKKIEKGIDIKNIHDLFALRIITNREDIECYRILGLIHINFTFLPQTFKDYISSPKLNLYQSLHTTITFRKVLLEIQIRNSAMDKTANFGVAAHWLYKQNEEDIKEVTSELMFDILNNSDKEISKKIKNIQLTKIYDVLLLNNNKWYVVNEGSTVLDLACRYKPEKIFYLKTVFKEGVPVDLNYNPIKDDVLSFEYNDGHEVLAHHSWEEYVTFEDAKKIFRSLATDNDEPNKLVRELKNALKDKLESAKEIKRRLAFLNFNTLESYLEFYKNFSNKEIVYGFLSKTRKWKKYYLELSKGISKYELLLYNIKDKNIFNCKKAIFTECCTKLPGMDIIGVLNKGVLFIHRFDCERVSDKSKKFILEWDLDKATELTRSYPATLIININSKIFKINPIIHFITSKGFEIDSFDSSLKEDNKVLTFKLQVNKINNLNLLITELTYKFEQISSVKFK

SEQ ID NO: 21688 - protein, 529 aa, Rhodobacter sphaeroides 2.4.1
MTDTTKTASEQDRVLIFDTTLRDGEQSPGATMTHDEKLEIAALLDEMGVDIIEAGFPIASEGDFEAVSAIARQSKNATICGLARANYKDIDRCWEAVRHAKSPRIHTFIGTSPLHRAIPNLDMDQMAERIHDTVSHARNLCDNVQWSPMDATRTEHDYLCRVVEIAIKAGATTINIPDTVGYTAPRESADLIRMLVERVPGADTIVFATHCHNDLGMATANALAAVEAGARQIECTINGLGERAGNTALEEVVMALKVRNDIMPFRTGIDTTKIMNISRKVATVSGFPVQFNKAVVGKNAFAHESGIHQDGMLKNAQTFEIMRPADVGLADTSLVMGKHSGRAALRAKLKDLGYDLADNQLNDVFVRFKALADRKKEVYDDDIVALIQDQVTSAEHDTLQLKRLRVVCGTDGPQEAEMTLSVEGVDHAIDATGDGPVDAAFNAVKMIYPHHAKLHLYQVHAVTEGTDAQATVSVRLEEDGKIATGQAADTDTVVASVKAYVNALNRLIHRRQKSAPGADMKDVHYSSHA

SEQ ID NO: 21689 - protein, 969 aa, Prochlorococcus marinus str. MIT 9312
MKSTVNSDLFINRHLGLSDVDEQKMLSKIGFNNIDQFINQVIPEDIQLNDKSSEILPQGCSEIEALNELEEIANKNTKMRSLIGLGYYDNHMPKVIQKHVLENPRWYTSYTPYQAEIAQGRLEALFNFQTIVCELTGFPIANASLLDEGTAAAEAMAMSFAARKNKSSKLYLVESNVFDHTFNVLQTRAKPLGISLKRFNQSNLPNHDDVFGILLQLPGKNGELFDPTFLISQAHRSEIIVTGCIDPLAQVLIKPISEFGVDVAVGSMQRFGVPLGFGGPHAAFFACSEKYKRLIPGRIVGQTLSKNGEKSLRLALQTREQHIRREKATSNICTAQSLLAIISSFYAIYHGPTGLTQIAKRLVQLRINLESCLADLGFDIPDGIRFDSVDVYSEHSQKIHNEALNNGYNLRILPLGSTIENSTGFGISLDEMSNEKEIEDILTFIANVIEKKEDLDNIKFDQGFQLESLALRSTEWMQQDIFTTYQSETELMRYIFRLAEKDFSLVDGMMPLGSCTMKLNSAAELNPVSWANLSSIHPFSPPNQTKGYSKIISDLEKWISDIVGLKSVSFQPNAGSQGEFAGLLAINSYFVSKGELSRKKCLIPKSAHGTNPASAVMAGFDVLTVECDEEGNIDFQDLSIKVTKFDTQIGALMLTYPSTHGVFELQIRKICDLIHSIGGFVYLDGANLNAQVGLCKPGNYGVDICHLNLHKTFCIPHGGGGPGVGPVAASETLSPFLPTHSLKDNNLSNSSNYVSSAKHGSASILPISWMYIKMAGLCGLRKATSHAILSANYIAHTLKHKFKILYKGKNNFVAHECILDFRDLKSKTGLSVNDLAKRLIDYSFHAPTISWPVPETIMIEPTESESLAELDRFCEAMLLIGEEISEIENNIELNNNNVISNAPHTLKELIADTWNYPYSKEKASFPYGTQTAIKFWSAVSRINNAYGDRNLICSCNVNQEETLDEKKCA

SEQ ID NO: 21690 - protein, 225 aa, Lotus japonicus
MAPVKGPLTPIQVENLQFPASITSPATAKSYFLGGAGERGLTIEGKFIKFTGLGVYLEDKTVDSLATKWKGKSSQELLDSLDFYRDIISSPSEKLIRGSKLRPLSGVEYSRKVMENCVAHMKSTGTYGEAEAAAIGKFAEAFRNLDFPPGSSVFYRQSPDGELGLSFSPDDTLPEKEAVVIENKALSEAVLETMIGEHAVSPDLKRCLAERLPAVLNQGLLLSGN

SEQ ID NO: 21691 - protein, 462 aa, Listeria monocytogenes
MFKTNVEQNNVPVFGSFESGQDLPEKRMNKESVDPRIAYQLVKDQLIDEGSARQNLATFCQTYMEPEAEQIMAETMEKNAIDKSEYPQTAKLESSCVNMLADLWNVDESEHYMGTSTVGSSEACMLGGMAMKFRWRSAALKNGLDIHAKKPNLVISSGYQVCWEKFCVYWDIELREVPMSEEHLSINTDIIMDYVDEYTIGIVGILGITYTGKFDDIMTLNDLVEDYNNTHDNEVVIHVDGASGAMFTPFVEPGLEWDFRLPNVVSINTSGHKYGLVYPGVGWILWRDKEYLPEELVFDVSYLGGHMPTMAINFSRSASQIIGQYYNFLRFGYEGYRQIHMRTRDGALQLSQAVAETGLFEIYNDGANLPIVCYKLKDDANVAWTLYDLADRLQMKGWQVPAYPLPKEMGNTIIQRYVCRGDLGQNMVTAFKNDLSESIEELNNAHILYHDVNTSKTHGFTH

SEQ ID NO: 21692 - protein, 423 aa, Shewanella oneidensis MR-1
MDAISTSALLIFLLVLILFSAYFSGSETAMMTLNRYRLRHLASNGHKGAIRALKLLERPDRLIGLILIGNNLVNILAASIATIIGMRLWGDLGVAIASGVLTLVVLVFGEVTPKTIAALNPERIAFPSSYLLIALSKIFAYVVTSVNFITTGILRLVGIKSISSSDALSKEELRTVVHEAGALIPQRHQEMLLSILDLEKVTVEDIMVPRSDIYAINVNDDFKFINRQVIQSPHTRVLVYRDTIDDAVGFIHLRDALRLQSKEQFSKSSLLRAVKELYFIPEGTPLNVQLANFQHNKERIGLVVDEYGDIQGLVTLEDILEEIVGDFTTSMLATPSEDINVQQDGSYLVNASITIRDLNKEMKWDFPTDGPKTLNGLILEYLEDIPSENTSLRLAGYPLEVIEVADNMVKTVRIIPQHYQSPH

SEQ ID NO: 21693 - protein, 314 aa, Rhodobacter sphaeroides 2.4.1
MIPILTLTLNPAIDLAADVPQVLPGIKLRCTEPRVDPGGGGLNVSRAIRILGGRSTAFVALGGNIGGRLAALVAAAGIEIVAFSGPGETRESLTVTETATGRQFRFMLPGAAWDAERVEAALARIDRAVPEGGMVVLSGSLPPGVPADFPAMVSRVLGKRARLLVDTSGAPLAHLAAGGVPDLDILRMDDGEAASLAGRPLACASETADFASSLVARGVAECVIVARGADGSVLADARGRWHARSEPVEVVSAVGAGDTFVGAFVLALSRGAPPEEALAHGVAGAAAAVLTEATELCHPEDVARLLPSAAATAL

SEQ ID NO: 21694 - protein, 440 aa, Pyrococcus horikoshii OT3
MKIVVIGSGTAGSNFALFMRKLDRKAEIIVIGKEPTMQYSPCALPHVISGTIEKPEDVIVFPNEFYEKQRIKMMLGVEAKKIDRERKVIITDKGEVPYDKLVLATGSRAFIPPIKGVENEGVFTLKSLDDVRRIKEYISKRKPKKVVVIGAGLIGLEGAEAFAKIGMDVLVVELLEHLLPTMLDKDMAKIVQEEMEKHGVKFKFGVGVSEIIGNPVKEVKIGEESVEADLVLVATGVRANVDLAKDAGLEVSRGIVVNEYLQTSDPDIYAIGDCAEVFDAVTGKRTLSQLGTSAVRMAKVAAENIAGKKVKFRPVFNTAITELFDLEIGTFGITEERAKKEGIEVVIGKFKGSTKPEYYPGGKPITVKLIFRKEDKRLIGAQIVGGERVWGRIMTLSALAQKGATVEDVAYLETSYAPPISPTIDPITVAAEMAMRKFKS

SEQ ID NO: 21695 - protein, 313 aa, Silicibacter pomeroyi DSS-3
MAETRHTKVLIIGSGPAGYTAGVYASRAMLEPILVQGIEPGGQLTTTTEVENWPGDTEVQGPDLMVRMEAHAKAMGCEIIGDIITSLDTSARPFVAKGDSGTTYTADAVILATGARAKWLGMESEEKFKGFGVSACATCDGFFYRGQEIVVIGGGNTAVEEALFLTNFASKVTLIHRRDELRAEKILQDRLFKNEKIVPLWFNQLEEVYGTDAPLGVEGVKVRNVKTGEITDIPCKGVFVAIGHAPANELVKDVLELHNGGYVSVKPGTTETSIPGIFAAGDLTDHKYRQAVTSAGMGCMAALDAERFLAEQE

SEQ ID NO: 21696 - protein, 178 aa, Oryza sativa (japonica cultivar-group)
MKQRIQERVRKKGRAQFNKSKTGSIVAFKVSFRDFNPLNSFIWFELFGEPTDRDVDLLGGVIQAWYVMGRLGAYNSSNLQLANSMLDYDPSYDSDQASGVMPSSFHDISDVEFQDNWGRVWVDLGTSDYLGLDVLLNCLTQLSSEHLGIKQVVFGGKKMGDWEEGMKNSDYGYRHFKI

SEQ ID NO: 21697 - protein, 464 aa, Listeria monocytogenes
MLYSKENKESYLEPVFGSSAEDRDIPKYTLGKEPLEPRIAYRLVKDELLDEGSARQNLATFCQTYMEDEATKLMSETLEKNAIDKSEYPRTPELENRCVNIIADLWHAPKDQKFMGTSTIGSSDACMLGGMAMKFAWRKRAEKLGLDIYAKKPNLVISSGYQVCWEKFCVYWDIDMRVVPMDKEHMQLNTDQVLDYVDEYTIGVVGILGITYTGRYDDIYALNEKLEEYNSKTDYKVYIHVDAASGGFFTPFVEPDIIWDFRLKNVISINTSGHKYGLVYPGIGWVLWKDESYLPEELIFKVSYLGGEMPTMQINFSRSASHIIGQYYNFLRYGFEGYRTIHQKTSDVAQYLAHAVEQTGYFDIFNDGSHLPIVCYKLKTTANVNWTLYDLADRLQMRGWQVPAYPLPKSLENIIIQRYVCRADLGFNMAEEFIQDFQASIQELNNAHILFHDTQQSGVHGFTH

SEQ ID NO: 21698 - protein, 318 aa, Wolbachia endosymbiont of Onchocerca gutturosa
LCNKKIQLGINLTKGLGAGALPDIGKGAAEESIEEIMEHIKDSHMLFITAGMGGGTGTGAAPVIAKAAREAGAAVKDKMLKEKKILTVGVVTKPFDFEGVRRMRIAELGLEELQKYVDTLIVIPNQNLFRIANEKTTFADAFKLADNVLHIGIKGVTDLMVMPGLINLDFADIGTVMTEMGKAMIGTGEAEGEDRAVTAAEAAISNPLLDNMSMKGAQGILINITGGEDMTLFEVDAAVNRVREEIDENANIIFGATFDQAMEGKVRVSVLATGIDNSSNICDDRAETSSVSQTKISKEEKFKWSYSQSSVPEVKPAE

SEQ ID NO: 21699 - protein, 547 aa, Lactococcus lactis subsp. lactis Il1403
MTEKILIVGGVAGGMSAATRLRRLNENAEIIVFEKGPYVSFANCGLPYYVGGEIAEREKLIVQSAKALKNRFNLEVRENSEVIAIDSEGKKVTVVSNGESYVESYDKLILSPGAKPLIPQIKGLNQATNVFSLRNIPDVDKIMTYLKAKAPKSATIIGAGFIGLEMAENLAKRGLSVTIVEKAPHVLPTIDREMAAFVNEELIKNNLSVMTNRGAVEFKNDEILLDNGESLQSDLTILSVGIQPETSLAKSAGIKLGLRNAILVDEHYETSVKDIYAVGDAIVVKNQLGQDALISLASPANRQGRQVADIISGLPIKNRGSLGTAIVRVFDLQVASTGLSEFQLRGLKINHKIVHVTANNHAGYYPDVTSIVLKLIFEPESGQIFGAQAIGKEGVDKRIDILSTAIKAKLTVFDLPELELTYAPPFDSAKDPVNMAGYAAINLLLGQSENIQWHELAAELAKGKVLLDVRNPNELAKGKFKNSQNIPLDDLRERLNELDKKNEYIVSCQSGLRSYNAERILKQEGYKVKNLDGAFGLYSKVTKELLD

SEQ ID NO: 21700 - protein, 284 aa, Pseudomonas syringae pv. tomato str. DC3000
MTAKLIDGKAIAASLRQQIAKRVAERSQQGLRTPGLAVILVGSDPASQVYVSHKRKDCEEVGFISQAYDLPAETTQVALTNLIDRLNEDAAVDGILLQLPLPAHLDASLLLERIRPDKDVDGFHPYNVGRLAQRIPLLRPCTPKGIIALLESTGVDLYGLDAVVVGASNIVGRPMAMELLLAGCTVTVTHRFTKDLAGHVSRADLVVVAAGKPGLVKGEWIKPGAIVIDVGINRQDDGKLVGDVVYETALPRAGWITPVPGGVGPMTRACLLENTLYAAETLHD

SEQ ID NO: 21701 - protein, 429 aa, Streptomyces coelicolor A3(2)
MSTAPILYSPDGPEDLVLDPVEQAVADIAAGRPVVVVDDENRENEGDLVIAAEKATEEIVAFMMTECRGLICAPMEGEELDRLRLPQMVDDNTESMKTAFTVSVDAGAAHGVTTGISAADRATTLRLLAGGTAEPGDLVRPGHVFPLRARPGGVLVRNGHTEAAVDLARLAGLRPAGAIVEIAGEDGRMLRLPELIPFARKHGLTIISIEDLIAYRRSAEPTVRREAEVRLPTKHGEFTAYGYRSTVDGVEHIALVHGEIGDGEDVLVRVHSECLTGDVFGSQRCDCGPQLDASLDRIQAEGRGVVVYLRGHEGRGIGLMSKLRAYELQERGRDTLDANLELGLPADARDYGAGAQILADLGVRAVRLLTNNPDKSDALERHGITVTGREPMPVQAGEHNLRYLRTKRDRMGHDLPWLDTTPVSTCGNQ

SEQ ID NO: 21702 - protein, 494 aa, Brassica oleracea var. acephala
MKGLQNIYHHSYTFSFLLVFLVLILFHPALSIYVNTLSSSESLTISSNRTLVSHGGVFELGFFKPLGRSRWYLGIWYKKVSQKTYAWVANRDSPLSNSIGTLKISGNNLVLLGQSNNTVWSTNLTRENVRSPVIAELLPNGNFVMRYSSNKDSSGFLWQSFDFPTDTLLPDMKLGYDLKTGRNRILTSWRSSDDPSSGNTTYKIDTQRGLPEFILNQGRYEMQRSGPWNGMEFSGIPEVQGLNYMVYNYTENSEEISYTFHMTNQSIYSRLTVSDYTLNRLTWIPPSRAWSMFWTLPTDVCDPLYLCGSYSYCDLITSPNCNCIRGFVPKNPQQWDLRDGTQGCVRTTQMSCSGDGFLRLNNMNLPDTKTATVDRIIDVKKCEERCLSDCNCTSFAIADVRNGGLGCVFWTGELVEIRKFAVGGQDLYVRLNAADLDFSSDEKRHRTGKIIGWSIGVSVMLILSVLVLCFWKRRQKQAKAYVVGMKNFVEMEKV

SEQ ID NO: 21703 - protein, 486 aa, Symbiobacterium thermophilum IAM 14863
MALVPLLFEKSTPGKRAVTFPAPDVPTVELSEAIPADLIRQTPAALPELSEVEVVRHFTQLSRLNHGVDVDFYPLGSCTMKYNPKVNEEAARIPGFALTHPLQPEETVQGNLQLLHTLEGWLCEVTGMDRMTFQPAAGAHGELTGILLIRAYHESRGDTERNEVIVPDSAHGTNPATAAMAGYRVVPVKSRPDGSIDVDALRQIVGPKTAALMMTNPSTLGLFDPHVREITEIVHQAGGLCYYDGANLNAIMGYARPGDMGFDVVHLNLHKTFSTPHGGGGPGSGPVGVKSHLVPFLPVPVVEKQGDRYALDWDRPQSIGKIHGFWGNFGVIVRAYAYVLAHGPALKEVSEHAVLNANYVLARLKPYYEPYVDRYCMHECVLSARTLKQETGVRTLDVAKRLLDEGVHPPTIYFPLIVEEALMIEPTETEDKATLDRFIEAMIRIHDEARSNPEYVKSAPHKTPVGRLDEALAARRPNLRYRANPS

SEQ ID NO: 21704 - protein, 504 aa, Triticum aestivum
  misc_feature (204)..(204): Xaa can be any naturally occurring amino acid
  misc_feature (219)..(219): Xaa can be any naturally occurring amino acid
MSTCAASLAPLLGTAAANATDYLCNQFADTTTAIDSTYLLFSAYLVFAMQLGFAMLCAGSVRAKNTMNIMLTNVLDAAAGALFYYLFGFAFAFGTPSNGFIGKHFFGLRDVPQVGFDYSFFLFQWAFAIAAAGITSGSIAERTQFVAYLIYSAFLTGFVYPVVSHWIWSADGWASASRTSGPLLFNSGVIDFAGSGVVHMVGGXGRALGRAHRGPPHWXRFDHAGRAVALRGHSASLVVLGTFLLWFGWYGFNPGSFLTILKSYGPPGSIHGQWSAVGRAAVTTTLAGSTAALTTLFGKRLQTGHWNVLDVCNGLLGGFAAVTAGCSVVDPWAAIICGFVSAWVLIGLNKLAARFKFDDPLEAAQLHGGCGAWGVIFTALFARREYVEQIYGAPGRPYGLFMGGGGRLLGAHVVLILVIAAWVSCTMGPLFLALNKLGLLRISAEDQMAGMDQTRHGGFAYAYTDEDSSSRPGRGAGGSVGGFMLKSAQTSQVAADATSPSSSV

SEQ ID NO: 21705 - protein, 458 aa, Symbiobacterium thermophilum IAM 14863
MRYVPITQADKAAMLREIGVSSTEELFAANIPAEVRLNRPLNLPPALTEMELLAHLRELAAQNAHTGEYACFLGGGAYDHYVPAAVDAVIRRGEFLTAYTPYQPEISQGVLQAIYEYQSLMCELTGMDLSNASMYDGASALAEAAGMVVNQTGRSKLLVARSVSPLYRRVVQTYMHGIGVELIEVPLDGVTLDLNRLEALMTEEVGGLLLQTPNYLGYLEKVREIEALVHAKNGLFVVAVDPISLGLLEAPGSYGADIVVAEGQGLGVPLSYGGPYLGVLATRDRFARRMPGRIAGATVDNRGQRGFVLTMQAREQHIRREKATSNICTNQALIALAATVYLALVGKEGLREVANLSLQKAHYAAQQIARLPGWRLAGDAPFFKEFTVLAPAAAAEVSRRLVDRKILGGLDVGADYPELLGGAAGSAGGPAAALSFAVTEKRTRAEIDRLVAALGEVK

SEQ ID NO: 21706 - protein, 191 aa, Synechococcus sp. CC9605
MTGTPKSSPLGTAQQWVLVLIAVVLAIGLVILRGGIQSESPMEQLARRSLDPQTALTNGRPTLIEFYADWCQVCREMAPSMLDLEKRSRDRLDVVLVNVDNPRWQDLVDRYDVNGIPQLNLFNAEGEAKGRSIGLRSVEELQLLTTALIEDQPLPALPGVGNISRLETPFSANNALAGASSPANAGPRSHG

SEQ ID NO: 21707 - protein, 414 aa, Erythrobacter sp. NAP1
MNATGSTSADVVIVGTGHGGAQAAIALRQQGHESSILMIGRDAEPPYERPPLSKEYLAGDKSFERMMIRPEKFWADKGVQLRLGCAVIEIDWMRHEVTLSDGSKVGYRKLIWAGGGDPRRIDVPGAGLKGIFCVRDKRDADAMMGALEAGAKRAVVIGGGYIGLEAAAVLRKLGCEVTLLEVQDRVLARVAGEELSRFYEEEHRRQGVDVRLSQGISEILGEDGKVTSVQLDNGEMLACDMVVVGIGIVPAVAPLIAAGAAGANGVDVDVYCRTTLDDIYAIGDCAAHVNPFAESAVIRLESVQNANDMANTVARAIMGDKQPYHALPWFWSNQYDLKLQTAGLSLGYDATVVRGDPAERKFSVVYLKEGRPIAFDCVNAMKDYVQGRKLLERGIEKVDPALLADTEIQLKELI

SEQ ID NO: 21708 - protein, 508 aa, Burkholderia vietnamiensis G4
MNAAVPQTTLALPTAKLLIDGAFVESRSAEWGDIVNPATQQTIGRVPYATPHEVDAAIAAAQRAFQTWKTTSIGTRLRIMLKFQELVRRNLERIAHTLTAEQGKTLPDAQGDIFRGLEVVEHACSIGTLQLGEFAENVAGGVDTYTLRQPIGVCAGITPFNFPAMIPLWMFPMAIVCGNTFVLKPSEQDPLSTMELVELAIEAGVPKGVLNVVHGGKDVVDRLCTHPDIKAISFVGSTRVGTHVYNLGSQHGKRVQSMMGAKNHAVVLPDAHREQTINALVGAGFGAAGQRCMATSVVVLVGSARDWLPELVEKAKTLKVNAGSEAGTDVGPVVSRSAKARILSLIDAGVKEGAKLELDGRDVTVRGYEQGNFVGPTLFSGVTTDMTIYREEIFGPVVVVMEVDTLDEAIALVNANPMGNGVGLFTQSGAAARKFQSEIDVGQVGINIPIPVPVPYFSFTGSRGSKLGDLGPYGKQVVQFYTQTKTVTARWFDDDATAGGVNTTIALR

SEQ ID NO: 21709 - protein, 596 aa, Campylobacter jejuni subsp. jejuni NCTC 11168
MSIYKQRVLELRRLMKENNIDAYLILSADPHLSEYLPEYYKNRVFISGFKGSVGTVLITQEEGFLWVDGRYWLQAQKELEGSGILLQKQDAKNTFTKWLEKNLSEDQILGIDFALLPLSLQKDLKINCKANLKHIDLISPLWKDRPTLPQEKIYEHELEYCSYSRKEKLALVRQKMKNLNATSHLISSLDDIAWLTNLRGNDVNYNPVFLSHLLILEDKALLFVDQKKVNSELEKKLNLDGFWLKNYDEIIMELEELANTNLLIEPSKMTALLINSLDKSVKIIQEINPSTHLKAAKNTKEIAHIQDAMIEDGVALCKFFAWLEEAIKNKELISELDIDVKASEFRAQSKYYISDSFATIAGFNENAAYPHYKATKESFAYLKKDGLLLIDSGGQYKNGTTDITRVVPIGKANAEQIHDYTLVLKAHIAISSAIFPKDITMPLLDAITRAPLWKEQIDYIHGTGHGVGYFLNVHEGPQVLSYLSPVLEKTKAKEGMLTSIEPGIYKVGKWGIRLENLVIHTKVENPKNKDFGEFLYFKPVTLCPFEISCIDTKMLDEKEKEWLNNYHKEVFEKLSPKLGDYPKALVWLEKRTKAIF

SEQ ID NO: 21710 - protein, 320 aa, Parvularcula bermudensis HTCC2503
MADRLHTKLLIIGSGPAGYTAAIYAARAMLEPVIVHGLQPGGQLTITTDVENYPGFADPIQGPWLMEQMQKQAENVGTKMVSDIITEVDTASRPFSFKGDSGTIYTADAVIVATGAQAKWLGLPSEKKFQGFGVSACATCDGFFYRGRTVGVVGGGNTAVEEALFLTNFADKVYLIHRRDSLRCEAILRQRALDHPKIELLWNRQVDEVLGSDNPLGVEGVRLASTVGEDSMELAIHGLFIAIGHAPATQIFEGHLEMKPNGYIVTAPDSTATSVPGVYAAGDVTDETYRQAVTAAGMGCMAALEAEKFLAGMAIAEAAE

SEQ ID NO: 21711 - protein, 320 aa, Pseudomonas aeruginosa
MTRHNVLVTGATGFIGAALVNSLCSSGQYKVWAGCRRRGGAWPRGVTPLLLGELGSSVVWDAESAIDTVVHCAARVHVMSETASDPLVEFRKANVQGTLDLAREAVSRGVRRFIFISSIKVNGEGTEPGRPYTADSPPNPVDPYGVSKREAEQALLDLAEETGLEVVIIRPVLVYGPGVKANVQTMMRWLKRGVPLPLGAIHNRRSLVSLDNLVDLIITCIEHPAAVGQVFLVSDGEDLSTTELLRRMGRALGAPARLLPVPASWIGAAAKVLNRQAFARRLCGSLQVDIMKTRQVLGWTPPVGVDQALEKTARSFLDRQ

SEQ ID NO: 21712 - protein, 564 aa, Pseudomonas aeruginosa PAO1
MTETAKRPLYVPHAGPSLLEMPLLNKGSAFSTQERIDFNLQGLLPHNIETIEEQTERAYSQYNLCNTDLDRHIFLRSIQDNNETLFFRLLEEHLEEMMPIIYTPTVGQACQEFSKIYRTHRGLFISYPDRERIDDILRSATKNNVKIVVVTDSERILGLGDQGIGGMGIPIGKLSLYTACGGISPAYTLPVVLDVGTNNPDLLNDPMYMGWRHERVSGAQYEEFVDLFIQAIKRRWPNVLLQFEDFAQTNAMPLLERYKDELCCFNDDIQGTAAVAVGTLLAACKAKGEKLSEQTVTFVGAGSAGCGIAEQIIAAMQLEGLDEAQARRRIFMVDRWGLLTDDMSNLLDFQHRLAQKRADLGAWGGQQGDDLALLEVIRNARPTVLIGVSGQRGLFSEEVIRELHSHCKQPLVMPLSNPTSRVEATPQEILNWTDGQALVATGSPFQPVQVGDKRIPIAQCNNAYIFPGIGLGVIAARANRVTEGMLMAAANALANCSPIVTQGEGAVLPALGDIREVSKRIAVAVAKQAQAEGKALHTSDEVLNDAIEANFWFPRYRAYRRTSF

SEQ ID NO: 21713 - protein, 556 aa, Zea mays
  misc_feature (448)..(448): Xaa can be any naturally occurring amino acid
MVFPAILPKVAARWLFTFYRAARKLRRHAFQLYYRNTAAKPSSAVSQQQAGAAATVTAAAAFKTGAAIPDAGGRTVVCDMHGALLRSTALFPYFMLVACEGGSLVRAMLLLCAFPLVWALGERRGAGVRVMAFVTFAGLRPRDVDLVARAVLPKHYMEQLSALAYGSLWLPARRKVAVTSAPRVMSEWFLKEYMAADAVVGLELQHVNVGRRRYFTGLLLSSGHATGTELRQKAITEALLGAEDDPIAVVGIISDSSPLDDELFVPYCKELYVVSRESAKNDKLSREKYPKPLIFHDGRLAFLPTPAAMLAFFLFLPLGVVLSVIRINIGIVLPYKINFATAAIFGVRFRASGLRAPPADGEQRRGVLYVCTHRTLVDPIMLTTALQKPVPALTYSLSRLSELIAPIKTVRLTRDRARDADTMSRLLAQGDLAVCPEGTTCREPYLLXFSPLFAELADDMEPVALDAQVTTLYGTTASGHKWLDPVAFFANPVPSYRVEFLGAVPREWTRAGGRTGVEVANWVQRRLGQALDFECTGLTRRDKYMMLAGNDGVVAK

SEQ ID NO: 21714 - protein, 336 aa, Odontella sinensis
MSINIGINGFGRIGRLVMRAAKGRSDINVVAVNDPFIPVNYMEYMYKYDTVHGKCGQEVSHDAEANTLTIDGKDVKVFGEMDPSKIQWGSAGADYVIESTGVFTSTEKASMHMKGGAKKVVISAPSGDAPMFVMGVNQEKYESSMDVVSNASCTTNCLAPLAKVINDEFGLKEGLMTTVHAVTATQQTVDGPSQKDWRGGRAACYNIIPSSTGAAKAVGKVIPELNGKLTGMSFRVPTANVSVVDLTARLDKGASYETICAAIKEASEGKMKGILGYQDEDIVSSDFIGDTHSSIFDEKAGIALTDDFVKLVSWYDNECGYSNRVLDLIKHIESDS

SEQ ID NO: 21715 - protein, 371 aa, Oceanobacter sp. RED65
MSLNSIEEIIQDISDGKMVILMDDEDRENEGDIIVAAEKVTPEIINFMASKARGLICLTLTPERCDFLGLPSMVSGNGSKFSTPFTVSIEAAEGVTTGISAADRAVTVRAAVNPMGKPDDIVQPGHIFPLRAQAAGVLSRAGHTEAGCDLARLAGLQPSSCIVEIMNEDGTMARRPELEEFAKEHDIKIGTIADLIQYRMANEQTIEKISSDTLQTVYGDFLLHVYRDTINQDTHLAITKGDVEACEAPLIRVQAAETLRDLLGAVMPNSHSWSMANSLQAIGDSDAGALVMLNAGEKEDVATAIETFYGRQKPQRTTDVDSSGAYVTIGTGSQILRDLGVSKMRLLSSPMKFAGISGFNLEVVEYIPCEK

SEQ ID NO: 21716 - protein, 356 aa, Hypocrea virens
MSRSNPPNNASASRKISFNVSEQYDIQDVVGEGAYGVVCSAIHKPSGQKVAIKKITPFDHSMFCLRTLREMKLLRYFNHENIISILDIQKPRSYDSFNEVYLIQELMETDMHRVIRTQDLSDDHCQYFIYQTLRALKAMHSANVLHRDLKPSNLLLNANCDLKVCDFGLARSAASQEDNSGFMTEYVATRWYRAPEIMLTFKEYTKAIDVWSVGCILAEMLSGKPLFPGKDYHHQLTLILDVLGTPTMEDYYGIKSRRAREYIRSLPFKKKVPFRTLFPKTSDLALDLLEKLLAFNPVKRITVEDALKHPYLEPYHDPDDEPTAPPIPEEFFDFDKHKDTLSKEQLKQLIYQEIMR

SEQ ID NO: 21717 - protein, 541 aa, Picrophilus torridus DSM 9790
MEDNLKKSGLKRGFSLHDAAMFGIGGAIGSGILFAVAGGTTYAGPAIIISWIIAAIMIVIVTIPYAEFSAMAPRGGISARISYYSYGSYGGFMSGWSLFLWAVLIPPIEAVAVSEYASYYIKGLYSSVTGFLTPEGIALSIALTILFVFINLFGIRKFGIVNNVLTWFKILVVVAIIVIVPLFVFRPSNFTTPSFIPSNASGILIAIPATGILFSFGGYRQVADMAGEIKNPKRNLPRAIGITLAVQSIFYILMTIIVVGSVNWTGLKTAPGSWSVVGSLGSPIVTIIHSNIAYLHGYAVPVLSGLIILALIFAIFSPMGTFGVYLTGSSRIIFGFSREGAIPSFFGSTTKKGTPLYAIILVAVIGDLFLIPFPSWYTLTDFVVVAAVVNFAIVAASLPVIRKLYPEIERPFKVPFATAWSFVAFIASSILIYFATYPDTLYALGATLAGSVVFIYQAYKKHFQELSIKNSLWIPVYIIVMIIISYLGSSSTGGINLIKYPYDIVSVIIVGIVFWFVSQASAPRSVKGDMESLIKNAPEDV

SEQ ID NO: 21718 - protein, 293 aa, Thermoproteus tenax
MTVLVGPDTKVIVQGITGKEGSFHAQRMLEYGTKVVGGVTPGKGGATVAGVPVFDSVEEAVRATGANASVVFVPAKFAADAVYEAVDAGIKLIVVITEHIPIHETLRFVNYARARGATVIGPNCPGLVAPPLKVKLGIMPNSVYQTPGRIGVVSRSGTLTYEISYQLARAGLGINTAIGVGGDPIVGTDLVEAALLMSRDPEVDAIVAIGEVGGDAEERLAKLYAEGVIKKPIVAYVAGRTAPPEKRMGHAGAIVMLGSGDANSKVKTLREAGIPVADTPVEVPQLVLKALRR

SEQ ID NO: 21719 - protein, 520 aa, Xanthomonas axonopodis pv. citri str. 306
MNTTVSNQTPRIRIFDTTLRDGEQSPGCSMTPQQKLVMARALDELGVDIIETGFPASSHSDREAVAMMGRELRRPTLAVLSRCLQADIETSAKALETAANPRLHVFLSTSPLHREHKLRMSREQVLESVHRHVTLARGYVDDVEFSAEDATRTEEDFLAEVTRVAIAAGATTINLPDTVGFTTPEEIRGMFSRLIASVEGADKVIFSAHCHNDLGLAVANSLAAIEGGARQVECTINGIGERAGNCALEEITMALKVRGAFYNIDSAINTPRIVSTSQLLQRLVGMPVQRNKAVVGGNAFAHESGIHQHGMLRHRGTYEIMRPEDVGWESSQMVLGRHSGRAAVEQRLRALGYLLEEEEVKLVFEQFKALCEKQRVVTDADLQALMQDATVQEGYRLASMTISDVGSRANALVELSDPEGNRVAETAQGNGPVDALFGALASATGVKLELDSYQVHSVGIGADARGEASLSVRHDGVEYEGTGTSKDIIEASALAWLDVANRLLRQRERGVVAGKTAAVA

SEQ ID NO: 21720 - protein, 357 aa, Xanthomonas axonopodis pv. citri str. 306
MSKQILILPGDGIGPEIMAEAVKVLKRIDAQHGLGFQLVYDELGGTAYDKYGSPLADETLERARGADAVLLGAVGGPQWDTIDPALRPERGLLKIRSQLGLFANLRPALLYPQLADASTLKPEVVAGLDLLILRELTGGIYFGQPRGNRTLDNGERQAYDTLPYSESEIRRIAKAGFDMARLRGKKLCSVDKANVLASSQLWRAVVEEVAKDYPDIALSHMYVDNAAMQLVRAPKQFDVIVTDNMFGDILSDQASMLTGSIGMLPSASLDANSKGMYEPCHGSAPDIAGKGIANPLATILSVAMMLRYTFARATAADAIEHAVGKVLDQGLRTADIWSEGTTKVGTVAMGDAVVAAL

SEQ ID NO: 21721 - protein, 563 aa, Idiomarina baltica OS145
MSDEQKRPLYIPYAGPSLLETPLLNKGSAFSKEERAAFNLTGLLPPRYESIEEQAERAYMQYKSFETPLNKHIYLRAIQDNNETLFYRLLTDHLEEMMPIIYTPTVGDACEKFSDIYRSSRGLFISYSERDQLDDILRNATKQKVKVIVVTDGERILGLGDQGIGGMGIPIGKLSLYTACGGISPAYTLPVMLDVGTNNEKLLNDPMYMGARHKRINQEQYDEFLEKFIKAVTRRWPGVMLQFEDFAQPNAMPLLRRYRDEVCCFNDDIQGTASVTVGTLLAACRQKGKKLSEQKVVFVGAGSAGCGIAEQVMIQMVAEGLSEEQAKKQIFMVDRYGLVVDSMSDLRDFQQALAQPIDSLKDWQYSGDYPSLLDVIHCAEPDVLIGVSGQAGLFTEQVITTMARYVEQPIIFPLSNPSKHVEAHPHDVIKWTQGKAIVATGSPFGEVEWEGTTYPIAQCNNSYIFPGIGLGVIAVKATRVSDEMFRVASKTLAKASPSANGKNKNLLPGFTELAQLSKDIAFAVAKVAQEEGVALEIDDEVLKQRIEKNFWSPEYRHYKRVSI

SEQ ID NO: 21722 - protein, 1023 aa, Anabaena variabilis ATCC 29413
MGSVLYSLSESANLYPASELFLRHRLQIVEELWESVLRQECGQNMVDLLRQLRDLCSPEGQATKDQAVSAVKLIEQLNINEAIRAARAFALYFQLINIIEQEYEQRQQLTRYSDLEAETAPLNGSENITSSSNHNEDDVIFNRGLGTDFLGKNWTNRGQGKQKGTFAALFPLLSKLNVPPQQIQRLISQLDVRLVFTAHPTEIVRHTIRDKQRQVVDLLQQLDEVENRAKEGGGYPWEAGEIREKLLEEIRLWWRTDELHQFKPTVLDEVDYALHYFQEVLFDGIPQLYKRFKYALNQTFSWLEPPSKDFCSFGSWVGSDRDGNPSVTPEITWQTACYQRKMVLERYIKSVKQLIELLSISMHWSDVLPDLLESLELDQSQLSEVYDALALRYRQEPYRLKLAYVLKRLENTRDRNLALYKGETPTNEDSPMYRSGAEFLAELRLIQHNLTETGLSCRELDNLICQVEIFDFNLTKLDIRQESTRHSDALNEILDYLQLLPQPYNDLSEEQRVAWLTTELQTRRPLISSELPFSDKTNDVIKTFRVVRSLQQEFGINICQTYIISMCRQVSDVLEVLLLAKEARLFDPAIAVGTIQVVPLFETVEDLQRSRSVMRQLFELPLYRALLAGGYKSTEVKVPSPESTPLPTPHSVLTPDLQEVMLGYSDSNKDSGFLSSNWEIHKAQKSLQKIAEEYGVNLRIFHGRGGSVGRGGGPAHEAILAQPGHSINGRIKITEQGEVLASKYSLLDLALYNLETITTAVIQASLLRTGFDDIEPWNEIMEELAARSRQHYRGLIYEQPDFIDFFHQVTPIEEISQLQISSRPARRPSGKKDLSSLRAIPWVFSWTQTRFLLPSWYGVGTALQEFFNEEPEEHLKLMRYFYVKWPFFKMVISKVEMTLAKVDMQMAGHYVQELSDPEDKSRFEKVFEQIANEYYLTRDLVLKITDHSRLLDGDPVLQRSVQLRNGTIVPLGFIQVSLLKRLRQSKNNNATSGVIHSRYSKGELLRGALLTINGIAAGMRNTG

SEQ ID NO: 21723 - protein, 337 aa, Xylella fastidiosa 9a5c
MPICMRQVRSRSVTIARMNHTSDTALLIVNLGTPEAPTAAAVRRYLGEFLSDRRVVSIPPLFWKPLLHMVILPIRGPRSASKYAKVWLQEGSPLSVYTRRIAEGLTQHLPDWRVAWAMRYGAPALTKALDALQAQQVRRIVILPLYPQYSTTTTASVQDVVEAWCKRTPQVQVECIQDYAEDSAWVAAVAASIRRHWQAHGRSEKLMFSFHGLPQRVANNGDPYPQRCQVSASLIAAALDLNESEWVLGYQSRFGAERWLQPYAEPTLWALAESGIRRFDLVCPGFSVDCLETLEEVALGFSETLAARGATMRYIPCLNDDPAHVQALAGLAQRALL

SEQ ID NO: 21724 - protein, 622 aa, Burkholderia mallei ATCC 23344
MCGITGWIDFARDLRNEAPIVDTMTDTLARRGPDARGVWLDTHAALGHRRLSIIDPERGAQPMLTPERGPRGLPRAVISYAGETYNFRELRAELGALGHRFDTHCDTEVVLRAYLEWGAAFVDRLNGMYSIAIWDTARDELLLVRDRLGVKPLFYYPTADGVIFGSEPKAILAHPDVRARTSSEGLCDALLFLRTPGQVPFSGMREVKPGHVLRVRRGGLAEQRYWALEARPHTDDLPTTIATIRALLDDIVSRQMISDVPLCALLSGGVDSSTIAALAQKRRRANGGGALSTFCVDFTGHTRNFRADPIRPTADAPFALEVARHIGSDHHTIELDQAGLLDPQVREAVLRAWDLPFNFADLDVSLHRLFAEVRKHATVALSGEAADEIFGGYLWFSDPAARRAHTFPWLKLGAHRGLDPRALFHRSFIDALRLGEYEAQLYRAALAEVPRLDGENAEDRRTRELHYLTLTRWLPVLLDKKDRMGMASGLEGRVPFCDHRLVEYVFNIPWAMKTFSGQEKALLRAAAADLLPESVLNRKKAAYPSIQAPGYDRGLIERLNRAIAAGRAPLEPFIDAGALRGLTEKTAAGSLSEFERILLESSSRLNDWLDLYRVELDGVPAG

SEQ ID NO: 21725 - protein, 76 aa, Zea mays
GRCKGHGSKISWTQVETGSAITWKYPSVELIGDDSVGEFYSVALTKDCQQADTGTKMIHKGKNSRSRIISKGISAG

SEQ ID NO: 21726 - protein, 434 aa, Chlorobium tepidum TLS
MAFELDPGLFDSDQDSGVNIKIVGVGGCGGNAVNNMMDRKISGAEFVVFNTDRQALLNSKAPIRVQIGKKATNGLGAGADPAKGRLAAEDDRELIAMQLRGADLVFIAAGMGKGTGTGAAPVVASIARNMGILTIGVVTRPFSFEGQIKARIADSGITELRKYIDTLIIVENEKILSIADEGVSATEAYNMANDVLFRAVKGIADIITHHGHVNVDFADVRSIMQSAGDAVMGSAAAAGERRALKAASDAVTSPLMEGVKMRGAKGVLVNITGDVTMRDIADAMNYIEEQVGSDAKIINGYVDEPQVSGEIRVTVIVTGFKRVEPGEERQPASSSGQQEKTLPKAHHVQGFGRLVQSSGYPEQVVEDMRIPAYIRKSRSIQEPFDIGRACSTTRSRPSGGSAPMPGQSDEDEQIRKGATDTPAYLRRKNNPPLQ

SEQ ID NO: 21727 - protein, 420 aa, Solanum demissum
MGNCVGSSARVEATLSSTTPSAYEASRFPDRKSNSSVPSSLSIPSYGRKSSSESLPTPRSESEILFSPNVKSFSFNELKNATRNFRPDSLLGEGGFGCVFKGWIDAQTLTASKPGSGIVIAVKKLKPEGFQGHKEWLTEVNYLGQLRHPNLVKLIGYCIDGDNHLLVYEFMPKGSLENHLFRRGPQPLNWATRIKVAIGAARGLAFLHDAKEQVIYRDFKASNILLDAEFNSKLSDFGLAKAGPTGDRTHVSTQVMGTQGYAAPEYVATGRLTAKSDVYSFGVVLLELLSGRRAVDNAKVGIEQNLVDWAKPYLGDKRKLFRIMDTKLEGQYPQKGAYTAANLAWQCLSNEPKLRPKMSEVLTALEELQSPKGVSKLSHTEHRAIPSPVAVSPMRHHRSPLHMTPSASPLQAYQKSPRGR

SEQ ID NO: 21728 - protein, 610 aa, Prosthecochloris aestuarii DSM 271
MSIVINKETRAVIIGGAAGLSAAKKMAEFDFLVKRPLTVQAFVYPPEEGQQKEIFLGGELKNVKVYSALEKALEENPQINTALIYLGASRATQATMEALESKNIQLVSVITEGVPEKDAKKLRIVAEKKGKTLNGPSSIGIMSAGQCRLGVIGGEFKNLKLCNLYRPGSFGVITKSGGLSNEAMWLCAQNGNGITSAVAIGGDAYPGTDFVNYLEMFDKDPETKAVVMIGEVGGTLEEEAAEWLGKEPRSIRLIAAIGGTCQEVLPQGMKFGHAGAKEGKKGTGSARSKINALREAGAIVPDTFGGLSKAIKQVYEELLADGSIAPEQPLDDALLPELPPKVQKVIKEGEVIVDPLIRTTISDDRGEEPRYRGYAASQLCEKGYGIEDVIGLLWNKKLPTREESEIVKRIIMISADHGPAVSGAYGTILGACAGIDMPQAVSAGMTMIGPRFGGAVTNAGKYFQMGVKDFPNDIPGFLAWMKKNVGPVPGIGHRVKSLRNPDQRVKYLVSYVKNETSLRTPCLDFALEVEKVTSAKKDNLILNVDGTMGAILMDLGFPIHSLNGFFVLARTIGMIGHWIDQNEQNSRLIRLYDYLINYAVEDEREVPEKK

SEQ ID NO: 21729 - protein, 720 aa, Aspergillus nidulans FGSC A4
MVGPSLLQLPWVALAYARPKHRQDPNWTYRQAFTNSLLKAFLRNWVALHLKWRLSLKPRSESDRFIQIPPANPALYTGIVIDEKIRPETIGATWYPAPYPSPDSSQTALPEGQHVVLHLHGGSYILGDGRTSSCNFLATTLLEHTPSSYILCPQYRLAGNRNGNFPAQLQDTIASYAYLIHTIGIPASQIIISGDSAGADLALALLRYTIEFDNLSILPAPKCCWLWSPWCDVPPAVDPGRWNHSANYRTDYIPGSFPARGAKLFLKNVDVTKYVERYVSPVLHPFAVPSPVLIITGDREVLFEDHKKLSQGLKELAHKDEQIELFVTRGVPHDVLMIAWIMGFQKEARESAIKAGEFLHSSFFSTRYRHLSLHCNLFLPFWGFNITIMGLFQPKVMPLPHGIDLTGKTAVVTGATAGLGLETARQILRLNVSTLVLAVRNTEKAQSCVADLFRDADIQARLTRPDIHVLECNMEQYSSVKSFSAKLKESIPRVDILILNAGIHSFVYEKTSDGHEKALQVNYLSNVLLLAELLPFLESTAEQTGSAVRITWLGSRTYYLSNSLEKSDILTYGGGILQYMDSEKASASAGMNQYSDRKLLCALFVYELASRLNRDKVTLNLVCPGMVKTDLGSNGPLWIRTLIEIVKILRARPVEVGGWLVLNAAVVAGKESHGSLIGDKEVTEPTKFIKSSAGQELQKRLWKETVEEMATLTELLSAFV

SEQ ID NO: 21730 - protein, 397 aa, Shewanella sp. ANA-3
MLDSRTIQVIKSTIPLLESAGPVLTQHFYERMFKHNPELKDVFNLAHQHSGGQPVALFNAVAAYAKNIDNLGALGSAVERIAHKHTGFLIQPEQYAIVGSHLLATLKELGGKAVTEEVLTAWADAYGFLANIFINREAQIYQESAQQDGGWSGVREFIISEKKAESLEIASFVLTPVDGKAVKDFIPGQYLSIKAQHPKLAFDEIRQYSLSDAPNGQSYRITVKRELNGQVSNLLHDVLQVGDTLSVMPPAGDFTLAVQAETPVVLISAGVGQTPMKSMLNQLLKLRHPSTVTWLHACEHGGVHGFKSAIKNKLGQHANLASHVWYREPTKADMLGQDYDFEGTMNLTSVADKIVANAHYYFCGPIGFMASIKQQLLAFGVPSEQMHYEVFGPHAEL

SEQ ID NO: 21731 - protein, 339 aa, Arabidopsis thaliana
MKGTLRYLAGIAGPNGFGSRSTAEQVTQHSFFPCSHLTAIITGGTSGIGAETARVLAKRGVRVVMAVRDMKKAEMVKERIIRENPEADIILFEIDLSSLSSVARFCSQFLSQDLPLNILINNAGVFSPNLEFSEEKIELTFATNFLGHYLLTEMLIEKMIDTAEKSGIEGRIINLSSVIHNWVKPDCFSFPKLLHPISRYNGTRAYAQSKLATILHAKALSKQLKDRNANVTINAVHPGIVKTAIIRAHKGLFTDSLFLIASKLLKSISQGAATTCYVALSNETKGLSGKYFADCNETNCSDLANDEYVALKLCTQSRALIHDHLHEFQIHALPNLCFL

SEQ ID NO: 21732 - protein, 318 aa, Wolbachia endosymbiont of Onchocerca gibsoni
LCDKKIQLGINLTKGLGAGALPDIGKGAAEESIEEIMEHIKDSHMLFITAGMGGGTGTGAAPVIAKAAREARAAVKDKMLKEKKILTVGVVTKPFDFEGVRRMRIAELGLEELQKYVDTLIVIPNQNLFRIANEKTTFADAFKLADNVLHIGIRGVTDLMVMPGLINLDFADIGTVMNEMGKAMIGTGEAEGEDRAVTAAEAAISNPLLDNMSMKGARGILINITGGEDMTLFEVDAAANRVREEVDEDANIIFGATFDQAMEGKVRVSVLATGIDNSSNIRDSKAETSFVSQTKTSKEERFKWSYSQASVLKTKPAE

SEQ ID NO: 21733 - protein, 509 aa, Salinibacter ruber DSM 13855
MPFQRRLSPNTRPPLALFVAVDSVMPDPTADSSSEANEEVLTGNVLKIVLLSLSAALGGFLFGFDSGVINGTVEAIQSDFGAGEVVTGFNVASMLLGSAVGAFFAGNLADKVGRRPTLILTALAFMVSAWGSGAAGGSVPFVAARLIGGLAVGAASILAPAYISEIAPSSIRGSLATLQQLMIVVGLFVAFLNNYLIAQAAGSAANAFWMGFDAWQWMYWMELIPASVFFLSLLAIPESPRYLVAANREEEAASVLDSLGTATNVKEKLADIRSTLNDERRPRLTDVIQEHTGRIHPLLWAGIGLAALQQLTGINVVFYYGGTLWQAAGFTEASALLTNVVNGSVNVVFTFVAIALIDRVGRRPLLLVGSIGQALMLGVMAYVFATAAQGGAGGIEMQGNQGVVALVAANAYIAFFAFSWGPVMWVMLGEMFPNRFRGAALSICGLVQWLSNFLVTWTFPILLGSIGLGISYGIYAAFGVVAFVFVKLFIDETKGRSLEDMSREADAAA

SEQ ID NO: 21734 - protein, 318 aa, Wolbachia endosymbiont of Onchocerca ochengi
LCDKKIQLGINLTKGLGAGALPDIGKGAAEESIEEIMEHIKDSHMLFITAGMGGGTGTGAAPVIAKAAREARAAVKDKMLKEKKILTVGVVTKPFDFEGVRRMRIAELGLEELQKYVDTLIVIPNQNLFRIANEKTTFADAFRLADNVLHIGIRGVTDLMVMPGLINLDFADIGTVMNEMGKAMIGTGEAEGEDRAVTAAEAAISNPLLDNMSMKGAQGILINITGGEDMTLFEVDAAANRVREEVDEDANIIFGATFDQAMEGKVRVSVLATGIDNSSNIRDGRVETSSVSQTKISKEEKFKWSYSQASVLKTKPAE

SEQ ID NO: 21735 - protein, 317 aa, Wolbachia endosymbiont of Brugia malayi
LCDKKIQLGINLTKGLGAGALPDVGKGAAEESIDEIMEHIKDSHMLFITAGMGGGTGTGAAPVIAKATREARAGVKDKASKEKKILTVGVVTKPFGFEGVRRMRIAELGLEELQKYVDTLIVIPNQNLFRVANEKTTFSDAFKLADNVLHIGIRGVTDLMVMPGLINLDFADIETVMSEMGKAMIGTGEAEGEDRAISAAEAAISNPLLDNVSMKGAQGILINITGGGDMTLFEVDAAANRVREEVDENANIIFGATFDQAMEGRVRVSVLATGIDCSVTHDNKQETSSVNQDETSEEKKFEWSYSQTLLPEAKQAE

SEQ ID NO: 21736 - protein, 325 aa, Shewanella oneidensis MR-1
MKFDYKPGQFITFVLEINGEQACRSYTLSSTPSRPYSLMVTIKRVDGGLVSNYLIDHLQPGQTVRVLPPTGQFNLFDIPANKYLFLSAGCGITPMYSMSRYLTDTQINADIAVVHSARTQADIIFKNTLETMAARHASFKLCYLVEGVTTDTVWHTEEAFHYVGRLSAQNLLSLVPDFAERIVFLCGPELYMQAVKTILTELNFDMNKLYHESFATAVKEAQSHVKQAEIQSETPTTSSTGFMLSIGDKKHLLTAEQTLLDGIEAEGLPIIAACRSGVCGACKCKVLQGETESTSYMTLTPTDIEAGYVLACSTRLKSDVTLSLI

SEQ ID NO: 21737 - protein, 722 aa, Zea mays
YRSGIPGSTHAFGFVNDEFCNHSKEHQRAKDGSVVDDCLQTSSTRELEDSSIPQAAAYAVLEPKSSRTPIHVELERSKTKSVGNDSIQSMKPVPSALTVDKATSVRGNCSITPNNSSKVADSLPDRNFEPSDRSGSTTNNLATSLKKMVRQQTAPKVVRHYPSESTLFPYELFVRLYVKVELRPFGLHNLGNSCYANAVLQCLMFTRPLTTYLLEGLHSKNCSQNGWCFMCEFEKLIVEGKRRKIALSPTGILSHLNDIGSSFGPGKQEDAHEFLRYAIDAMQSVCTKEARKGGVLRSAEETTLVQLIFGGYLRSKIKCSRCHVSSEQCEPMLDLTVEIDGDISSLDEALVRFTSTEALDGENKYHCSRCKSYERAKKKLTIEEAPNILTIALKRYQSGKFGKISKAIRFPETLNIVCYMNPDTDDISPVYSLYAVVVHHDVMNAAFSGHYVCYVKDTHGKWFKADDSQVKPVSLDNVMSKCAYMLLYARCSPRAPSSVRQAISDPARPKKAKQKVVPGGTTWRGGSFNRHQDGQRHSNHTADDLTHAFDEYRNAPYSPSDSPSPSESSSLFSNSDAGSHSTVSTDSSESTRNSTSTEEYEYVFGAADQMYPGGPHGRSTCGDDYSTYSRSRSSLNTSSSGRDAYSAASSADHKHQVVGSGGQVEGDESTSLLYTDRSNQQLSSKLTDQYRQLDGSGHDPGETRGGVLLRRPSRDRTAQTFY

SEQ ID NO: 21738 - protein, 317 aa, Wolbachia endosymbiont of Brugia pahangi
  misc_feature (229)..(229): Xaa can be any naturally occurring amino acid
LCDKKIQLGINLTKGLGAGALPDVGKGAAEESIDEIMEHIKDSHMLFITAGMGGGTGTGAAPVIAKATREARAGVKDKASKEKKILTVGVVTKPFGFEGVRRMRIAELGLEELQKYVDTLIVIPNQNLFRVANEKTTFSDAFKLADNVLHIGIRGVTDLMVMPGLINLDFADIETVMSEMGKAMIGTGEAEGEDRAISAAEAAISNPLLDNVSMKGAQGILINITGGGXMTLFEVDAAANRVREEVDENANIIFGATFDQAMEGRVRVSVLATGIDCSVAHDNKQETSSVNQDETSEEKKFEWSYSQTLLPEAKQAE

SEQ ID NO: 21739 - protein, 1203 aa, Aspergillus nidulans FGSC A4
MVGGDHRSLIESIYNAPANLLSVVACSGSAVGQCLSPAKFDILVPTSSRIASTKLPTSANTSPTLISSNCYGKTAAKQKMAARPQTAKKSKRDRKKAWKKDPWKGKVADLSHPPYRKAKMEGKLPGPNPDEHVRPSVPTSNHVARAAQRMKYWPERQRLSPIQSPELDAPTLVNGKELGLPELNRDAKPALNPVDRIPPTRFPRVYVGDNAPTPRWLIRPVRPVTNHESAHNSSSESGSAASGFSSASGSSRLLPLGRLRWEFDPGPAAKHGQDEARLHEYAYRYLQNSLRDPIVREEMRNMIWNSPYALVVANVEDPLPIPPPPPHFKDQRPSDYAALREAISASNPDDYHFKYPDYARPSLAARTYGHQDTYKSRKSSVDSQSSAVSHGSSSTGESSRTRASSSSSISIVHKELSPVYQHEFDDDTNHYLKRGQKVGFKAKIKTKEKNQTESFLSKPPRRGRGRPTKSDIDFLDVPTLEELSSAEPPRKKRAGVEKPARDMWRPLSETFSEEEDIITPKAPKITSKNAAKAKMDGAILNKRTGGWLVSVYAEYESCLPCWQELISFPTLEDTKSGQIPADYAKHDLGTYLVCAEVAKRQEQLALGWLSASVIHPHGFLPTRRPGYSEGVIPREYSALLLGSRGQTLRAVSDITKMRARTLLLRVSIFSAALALQPSAPGPAPYTEPYRPQYHFTPAQNWINDPNGLLYHNGTYHMFYQYNPGGVAHEAMSWGHATSQDLTHWDERPVALTARGFPGKNISEQFFSGSAVYDVDNSSGYGNGMGTAAPMVAMYTSFYVYGQTLPSGKKVRASQQSQSLAYSLDSGETWTTDDAVNPILLQPPHPYESQYKEWRDPNVFWHAPTKKWILTTALSDLHKLLIYTSTDLKNWTLASEFGPYNAVGGVWECPSFFPLPVDNDESNVKWVAIIGLNPGGPPGTVGSGNQYILGQFNGTHFLPDAESLHEQGEANWLDYGPDFYAALVYNGLPEFQRTVIAWMSNWQYAEKVPTTVWRNAMTIPRRLGLKTINGKVLVVQEPEANWAAIMSKPQTTRILSLPANSTRNLGSLGKTLAANLTFSAGEQNGSSFGISLLATQNFTTQTLIGYNFATKHIFVDRRASGNTSFDETFASVYRAPLEPADDGTVTLRIFADWSSVEVFGGQGETTLTAQVFPPEGATHARLFANGAGVEDVLLSVSKVGSVWN

SEQ ID NO: 21740 - protein, 338 aa, Glycine max
MGVDYYKLLQVDRNVSDEDLKKAYRKLAMKWHPDKNPNNKRDAEAKFKQISEAYDVLSDPQKRGVYDQYGEEGLKGQVPPPGAGGFSGGSDGGPTMFRFNPRSADDIFSEFFGFSSPYGMGDMGGRAGPSGYPRFADDLFASFSRSAAGEGPGNVLRKSAPIEKTLQCSLEDLYKGTTKKMKISRDVIDSSGRPTTVEEILTIEIKPGWKKGTKITFPEKGNEQRGVIPSDLVFIIDEKPHGVFKRDGNDLVVTQKISLVEALTGYTAQLTTLDGRSLTIPINSTISPTYEEVVKGEGMPIPKEPSKKGNLRIKFNIKFPSRLTSEQKSGIKRLLTSP

SEQ ID NO: 21741 - protein, 316 aa, Wolbachia endosymbiont of Litomosoides sigmodontis
  misc_feature (247)..(247): Xaa can be any naturally occurring amino acid
LCNKKIQLGINLTKGLGAGALPNVGKGAAEESIDEIMEHIKDSHMLFITAGMGGGTGTGAAPVIAKAARETGAAIKDKASKKKILTVGVVTKPFDFEGVRRMRIAELGLEELQKCVDTLIVIPNQNLFRVANEKTTFSDAFKLADNVLHIGIRGVTDLMVMPGLINLDFADIETVMSEMGKAMIGTGEAGGEDRAVSAAEAAISNPLLDNVSMKGAQGILINITGGADMTLFEVDAAANRVREEVDXNANIIFGATFDQAMEGRVRVSVLATGIDYSVTYNDKTEALSTNQDLTSEEEKFEWSYSQTSIPETKQAE

SEQ ID NO: 21742 - protein, 120 aa, Daucus carota
MGVLRSSFVAMMVMYMVLATTPNAEAVLTCGQVTGALAPCLGYLRSQVNVPVPLTCCNVVRGLNNAARTTLDKRTACGCLKQTANAVTGLNLNAAAGLPARCGVNIPYKISPTTDCNRVV

SEQ ID NO: 21743 - protein, 291 aa, Triticum aestivum
  misc_feature (200)..(200): Xaa can be any naturally occurring amino acid
MSADLNRDYEIGEEIGRGRFGVVHRCTSRSTGEAFAVKSVDRSNLADDLDRELAEIEPKLAQLAGAGNPGVVQVHAVYEDDSWTHMVMDLCSGPDLLDWVRLRRGAPVPEPVAADIVAQLAQALALCHRRGVAHRDVKPDNVVLDVDDDGENSSPRARLADFGSAAWIGADGGRAEGLVGTPHYVAPEVVSGGDYGEKAXDVWSAGVVMYVLLSGGALPFGGETAKDVLSAVMRGSVRFPPRLFSGVSPAAKDLMRRMMCRDEWRRFSAEQVLRHPWIVSGGGARAMEQPT

SEQ ID NO: 21744 - protein, 404 aa, Oryza sativa (japonica cultivar-group)
MAAATTSRRGPGAMDDENLTFETSPGVEVISSFDQMGIRDDLLRGIYAYGFEKPSAIQQRAVLPIISGRDVIAQAQSGTGKTSMISLSVCQIVDTAVREVQALILSPTRELAAQTERVMLAIGDFINIQVHACIGGKSIGEDIRKLEHGVHVVSGTPGRVCDMIKRRTLRTRAIKLLILDEADEMLGRGFKDQIYDVYRYLPPELQVCLISATLPHEILEMTSKFMTDPVRILVKRDELTLEGIKQFFVAVEKEEWKFDTLCDLYDTLTITQAVIFCNTKRKVDWLTERMRSNNFTVSAMHGDMPQKERDAIMGEFRSGATRVLITTDVWARGLDVQQVSLVINYDLPNNRELYIHRIGRSGRFGRKGVAINFVKKEDIRILRDIEQYYSTQIDEMPMNVADLI

SEQ ID NO: 21745 - protein, 364 aa, Aminobacter lissarensis
MATYHLKIISKRDEGNDTASLWLEVPQDLRGAFSYQPGQFLTVEREQSGERISRQYSLSSTPGAHRDLRITVKKIPGGAVSPWLVDIAGQGQALEVQVPRGRFFRGFNESRHVLMLACGSGIAPVLSIARHLLALDAGHRVTIVYGNRTPDAIILRDEVRELAESYPDVCRVEHVMSRAGEGWQGARGRIDRAFILSRMEDWLAAGQGLPPSIFLCGPQEFMDAAEATFTEKGVALKDIHRESFDLVLNDDDDEPGLSLAGVNDPGEAGACERIVAVVGGEEYEAVPEAGESILAALIRAEADVPFSCQEGTCASCISKLTEGSATVRPAVLQTLRQDDLDEGVTLACLSRPTTKHVRIDFDEI

SEQ ID NO: 21746 - protein, 96 aa, Brassica napus
  misc_feature (91)..(91): Xaa can be any naturally occurring amino acid
NQIIAGDPENTTETWMSNAYSFGMVLWEMVTGEAAYASCSPVQAAVGIAACGLRPEIPKECPQALRTLMINCWNNSPSKRPNFSDIHSSLXRAMSR

SEQ ID NO: 21747 - protein, 846 aa, Frankia sp. EAN1pec
MPGTPRQHIVVVGNGMVGQRFVETLRQRDTGGRFSITVVGEEPRRAYDRVALSSYFDGVSADELDLVAAGIYDSPHATLHLDESVTAIDRAASTVTTSRGRTLGYDVLVLATGSYPFVPPVPGRDLEGCFVYRTLDDLDAIRAAATAAAEHTRGRRAGLVVGGGLLGLEAARALRLLGMSPHVVELAPRLMPLQVDEPGGAVLRRLIERLGVTVHTATSVAAVEPSGGRLLATLANGTELDLDVVVFSAGIRPRDQLARECGLAVGPRGGVAVDARCRTTDESIYAIGECAVVDGHVYGLVAPGYDMASVVAEQLLGRDATFTGADLSTKLKLLGVDVASFGDALAATAGALEVRVENAVENTYAKIVVSDDASTLLGGILVGDASRYAALRPLVGRRLPADPVAMIAPTGGVDLDAGALPREAQICSCNDVSKGAILDSIVEHGLTDVAGIKACTRAGTTCGSCVALLKPLLAEAGVEVGTGLCEHFDVTRAELFEIARSQRIGTFTELVQRHGRGRGCDTCKPAVASILASLGHGYVLDGEQAALQDTNDHFLANLQKNGTYSVVPRIPGGEITPEKLIVIGEVARDFGLYVKITGGQRVDLFGARVEQLPLIWRRLVDAGMESGHAYGKAMRTVKSCVGSTWCRYGVQDSVGLAIDLELRYRGIRGPHKIKAGVSGCARECAEAQSKDIGVIATDTGWNLYVGGNGGARPRHADLFLTSVDTETLVRTIDRFIMFYARTADRLQRTSTWVESLSADGQDGLAYLRGVLVDDSLGICAELDAAMESHVAHYSDEWADTLADPERLRRFVSFVNAPEVPDPSIQWAPERGQIKPLIAGPTLEVVS

SEQ ID NO: 21748 - protein, 437 aa, Desulfitobacterium hafniense Y51
MFLVALNAFFVAAEFSLVKVRKTRLAELSESGSRKATLALAVTSQLDAYLSACQLGITLASLGLGWLGEPAIASLLAPLFKNLVAWDGVLTHTVSVVIAFLLITFLHIVLGELVPKSIAIQRAESAALWTAGPLKMFYKLFYPVIRFLNGLANLILKLGGISPANESDLAHTEEELRMLVDASQRHGILDKMEGKLLDNVFEFSDRVVSEVMVPRQDMMCLYIQDSMEEVLETVKTSGHTRYPLCDDDKDNVIGLVHMRDLLSLSESSVKNIGELKRDILIVPEGMPISHLVQKMRVQRTHLAVVVDEFGGTAGMVTIEDLIEELVGEIYDEFESAGQAEIIKSGESEYLINGRVLLDDLSELLAVEFEDETVSTIGGFVFNRLGRKPVKGDRIDFMDYTFTVMEVVGFRITRVKASRRPAPDGADMSPDTREDSGK

SEQ ID NO: 21749 - protein, 402 aa, Bradyrhizobium japonicum USDA 110
MPIREVDMARKRIGILTGGGDVAGLNAVIKSVTYRGSEDDIEVVGLRRGWEALTHLNLDDPNSRSHYVIPLNRENTRTIDRRGGTVLHSSRVNPSKIQKLPGHLVGNEVPVSLSTNGGIATKTWDLTSRVLANLSGLGIEHLIAIGGDDTLSYAAKLNELGVKIIAIPKTMDNDVRNTEYCIGFSTAITRASDAIQRQRTTVGSHERIGIFRVFGRDAGFTALYTAYATSIRCLIPEHKVDLDKLIQLLIEDKRANPSNYALIVLSEGAQWEGYKLREYGEPDAYGHRKKANVAESLADEIKQRTGEETITSDLTYDLRSGDPDFIDKLVALTFGNMAYDAMLESKTGLMSALVEGRYDLVPIPDAKLGPRKLDVASSYNTERYRPIYANKQGLPIFLNRAS

SEQ ID NO: 21750 - protein, 149 aa, Triticum aestivum
HRALWHASLWDMHESHHLPRDGPFELNDVFAIVNAVPAMALLAFGFFNRGLLPGLCFGAGLGITLFGMAYMFVHDGLVHRRFPVGPIENVPYFRRVAAAHQIHHMDKFDSVPYGLFLGPKELEEVGGTEELEKEVQRRIKRRQRSDARQ

SEQ ID NO: 21751 - protein, 825 aa, Hordeum vulgare subsp. vulgare
MAFSPRSPWSRSKKPDIYSTVVVHDDEDDAHGGGAARAEDDDDDDPSALPPLLQRLPKDFGGASFDDDDDPYSSDLDDASLSATVVIKRGAPASTSSSSRSPFLDLRRSSPRAAEADPYSTFVVHGTARSGGASSPRESVSGTFIRHSGGPPSPRESVSGTFIRHTRGSSSPRESYSGTFIHHTSGASSPRDPASGAGAGFGSSFMTPSTGQAEEDRQPSLLMQQQQSRRQASMSSVPDSVTREDPSTKYELLHELGKGSYGAVYKARDLRTQELVAVKIISLTEGEEGYEDIRGEIEMLQQCSHPNVVRYFGSYQGEEYLWIVMEYCGGGSVADLIGITEEPLDEPQIAYICRETLKGLAYLHTIFKVHRDIKGGNILLTEQGEVKLGDFGVAAQLTRTMSKRNTFIGTPHWMAPEVIQESRYDGKVDVWALGVSAIEMAEGMPPRSTVHPMRVIFMISSEPAPMLEDKEKWSLLFHDFIAKCLTKDARLRPAAIEMLKHKFIEKCNTGASKMLAKIKEAKIIRETAVQNQLPDSDDAMDATVRINEDYGETVPTNSQSTHETKNDGSGGDFGTMIVHPEDGDEAVESSIFPRAEFIPGLGSINSFTHDPKRAELISKFWAENTADSDATKGRDLDGLPDTQEPKAMPRSIGTFKHHKGVEGTVLRHDNTASPGVASTMTKLSSSPSRKAFSVQDKLWSIYAAGNTVPIPFLKAIDISPLALVSDSVAGNGPAGSSTTDALEAVRELFSGDGQAKKGRKGQNEVPLPPGVHDRLTTSPTLMNLAQALAYHKTCYEDMPLQDSQATEEQQTIQNLCDTLRTILRL

SEQ ID NO: 21752 - protein, 329 aa, Wolbachia endosymbiont of Paratullbergia callipygos
QALEKSLCDKKIQLGINLTKGLGAGALPDVGKGAAEESIDEIMEHIKDTHMLFITAGMGGGTGTGAAPVIAKAAREIKAAIKDRAPKEKKILTVGVVTKPFGFEGVRRMRIAEFGLEELQKYVDTLIVIPNQNLFRIANEKTTFSDAFKLADNVLHIGIRGVTDLMVMPGLINLDFADIETVMSEMGKAMIGTGEAEGEDRAISAAEAAISNPLLDNVSMKGAQGILINITGGGDMTLFEVDAAANRVREEVDENANIIFGATFDQAMEGRVRVSVLATGIDSNVNRDNKSETLSSNQSENSEKEKLKWSYSQNIGVQDKLPEAKEYAT

SEQ ID NO: 21753 - protein, 633 aa, Saccharomyces cerevisiae
MSSNNNTNTAPANANSSHHHHHHHHHHHHHGHGGSNSTLNNPKSSLADGAHIGNYQIVKTLGEGSFGKVKLAYHTTTGQKVALKIINKKVLAKSDMQGRIEREISYLRLLRHPHIIKLYDVIKSKDEIIMVIEYAGNELFDYIVQRDKMSEQEARRFFQQIISAVEYCHRHKIVHRDLKPENLLLDEHLNVKIADFGLSNIMTDGNFLKTSCGSPNYAAPEVISGKLYAGPEVDVWSCGVILYVMLCRRLPFDDESIPVLFKNISNGVYTLPKFLSPGAAGLIKRMLIVNPLNRISIHEIMQDDWFKVDLPEYLLPPDLKPHPEEENENNDSKKDGSSPDNDEIDDNLVNILSSTMGYEKDEIYESLESSEDTPAFNEIRDAYMLIKENKSLIKDMKANKSVSDELDTFLSQSPPTFQQQSKSHQKSQVDHETAKQHARRMASAITQQRTYHQSPFMDQYKEEDSTVSILPTSLPQIHRANMLAQGSPAASKISPLVTKKSKTRWHFGIRSRSYPLDVMGEIYIALKNLGAEWAKPSEEDLWTIKLRWKYDIGNKTNTNEKIPDLMKMVIQLFQIETNNYLVDFKFDGWESSYGDDTTVSNISEDEMSTFSAYPFLHLTTKLIMELAVNSQSN

SEQ ID NO: 21754 - protein, 344 aa, Wolbachia endosymbiont of Mesaphorura italica
  misc_feature (254)..(254): Xaa can be any naturally occurring amino acid
QALEKSSCKKRIQLGVNLTKGLGAGALPDVGKGAAEESIDEIMEHIKDSHMLFITAGMGGGTGTGAAPVIAKAAREIKAAIKDKSSKEKKILTVGVVTKPFGFEGVRRMRIAELGLEELQKYVDTLIIIPNQNLFRIANEKTTFSDAFKLTDNVLRIAIRGVIDLMVVPGLINLDFADIETVMSEMGKAMIGTGEAEGEDRAISAAEAAISNPLLDNVSMKGAQGILINITGGGDMTLFEVDAAANRVREEVDXNANIIFGATFDQAMEGKVRVSVLATGIDSNVNRDNKSETLSSNQSENSEKEKLKWSYSQNIGVQDKLPEAKEYATAEQGSEGVKWGSNIY

SEQ ID NO: 21755 - protein, 403 aa, Arabidopsis thaliana
  misc_feature (205)..(205): Xaa can be any naturally occurring amino acid
MLYLISSISMLLFCWFPDPIVLSSYYKSCSLTQQGEMALSAIGFEGYEKRLEVTFFEPSIFQDSKGLGLRALTKSQLDEILTPAACTIVSSLSNDQLDSYVLSESSFFVYPYKVIIKTCGTTKLLLSIPPLLKLAGELSLSVKSVKYTRGSFLCPGGQPFPHRSFSEEVSVLDGHFTQLGLNSVAYLMGNDDETKKWHVYAASAXQDSSNCNNNVYTLEMCMTGLDREKAAVFYKDEADKTGSMTDNSGIRKILPKSEICDFEFEPCGYSMNSIEGDAISTIHVTPEDGFSYASFEAVGYDFNTLDLSQLVTRVLSCFEPKQFSVAVHSSVGANSYKPEITVDLEDYGCRERTFESLGEESGTVMYQTFEKLGKYCGSPRSTLKCEWSSNNSCSSEDEKDEGI

SEQ ID NO: 21756 - protein, 373 aa, Bacillus clausii KSM-K16
MFDFEMDMEQLAQIKVIGVGGGGSNAVNRMIENGLQGVDFIAVNTDAQALHLSKAEKKLQLGGKLTRGLGAGANPEIGKKAAEESREQLEEVLTGSDMVFITAGMGGGTGTGAAPVIAEVAKELGALTVGVVTRPFSFEGRKRQNQAISGIAALKEKVDTLIVIPNDRLLEMVDKNTPMLEAFREADNVLRQGVQGISDLIATPGLINLDFADVKTVMSEKGSALMGIGVATGENRAAEAAKKAISSPLLETSVDGAQGVLMNITGGTNLSLYEVHEAAEIVSEACDAEVNMIFGSIINENLKDEIVVTVIATGFEETAEAKQPQSRTMQQQHARPQPKEEPKRTESRQQARQKEEQPDTLDIPTFLRNRRNR

SEQ ID NO: 21757 - protein, 477 aa, Thermoproteus tenax
MILWPMPDVVVVNPATEEVLAVLPSASREEVRRAIDEAEDAFYRWSELPLRERAKLLRRAADLIEADDTLINTLVAESGKPIRDARAELRRAIEIFRASAEEAKYILEGKIPRVDAYDYPLANENRIAMEVREPMGVVAGALSYNNPASTFAHKIAPVIAAGNTVIAKPSSHTPLTALKMAQILQKAGVPQGVVQVVVGSGEEIFNEFVDNPKVVGISFTGSTAVGLQVAAKAAGRGKKFMIAPGGSDPAIVFADADLEAAASIIARARFENAGQNCNATKRVFVERKVYDKFLDILRRKIAAIKVGDPMDESTEMGPVISDKMVKAMEGIVADAVEKGGKLLYGGRRMQRKGYFFEPTLVAFDGRPPEAKAFREEVFGPVLPVAPFEDEREAVELANWTQYGLQSAVFTSDYKRAFRVARAIKAGAVMINDSTRVRFDALPYGGVKMSGLSAGWREGVRSTMLLFTEIKYYVLNIA

SEQ ID NO: 21758 - protein, 962 aa, Idiomarina baltica OS145
MTSTTLTQLEHHDEFIGRHIGPSHDEQQAMLKELGVDTLEALTKDTVPGSILRDPFLKVGEPKTEREALAELKAIAKKNQIFTSYIGMGYYDTVTPNVILRNVLENPGWYTAYTPYQPEIAQGRLEALLNFQQMTMDLTGLDLASASLLDEATAAAEAMAMAKRVSKNKKSNAFYIADNVYTQTIDVVKTRAEYFGFDIIVGPAREASDHDVFGALLQYPDKTGELHNIEQLIGELQEKKAIVSVASDLMSLLMLKSPGEMGADIVFGNAQRFGVPMGYGGPHAAFFATRDKFKRSLPGRIIGVSKDSRGRPALRMAMQTREQHIRREKANSNICTAQVLLANMASFYAVYHGPQGLRRIANRIHRLTDIVALGMQDKGVQISNAHWFDTLTFEMKENATDVLARAKAAGINLRNDGEAVFGISMDEAKTRADVEVLFNVLFGDDHGLDVEVLDSRVASKEVESIPAQLVRESDYLTHPVFNEYHSETEMLRYIKKLENKDLALNHSMISLGSCTMKLNATAEMIPVTWPEFAQLHPFCPVEQAQGYAEMISSLSEWLVDITGYDALSMQPNSGAQGEYAGLLAIQKYHESRGEGHRNICLIPSSAHGTNPASAQMMNMKVVVVDCDKNGNVDMADLKAKAEEAGDHLSCIMVTYPSTHGVYEEGIREICELVHEFGGQVYMDGANMNAQVGVTSPGYIGSDVSHLNLHKTFCIPHGGGGPGMGPIGVKEHLKPFLPNHSIINLKTTELGNGAVSAAPYGSASILPISWMYIAMMGGRGLREASETAILNANYVAEKLSKHFKILYRGRNNRVAHECIIDLRQMKEDAGIAEIDVAKRLQDYGFHSPTMSFPVAGTIMVEPTESESKAELDRFIEALVCIKQEADKIAAGEWPQDNNPLVNAPHTLADITDAEWDRPYDRHTATYPVEAVSYDKFWPTVNRIDDVYGDRNLMCSCPSIEEYR

SEQ ID NO: 21759 - protein, 320 aa, Triticum aestivum
MGILSLITGKPGASGFGSGSTAEQVTEGISAAGLTVLVTGGSSGIGLETSRVFALRGAHVIIAARNTEAASEARKRIMEIHPVARVDVLKLDLSSLKSVRAFADQFNSMNLPLNILINNAGVMFCPFQLSEDEVEMQFATNHLGHFLLTNLLLDNMKTTAKSTGIEGRIVNLSSVAHLHTYPKGILFDQLNDKKIYNDKMAYGQSKLANILHAKELSRRLKEEGANITVNCVHPGLIMTNLMRHSFALMKAIQVVTYLFWKNVPQGAATTCYVGLNPQLKGVTGKYFADCNEEKTSAHAKSDVLAKQLWEFSEELIRSAK

SEQ ID NO: 21760 - protein, 481 aa, Papaver somniferum
SLVAVVITTFLYLIFRDSSPKGLPPGPKPWPIVGNLLQLGEKPHSQFAQLAETYGDLFSLKLGSETVVVASTPLAASEILKTHDRVLSGRYVFQSFRVKEHVENSIVWSECNETWKKLRKVCRTDLFTQKMIESQAEVRESKAMEMVEYLKKNVGNEVKIAEVVFGTLVNIFGNLIFSQNIFKLGDESSGSVEMKEHLWRMLELGNSTNPADYFPFLGKFDLFGQSKDVADCLQGIYSVWGAMLKESKIAKQHNNSKKNDFVEILLDSGLDDQQINALLMEIFGAGTETSASTIEWALSELTKNPQVTANMRLELLSVVGKRPVKESDIPNMPYLQAFVKETLRLHPATPLLLPRRALETCKVLNYTIPKECQIMVNAWGIGRDPKRWTDPLKFSPERFLNSSIDFKGNDFELIPFGAGRRICPGVPLATQFISLIVSSLVQNFDWGLPKGMDPSQLIMEEKFGLTLQKEPPLYIVPKTRD

SEQ ID NO: 21761 - protein, 351 aa, Medicago truncatula
MASSLTHCYSSPSSTTTLLLRRRHPINVGPTSLRFFTIHSSPSSSRVLSIAASATEASSAKVIDGKTVAKQIRDEIAVEVSRMREAAGVIPGLAVILVGDRKDSATYVRNKKKACETVGINSLEVNLPEDSTEEEVLNHIAGYNDDPSVHGILVQLPLPSHMNEQNVLNAVRIEKDVDGFHPLNIGRLAMRGREPLFVPCTPKGCIELLHRYGVSIKGKRAVVIGRSNIVGMPAALLLQREDATVSIVHSRTTNPEEIIRQADIIIAAVGQPNMVKGSWIKPGAVIIDVGINPVDDPSSSRGYKLVGDVCYEEAVKVASAITPVPGGVGPMTIAMLLQNTLISAKRIHSFE

SEQ ID NO: 21762 - protein, 484 aa, Chlamydophila pneumoniae CWL029
MGESVKVFLEEREDYPYGFVTPIESQGLTRGLSEETIEEIAALRNEPQFIIDFRLQAYRYWKQLHEPAWARLHYGPIAYDDIVYFSSPKQKKPLGRLEDADPEILDTFKKLGIPLDEQKRLLNVENVAVDLVFDSVSIGTTFKEALEKAGVIFCSLGEAIQEHPNLVKKYLGSVVSHRDNFFAALNAAVFSDGSFVYVPKGVKCPMDISTYFRINNKEAGQFERTLIVVEDGGYASYLEGCTAPAYSSNQLHAAVVELVAHEHAVIRYSTVQNWYAGDKKTGKGGIYNFVTKRGLCAGYRSKISWSQVEVGAAITWKYPSCILKGDESVGEFYSVALTSGKMQADTGTKMLHVGKRTTSTVISKGISSDESKNTFRSLVSLGKKAEHSSNYTQCDSMLIGKASGAYTDPKIVVENSTSSIEHEATTSKLREDQLLYLRSRGLSPEEAVSLVIHGFCREIIEQLPLEFAQEASKLLLIKLENSVG

SEQ ID NO: 21763 - protein, 342 aa, Bacillus subtilis subsp. subtilis str. 168
MARVISMSDAINEAMKLAMRKDENVLLIGEDVAGGAAVDHLQDDEAWGGVLGVTKGLVQEFGRTRVLDTPISEAGYMGAAMAAASTGLRPIAELMFNDFIGTCFDQVINQGAKFRYMFGGKAQVPITVRTTYGAGFRAAAQHSQSLYGLFTSIPGLKTVVPSNPYDAKGLLLAAIEDNDPVFFFEDKTSYNMKGEVPEDYYTIPLGKADIKREGNDVTLFAVGKQVNTALEAAAQLSERGIEAEVLDPRSLSPLDEDAIFTSLEKTNRLIIIDEANPRCSIATDIAALVADKGFDLLDAPIKRITAPHTPVPFSPVLEDQYLPTPDKIVSVTLELLGEPALN

SEQ ID NO: 21764 - protein, 398 aa, Bacillus subtilis subsp. subtilis str. 168
MAVKVVMPKLGMAMKQGEVSIWNKKVGDPVEKGESIASIQSEKIEMEIEAPEKGTLIDIKVKEGEEVPPGTAICYIGDANESVQEEAGAPVAEDNMPQAVQPVKQENKPAASKKDRMKISPVARKIAEKAGLDLKQLKGTGPGGRIVKDDVTKALAEQKKDQAKPVSEQKAQEIPVTGMRKVIAARMQESLANSAQLTITMKADITKLATLQKQLSPTAEERYGTKLTITHFVSRAAVLALQAHPVLNSFYQNERIITHPHVHLGMAVALENGLVVPVIRHAEKLSLIELAQSISENAKKAREGRAGSEELQGSTFSITNLGAFGVEHFTPILNPPETGILGIGASYDTPVYQGEEIVRSTILPLSLTFDHRACDGAPAAAFLKAMKTYLEEPAALIL

SEQ ID NO: 21765 - protein, 473 aa, Legionella pneumophila subsp. pneumophila str. Philadelphia 1
MAWIVAIIGSIAGFLFGYDEGIIAGSLGLVKNHFNLNATHIGVMASALPFGALFGSLLIGAFMASKCVKRFGRRSLLSFAGFLFFVGALGAGFAETVSVLILSRLILGLAIGMASVLTPLYLAETAAVQSRGAVVAIYQLALTVGIVCSYSVNYLLIEQQAWRAMFASSAIPALLLTLGILFMPESPRWLCSVGRHGAAANSLRKLRGKQSVEQELKDIEATLANEPKQGNWLLLFQKPLLPVLMLGTILFCLQQLSGINVVIYFAPEIFKNLGLGSTTGQILATMGIGLVNLLVTIIAILYVDKLGRRKLLLLGFAGTSLSLFALSLFSLNHVAWLSYLSVICLMVYIFSFAISVGPIPHIAMAEIFPLHVRGAGMGMSSMSNWLFNTIVIFSFPVLHQMFGIEMTFVLYAVICFLGFIYAYIYMPETRNISLEQIETYIMSGKPLRFLGREDEEVNAVSTKSESSLLASTN

SEQ ID NO: 21766 - protein, 292 aa, Xanthomonas campestris pv. vesicatoria str. 85-10
MSEDDSSQSPETPEKRRSWLERLSAAFSGEPHTRDELVALLRTAEQDGLIAADTLRMMEGAISVSELTVGDVMISRSQMVSLPVEARFIDLMKQVVESGHSRFPVHGENKDEVLGILLAKDLLRGVVADNGPGNVRELLRPAVLIPESKKLNVLLKEFRLSRNHMAIVVDEYGGVAGLVTIEDVLEQIVGEIDDEHDDAEEENSLIAIQADGRYVVDALTPIEDFNERFGAEFPDDEYDTVGGLVTDAIGHLPETGEELTLGRFAFRVAKADARRVHAFHVTILPPDPQDDA

SEQ ID NO: 21767 - protein, 370 aa, Bradyrhizobium sp. BTAi1
MATHKLLLLPGDGIGPEVMAEVKRLIGWLNGKGLASFETEEGLVGGAAYDAHGASISEADMDKAKAADAIIFGAVGGPKWDGVPYEVRPEAGLLRLRKDLGLFANLRPAVCYPALADASSLKREIVEGLDIMIVRELTGGVYFGEPKTITDLGNGQKRAVDTQVYDTYEIERIARVAFDLARKRRNKVTSMEKRNVMKSGVLWNEVVTAVHNREYKDVTLEHQLADSGGMNLVKYPKMFDVIVTDNLFGDMLSDIAAMLTGSLGMLPSASLGEVDAKTHKRRALYEPVHGSAPDIAGKGLANPIAMLTSFGMALRYSFDLGALADKLDAAIAAVLASGLRTADIKAEGSTPASTAQMGEAIIKELEKLTA

SEQ ID NO: 21768 - protein, 317 aa, Wolbachia endosymbiont of Dirofilaria repens
LCDKKIQLGVNLTKGLGAGALPDIGKGAAEESIEEIMEHIKDSHMLFITAGMGGGTGTGAAPVIAKAAREARAAVKDKMLKEKKILTVGVVTKPFSFEGVRRMRIAELGLEELQKYVDTLIVIPNQNLFRIANEKTTFADAFKLADNVLHIGIRGVTDLMVMPGLINLDFADIGTVMSEMGKAMIGTGEAEGEDRAVNAAEAAISNPLLDNVSMKGAQGILINITGGGDMTLFEVDAAANRVREEVDENANIIFGATFNQAMEGKVRVSVLATGIDNSTIRDDRAETSSVSQTKPLKEEKFKWPYSQISVPETKPAE

SEQ ID NO: 21769 - protein, 393 aa, Streptomyces galilaeus
LGVIAPGGIGTKAFWERIVSGVSATRTITAFDASGFRSRMAAECNFDGVRSGLTVRDTARLDRATQFAVVAAREALADSGIEIDERNAHRTGVSLGSAVGCTQKLEEEYVARSDGGQRWLVDHAAGTPYLYDYFVPSSMAAEVAWEAGAEGPAALVSAGCTSGLDSLGHALDLIREGAVDIMIAGGSDAPIAPITVACFDAIKATSPRNDTPEHASRPFDRTRSGFVLGEGAAVLVLEERESALRRGAQIYAEIAGYAGRANAHHMTGLRPDGLEMSAAITGALDDARIDREAVGYVNAHGTATRQNDIHETAAIKHSLGEHAHRVPVSSIKAVIGHSLGAVGSIEAVASALVIRHGVVPPTAGLHEPDPQLDLDYVPLTARDQATDTVLTVG

SEQ ID NO: 21770 - protein, 831 aa, Bordetella parapertussis
MSMARRDFIKQTAAAAAATVAGVPLTGYTQNIVTESEAAKLKWSKAPCRFCGTGCGVNVAVKDNQVVATHGDFNAEVNKGLNCVKGYFLSKIMYGSDRLTQPLLRIKDGKYAKDGEFAPVSWDQAFDVMAEQFKRVLKDKGPEAVGMFGSGQWTVWEGYAALKLMKAGFRTNNLDPNARHCMASAAVGFMRTFGADEPMGCYDDIENADAFVLWGSNMAEMHPILWTRVTDRRLSAPATKVAVLSTFEHRSYELADLTLTFEPQSDLAILNYIANHIIRTKRVNRDFVDKHTVFREGNADIGYGLRPEHPLQQAARNAGDAGGSKPITFDDFARFVSKYDLEYTAKLSGVPKNRLEELAELYADPKVRVTSFWTMGFNQHTRGVWCNNMVYNIHLLTGKISTPGNSPFSLTGQPSACGTAREVGTFSHRLPADLVVTNPEHRRHAEEIWKLPDGTIPSKVGAHAVLQNRMLKDGKINAYWVMVNNNMQAAANLMNEGLPGYRNPENFIVVSDAYPTVTTLSADLILPAAMWVEKEGAYGNAERRTQFWHQLVDAPGQARSDLWQLVEFSKRFKVEEVWPADLLAKKPEYRGKTLYDVLFANGKVNQFPNTELDPEYANQEAQAFGFYLQKGLFEEYAEFGRGHGHDLAPFDVYHKARGLRWPVVDGKETLWRYREGSDPYVKPGTGFQFYGNPDGKAVIFALPYEPPPEAPDKEYPFWLSTGRVLEHWHSGSMTRRVPELYKAFPEAVCFMHPDDAQALGVRRGVEVEVVSRRGKMRTRVETRGRDKPPRGLVFVPWFDAGQLINKVTLDATDPISFQTDFKKCAVKIVKV

SEQ ID NO: 21771 - protein, 327 aa, Spiroplasma citri
MLKKIGILTSGGDSQGMNAAIAGVIKTAHAKGLETYIIRDGYLGLINNWIEVVDNNFADSIMLLGGTVIGSARLPEFKDPEVQKKAVDILKKQEIAALVVIGGDGSYQGAQRLTELGINCIALPGTIDNDITSSDYTIGFDTAINIVVEAIDRLRDTMQSHNRCSIVEVMGHACGDIALYAGIAGGADIISINEAALSETEIADRVAMLHQAQKRSVIVVVSEMIYPDVHKLAKLVESKSGYITRATVLGHTQRGGNPTAMDRYRAFQMAQFAVEQIIAGVGGLAIGNQGDQIIARPIMEALSIPRSSRKEIWAKFDQLNQNIYQKS

SEQ ID NO: 21772 - protein, 835 aa, Xylella fastidiosa Ann-1
MSSSAVRLSTVETPVYVPRTVVHKFGGTSVADADCYRHVARLLLAREETVQVTIVSAMKGVTDTLIALAEQAANHSPDWQALWQQTRTRHCDAAQALLGEHAATLQDWLNTHFNELHEMLVALSVIGMLPSEVLDRLQGLGEVYSAQLLGEYLQFQGEDCVVLDARQVLVVSPGEFGAEVDWATSAQHLAHWRMQHPQRRVVVTGFVASDRTGRAITLGRNGSDYSGAIFAALFEADELHIWTDVDGVMSADPRVVPDAVQLDALSYDEACELAYFGAKVVHPQTMSPVMKRGVPIIIRNTFQPRHPGTRITADSVVSGSVKGLTLSPGLAVLNLEGTGLIGVPGTAERVFAALRNARLSVVMISQGSSEHSICCLVHQTEAERARDALLYAFAHELAIGHVQRVQLTNNISVLAAVGDGMAGHLGVAARLFESLRRAHVNILAIAQGSSERNISVAIDSQQATKALRAAHAAFWLSPQTFSIGVIGPGHVGEALLDQLCAAQQQLLSKANLDLRLRAIVSQRRMLLDERGLGSDWRHAFAAVPEAVDLDAFTAHLQAAHLPHAVIIDCSGSAEVADRYADWLAAGIHVVTPNKQAGSGPLHRYHAIRAAADASGARFRYEATVGAGLPVITTLRDLMDTGDSVTSIEGIFSGTLAWLFNKYDGSVPFSQLIAQARAMGYTEPDPRDDLSGVDVARKLVILARDAGRDISLEDVAVESLVPETLCQLSVADFMERLNEIDATFAERLAAAKQRGCVLRYVAQLSPGHVPSVSLIELPSDHAFVNLRLTDNVVQFTTRRYSENPLVVQGPGAGPEVTAAGVFADLLRVAAGEGARL

SEQ ID NO: 21773 - protein, 317 aa, Lycopersicon esculentum
MGKVGEELTEQETAIYDRQIRVWGVDAQRRLSKSHIFVSGLKGTVIEFCKNIVLAGVGSLTLNDDRLVTEELLSANFLVPSDENVTSGKSLAELCCESLKDFNPMVTVSVEKGVLANFHVEFFQKFDAVVISCCSLLTKKSVNAKCRKLPRRVAFYSVECRDSCGEIFVDLQSYSKKKNEETIECQLQYPSFEEAIAVPWRSLPKRMSKLYFAMRVLERFEVLEKQNPQDTSGDDLPNVLKLRKELCEAQCINESQIPVPLLQRLLAARVEFPSVCAIIGGVLGQVIKAISGKGDPLKNFFLFDAMDGKGIIEDISG

SEQ ID NO: 21774 - protein, 572 aa, Shigella flexneri 2a str. 301
MKQTVAAYIAKTLESAGVKRIWGVTGDSLNGLSDSLNRMGTIEWMSTRHEEVAAFAAGAEAQLSGELAVCAGSCGPGNLHLINGLFDCHRNNVPVLAIAAHIPSSEIGSGYFQETHPQELFRECSHYCELVSSPEQIPQVLAIAMRKAVLNRGVSVVVLPGDVALKPAPEGATTHWYHAPQPVVMPEEEELRKLAQLLRYSSNIALMCGSGCAGAHKELVEFAGKIKAPIVHALRGKEHVEYDNPYDVGMTGLIGFSSGFHTMMNADTLVLLGTQFPYRAFYPTDAKIIQIDINPASIGAHSKVDMALVGDIKSTLRALLPLVEEKTDRKFLDKALEDYRDARKGLDDLAKPSEKAIHPQYLAQQISHFAADDAIFTCDVGTPTVWAARYLKMNGKRRLLGSFNHGSMANAMPQALGAQATEPERQVVAMCGDGGFSMLMGDFLSVVQMKLPVKIIVFNNSVLGFVAMEMKAGGYLTDGTELHDTNFARIAEACGITGIRVEKASEVDEALQRAFSIDGPVLVDVVVAKEELAIPPQIKLEQAKGFSLYMLRAIISGRGDEVIELAKTNWLR

SEQ ID NO: 21775 - protein, 360 aa, Arabidopsis thaliana
MKAICDRFVPSKCSSSSTSEKRDISSPTSLVSDSASSDNKSNLTLCSDVVASSSPVSQLCREASTSGHNPVCTTHSSWTVILKTASMASGAIRRFQDRVLGPSRTGISSSTSEIWLLGVCYKISEGESSEEADAGRVLAAFRQDFSSLILMTYRRGFEPIGDTTYTSDVNWGCMLRSGQMLFAQALLFQRLGRSWRKKDSEPADEKYLEILELFGDTEASAFSIHNLILAGESYGLAAGSWVGPYAVCRSWESLARKNKEETDDKHKSFSMAVHIVSGSEDGERGGAPILCIEDVTKTCLEFSEGETEWPPILLLVPLVLGLDRVNPSHFHVPSKPRHFGRQTRCINLHSWSSRRQRFLP

SEQ ID NO: 21776 - protein, 713 aa, Methylobacillus flagellatus KT
MSLMQPFKRARQYWLTLSRHCDPLELEQAVIRIWLGMTFLSFLVYREFTAPNPISDNFPLAIPMTVVFQVLSFTLFGLILFTTKHAALRRLSGAWLDIGLPTMFMAMTGELGVILVGVYLWVTFGNGFRFGKKYLLHSQALSLIGFLYTINVNPFWLEHKAISYSLLLMLVALPLYVATLITRIEEARQKAEVANHAKTRFVANMSHEIRTPLNGIIGISTLLRNTQLNPEQDELLRTLESSSKLLLAQLNNVLDFSKIEQEKMQVEKTELSLRDLAEQTIEVFKGQALHKRIRLEKDIRIDDVRVKSDPYILQQILANLVGNAVKFTEQGAVTLSVHALETTADHGVYRIEVVDTGIGISDEHRERIFESFTQADISTTRKFGGSGLGLTIAKRLVEALGSELHLSSSLNAGSRFWFDLSLDIVAPAPAAPLVVIDNHPKSATKPLKILVCEDNVTNQTIIVKLLQLPGHHVSVVDNADDLLDRLEVEQFDLVVSDLNMAGMTGIEALKLYRFLRPEDKKTKFILFTADATVETKAAAEVAGFDAYLTKPIETKLLFDTIASLTGGTPVPDQIAQFYARADTATPQEAEQACDILSSQTLSELELLGGQDGMFVPRLLGKYVTDCGALVKLIKQNLGAKRYAELHEFCHALKGNSLSVGAIAVSKQAELMDKASPEELRFRGTMMLEQLEKEFEAATQAINDYLNSRQAASS

SEQ ID NO: 21777 - protein, 92 aa, Arabidopsis thaliana
MAFFMLSSDPVDTWADQATMVAPFTGLKSSAAFPVTRKTNMDMTSIVSNWGRVSCMNVWPPIVKKNVETLYYLPDRRDGELANEVDYSFLNK

SEQ ID NO: 21778 - protein, 444 aa, Carboxydothermus hydrogenoformans Z-2901
MKYTPHTPDEVREMLSSLGLSSIEELFSDIPEEVKLKRPLNLPSGMSELEVKKHLANLAAKNGSADKYTVFLGAGVYDHYVPAVVNHILLRSEFYTAYTPYQAEMSQGVLQSIFEYQTMICELTGLDITNASMYDGGSALAEAALMAVSQTRRDKVLVLATVHPEYRSVVKTYTWGPEIEVVEVPYKSGTVDLEKLEELIDDKTAAVLVQHPNFFGQLEPVEEISRLIHAQKGLLVVAVDPISLGILKPPAEYGADIAVGDGQALGNGLAFGGPHLGFFAARKDLARRMPGRLVGLTTDKEGNRGFVLTLQAREQHIRREKATSNICSNQALNALAATVYLATVGKKGLKEIALQSLQKAHYAFERLIGEGYEPLFSGPFFKEFVVKVKNEEEITQKLLKHHILAGPGISRFYPELAPALMIAVTEKRTREEIDNLVEVLGGDR

SEQ ID NO: 21779 - protein, 286 aa, Frankia sp. EAN1pec
MTGPRTVLITGATDGHGRALAHRLAAEGTTLILHGRDPDKLARTADDIQTTHRVSRPRTMQADLAELAQVRRLASDVQAVADRLDVLVSNAGIGAGHPDGHTRRTSVDGYELRFAVNYLAGFLLTLDLLPLLRRSAPARIVNVASIGQHPLDLGDLMIERGYSGTRAYGQSKLAQIMSGFELAQRLPGAEVAVNSLHPATYMPTKIVLAEIGHHIDSIDDGVSATHRLVTDAAFAGVTGRFFDRTSDTRPNIQAYDEQARAELWRRSLELVDRSGVHGRGVRGVMI

SEQ ID NO: 21780 - protein, 208 aa, Saccharomyces cerevisiae
MFTPIDQAIEHFKQNKFVIVMDDAGRENEGDLICAAENVSTEQMAFLVRHSSGYVCAPMTNAIADKLDLPLLRTGMKFESNDDDRHGTAYTITVDVAQGTTTGISAHDRSMTCRALADSSSTPKSFLKPGHICPLRAADGGVLQRRGHTEAGVDLCKLSGLSPVAVIGELVNDDEQGTMMRLNDCQAFGKKHGIPLISIEELAQYLKK

SEQ ID NO: 21781 - protein, 937 aa, Anabaena variabilis ATCC 29413
MPVSNTKPSLQRQIKTMIRSSVQTAQKLPLRLILVVPFVLQIFTAVSLVGYLSFKNGQKAVNELADQLIVKVNGLVDQHLDTYLAVPRQINQINVDATNLGMLNLENFQTTGRYFWQQMQVFNVGYISFANPQREFIGVERLDKGSLLINEVSQEKGIGKLYVYNTNNQGDRQQLIAVKDYNPHVEAWYADAVKVGKPIWSQIYSWEDKPEVLSISASYPINDSNNKFVGVISVDLILSQINSFLANLKVGQTGQIFILERSGMIVASSTSEAPYKVISGKAQRLSAHQSQNYLLRETTDYLQQKFGQLKNVKSYQETVLQLRHERHFVQVRPWKDKLGLDWLVIVVVPESDFMAQINTNNRTTVLLCLGALIIATAMGVYTSRWIARPVVQLTQASSAIASGNLDQEVTISGLKELSMLATSFNQMAGQLRDSFAELEKTNQELENRVAERTAEITAAKETADAANRAKSEFLANMSHELRTPLNGILGYAQILQMDSNTSDEQMQGLNTIYECGSHLLTLINDILDIAKIEAKKLELYPKEFDLRKLLLGACEMCRIKADQKELIFKYHLNNRIPANIFADEKRIRQVLINILSNAIKFTDHGTVTFDVEVVACTGTKLITNTNQLLPVHQLRFHIEDTGIGMTDEQLKKIFLPFEQVGDNLHKSEGTGLGLAISSQILELMGSDLKVESVYGKGTKFWFDLDLPIVDTGKFSLSVEGQKNIIGYEGKTRSILIIDSSWENRSIFANLLSSLGFKLIEVSNLQESLDKIKTEHPDLIIADIAMPEINNLQATKKMRSQVEFANLVIIASSASVSEYTRQQSQEAGYDDFLAKPVKVEELFNMLQTYLSLKWIYSLNDDSSAKISTTEEIIFPPPTELFNLYQAAKAGYVVGIQEEIIRIQQLDKRYTRFAVKVSELIAEFEDEAIVAMIQPHLSY

SEQ ID NO: 21782 - protein, 80 aa, Oryza sativa
MSEEAGRPLPKFGEWDVNDPASADGFTVIFNKARDEKKGGNGQDTDSPCKETRTERVESYAPKTNSKKWFCCVTSSPTQS

SEQ ID NO: 21783 - protein, 238 aa, Picrophilus torridus DSM 9790
MIIDENDEYLIIRMDNGLNTLDVDAIKEITDNISKRKPTIITGNDKAFSAGANVKKFLGLSKSDAYNISRQAHEMLLKITGNSMPVIAAIKGYALGGGFELALACDLRFADLDAKFGFPEIKLGIIPGWGGTQRLKPLIGETRAMEMILTGKIIDSNQAFSLGILNYIGGDYMNRAIDMASSIYNKSHEAVSAIKYLLRQGSLDLEMERFAGLFDEYNSKEGINAFLEKREPKFNLND

SEQ ID NO: 21784 - protein, 327 aa, Anabaena variabilis ATCC 29413
MAETLFFNALREAIDEEMARDSSVFVLGEDVGHYGGSYKVTKDLYKKYGELRILDTPIAENSFTGMAVGAAMTGLRPIIEGMNMGFLLLAFNQISNNAGMLRYTSGGNFKIPLVIRGPGGVGRQLGAEHSQRLETYFQAVPGLKIVTCSTPYNAKGLLKSAIRDDNPVLFFEHVLLYNLKEDLPEKEYYLPLDKAEIVRSGKDVTILTYSRMRHHVTQAVKALEKQGYDPEVIDLISLKPLDLETIGASIRKTHKVIIVEEAMRTGGIAAELIASINDRFFDELDAPVLRLSSQDIPTPYNGTLERLTIVQPEQIVEAVQKMIALRV

SEQ ID NO: 21785 - protein, 243 aa, Streptomyces coelicolor A3(2)
MAIIETEAALHEAHRDNHTHRDVNGGWLRPAVFGAMDGLVSNLALMTGVAGGTASQQTVVISGLAGLAAGAFSMAAGEYTSVASQRELVEAELDVERRELRKHPADEEAELAALYEARGVEPELAREVARQLSADPEQALEIHAREELGIDPSDLPSPTVAAVSSFGSFALGALLPVLPFLLGAGALWPAVLLALAGLFLCGAVVAKVTARSWWYSGLRQLALGGAAAGVTYLLGSLFGTAVG

SEQ ID NO: 21786 - protein, 591 aa, Oryza sativa
MCGILAVLGVADVSLAKRSRIIELSRRLRHRGPDWSGIHCYQDCYLAHQRLAIVDPTSGDQPLYNEDKSVVVTVNGEIYNHEELKANLKSHKFQTASDCEVIAHLYEEYGEEFVDMLDGMFAFVLLDTRDKSFIAARDAIGICPLYMGWGLDGSVWFSSEMKALSDDCERFISFPPGHLYSSKTGGLRRWYNPPWFSESIPSTPYNPLLLRQSFEKAIIKRLMTDVPFGVLLSGGLDSSLVASVVSRHLAEAKVAAQWGNKLHTFCIGLKGSPDLRAAKEVADYLGTVHHELHFTVQEGIDALEEVIYHVETYDVTTIRASTPMFLMSRKIKSLGVKMVLSGEGSDEIFGGYLYFHKAPNKKEFHEETCRKIKALHLYDCLRANKSTSAWGVEARVPFLDKNFINVAMDIDPEWKMIKRDLGRIEKWVLRNAFDDEEKPYLPKHILYRQKEQFSDGVGYSWIDGLKDHANEHVSDSMMMNASFVYPENTPVTKEAYYYRTIFEKFFPKNAARLTVPGGPSVACSTAKAVEWDAAWSKNLDPSGRAALGVHDAAYEDTLQKSPASANPVLDNGFGPALGESMVKTVASATAV

SEQ ID NO: 21787 - protein, 560 aa, Streptococcus agalactiae A909
MTESHNQYGADLIVDSLINHDVKYVFGIPGAKIDRVFDTLEDKGPELIVARHEQNATFMAQAVGRITGEPGVVIATSGPGISNLATGLVTATDEGDAVLAIGGQVKRGDLLKRAHQSMNNVAMLEPITKYSAEVHDPNTLSETVANAYRLAKSGKPGASFISIPQDVTDSPVSVKAIKPLSAPKLGSASVLDINYLAQAINNAVLPVLLLGNGASSEGVTAAVRRLLDAVKLPVVETFQGAGIVSRELEDETFFGRVGLFRNQPGDMLLKRADLVIAIGYDPIEYEARNWNAEISARIIVIDVEQAEIDTYFQPERELIGDMAHTLDLLLPAIKGYELPEGSKEYLKGLRNNIENVSDVKFDRDSAHGLVHPLDLIDVLQENTTDDMTVTVDVGSHYIWMARYFKSYEARHLLFSNGMQTLGVALPWAISAALLRPNTKVISVSGDGGFLFSAQELETAVRLHLPIVHIIWNDGKYNMVEFQEEMKYGRSSGVDFGPVDFVKYAESFGAKGYRVDSKDSFEETLKQALIDAENGPVLIDVPIDYKDNVTLGETILPDEFY

SEQ ID NO: 21788 - protein, 332 aa, Legionella pneumophila subsp. pneumophila str. Philadelphia 1
MMRRGLLLLNLGTPNNADIRAVKLYLREFLTDKRVIDLPTIPRYILVYCLILPFRSPKSAQAYQSIWTEKGSPLLYHSQNLVTKLQSALKDEYKIALGMRYGTPSITTALAELKDCHSLTILPLFPQYSSAATGSAIEKTLSHLANQEIIPSIKIIRDFYQRPEYIQAQAKIMKPYIKDNFHLLFSYHGIPERHIHKSGCDTLCPQTCTPIYDKNQACYRAQCYQTSLLLAKELQLGTHQYTTAFQSRLGKTPWIKPYTDEIFAELISKGIKNIVVSCPSFVADCLETLEEIGIRAKEQWEKLGGEQFILTPCMNDHPEWIKAIQSIVNEQF

SEQ ID NO: 21789 - protein, 176 aa, Zea mays
KKKKKKKKKKKKKKPHPQIPRFTDASISVCCVALPCPAIISYVSPAERERGKGLVAPKFATLGLAVLLGATGGAPPAAGRAAMSCSTGYSTLMPGLPFVQMGGALPPQPGCGGIRSLLKKANNTPDRRTIWGCLKNVANGANGRGTYFSRAAALPRKGGVPLPYKISTNVNCNTIN

SEQ ID NO: 21790 - protein, 393 aa, Streptomyces capoamus
LGVIAPGGIGTKAFWERIVSGVSATRTITAFDPAPFRSRMAAECDFDGARLGLSPRDTARLDRATQFALVATREALADSGIEIDETNAHRTGVSLGSAVGCTQKLEEEYVARSGGGQQWLVDHAAGTPHLYDYFVPSSMAAEVAWEAGAEGPTALISAGCTSGLDSLGHAVELIREGSADIVIAGGSDAPIAPITVACFDAIKATSPRNDTPDHASRPFDRTRSGFVLGEGAAVLVLEERESALRRGADVYAEIAGFAARANAHHMTGLRPDGLEMAAAITGALDDARIDRTSVGYVNAHGTATRQNDIHETAAIKHSLGEHAHRVPVSSIKAVIGHSLGAVGSIEAAASALVIRHGVVPPTAGLYEPDPQLDLDYVPLTARDQRTDTVLTVG

SEQ ID NO: 21791 - protein, 469 aa, Burkholderia thailandensis E264
MQTESNGRPGAGGGAARPALQQTLGTWQLWGIAVGLVISGEYFGWSYGWASAGTLGFVVTALFVAAMYTTFIFSFTELTTSIPHAGGPFAYARRAFGPAGGYLAGVATLVEFVFAPPAIALAIGAYLHVQFPGLEPKHAAMGAYLVFMALNIVGVQIAATFELVVTLLAIFELLVFMGVVSPGFAWSNFMKGGWAGADHFSAGAFHGMFAAIPFAIWFFLAIEGVAMAAEEAKNPKRSIPIAYVAGILTLVALAIGVMVFAGGAGDWTRLANINDPLPQAMKYIVGANSGWMHMLVWLGLFGLVASFHGIILGYSRQIFALAREGYLPEWLAKVHPRFKTPYRAILAGGVVGIVAIYSDELIQFGGQTLTANIVTMSVFGAIVMYIVSMAALFKLRRAQPRMERPFRAPLYPFFPAFALVAALVCLGTMVYFNALVASIFVAFVALGYGYFLATRAQRAAAPADALLEE

SEQ ID NO: 21792 - protein, 597 aa, Arabidopsis thaliana
MASEKSTSKGQAWFCTTGLPSDIEIEVDDMTFHLHKFPLMSKSRKLHRLITEQETKNGYPHIKLEDFPGSSESFEMVAKFCYGVKMDLSASTVVPLRCAAEHLEMTEEYSPDNLISKTERFLSHSVYKSLRESIKALKACESVSPLAGSLGITEQCIDSIVSRASSADPSLFGWPVNDGGGRGNISATDLQLIPGGAAKSRKKPSRDSNMELWFEDLTQLSLPIFKTVILSMRSGDLSSDIIESCLICYAKKHIPGILRSNRKPPSSSSTAVSENEQRELLETITSNLPLDKSSISSTTRFLFGLLRTAIILNAAEICRDLLERKIGSQLERATLDDLLVPSYSYLNETLYDVDLVERILGHFLDTLEQSNTAIVEVDGKSPSLMLVGKLIDGFLAEIASDANLKSDKFYNLAISLPDQARLYDDGLYRAVDVYLKAHPWVSEAEREKICGVMDCQKLTLEACTHAAQNERLPLRAVVQVLFFEQLQLRHAIAGTLLAAQSPSKRQVDAGKWKKTVRENQVLRLDMDTMRTRVHRLERECSNMKKVIAKIDKEGSSPATTTDRPRSWSITKKFGCKFKTQVCDSHEATMVDHRSRRS

SEQ ID NO: 21793 - protein, 393 aa, Streptomyces tauricus
LGVIAPGGIGTKAFWERIVSGVSATRTITAFDPAPFRSRMAAECDFDGARHGLSARDTARLDRASQFALVAAREAIADSGVEIDAGNAHRTGVSLGSAVGCTLKLEEEYVARSDGGKQWLVDHAAGTPYLYDYFVPSSMAAEVAWEAGAEGPAALVSAGCTSGLDSLGHAVELIREGSADIMIAGGSDAPIAPITVACFDAIKATSPRNDTPDHASRPFDRTRSGFVLGEGAAVLVLEERESALRRGAQVYAEIAGFAARANAHHMTGLRPDGLEMAAAITGALDDARIDREAVGYVNAHGTATRQNDIHETAAIKHSLGEHAHRVPVSSIKAVIGHSLGAVGSIEAAASALVIRHGVIPPTAGLHEPDPQLDLDYVPLTARDQPTDTVLTVG

SEQ ID NO: 21794 - protein, 269 aa, Triticum aestivum
  misc_feature (243)..(243): Xaa can be any naturally occurring amino acid
VTSRTSLYKKAFSYRSGIPGISSTHASEQYFVDEDDTVPQKVVVQKNSRRGVHFRRAGPRQRVNFESDEVKACIVSCGGLCPGLNTVIRELVCGLAHMYNVNNIFGIQNGYKGFYSSNYVAITPKTVNDIHKRGGTVLGTSRGGHDTKKIVDNIQDRGINQVYIIGGDGTQKGAYEIYKEIRKRGLKVAVAGVPKTIDNDIAIIDKSFGFDSAVEEAQRAINSAHVEACSAENGIGLVKLMGXRYSGFIAMYATLASPDVDCCWIPSLR

SEQ ID NO: 21795 - protein, 393 aa, Streptomyces purpurascens
IGVVAPGGIGTKQFWQTITGGRTATRTISLFDPAPFRSRIAAECDFDAAEQGLSAEDAERLDRAAQFALVALREAVTDSGLEPDPETAHRTGVSLGSAVGCTQKLEQEYLALSGGGQEWLVDHTAASAQLYDHFVPSSMAAELAWEAGAEGPCTVVSAGCTSGLDSVGHAVALIREGLADVMIAGATDAPISPITVACFDAIRATSPRNDDPATALRPFDRTRNGFVLGEGAAVLVLEELTAARARGAHVYAEIAGYASRGNAYHMTGLRTDGRELAAAVDAALDEARLGPDALGYVNAHGTATKQNDVHETAALKRSLGAAAHRVPVSSIKSMIGHSLGAIGSIEVAATALALEHGVIPPTANLTDPDPELDLDYVPLHARERDMSAALTVG

SEQ ID NO: 21796 - protein, 202 aa, Pseudomonas putida KT2440
MCVRRYPASSRIVMREKRVMRAHWLTVPVLALLASTSSWAADCPALLQGSLPELRGKGQVDLCERFAGKPLVVVNTASYCGFAPQFEGLEATYKEYHEQGLEMLGVPSNDFKQEDADSEKTAKVCYANYGVTFTMTKTQAVRGKDAIPLFAELASQSSAPKWNFYKYVVDRKGKVIGNFSSLTKPDDPAFRAAIEKAIASQP

SEQ ID NO: 21797 - protein, 332 aa, Medicago truncatula
MRGNQLQFSQFQKLRLQKALDKLESLSSDSSVLWSVLTSTYVFVRSLLSRYKPKAGDIVIGRVIEVGQNRWRLDINCGQNAYMMLSAMNMPDGLQPCPYFVVETNTEDAETKGRIEKTVLKILEESNMHEATESKVRNKRKKKNNSSSNKSEIPTTMCTMTVAVLLSASLASKPIQDILDHLLLGHAPDIPVMHVLKSPTLDKIWPDNAEVVRDFQHDGLYLQARSQKYGKLSSGQLLTVAPYLVKRQNQHFHHLEHYGIDLILGCNGFIWVGEHVEARDDMIEDQINQSDPQVLIPNKNYVSLEEQEKTILDWRQVNTYAGLLMLLEHCPL

SEQ ID NO: 21798 - protein, 157 aa, Bacteroides thetaiotaomicron VPI-5482
MSAFAIVLATTACAGNGGENKKSNEPTKEDNKMEVVSLNKAEFLKKVYDFEANPNDWKFEGKRPAIVDFYATWCGPCKALHPVLEELSKEYSGKVDIYQIDVDQEKELAAAFGIRSIPTLLLIPMKEEPRITQGALPKDQLKKAIDEFLLKQNNEAK

SEQ ID NO: 21799 - protein, 395 aa, Rickettsia conorii str. Malish 7
MRVKIIVPSLGESITEATIAKWYKKQGDSVKTDELLLEIETEKVTLEVNAPCNGTIGKISKTEGANVAVGEEIGEINEGASANTAGTNNESAKAQAVTQPTSEKPAVANNTLAPSVQKLVTENKLDPNNIKGTGRDGRITKGDVLATINTTTTSAPAISKSNEERVQRVRMSRLRKTIAQRLKDSQNTAAILTTFNEIDMSKVIALRNQYKEEFEKKHAVKLGFMSFFVKATIEALKLIPSVNAEIDGDDLVYKNYYDIGVAVGTEQGLVVPVVRDADKMGFAEVEKTIGILAKQAREGKLSMADLSGGTFSISNGGVYGSLLSTPIINPPQSGILGLHKTEERAVVIDGKIEIRPMMYIALSYDHRIIDGKEGVSFLVKIKQLIENPEKLLLNL

SEQ ID NO: 21800 - protein, 212 aa, Secale cereale
MDAADAGSPRFGHRTVCSEPPKRPAGRTKFKETRHPLYRGVRRRGRLGQWVCEVRVRGAQGYRLWLGTFTTAEMAARAHDSAVLALLDRAACLNFADSAWRMLPVLAAGSSRFSSAREIKDAVAVAVVEFQRQRPFVSTSETADGEKDVQGSPRPSELSTSSDLLDEHWFSGMDAGSYYASLAQGMLMEPPAARAWSEDGGEYSGVHTPLWN

SEQ ID NO: 21801 - protein, 450 aa, Lactobacillus brevis
MKVTVVGCTHAGTFAIKQILAEHPDAEVTVYERNDVISFLSCGIALYLGGKVADPQGLFYSSPEELQKLGANVQMNHNVLAIDPDQKTVTVEDLTSHAQTTESYDKLVMTSGSWPIVPKIPGIDSDRVKLCKNWAHAQALIEDAKEAKRITVIGAGYIGAELAEAYSTTGHDVTLIDAMDRVMPKYFDADFTDVIEQDYRDHGVQLALSETVESFTDSATGLTIKTDKNSYETDLAILCIGFRPNTDLLKGKVDMAPNGAIITDDYMRSSNPDIFAAGDSAAVHYNPTHQNAYIPLATNAVRQGILVGKNLVKPTVKYMGTQSSSGLALYDRTIVSTGLTLAAAKQQGVNAEQVIVEDNYRPEFMPSTEPVLMSLVFDPDTHRILGGALMSKYDVSQSANTLSVCIQNENTIDDLAMVDMLFQPNFDRPFNYLNILAQAAQAKVAQSVNA

SEQ ID NO: 21802 - protein, 268 aa, Secale cereale
MDVADIASRSGQQQQGHRTVSSEPPKRPAGRTKFHETRHPLYRGVRRRGRVGQWVCEVRVPGIKGSRLWLGTFNTAEMAARAHDAAVLALSGRAACLNFADSAWRMLPVLAAGSFGFDSAREVKAAVAVAVVAFQRKQIIPVAVAVVALQKQQVPVAVAVVALQQRQVPVTVAVVALQKLQVPVAVAVVALQKKQIILPAACLAPEFYMSSGDLLELDEEQWFGGMDAGSYYASLAQGMLVAPPDDRARPENGEQSGVQTPLWSCLFD

SEQ ID NO: 21803 - protein, 601 aa, Shewanella oneidensis MR-1
MSLPSSSHNKIANRLAAIRSELANANLDAFIIPRADEYLGEYVPEHNERLYWATDFTGSAGMAIVLKDKAAIFTDGRYTVQVRLQVDANLFSYESLTDTPQIEWLCDTLPAGARVGFDARLHTLAWFENAKATLAKAQIELVAVEQNPIDKHWQNRPAPSSAAITLFSDDSAGKTSLQKRTEIGALVKKAGADVALITALDSFCWLLNIRGNDVPRLPVVLGCALLHANGDMQLFTDLSKLPEGIEEHVGTGVSFNSEAALADTLASLQGVKLLADPNSANAWAQNLARDAGAKLIAGIDPVSLPKAQKNAAELAGMRASHIRDGVAVSRFLAWLDAEVAANRLHDEATLADKLESFRLEDPKYREPSFDTISAAGANAAMCHYNHNNGTPAMMTMNSIYLVDSGAQYIDGTTDVTRTIAIGEVSDEQKKMVTLVLKGHIALDQARYPKGTTGQQLDAFARQYLWQHGFDYDHGTGHGVGHFLSVHEGPQRIGKNLNAIALIPGMVLSNEPGYYRADCFGIRLENLVVVQHCEALKDAEREMYEFDALTLIPMDARLIDKSLLTQGEIDWFNAYHQKVFNTLSPLMSGTELEWLTQATKAI

SEQ ID NO: 21804 - protein, 486 aa, Carboxydothermus hydrogenoformans Z-2901
MGSYPLIFELSKEGRTGFELPELDVPAKDINNLIPEEMQRKTEPDLPEVAEVDVVRHYVGLSRRNFGVDNGFYPLGSCTMKYNPKINEDTSRLAGFAELHPYVPEELAQGALELLYDAEQYLKEITGMDRFTFQPAAGAHGEFTGLMIIKAYLEKKGEKRTKVIVPDSAHGTNPATAAMCGFNVISIKSNERGLVDPEELAKVLDKEVAALMLTNPNTLGLFEEEIVKIAKMVHDVGGLLYYDGANLNAIMGVTRPGDMGFDVMHINLHKTFSTPHGGGGPGSGPVGVKAHLAEFLPVPVVEKDGDRYYFNYNLPNSIGKVRTFYGNFLVVVKAYTYLKALGGEGLTDVSQKAVLNANYLREKLKKYFYLPYDRLCKHEFVLSGKWQKEKGVRTLDIAKRLLDYGVHPPTIYFPLIVDEALMIEPTETESKETLDRFIEVMIAISREVEENPELLHEAPHVTPVKRLDEVGAARNPILRWSKDWQK

SEQ ID NO: 21805 - protein, 226 aa, Candida albicans
MALSDEQVKSELSKMQAFIEKEAKEKAKEIKLKADEEYEIEKASIVRSETAAIDSTYEQKLKKASLAQQITKSTIGNKTRLRILSTKDEVLHEIFDEAEAELKKITKDKKQYKPVLVGLIEEGVLALMEPKVSIKVREQDVDVAKEAITEAAKNFEEKAKFKVEISIDDKNFLAKDIAGGIVVVNGSGKIEVDNTLEERLKILSEEALPAIRLELFGPSTTRKFFD

SEQ ID NO: 21806 - protein, 632 aa, Schizosaccharomyces pombe
MSIDCLYRRSSLFDTSFVPLHSSIPATSKMSASNSDVNAPISPVVDEGKSELVSPTLERLVAPFNCSPSSTPLQDVAGVGSKMSDTLWMGDLEPWMDATFIQQLWASLNEPVNVKVMRSKASSSETLISYCFVQFSSSAAAERALMKYNNTMIPGAHCTFKLNWATGGGIQHNNFVSRDPEFSIFVGDLLPTTEDSDLFMTFRSIYPSCTSAKIIVDPVTGLSRKYGFVRFSSEKEQQHALMHMQGYLCQGRPLRISVASPKSRASIAADSALGIVPTSTSNRQPNQDLCSMDPLNTTVFVGGLASNLSEKDLQVCFQPFGRILNIKIPFGKGCGFVQYSEKSAAEKAINTMQGALVGTSHIRLAWGHNTLPVSALSQSQSQVSDEGFDRTLSANQIFGMNQSVIGANSGSSNSSGSSLKSAPVSPRTAAAQSLLPNSVVSSINGMNSVNFSTISPPPLSRSASISPTLSGSGSGLTPLSSHFPSAATGLVGGQVYPQSSVLQSSKINGSAKVQPSVKLPEWLQPFSGNNHNSFATQDLLTRVSSLKLVDDEQPASLNGSAFQARASRPWNLGRERQSSLIDLRHELEQNENGLEKSGFGLNLRGRLPPRSYSTFNCTGQYLQPSLRLSRDS

SEQ ID NO: 21807 - protein, 644 aa, Aspergillus oryzae
MPMLKDPSKKYKRFKPLHLPDRQWPNKVIEKAPRWLATDLRDGNQSLPDPMDGEQKFRFFKMLVDIGYKEIEVSFPSASQTDFDFTRRLVETPGVVPDDVWLQVLSPCREDLIRRTVDSLKGAKKAILHIYLATSPCFRRIVFNMDKQKSLEMAVRCTKFARSITKDDPSTAGTEWHFEFSPETFSDTEPEFAAQVCQAVKEAWGPTEEAPIIFNLPATVEMSTPNVFADQIEYFCRHVSEREKYVVSIHPHNDRGCAIAAAELAQMAGAQRVEGTLFGNGERTGNVDLVTLALNLYTQGITPNVDFSDINAVIKVVEESNKIPVNERWPYGGQLVVCAFSGSHQDAIKKGFKLRDDATAASDEEVQWEIPYLPLDPQDIGRTYEAVIRVNSQSGKGGAAWVILRSLELDLPRALQVEFSKIVQKKSEEVSRELRASEIVGLFEEAYHLKSNPRFNLVDYNITTDRSTSPAPPEPGKALNTKNLKRRFTGVIEIDGVQHAITGVGPGAISSLAGALSTLGIDLDVVDYKEHSIGLGREVKAATYIQCTAAGSKEQVWGVGIHQDVVQASLIALLSAASSFLTSRAGSPAPFRPIRSNTLTDEDLQALETLTGSSDLATNLAKAANGSSKSQVDIDALTRQAESQ

SEQ ID NO: 21808 - protein, 568 aa, Oryza sativa
MASSALICDTEQWKGLQAHVGAIQKTHLRDLMDDAERCKAMTAEYEGIFLDYSRQRATGETMEKLFKLAEAAKLKEKIEKMFSGDKINSTENRSVLHVALRAPRDEVIKSDGVNVVPEVWGVKDKIKQFSETFRSGSWVGATGKALTNVVSVGIGGSFLGPLFVHAALQTDPEAAESAKGRQLRFLANVDPVDVARSIKDLDPETTLVVVVSKTFTTAETMLNARTLQWSGLSLLLGPDAVAKHMIAVSTNLELVEKFGIDPKNAFAFWDWVGGRYSVCSAVGVLPLSLQYGFPIVQKFLEGAASIDKHFRSSSFEKNIPVLLGLLSVWNVSFLGYPARAILPYSQALEKFAPHIQQLSMESNGKGVSIDGVQLPFESGEIDFGEPGTNGQHSFYQLIHQGRVIPCDFIGVVKSQQPVYLKGEIVSNHDELMSNFFAQPDALAYGKTPEQLHSEKVPEHLISHKTFQGNRPSLSLLLPSLSAYEIGQLLSIYEHRIAVQGFLWGINSFDQWGVELGKSLASQVRKSLHASRMEGKPVQGFNSSTASLLTRYLAVEPSTPYNTTTMPKV

SEQ ID NO: 21809 - protein, 418 aa, Anabaena variabilis ATCC 29413
MLSVNVKIGRRPLTLRVAVVGSGPAGSSAAETLAKAGIETYLFERKLDNAKPCGGAIPLCMVSEFDLPPEIIDRQVRKMKMISPSNREVDINLIKEDEYIGMCRREVLDGFLRNRAAKLGANLINATVHKVDIPGNNSDPYTIHYVDHNEGGAQGVTKTLKVDLIIGADGANSRIAKEMDAGDYNYAIAFQERIRLPEDKMAYYNDLAEMYVGNDVSTDFYAWVFPKYDHVAVGTGTMQVHKASIKQLQAGIRARASEKLAGGKIIKVEAHPIPEHPRPRRVVGRIALVGDAAGYVTKSSGEGIYFAAKSGRMCAETIVEVSQNGSRIPTENELKIYLKRWDKKYGLTYKVLDILQTVFYRSDATREAFVEMCADLDVQKLTFDSYLYKTVVPANPITQLKITAKTIGSLIRGNALAP

SEQ ID NO: 21810 - protein, 345 aa, Carica papaya
MAMIPSISKLLFVAICLFVYMGLSFGDFSIVGYSQNDLTSTERLIQLFESWMLKHNKIYKNIDEKIYRFEIFKDNLKYIDETNKKNNSYWLGLNVFADMSNDEFKEKYTGSIAGNYTTTELSYEEVLNDGDVNIPEYVDWRQKGAVTPVKNQGSCGSCWAFSAVVTIEGIIKIRTGNLNEYSEQELLDCDRRSYGCNGGYPWSALQLVAQYGIHYRNTYPYEGVQRYCRSREKGPYAAKTDGVRQVQPYNEGALLYSIANQPVSVVLEAAGKDFQLYRGGIFVGPCGNKVDHAVAAVGYGPNYILIKNSWGTGWGENGYIRIKRGTGNSYGVCGLYTSSFYPVKN

SEQ ID NO: 21811 - protein, 247 aa, Prosthecochloris aestuarii DSM 271
MIKLVLLRHGESQWNRENRFTGWRDIDLSEKGLAEAANAGVLMKEEGLTFDIAYTSVLKRAIRTLWNALDTMDLLWVPVEKTWRLNERHYGSLQGLNKTETAQLHGEEQVLVWRRSYDTPPPPLEKTDERYPGNDPRYASLSSEEIPVAECLKDTVARFLPYWHETIAPQIKAGKKVLIVAHGNSLRALVKYLDNISEEDIVGINIPTGIPLVYELDDDLKPIRHYYLGDQEAAAKAAAAVANQAKG

SEQ ID NO: 21812 - protein, 1040 aa, Prosthecochloris aestuarii DSM 271
MTNSSTSATAEFRTLVVLEALKERRPEHEVAAAFNISRQELSEWKEQFLSKADSLFRPELTENKPEKCPDDIDWQKVFHAISHPTIILDENQIILSANPATAKAFGLDTPDLIGRKCTELFHATWCTPDRCPMQEVKMTRNPAEGIMISETLGRYFLVSCTPVLNTTGDVEKIIHIATDITQQIKAEQTLQRSDSILSTLQFVTTELQNSHRFEETINRVLSMLGTVLEVNRAYIVECQAVDTKTPFTNLRYLWQDPYALSKKQKPLFQEPLSDRGERASLLKTLEKNLVLQRITNDTSGAERAILQAAHITSILAIPINIEKKWWGFIGFDDCRNDRSWTRTEIEALRSAAETLGAAIIHQRTTLKLKESEARNGAMLNALPDMLFVLDKEGVCLDFHARNNNEPHPPAKQFIGKSLKEIFPEAHSSALQHLIHEVSESGAPKIHEYQMKRSGKTSHYEIRVVPLGTDKTLNIVRNMTDQKETENKLLRTNRKLENASRKAKKLAEQAQEASKAKSEFLANISHEIRTPMNGVIGMTGLLLETDLTPQQHRYAGTIASSAQSLLDLINDILDVSKIEAGKLTLEILDFDLQELMDDFAASFAIQAEQKNLEFLCSIEPGIPTRLTGDPGRLRQILMNIAGNAVKFTSKGEIAIYVTLDSDCDDQVVLRFCIRDTGIGIAKEKIDTLFEKFTQIDASATRQYGGTGLGLSIAKDLVELMQGSIGVESTVNQGSLFWFTAKLNRQTHATLQAQESKNRSLFGQKALIVDDNATNREILSKRLLSWGMRPEESDNGQDALDMLIRASTSTDAFTIAVIDMQMPEMDGVMLGKAIREHEALMSLQMIMMTSLGNNGESSLAEKAGFSAWLQKPVQIKKLKNALIALSATQEPEADEQPSQKKPNNLLNRFAECKARILLVEDNIVNQQVAMLMLKKFGLHVDGVANGKEALSALMSLPYDVVLMDIQMPVMDGLEATRRIRNGECGTSAIPIIAMTAHAKQSDRELCLATGMNDYVSKPVNQQALADTLEKWLPKHSDTQNAT

SEQ ID NO: 21813 - protein, 625 aa, Erwinia carotovora subsp. atroseptica SCRI1043
MAIEINVPDIGADEVEVTEVLVKVGDKVEAEQSLITVEGDKASMEVPSPQAGVVKEIKVSVGDKVETGKLIMIFDSADGAADAAPAKAEEKKEAAPAAAPAASAAKEVNVPDIGGDEVEVTEVLVKVGDTVAAEQSLITVEGDKASMEVPAPFAGTVKEIKISNGDKVSTGSLIMVFEVAGSAPAASAEKTEAAPAAAPAASAAKEVNVPDIGGDEVEVTEVMVKVGDKIAAEQSLITVEGDKASMEVPAPFAGTVKEIKISTGDKVKTGSLIMVFEVEGAAPAPAAKQEAAAPAPTAKSAAAPAAKAEGKGEFAENDAYVHATPVIRRLAREFGVNLAKVKGSGRKGRILREDVQAYVKDAVKRAEAAPTAAAGGGLPGMLPWPKVDFSKFGEVEEVELGRIQKISGANLSRNWVMIPHVTHFDKTDITDLEAFRKQQNVEAEKRRLDVKITPVVFIMKAVAAALEQMPRFNSSLSEDAQRLTLKKYINIGVAVDTPNGLVVPVFKDVNKKGIVELSRELMAISKKARDGKLTAGEMQGGCFTISSLGGIGTTHFAPIVNAPEVAILGVSKSAMEPVWNGKEFTPRLMMPMSLSFDHRVIDGADGARFITIINNTLSDIRRLVM

SEQ ID NO: 21814 - protein, 470 aa, Burkholderia sp. 383
MKAESNGRPAAGAKSSGQPALQQTLGTWQLWGIAVGLVISGEYFGWSYGWASAGTLGFVVTALFVAAMYTTFIFSFTELTTSIPHAGGPFAYARRAFGPTGGYLAGAATLVEFVFAPPAIALAIGAYLHVQFPGLEPKHAAMGAYLVFMALNIVGVQIAATFELVVTLLAIFELLVFMGVVSPGFAWSNFMKGGWSGADHFSVGAFHGMFAAIPFAIWFFLAIEGVAMAAEEAKNPKRSIPIAYVAGILTLVALAIGVMVFAGGAGDWTKLANINDPLPQAMKYIVGANSGWMHMLVWLGLFGLVASFHGIILGYSRQIFALAREGYLPEWLAKVHPRFKTPYRAILAGGVVGIAAIYSDELIQFGGQTLTANIVTMSVFGAIVMYIVSMASLFKLRRSQPNLERPFRAPLYPIFPAFAILAALVCLATMVVFNGLVALVFLGFLAFGYAYFLATRSQRASAPGDVLLEE

SEQ ID NO: 21815 - protein, 338 aa, Arachis hypogaea
MAVYDQSGDRNRTQIDTSRKRKSRSRGDGTTVAERLKRWKEYNETVEEVSTKKRKVPAKGSKKGCVKGKGGPENSRCSFRGVRQRIWGKWVAEIREPNRGSRLWLGTFPTAQEAASAYDEAAKAMYGPLARLNFPRSDASEVTSTSSQSEVCTVETPGCVHVKTEDPDCESKPFSGGVEPMYCLENGAEEMKRGVKADKHWLSEFEHNYWSDILKEKEKQKEQGIVGTCQQQQQDSLSVADYGWPNDVDQSHLDSSDMFDVDELLRDLNGDDVFAGLNQDRYPWNSVANGSYRPESQQSGFDPLQSLNYGIPPFQLEGKDGNGFFDDLSYLDLENVDA

SEQ ID NO: 21816 - protein, 468 aa, Thermus thermophilus HB27
MSELEIRQIGEEYRWHFIDEIRPVFKAEKGLTRRVIEAISYHKGEPEWMLKFRLRAFEIFQKKPMPTWGPDLSGLNLDDLVYYVKPTEVRDAKSWEEVPEEIRRTYERLGIPEAERKVLAGVGAQYDSEMVYHRVREELERQGVIFVAIEEGMKKYEDLFKEYFAKVVPPEDNKFAALNSAAWSGGSFVYVPPGVKVELPLQAYFRVNTPEFGQFERTLIIVDEGAEVHYIEGCTAPMYSTESLHTGVIEIVVKRGARSRYTTIQNWSTNMYNLVTQRALVYGDAYHEWVDGNLGSKVTMKYPSSYLLEPGARSEILSIAFAKTGQHQDTGGKLILAAPHTSGTIVSKSISKGEGRASYRGLVKVMEGARHGKVNVECDALLIDPESRTDTYPYIEIEEETAHVGHEATVSKINDEQIFYLQSRGLKEDEAAALIVRGFIEPIAKELPLEYAVELNKLIELEMEGSVG

SEQ ID NO: 21817 - protein, 431 aa, Thermus thermophilus HB27
MQVLDKTQVEAVSKALGEPAWLLEKRLKALEAFARLPYPSKKDENWRYTDLSEAPLELPVEAPKGLRLSRDDLPEPVKRRLERTDVSGFLVFVGPDLVYAEVPEALKEKGLVFTSLAEALKTHPDKVEAALFQAVYTEDKFAAQNSAFFTHGAFLYVPAGLEVEKPLGVFKVLLEGEKASAGRSLLFLEDNAKAAYIEEYLSLDLPPTLHLSATEMVLRPGARLRHAHVQTFGEGVWHFHRQRALLERDSGLNDLVVNLGGAYARSEVASELVGPGAESEMLGLYFGHGRQQFDHYTLQHHVEHHTRSDLLYKGAVKDEARAVFSGLIRLEKGAQKTDAYQANRNLLLSPTARVDSIPQLEIGANDVRCTHGSTTAPVDEMQLFYLQSRGLPRGLAQELLVKAHLADVLSRIPLKALRAHIEAVIEEKVRI

SEQ ID NO: 21818 - protein, 393 aa, Streptomyces albus
MEVLAPGGVGTKNFWSLLSEGRTATRGITFFDPAPFRSRVAAEIDFDPYAHGLSPHEVRRMDRAAQLAVVAARGALADSGLETAALEPHRTGVTVGSAVGATMGLDEEYRVVSDGGRLDLVDHAYAVPHLYNHLVPSSFAAEVAWAVGAEGPSTVVSTGCTSGIDALGYALELVREGSVDVMVAGASDAPISPITMACFDAIKATTPRHDDPEHASRPFDGTRNGFVLGEGSAFFVLEEWESARRRGAHVYAELAGYATRSNAYHMTGLRTDGAEMAEAIRLALDEARLAPEAIDYVNAHGSGTKQNDRHETAAFKKSLGAHAYATPVSSIKSMVGHSLGAIGSIEIAASALAMEHHTVPPTANLTTPDPECDLDYVPLHAREQRTDAVLSVG

SEQ ID NO: 21819 - protein, 164 aa, Pseudomonas putida
MSLNDLNTLPALLPKRTLPLRNSFQPHHRARQGHREVADSIPACLVSNWWTSDFVEAKFSLYFLALVDPATIPADDDARHQWMKSIPGVLELTHNHGTERDADFAYHDGNTDPRGFGHICVSVPDVVAACERFEALQVPFQKRLSDGRMNHLAFIKDPMVTGSK

SEQ ID NO: 21820 - protein, 2761 aa, Ustilago maydis 521
MHPRQPSGPGSTDAMEIYDHLHTPKHEIDVADAFAAAMPSAIDPNQPSLRSVPEDAQLDTQQLSSLNASPLASSLQPSSQVAQQESPTSRRSDKLATSSYGLVQPGGRPDLASRRSSDVLKSLPGLPLALTNAEQTFLPATLNGGTSSAIPHPSAAIGSLVDHRAPPADTLPPQHIPRPLPGSATPSASASPSAMQTPPKKTPYDAIAAGVQTLAMPNSISVGPLSPPESDPHRSMMDSNRKSIDDIRRNHAARAAQRQSNNSSPIETRPGNGLVPDSAYTPTRAHAQYQSEFASSPDPTQRQRRAMASEPPRPASVLDTRAAQMQAVQRRQHDSRLGQGSSDTFDATDTLGSSRDTQLDRASQQHLQLRAAREQELERERLQHQQLQEQQREKEQQRQREKLKEREREKEREREREKERGERDRDRDRERRSRRLLGDYALGKTLGAGSMGKVKLGVKMGNGEKVAIKIIPRHTSMAAAQSPRAAVDENGKPQPPPPPPTASFLAKAAAKDQSKEIRTIREGSLQILLHHPYVCGMREMIIHTNHYYMVFEYVNGGQMLDYIISHGRLRERSARKFARQIGSALEYCHRNSIVHRDLKIENILISKTGNIKIIDFGLSNLFSPHSHLSTFCGSLYFAAPELLNAKVYTGPEVDVWSFGIVLYVLVCGKVPFDDQSMPALHAKIKRGQVEYPAWLSGECKHLLSRMLVTNPANRATLAEVLAHPWMVKGYEGVPDPHLPDRTPLRPHNIDQEVIKGMTGFEFGSPEAITAKLIEVLNSEAYQTSLYHWELKNLPASLTGLSTVSNSGSSIDSPGLNRPSTRGSFTATSGSDTVKSKAGSRRFSGIDFYKKKLTTNPLAAAFGSKDDSAVGSANGSSNGLGSGTGLLPFGKEPLDPTRGFHPLISIYFLVKEKMERERLYGHSFFASSNLSLNGPPVPSTGAVAGAGTGARAAAAGAMPTAADIPQEALRVPEVPHVSHRAYDPSRQQEAALASPAPPRPAAAMIPVPASPTPVFESREKSRPSGLMAGPPRARANADEMEAALREKCLPSPKDAGFAPGIGGMAPVPAASTPGMRQSFSVVPPGPEVAIGHNHRHSMMAPDISMAITNNHKRSVSLTARRPPGAAAAGRTPVGAMVEPSTPDAFSMDTRRMSTMSPARLPARASYIATPSKSEAGSAEPSSSPAATAHNTSSTLGYGATLARRFSSFMGRSPSQPLDTEARERKKQSRMSMPLGGLPQQQQQQHQQRRGSAHMPLSEVDEADTGTDVDAYDYDEVEEHLVTHDEDMPLGSGTTVRRSGTMGDMPASHANTRVSEASMGALSVGRAAGLSMSPKSTAAAKSGRRPSTGISPSTSMPLNVLDAGGAARQKEDALQQVSPSNARTGWMGPSTPGQAEVLPALVTRRRFGGGSNATGGQQNGSSASEGGSKPIFLKGLFSVQTTSTKPRTVIHASLVKVLDRIGIQYRELRGGYECVHLPSLDFSGSDSLGRGNARIPLETMAAAAAADAEASERSPTSEENNRQPKRKPSRLSFVSGRSKDKDRANRKEGSVAESIGALTGAGGTVRSRTPSLTSNAAFANADSTTLPPLPPKTPSKPSLLIRSPRQRADSMGAASMLGPSGSRDSNLMLDTTVAAGSGGDACALSPASAAGTVTARTMNAAQATELAVRFEIFVVKVPLLLGVNGLQFRRVGGNPWQYQMLAKRILQELKLPVLWNDRGSWIRMVAFHVWKHSRFTIHDSRFGVSKEAGEIHREWSRSRVGRIVCETRHAAVEPVLGTTFYHTFILTIKNAADDHKQVWQRYISPARIRNETCSISKMHKDYTTLHSVAPDKARIDNLCCDIERCCFTDTIHTQGSFHSSSSAHKTLLSDIPSISPRSLVKYLDSYVVGQTRAKKVLAVGVWNHYLRVASNQRMKHEAEARLEAQQQQQQQQQQQQQLSEEETETQLQRNCTIPDHGVSEAASRSLRLGKYKARSEEAAGPISNPTAMQEKDEAMASLQDSWRSQHQIEQERNAERARDPHGEATRSLMFGRSEREWLVNAGGPSAIIEDDSKVAIQNGSGYAGRIAPKFGDDLKPPEKPEKPEKPMKRVSAQTPAEEASWKLEQRKWSSTTAAQENALAEAASRMHNAVLSDYTRDFHQKDHVVEGTSRIGVFGADEPLYFSSNTMRGSQHAGVRGPGSQSQMSRTDETENKWESSQERAAYAAGIAQERTKRALRLARERLSTSRNSDHPSERASTVDVCHVSDCTPRTHDAGKETASTSNPGIAFLSTQPGSLPFFEKSNILLLGPSGSGKTLLLRTLAQALDVPFVHVDATPLTMAGYVGEDVESIIQRLLVEAGWDVDRAQRGIVCIDEIDKLRKTGLGGGGGGAGGAGGGGGKDVGGEGVQQALLRILEGTTIQIANKAGANAGASAAGTATAASKVPKSYPRQAATGDVNGVETAGGLGPWYNHRRAQADSADAKWNSNSLSSSQTQAASLSVDTSSILFVLSGAFVGIDHVIRNRLDRLSGDPTTLNVSSEDQNEKPHAATLSQCDLLSRLEPSDLEQYGMIPEFIGRVPVSVVLNPLSHQDLIRVMTEPRNSLVDQYTSLFKLNGIELHISRGAIEEVVHRAMGTCSAANSKALVRNSADRGGGGGGARSLRRIMEDVLLDAFYESYGSSSVKYILVDRQSVRDTSEVKLFSRGQKLDFEARVKTEAQDWCTRQQQQKQTRHQGANPAKAIRKDGGALGDMDAARTAMARHKARALIRSRLRRTNRLVDPVIYV

SEQ ID NO: 21821 - protein, 968 aa, Eleocharis vivipara
MATKNVEKLASIDAHLRLLAPKKVSEDDKLVEYDALLLDRFLDILQALHGEDLKETVQECYELAAEYEKNLDQAKLDELGNVLMSLDAGDSIVLAKSFSHMLNLANLAEEVQIAYRRRIKKLKKGDFGDENSATTESDLDETLMRLVSDLNKSPAEIFEALKNQTVDLVLTAHPTQSVRRSLLQKHARVRDCLAQLNEKDITPDDKQEIDEALQGAIQAAFRTDEIRRAPPTPQDEMRAGMSYFHETIWKGVPKFLRRVDTALKDIGINERVPYNAPLIQFSSWMGGDRDGNPRVTPEVTRDVCLLARLMAANMYYSQIEDLMFELSMWRCSEELRQRVELLHSSIKKDNKHYIEFWKKVPPNEPYRVILGDVRNKLYNTRERARHLLSQGQSDINEEATFTNLEEFLEPLELCYRSLCACGDRVIAEGSLLDFLRQVFTFGLSLVRLDIRQESERHTDVLDAITTYLGIGSYREWSEEKRQEWLISELTGKRPLIPHDFPQTEEVKDVLDALHVISEFPSENFGPYIISMATSTSDVLAVELLQRECHVKKPLRVVPLFERLADLKAAPAVMTRLFSMDWYRNRINGKQEVMIGYSNSGKDAGRLSADWKLYKFQAELAKIAKQFGVKLTLFHGRGGTIGRGGGPSHLAILSQPPNTINGSLRVTIQGEVIEQSFGEEHLCFRTLQRFTAATLEHGMHPPVSPKPEWAALMDEMAIIATEEYRSYVFKEPRFVEYFRLATPELEFGRMNIGSRPSKRKPSGGIVSLRAIPWIFSWTQTRFHLPVWLGFGTAFKHVIEKDVRNFQILREMYNEWPFFRVTLDLVEMVFAKGDPKIAAMYDKLLVSEELLPFGEKLRANYEETKNLLLQVAGHKDLLEGDPYLKQRLRLRDAYITTLNLLQAYTLKRIRDPNYNVKFRPHLSKEIMESKTDKPADELVKLNPASEYAPGLEDTLILTMKGIAAGFQNTG

SEQ ID NO: 21822 - protein, 269 aa, Rhizopus microsporus var. rhizopodiformis
RTFYNELRVAPEEHPVLLTEAPLNPKSNREKMTQIMFETFNAPAFYVAIQAVLSLYASGRTTGIVLDSGDGVTHTVPIYEGYALPHAILRLDMAGRDLTDYLMRILAERGHAFTTTAEREIVRDIKEKLCYVALDFEQEMQTAAQSSALEKSYELPDGQVITVGNERFRAPEALFQPALLGHESVGIHETTYNSIMKCDVDIRKDLYSNIVMSGGTTMYPGIADRMQKEITALAPSSMKIKIVAPPERKYSVWNGGSILASLSTFQQMW

SEQ ID NO: 21823 - protein, 399 aa, Clostridium acetobutylicum ATCC 824
MKIIVQKFGGTSVSTPERRSFVVQKVSSAIKEGYSPIVVVSAMGRAGEPYATDTLLSLIDNDFKETNKRASDLLMCCGEIISTVIMSNELKRAKIAAIPVTGGQAGIITDDEYSNASVKKVNPENLLKLLCHNEVPVVAGFQGKSQNGFFTTLGRGGSDVTASLIGCAVNAEKIEIYTDVDGIMTADPRIVQDAALIETISYNEVFEFAEQGAKVIHPRAVEVAMNGNIPLIIKNTLNDCKGTLINREGDSLNKNLITGITSLSGRVQVTTKFKDSKIKSTEFLSLLGERNINIDLINVFPKENIFTIDKKDLNKLKDTLIKTKVQYYLEDDCSKIAIIGNRICGVPGVMAKILKAITKEGIEVLQTADSHTTIWCLVKSNVRNKAINALHREFNLNNK

SEQ ID NO: 21824 - protein, 469 aa, Zymomonas mobilis subsp. mobilis ZM4
MSDTRPILIWFRHDFRLRDNAAITAAIQSRNPVICFYIQESADAKTESAADWWVAESLLALNRQLKEKGGQLHLFEGDAEKIIPEIVQQSHACKLFWNRRYDFKGKETDQILKKSIRAMGLEVQSFPNNLLNEPWTVKNDKGQPFRIFSAYWRAVQRHMNIQAVLPCPENWVFSTREIRHCLGYKDIAILAKETQDSSWKIKLKQSHRFGENEAHKQLKSFIENDLAHYAKERDFPAKDGTSLLSAFLRSGQISSKQIWHEVTKNGSGEGTSKFLEELGWREFAWSVLWEHPDLNQHNLRPEFDKMPWKKASDNLQRWKEGQTGYPFIDAGMRALWQTGFMPNRLRMVTASFLVKHLLIDWREGKKWFAQTLVDYDPACNATNWQWVAGSGIESAPYFRIMNPILQSQKFDPDGQYIREWVKELADVSTAFIHTPWKADKQPANYPLPIIAHEEGRNRALRAWKEIRHA

SEQ ID NO: 21825 - protein, 319 aa, Wolbachia endosymbiont of Folsomia candida
SCDKKIQLGINLTKGLGAGALPDVGKGAAEESIDEIMEHIKDSHMLFITAGMGGGTGTGAAPVIAKAAREARAAVKDRAPKEKKILTVGVVTKPFGFEGVRRMRIAELGLEELQKYVDTLIVIPNQNLFRIANDKTTFSDAFKLADNVLHIGIRGVTDLMVMPGLINLDFADIETVMSEMGKAMIGTGEATGEDRAISAAEAAISNPLLDNVSMKGAQGILINITGGGDMTLFEVDAAANRVREEVDENANIIFGATFDQARRGRVRVSVLATGIDSNVNRDDNSSSNQSESSEQEKLKWAYSQNVGVQDKLPETKEYS

SEQ ID NO: 21826 - protein, 393 aa, Streptomyces venezuelae
IGVVAPGGIGSRAFWDLLAAGRTATRGITLFDPVGLRSRIAAECDFDPAEHGLDPDLSRHADRYIQFAVVAAGEAVRDSGLDTDAEDPWRVAVSLGSAVGGTTRLEHDYVLVSEGGRRWDVDHRAADPKLHMAFSPSTLSSVVAEQFGARGPVQTVSTGCTSGLDAVGYAFHTIAEGRADVCISSASDSPISPITMACFDAIKATSPDNDDPEHASRPFDNNRNGFVMGEGAAVLVLEEYEHARARGAHIYCEIGGYATFGNAYHMTGLTGEGLEMSRAIDSTLDQARLDPTRIDYVNAHGSGTRQNDRHETAAVKRSLGSHAYDTPMSSIKSMVGHSLGAIGAIEVAACVLALKHQVVPPTANYETPDPECDLDYVPRDARPRKLRNVLSVG

SEQ ID NO: 21827 - protein, 269 aa, Rhizopus microsporus var. oligosporus
HTFYNELRVAPEEHPVLLTEAPLNPKSNREKMTQIMFKTFNAPAFYVAIQAVLSLYASGRTTGIVLDSGDGVTHTVPIYEGYALPHAILRLDMAGRDLTDYLMRILAERGHAFTTTAEREIVRDIKEKLCYVALDFEQEMQTAAQSSALEKSYELPDGQVITVGNERFRAPEALFQPALLGHESVGIHETTYNSIMKCDVDIRKDLYSNIVMSGGTTMYPGIADRMQKEITALAPSSMKIKIVAPPERKYSVWIGGSILASLSTFQQMW

SEQ ID NO: 21828 - protein, 270 aa, Secale cereale
MDVADIASPSGQQEQGHRTVSSEPPKRPAGRTKFHETRHPLYRGVRRRGRVGQWVCEVRVPGIKGSRLWLGTFNTAEMAARAHDAAVLALSCRAACLNFADSAWRMLPVLAAGSFGFGSPREIKAAVAVAVIAFQRKQIIPVAVAVVALQQQQVPVAVAVVALKQKQVPVAVAVVALQQLHVPVAVAVVALQQQQIILPVACLAPEFYMSSGDLLELDEEHWFGGMDAGSYYASLAQGMLVAPPDERARPENGEQERRPDAAMELFVRLI

SEQ ID NO: 21829 - protein, 393 aa, Streptomyces nogalater
IGVVAPGGIGVKAFWDLLTAGRTATRGITFFDPAGLRSRIAAECDFDPAAHGLDAEQVQRADRYIQFALVAGEEAVRDSGLDLAREDPWRVGVSLGTAVGGTTRLEHDCVLVSHRGQRWDVDHGEAEPQLHRAFSPSTVASAVAERFGARGPVQTVSTGCTSGLDAVGYAFHTVQEGRADICVAGASDSPISPITMACFDAIKATSPNNDDPAHASRPFDNNRDGFVMGEGGAVLVLEELEHARARGAHVYCEFGGYATFGNAYHMTGLTKEGLEMARAIETALGQARLDPTAIDYVNAHGSGTRQNDRHETAAVKRALGHHAYDTPMSSIKSMVGHSLGAIGAIELVACVLALAKQVVPPTANYEIPDPECDLDYVPRVARERKLTSVLSVG

SEQ ID NO: 21830 - protein, 261 aa, Halobacterium sp. NRC-1
MTAFTLDHVMMRVGDLDASLDWYGDHMGYVEHARWEADTFTNVYIGPEDPADDAALLELTYNHDTADYDNGDAFGHIAVRVDDVSDAYEELLAGGVADYRDPESCGGSYAFVKDPDGHEIELVAGDAGQRWSIDHTMVRVADATQHLGFWTRVFGYEHTGRWEADSFANYFMKPPAASDAAMAVELTYNYDDRTYTFGDGWGHLAVRADSLQDDWATLLERETADYRDPASCDMNYAFTKTPDGHEIEVLNPESSPMDRSA

SEQ ID NO: 21831 - protein, 269 aa, Rhizopus oryzae
HTFYNELRVAPEEHPVLLTEAPLNPKSNREKMTQIMFETFNAPAFYVAIQAVLSLYASGRTTGIVLDSGDGVTHTVPIYEGYALPHAILRLDMAGRDLTDYLMRILAERGHSFTTTAEREIVRDIKEKLCYVALDFDQEMQTAAQSSALEKSYELPDGQVITVGNERFRAPEALFQPSLLGLESSGIHETTYNSIMKCDVDIRKDLYSNIVMSGGTTMYPGIADRMQKEITALAPSSMKIKIVAPPERKYSVWIGGSILASLSTFQQMW

SEQ ID NO: 21832 - protein, 492 aa, Corynebacterium efficiens YS-314
MGAAGVPARFILDSVSMSLSTASPTIVWFRDDLRIRDNAALAWAADRGPVIGLFIDEDQPRALGGAARWWRDRSLTLLVDALATHGVPLLRRSGDPVVLLTEVVRETGAAAVTWNRRYHGPLRERDAEIKTQLREQGLEVHSHAGFLLTEPWEVTSGAGTGYKVYTPFSKAAFPLADESAARLGDPMPAQLTGPDTPVADTGGIDAPDPFWAAEMATHCRPGEQAALDRLGDFLDRMRERGGYADGRDEMARAVTSGLSPHLRFGEISVHRVWEEITAAADAGDIDATDAQVFRKELLWRDFAWHRLYALPDMATTNVREQFNRFGWAWDEHEAARLVDGRHPLSPTSSDEFHVALAAWRAGRTGIPLVDAGMRELWATGSMHNRSRMVVASFLTKNLQIHWRHGEEWFWETLVDADPASNAFNWQWAAGSGDDASPYFRIFNPETQARKFDPDETYIRRWIPEYGTPEYPAPIVDLKESRREALDAYEAVK

SEQ ID NO: 21833 - protein, 478 aa, Xylella fastidiosa Ann-1
MFKQLWATKLSQPSQDSAEGLSLQRVLGVWGLTALGIGAVIGGGIFVITGQAAANHAGPAIMLSFALAAICCTFCALAYAEFAAMVPVSGSAYTYTYATFGELAAWFIGWMLVLEYGVSAAAVAVSWSGYFLSLLQHLGIHLPAALVNAPLDGTLHATGAIANLPAATIVLLLTWLCYFGIRKSSKINIAMVALKSGLILLIIGVGWKYVNPDYWQPFIPTNQGPGKYGWNGVLHGASMVFFAYIGFEAVSVAAQESHRPQRDLPISMMSALAICTVLYIMMAAVMTGLVPYTQLGTDEPVVTAVAAHPQLGWLRVVVEIGALVGLSSVVLVMLIGQPRIFMIMAGDGLLPPIFSTIHSKHRTPHINTVITGLGIALLAALLAAVFPLDVLGELTSMGTLIAFTAVCAGVLILRCTRPDLPRPFRMPAAWLFCSAGVLSCITLLSAMTRHNWMLMSVWTVLGFSLYFSYGYHHSKLHQ

SEQ ID NO: 21834 - protein, 269 aa, Rhizopus stolonifer
HTFYNELRVAPEEHPVLLTEAPLNPKSNREKMTQIMFETFNAPAFYVAIQAVLSLYASGRTTGIVLDSGDGVTHTVPIYEGYALPHAILRLDLAGRDLTDYLMRILAERGHSFTTTAEREIVRDIKEKLCYVALDFEQEVQTAAQSSALEKSYELPDGQVITVGNERFRAPEALFQPALLSLESSGIHETTYNCIMKCDVDIRKDLYSNIVMSGGTTMYPGIADRMQKEITALAPSSMKIKIVAPPERKYSVWIGGSILASHSTFQQMW

SEQ ID NO: 21835 - protein, 496 aa, Xylella fastidiosa Ann-1
MTHATIYQGEERRMLKKHLFIVKPIEPTNHTGTGKGGTQLKRSLTAGQLVMLGIGAVIGAGIFVLSGHAAAEYAGPAVVLSYILAGIACALAGLCYAEFAAMLPVSGSAYSYAYATLGEFTAWFIGWNLILEYMFSASTVAVGWSGYLNSFLSSFGYGLPASLSSAPLDVVDGRLIYSGGLINLPAVAIVAAISGLCYVGITQSAFVNSITVAIKVSVIVLFIAFAARYVNPDNWVPFVPDNVAPGKYGIEGVIRGAAVVFFSYIGFDAVSTTAGEAKNPQRDMPIGILGSLAICTVIYIAFSGVLTGLMHYSQLDTPKPVATALETYPTLSWLKHVVEIGAIAGLSSTMLMMLMAQPRIFYAMSQDGLLPKLLSKVHPKFQTPHVGTLIVGACACALAGLFPISLLGDLVSMGTLLAFATVCIGIVVLRRTRPDLPRPFRVPMYWVIAPTGAAACLYLFWQPFTEHWPLMVGWTVLGLVMYGLYGYHHSKLRHGG

SEQ ID NO: 21836 - protein, 159 aa, Exiguobacterium sibiricum 255-15
MNTSLYEIEVQDATGQTVSLNDYAGEVLVIVNTASKCGLVKQLGDLQQLHDKYADQGVKVLGFPCDQFNNQEFADQQETMQFCQRNYGVTFPMFQKIDVNGPAEHRLYTYLKQQQGGLLSSNIKWNFTKFLVDREGRVVKRFAPVDSIQTIEKTLARYV

SEQ ID NO: 21837 - protein, 1364 aa, Xanthomonas campestris pv. vesicatoria str. 85-10
MPKGRWDLRRTYGRRAFFGALLILSAGLVAAIVTGVWLQRQNELERQQRFDYVVRTLARNISERMSTFEHGLRGARGAVIGAGSDIISRERFTLYSRSRDYPREFPGVLGYGYIHRVAPADEAAFLQAARADGAPDIHRRPLAPWDGERYMVLYFEPESSGNRPLGIDIASEPRRRAAALQAARSGEPVMTSPISLSGYRVPSESGFLVLLAVYREGMPLQTPQQRMLATSGWVYAPFSVEQMVRSALGERDDVALDLSDRNEPTHNFYRSGTPASDSALRPPVVRLLPIYGRTWVITAHPTAGFVASLNQSSPWLIGGLVMAAAVLFAALLVLYFSNGLRREEVLRKQMELAALVSHSSEAIVAETPDGRITHWNPAAEAMFGYTADEAIDQDLTMLLSPQPYAMPEVDHADAALAGNASAAQTMRHRDGHQVHVLASKAPIIESEGTLSGHSHFFRDISDRVRSHQRIIDLNASLEHQVAERTSELVKFSVLQRAILAHAGYAIIAIDSSGFVTLFNPAAEKLLGYSAAEVIGRRKASQFVEPEELQERAHMLAEQTGTPVAHTLEAIAALTSLGRSDTSEWTYVSHDGRRLPVLLTLSTLRDDHDQVIGYLGVAVDLTEQKLHEKQLRLAMDAAKSANQSKSDFLANMSHEIRTPMNAILGMLYLLQRSELPGAAQDMVAKIDRSARTLLEIINDILDFSKIEAGRIDLECAPFDLNQLFDNIADLMRSSLSAKPVEMIVEPLPRDSRWLLGDALRINQVLVNLVGNAIKFTEQGEVVLSVRRFPSGDPNKFKLLFSVRDTGIGISKEKQSVIFSPFLQADTSTSRRYGGSGLGLTISRRLVELMGGELEVESVPGRGSEFYFVVTLEKSAPPQAQRELPALPPEAMPRVLIADDHDAALNNLVRIATELGWRVDAVASGQAALQAIEHAAEPYDIFLLDWRMPDIDGVAIAREIRARATPGPHPVIVMVTAYERRLLEQHPEQQDLDAVMTKPVTGAALHRLVEQLLEQRPGTRPATPTFVARRLEGAHLLLVDDSDINCEVAQRILEGEGAMVTVAHDGEQAVSTLKRAPNLFHLVLMDVQMPVVDGYEATRRLRQIPALASLPVIALTAGAFRPQQEKALEAGMNGFIAKPFNVEELVTAIRHFLQPGTRRIPSLPHEAQAHVGPEWEYSDPELLDAARARSLWREREPYARYLIKLLRDSPDPAEVAAEHLRRNELPAIGAMAHKLRGAAGSLALPALAGAAGDLETRIEEGHDITASLIALKDVMQRTADAIRAFLQHGDSDVAADEEGVALDADSVQILTSAFASDDADQIDHALLICAPRLPRALQEALQRAVEDFDFRRAEATLREWQATHPH

SEQ ID NO: 21838 - protein, 266 aa, Bordetella parapertussis
MTRFLEVERRGRVCIVRMNRPEARNALTDAEQFQEFEDLVRELNADLDVRAAILTGNGPSFCAGGNVKKMLADYGPDSGPAARIPAKYSTGIQRIPMALAQLDVPLIAAVNGAAIGAGCDLACMCDIRIAADDARFAESFVKLGIIPGDGGSWFLPRIIGLARTYEMAFTGDTLDAATALQWNLVSSVVPAAQLMDAACQLAERIAVNPPQQVRFAKRLIREGLHQRLEAMLEFSRLYQTLSHRTADHQEGIAALLEKRPPVFHGR

SEQ ID NO: 21839 - protein, 618 aa, Poa secunda
MDSRGITPGAYAPLPSSGDDQRGGGVRYCLACVATVLAASAVVVVVAFVSVGGVRVLLAGGTGDSKDADAFPWSNSMLQWQRAGFHFQTEKNFMSDPNGPVYYRGYYHLFYQYNTKGVVWDDGIVWGHVVSRDLVHWRHLPIAMVPDHWYDNMGVLSGSITVLNSGRLVMIYTGVFSNTTDRSGMMEVQCLAVPAEPNDPLLRRWTKHPANPVLVHPPGIKDMDFRDPTTAWFDESDSTYRTVIGSKDDNQGDHAGFAMVYKTKDFLSFQRIPGILHRVEHTGMWECMDFYPVGGGDNSSSEVLYVIKASMNDERHDYYALGRYDAAGNTWTPLDPELDLGMGLRYDWGKFYASTSFYDPIKRRRVVLGYVGETDSRRSDEAKGWASIQSIPRTVALDKKTWTNLLLWPVQEIETLRANATAFNGITIDTGSVFLLPIRQGTQLDIEASFRLNASAVAAISEADVGYNCSSSGGAATRGVLGPFGLLVLADTRGEQTAVYFYVSRGLDGGLRTSFCNDESRSSWARDVTKRVVGSTVPVLDGEVLSMRVLVDHSIVQSFAMGGRVTATSRVYPTEAIYAAAGVYVFNNATGASVTAERLVMHEMDSVDNNQIFLVDDL

SEQ ID NO: 21840 - protein, 202 aa, Triticum aestivum
  misc_feature (143)..(143): Xaa can be any naturally occurring amino acid
MHPTRWELSHMVDLQAAALVISVVAAEVQAIYLHSTAMAPTVMASSATSVAPFQGLKSTAGLPVSRRSNGASLGSVSNGGRIRCMQVWPIEGIKKFETLSYLPPLSTEALLKQVDYLIRSKWVPCLEFKQGWGSSSVKHNASXPGYYDGRYWTMVESCLCSGCTDATPSYTSGGKVKKGVTLTPNVRINRIRKKCVKVNCVK

SEQ ID NO: 21841 - protein, 252 aa, Bordetella parapertussis
MNTSPTVRFETREQIAIITLNRPDKRNAINLEMRQALIAAWERFENDAALRVAILTGAGERSFSAGRDLSENTDLSQKTFLPILGDNVQASKPVIAAVNGAALGGGWFFTQMCDLVVAADHAVFGMPESKVGRAPAWAVWLQGVIPQKLVLELLLTGNPISAQRAAEIGFVNHVVPAAQLMDKAMELARAIVATAPLSAAACKEMVYAAAEMERGAALRTAFHILEPLYRSEDAREGALAFREKRAPRWSGR

SEQ ID NO: 21842 - protein, 118 aa, Triticum aestivum
  misc_feature (62)..(62): Xaa can be any naturally occurring amino acid
  misc_feature (76)..(76): Xaa can be any naturally occurring amino acid
  misc_feature (85)..(85): Xaa can be any naturally occurring amino acid
MARGAATQLVLVAMVAAMLLVACDAAISCGQVTSALSPCISYARGNGANPPAACCSGVRSLXAGAAQSTADKQAAXCKCIKSAAXGGLNAGQGRRHPFKCGVSVPYAISSSVDCSKIR

SEQ ID NO: 21843 - protein, 297 aa, Orychophragmus violaceus
MGSLVREWVGFQQFPAATQEKLIGFFGKLKQKDMNSLTVLVLGKGGVGKSSTANSLIGEQVVRVSPFQAEGLRPVMVSRTMGGFTINIIDTPGLVEAGYVNHQALELIKGFLVNRTIDVLLYVDRLDVYRVDELDRQVVQAITQTFGKEIWCKTLLVLTHAQFSPPDELSYGTFSSKRSDSFLKTIRTGSKMRKQQFEDSAIEVVYAENSGRCSKNEKEEKALPNGEAWIPGLVKAITDVATNQRKAIHVDKKMVDGSYSDDRGKKLIPLIMAAQYFIVEMIQGAIRNDIKTSGKPL

SEQ ID NO: 21844 - protein, 325 aa, Arabidopsis thaliana
MTTMSDLSVDLVGEILSRVPLTSLSAVRCTCKSWNTLSKHQIFGKAELAATKQFLGFTVMDYKVCSLRFDLQGIRNDGDDFVDHGKSGLKIRNKAVKKNHGNGLHRKTGRCHIVERTCPQYSEIYDFNSSSWRLVEINPVWFLHSDRVSLKGNTYFFAQDLLKDAKIENYLLCFDFTAERFGPHLPLPVHSYDDVTLSCVRQEQLALLYGNNETDDSLEIWITNQIDPNAVSWSIFLKVDIKPLIGFPKDFDPGSFFIDEEKKVVVVYDLDGHLYSTKKNCAYQRLYIIGEDGYFTSVKIKCSDSPEFSAYAPSLVTYKPTNYAK

SEQ ID NO: 21845 - protein, 297 aa, Orychophragmus violaceus
MGSLVREWVGFQQFPAATQEKLIGFFGKLKQKDMNSLTVLVLGKGGVGKSSTANSLIGEQVVRVSPFQAEGLRPVMVSRTMGGFTINIIDTPGLVEAGYVNHQALELIKGFLVNRTIDVFLYVDRLDVYRVDELDKQVVQAITQTFGKEIWCKTLLVLTHAQFSPPDELSYETFSSKRSDSLFKTIRAGSKMRKQQFEDSAIEVVYAENSGRCSKNEKEEKALPNGEAWIPSLVKAITYVATNQRKAIHVDKKMVDGSYSDDRGKKLIPLIIGAQWFIVKMIQGAIRNDIKTSGKPL

SEQ ID NO: 21846 - protein, 542 aa, Synechococcus elongatus PCC 7942
MTRPASAAIAVYDTTLRDGAQREGLSLSLEDKLRIAHCLDRLGVKFIEGGWPGANPKDVQFFWELQQRPLQQAEVVAFCSTRRPGQIAGEDELLKALLAAGTTWVTIFGKSWDLHVVEGLKTSLDENLVMISDSIAYLRTCDRRVIYDAEHWFDGYLANPDYALQTLAAAIEAGAEWIVLCDTNGGCLPHQISEIVAAVLDRFPSLAPDQTGPQLGIHTHNDSETAVANAIAAVQAGARMVHGTINGYGERCGNANLCSVIPNLQLKLGYDCVETEQLMQLTATSRLVSEIVNLAPDDHAAYVGQSAFAHKGGIHVSAVERNPLTYEHIRPEQVGNLRRIVISEQSGLSNVLAKARSFGLDLQRNDPACRDLLARLKELESQGYQFEAAEASFDLLMREATGDRPHFFDLKDFHVHCSKQRQELNALATVKVAVTGRDILESAEGNGPVSALDAALRKAIGSFYPAVMQFHLSDYKVRILDGAAGTSAKTRVLVESSNGSQRWSTVGVSGNIIEASYQAVVEGIEYGLLLQQQAPLQAAEKP

SEQ ID NO: 21847 - protein, 221 aa, Geobacter metallireducens GS-15
MKKDILEKGAIVQRDRETYAIAPHIPGGITDTATLRKICDVADRYGVKELKLTSAQRIALMGVKEEDLDTIWSDLDQQPGAAIGLCVRSVKICPGTTWCKRGVQDSVALGLKIDTIYHAMKLPNKMKMGISGCMVNCAETLLKDIGVVGTPKGWRIYVGGNAGARPRIGEVFTDTAPDDDEVLAVVARIVDYYKGSGSEQRLGRIVEQMGIETFRQAVLGT

SEQ ID NO: 21848 - protein, 326 aa, Escherichia coli
KTFSEAIISGEWKGYTGKAITDVLNIGIGGSDLGPYMVTEALRPYKNHLNMHFVSNVDGTHIAEVLKKVNPETTLFLVASKTFTTQETMTNAHSARDWFLKAAGDEKHVAKHFAALSTNAKAVGEFGIDTANMFEFWDWVGGRYSLWSAIGLSIVLSIGFDNFVELLSGAHAMDKHFSTTPAEKNLPVLLALIGIWYNNFFGAETEAILPYDQYMHRFAAYFQQGNMESNGKYVDRNGKVVDYQTGPIIWGEPGTNGQHAFYQLIHQGTKMVPCDFIAPAITHNPLFDHHQKLLFKFFAQTEALAFGKSREVVEQEYRDQGKDPAT

SEQ ID NO: 21849 - protein, 397 aa, Streptococcus agalactiae A909
MAFSPIKKLLQDIKSGKMVVLMDDENRENEGDLICAAEMVTKESINFMAKFGKGLICLPLSNYYAEKLELAQMASHNTDNHETAFTISIDHLSTSTGISAEDRALTAKMVANDSSKAKDFRRPGHLFPLLAKEGGVLARNGHTEATVDLCRLAGLKECGLCCEIMAEDGSMMRKDELLAFAQKHDLAIATIKQLQDYRRQEEGGVVREIEIQLPTQFGHFTAYGYSEVVANKEHVALVKGDISSGEDVLCRLHSECLTGDVFHSLRCDCGEQLANALQQIEAEGRGVLLYMRQEGRGIGLINKLKAYHLQEEGLDTLEANLALGFEGDERDYGVSAQLLKDLGINSINLLTNNPDKIQQLEAEGICVKNRVPLQVAATAYDLNYLKTKKEKMGHLLD

SEQ ID NO: 21850 - protein, 150 aa, Glycine max
REDDRRAWILDEYSEFHGHSPAVVTGKPVELGGSLGRDAATGRGVLFATEALLKEHGMSVSGQRFIIQGFGNVGSWAAQLISEKGGKVVAVSDITGAIKNTNGLDIPSLLKHSREHRGVKGFHGGDAIDPNSILVEDCDVLVPAALWGVI

SEQ ID NO: 21851 - protein, 247 aa, Zea mays
GKKLMAESANTVKKVSLELGGNAPCIVFDDADIDVAVKGSLAAKFRNSGQTCVCANRILVQEGIYEKFASAFIKAVQSLKVGNGLEESTSQGPLINEAAVQKVEKFINDATSKGANVMLGGKRHSLGMSFYEPTVVGNVSNDMLLFREEVFGPVAPLIPFKTEEEAVHMANDTNAGLAAYIFTKSIPRSWRVSESLEYGLVGVNEGIISTEVAPFGGVKQSGLGREGSKYGVDEYLELKYICMGNLG

SEQ ID NO: 21852 - protein, 85 aa, Schizosaccharomyces pombe
MPGKYGVRYGASLRRDVRKIEVQQHSRYQCPFCGRLTVKRTAAGIWKCSGKGCSKTLAGGAWTVTTAAATSARSTIRRLREMVEV

SEQ ID NO: 21853 - protein, 270 aa, Salmonella bongori
ILVVAATDGPMPQTREHILLGRQVGVPYIIVFLNKCDMVDDEELLELVEMEVRELLSQYDFPGDDTPIVRGSALKALEGDAEWEAKIIELAGFLDSYIPEPERAIDKPFLLPIEDVFSISGRGTVVTGRVERGIIKVGEEVEIVGIKETQKSTCTGVEMFRKLLDEGRAGENVGVLLRGIKREEIERGQVLAKPGTIKPHTKFESEVYILSKDEGGRHTPFFKGYRPQFYFRTTDVTGTIELPEGVEMVMPGDNIKMVVTLIHPIAMDDG

SEQ ID NO: 21854 - protein, 471 aa, Debaryomyces hansenii CBS767
MPIDILGTAIYEGPEAIPGWEYIKTYTPAIMALAGIKYYFGGTSNTWERDYHGKVYIMTGATSGLGANLAYELASKGAQLILLVRSTEDSWLVDYIEDLRERTDNFMIYAEECDLNSLYSIRKFATKWLDNQPPRRLDGVICCAAESIPIGKARQVTVDGVEKQMGINYLAHFHLLTLLSPALKIQLPDRDVRIVMATCVSQALGDLDMKDALWLNRRYPTREPWKLYGTSKLMLTMFAKEFQRRLNSFERKDKAPCNVRVNMVNPGIMRTPSTRRFLSMGAIWGLLVYFVLFPIFWIFFKSTTQGAQSFLYALAAPVFKNLDGGNVIQECKILKPARKELSDEDLQKALYDETEKLLEALEKSSAIERKRQEKIQESKMPLADKLRAQNEESRKKADIHTKPESPEELQAKLASLKRLIGIPSDANDELPLFPSQPNSSQSESRAENLSTTKSTPKSKSKAKKSKSKKID

SEQ ID NO: 21855 - protein, 257 aa, Carboxydothermus hydrogenoformans Z-2901
MEFEKIKFEVTDGYAVIYLNNPPVNALGQKVLKDLQKALQEIEKNPEIRAVIISGEGSKVFCAGADITEFADRAKGILPEVEGSVLFRQIELFPKPVIAALNGSSYGGGTELAISCHLRILADDASMALPEVKLGIIPGWGGTQRLPRLIGKTRALEAMLTGEPITAEEALSYGLVNKVVPKDQVLTEARALAAKLAKGAPIAMREILKAVTLGLDTSIEEGLKIEKEGSKVAFSSEDAVEGRTAFFEKRPPNFKGR

SEQ ID NO: 21856 - protein, 500 aa, Streptomyces coelicolor A3(2)
MTNIVNHWIGGKTAEGASGTYGPVTNPATGEVTTKVAFASVDEVDAAVAAAREAYLTWGQSSLAQRTSILFRFRALLDAHRDEIAELITAEHGKVHSDALGEVARGLEIVDLACGINVQLKGELSTQVATRVDVSSIRQPLGVVAGITPFNFPAMVPLWMFPIAIACGNTFVLKPSEKDPSAAVKVAELLSEAGLPDGVFNVVHGDKVAVDRLLEHPDVKAVSFVGSTPIARYIHTTASANGKRVQALGGAKNHMLVLPDADLDAAADAAVSAAYGSAGERCMAISAVVAVGAVGDELVEKIRERAEKIKIGPGTDPSSEMGPLITKAHRDKVASYVAGAAAEGCEVVLDGTGYTVDGHEDGHWIGISLLDRVPTTAKAYQDEIFGPVLCVLRADTYEEGVALINASPFGNGTAIFTRDGGAARRFQLEIEAGMVGVNVPIPVPVGYHSFGGWKDSLFGDHHIYGNDGTHFYTRGKVVTTRWPDPADAPAGVDLGFPRNH

SEQ ID NO: 21857 - protein, 496 aa, Thermus thermophilus HB8
MPLITTETGKKMHVLEDGRKLITVIPGDGIGPECVEATLKVLEAAKAPLAYEVREAGASVFRRGIASGVPQETIESIRKTRVVLKGPLETPVGYGEKSANVTLRKLFETYANVRPVREFPNVPTPYAGRGIDLVVVRENVEDLYAGIEHMQTPSVAQTLKLISWKGSEKIVRFAFELARAEGRKKVHCATKSNIMKLAEGTLKRAFEQVAQEYPDIEAVHIIVDNAAHQLVKRPEQFEVIVTTNMNGDILSDLTSGLIGGLGFAPSANIGNEVAIFEAVHGSAPKYAGKNVINPTAVLLSAVMMLRYLEEFATADLIENALLYTLEEGRVLTGDVVGYDRGAKTTEYTEAIIQNLGKTPRKTQVRGYKPFRLPQVDGAIAPIVPRSRRVVGVDVFVETNLLPEALGKALEDLAAGTPFRLKMISNRGTQVYPPTGGLTDLVDHYRCRFLYTGEGEAKDPEILDLVSRVASRFRWMHLEKLQEFDGEPGFTKAQGED

SEQ ID NO: 21858 - protein, 263 aa, Raoultella ornithinolytica
AATDGPMPQTREHILLGRQVGVPYIIVFLNKCDMVDDEELLELVEMEVRELLSQYDFPGDDTPIVRGSALKALEGEADWEAKIIELAGYLDSYIPEPERAIDKPFLLPIEDVFSISGRGTVVTGRVERGIIKVGEEVEIVGIKETAKSTCTGVEMFRKLLDEGRAGENVGVLLRGIKREEIERGQVLAKPGSIKPHTKFESEVYILSKDEGGRHTPFFKGYRPQFYFRTTDVTGTIELPEGVEMVMPGDNIKMVVTLIHPIAM

SEQ ID NO: 21859 - protein, 472 aa, Salmonella typhimurium LT2
MVSINHDSALTPRSLRDTRRMNMFVSVSAAVAGLLFGLDIGVIAGALPFITDHFVLTSRLQEWVVSSMMLGAAIGALFNGWLSFRLGRKYSLMAGAILFVLGSLGSAFASSVEVLIGARVILGVAVGIASYTAPLYLSEMASENVRGKMISMYQLMVTLGIVLAFLSDTAFSYSGNWRAMLGVLALPAVLLIILVVFLPNSPRWLAQKGRHIEAEEVLRMLRDTSEKARDELNEIRESLKLKQGGWALFKANRNVRRAVFLGMLLQAMQQFTGMNIIMYYAPRIFKMAGFTTTEQQMIATLVVGLTFMFATFIAVFTVDKAGRKPALKIGFSVMALGTLVLGYCLMQFDNGTASSGLSWLSVGMTMMCIAGYAMSAAPVVWILCSEIQPLKCRDFGITCSTTTNWVSNMIIGATFLTLLDSIGAAGTFWLYTALNIAFIGITFWLIPETKNVTLEHIERKLMAGEKLRNIGV

SEQ ID NO: 21860 - protein, 270 aa, Morganella morganii subsp. sibonii
ILVVAATDGPMPQTREHILLGRQVGVPYIIVFLNKCDMVDDEELLELVEMEVRELLSQYDFPGDDTPIVRGSALKALEGEAEWEAKIVELAGFLDSYIPEPERAIDKPFLLPIEDVFSISGRGTVVTGRVERGIVKVGEEVEIVGIKDTIKTTCTGVEMFRKLLDEGRAGENVGVLLRGTKREEIERGQVLAKPGSIKPHTKFESEVYILSKDEGGRHTPFFKGYRPQFYFRTTDVTGMIELPEGVEMVMPGDNIKMIVTLIHPIAMDDG

SEQ ID NO: 21861 - protein, 303 aa, Mycobacterium bovis AF2122/97
MTHMSIFLSRDNKVIVQGITGSEATVHTARMLRAGTQIVGGVNARKAGTTVTHEDKGGRLIKLPVFGSVAEAMEKTGADVSIIFVPPTFAKDAIIEAIDAEIPLLVVITEGIPVQDTAYAWAYNLEAGHKTRIIGPNCPGIISPGQSLAGITPANITGPGPIGLVSKSGTLTYQMMFELRDLGFSTAIGIGGDPVIGTTHIDAIEAFEKDPDTKLIVMIGEIGGDAEERAADFIKTNVSKPVVGYVAGFTAPEGKTMGHAGAIVSGSSGTAAAKQEALEAAGVKVGKTPSATAALAREILLSL

SEQ ID NO: 21862 - protein, 587 aa, Solanum tuberosum
CLKKSSLFSLPIFLLYFSIILSFNNGVNASHKVFPGLQSTSTVDEKNVHRTGYHFQPPKNWINDPNAPMYYNGVYHLFYQYNPYGSVWGNIVWAHSVSTDLINWIPLEPGIYPSEVFDKYGTWSGSATILPNNKPIILYTGIVDAKNTQVQNYAIPANISDPFLRKWIKPDNNPLIVADVSINKTQFRDPTTCWLGQDGYWRTLIGSVWGKQGLAILYKSKNFMKWTKIQHPLHSVDGTGNWECPDFFPVLLHGTNGLDASYNKKNIKHALKVSLDVTRFEYYTVGIYDTKKDRYIPDKTSIDGWKGLRLDYGNYYASKSFYDPSKNRRIMWGWANESDTVNDDVKKGWAGIQTIPRKLWLDPSGKQLVQWPVEELETLREQKVQLSNRKLKKGDKIEVKGITPAQADVEVTFSFSSLDKAEPFDPNWDNLYAQDVCAIKGSTVQGDLGPFGLLTLASQNLEEYTPVFFRVFKAQDKYKVLMCSDASRSTLKNDKTMYKPSFAGYVDVDLINKTLSLRSLIDHSVVESFGAGGKTCITSRVYPTLAIYDNAHLFVFNNGTETIKIKSLNAWTMGKPKMNWSFGHSSY

SEQ ID NO: 21863 - protein, 205 aa, Arabidopsis thaliana
MEKNISISKKLGNIVRFVLYMLHKGISKQKLLADFNATLKRGKNLMFHNRRRVPGSAVASHPQNEYEFSCSDTPNYTFPFNMAAFKKKSHHNSLFSCGQAPPTLDDDTSVSRAVLELLNSGGDHDQGSNTPAFSIEALTALSPYLPGFGRSTSSVRPLRVTDSPFPLREEGDVANGHVDKAADEFIKKFYKNLYQQKKMIESSPN

SEQ ID NO: 21864 - protein, 347 aa, Rhodosorus marinus
CKSGVAGEDSPKAVFPAVIGVPKQKGIMVGAGQKDDYVGDAAQARRGVLIIKYPLEHGIVTNWDDMEKIWHHAYYNELRVDPSEHPTLLTEAPLNPKANRERMTQILFESFNIPAFYVAIQAVLSLYASGRTSGIVIDSGDGVTHTVPIYEGYSLPHAVTRIDLAGRDLTGWMAKLLMQSGFSFTTSAELEIVRDIKQQLCYVAENYEAELNAGNSNPALEKEYELPDGQVITVGTERFQCPEALFKPDMLGVEMTGMHNTCFNSIMRCDIDIRKDLYNNIVMSGGSTMFAGIANRVQKEMETLAPASMKIKTIAPPERQYSVWIGGSILASLSTFQQMWVSKSEYD

SEQ ID NO: 21865 - protein, 168 aa, Kluyveromyces lactis NRRL Y-1140
MSDDFYSYSCETKDGSEYHMSELRGKVVLIVNVASKCGFRGQYGELQELYKEFHAKGFEILAFPCNQFMNQEPGSDEEIGKFCQEHYGVSFKIMKKCKVNGVNALPLYKYLKDQQPRMFGFTFVRWNFEKFLIDRSGRVHGRYSTLTKPKSMKEDIEQLLKQKSQLQS

SEQ ID NO: 21866 - protein, 403 aa, Moorella thermoacetica ATCC 39073
MNEGISFNTIEEAIAEIKAGRMVVVVDDEDRENEGDLVMAAARVTPEAINFMATHGRGLICVPMEGQRLDELELEPMVNQNTESMGTAFTVSVDAAEVTTGISAFERAATIKRLIDPSTRPEDLRRPGHIFPLRAKPDGVLRRAGHTEAAVDLARLAGLYPAGVICEIMNPDGTMARVPQLYKFCQEHGLKLITVADLIEFRRRREKLVRRVAEADLPTRYGHFKAVAYEEIMNGKGHLALVKGDIAKGRPVLVRVHSECLTGDVFGSERCDCGDQLQRAMKMIEDEGAGVILYMRQEGRGIGLLNKIKAYKLQEEGKDTVEANEALGFPPDLRDYGIGAQILADLGVRQIRLLTNNPKKIAGLEGYGLQVVERVPIEICPNKVNRRYLKTKKEKMGHLLHIS

SEQ ID NO: 21867 - protein, 352 aa, Nocardia farcinica IFM 10152
MAVEALLLLSFGGPERPEDVMPFLENVTRGRGVPRARLEEVAQHYLHFGGVSPINALNRDIIAGVERELDEAGIDLPVYFGNRNWHPMVEDTVAEMARDGVTGALVFPTSAWGGYSGCRQYHEDIERARAAVGPAAPHLTKLRQYFDHPLLIEAFADAIRAALERLPADRRDRARLVFTAHSVPVAADAAAGPPADGGELYSRQVADAARLCAAATGFADHDLVWQSRSGPPQVPWLEPDIVDHLEDLAGRGVDAVVVCPVGFVSDHLEVIWDLDNEAKDKAAELGMAFARASTPGTDPRFPRLVVELMREHLDGLAPRRLGAEPGYGCTIDGMPCASGCCAPQRRPAAAGR

SEQ ID NO: 21868 - protein, 319 aa, Idiomarina loihiensis L2TR
MAEAKHCKLLILGSGPAGYTAAVYAARANLNPVMVTGMQQGGQLTTTTDVENWPGDAEGLTGPDLMVRMQKHAERFDTEIVFDHISSVDFSKRPFQLKGDVGEYTADSVIISTGASAKYLGLDSEEAFMGKGVSACATCDGFFYKKQKVCVVGGGNTAVEEALYLSNIASEVHVIHRRDTFRAEKILVDRLHEKEQNGNVTFHLNKTLDEVLGDDAGVTGVRIKDTQDGSTEELEVAGCFIAIGHQPNTGIFDGELEMQDGYIQVQSGLQGNATATSVPGVFAAGDVMDHIYRQAITSAGTGCMAALDAERYLDALTKS

SEQ ID NO: 21869 - protein, 121 aa, Chlamydomonas eugametos
SLFAKLGGREAVEAAVDKFYNKIVADPTVSTYFSNTDMKVQRSKQFAFLAYALGGASEWKGKDMRTAHKDLVPHLSDVHFQAVARHLSDTLTELGVPPEDITDAMAVVASTRTEVLNMPQQ

SEQ ID NO: 21870 - protein, 107 aa, Wolbachia endosymbiont of Drosophila ananassae
MSDDITSVNDQNFKSEVTDYKGFVLVDFWAEWCGPCKSLMPRIEQLAKDRKGKIKICKFDIDEGTEVPSKYGVQSIPTLIIFQDGKEIARKIGATNDLSSWVDSEIS

SEQ ID NO: 21871 - protein, 975 aa, Burkholderia sp. 383
MKLEHPDRLMNRTPLSLAALETHDAFAERHIGPDAASQQAMLDTLGFASRAALIDAVIPASIRRAETLPLGPFAQPKSEAEALAALRVLADKNEVFRSYIGQGYHDTHTPAVILRNVLENPAWYTAYTPYQPEISQGRLEALLNFQQMVADLTGLAISNASLLDEATAAAEAMTLLQRTGKPTSNVFYVADDVLPQTLEVIRTRALPVGIEVKTGPAADAAQANAFGVLLQYPGVNGDVRDYRALTEAIHAAGGHVVVAADLLALTVLTPPGDWGADVAIGNTQRFGVPMGFGGPHAAYLAVRDEFKRQMPGRLVGVTVDAQGKPALRLALQTREQHIRREKATSNVCTAQALLAIMASMYAVYHGPHGLKTIALRVNRIAALLAAGVKQLGFATVNDTFFDTLTIDTGARTAQVHEFAKAKRINLRRVSDTQVGVSVDETTTRDDLADLLAVFAQAAGGTAPAVDALDAGLAGVAALPAGLERTSAYLTHHVFNRHHSETEMLRYLRSLSDKDLALDRSMIPLGSCTMKLNATSEMLPVTWPEFGGIHPFAPAEQTVGYREMIDQLEQMLVAATGYAAVSLQPNAGSQGEYAGLLIIHAYHASRGEAHRDVCLIPASAHGTNPASAHMAGMKVVVVACDAQGNVDIADLKAKADEHAKDLAAIMITYPSTHGVFEQNVREICEIVHAHGGQVYVDGANMNAMVGLTAPGQFGGDVSHLNLHKTFCIPHGGGGPGVGPVAVGAHLAKFLPNQRSTGYTREEDGIGAVSAAPYGSASILPISWMYIAMMGAKNLTAATETAILNANYIAKRLAPHYPVLYSGPGGLVAHECILDLRPIKESSGISVDDVAKRLMDYGFHAPTMSFPVPGTLMVEPTESESQEELDRFIAAMIAIRDEIRAVEEGRADREDNPLRHAPHTAAVVTANEWLHAYSREQAAYPVASLGTNKYWPPVGRADNVYGDRNLFCSCVPMSEYA

SEQ ID NO: 21872 - protein, 397 aa, Bacillus cereus ATCC 14579
MFHRIEEALEDLKKGKVVIVCDDENRENEGDFIALAEYITPETINFMITHGRGLVCVPITEGYAERLQLEPMVSHNTDSHHTAFTVSIDHVSTTTGISAHERATTIQELLNPASKGADFNRPGHIFPLIAKEGGVLRRAGHTEAAVDLAKLCGAEPAGVICEIINEDGTMARVPDLIECAKQFDIKMITIEDLIAYRRHHETLVTREAEITLPTDFGTFHAIGYSNSLDTKEHIALVKGDISTGEPVLVRVHSECLTGDVFGSHRCDCGPQLHAALAQIEREGKGVLLYMRQEGRGIGLLNKLRAYKLQEEGFDTVEANEKLGFPADLRDYGIGAQILKDLGLQSLRLLTNNPRKIAGLQGYDLEVVERVPLQMPAKEENKSYLQTKVNKLGHLLNL

SEQ ID NO: 21873 - protein, 480 aa, Medicago truncatula
MSLPPPIPPPSLATPPKARPTELPIRQIPGSHGWPLLGPLSDRLDYFWFQKPENFFRTRMDKYKSTVFRTNVPPTFPFFTNVNPNIIAVLDCKSFSHLFDMDLVDKKDVLVGDFVPSVEFTGNIRVGVYQDVSEPQHAKAKSFSMNILKQSSSIWVPELISNLDIFLDQIEATLSNSSSVSYFSPLQQFLFTFLSKVLARADPSLDPKIAESGSSMLNKWLAVQLLPTVSVGTIQPLEEIFLHSFSYPYALVSGDYNKLYNFIKQHGKEVIKSGTEFGLSEDEAIHNLLFVLGFNSYGGFSIFLPKLIDSIANGPTGLQEKLRKEAREKGGSTLGFDSLKELELINSVVYETLRMNPPVPLQFGRARKDFQLSSYDSAFNVKKGELLCGFQKLIMRDPVVFDEPEQFKPERFTKEKGAELLNYLYWSNGPQTGSPSGSNKQCAGKDIVTFTAALIVAHLLRRYDLIKGDGSSITALRKAK

SEQ ID NO: 21874 - protein, 850 aa, Pseudomonas putida KT2440
MKATASSGQRERLVIVGNGMVGHHCVEQLVSRGALQRFEVRVFGEERQRAYDRVHLSEYFGGSCAETLALCEHDFYEANGVHLHLGEAVLEIDRERREVVTAAGRYGYDQLVLATGSYPFVPPIEGSSGNARLVYRTLDDLDGIRAAAAGARRGVVVGGGLLGLEAANALKSLGLEAHVVEFAPRLMPVQLDGEGGAALKAQIEALGVGVHLSRATQSVSAGETYRYRMNFDGGEHLETDLIVFSAGIRPQDALGRGCGLDIAARGGVVIDNHCRSSDPRIFAIGECASWNGSVFGLVAPGYSMARNLAGLLMGEAAVAFTGADMSTKLKLLGVDVGSIGDAHGATPGARSYRFIDEANSAYRRLVVDASGKHVLGAVLVGDNSYYDTLLQYAQNGIALPADPAALILPQGGGAPALGADALPDSATICSCHNVSKGAVCAAIDSGCSDLAAVKGCTKAATGCGGCAALLKQVFEHELTARGVAVDKSLCEHFAYTRQELYGLVRVEGIRTFSELLERHGKGHLGCDICKPAVGNILASCWNQPIMDPALVPLQDTNDTFMANMQKNGTYSVVPRIPGGEITPDKLIVIGQVAKKYDLYTKITGGQRIDLFGAQLHELPLIWGELIEAGFETGHAYGKSTRTVKSCVGSTWCRYGVQDSVAMALRLEDRYKGLRSPHKLKFAVSGCTRECAEAQSKDIGVIATDKGWNLYVCGNGGMRPRHAELFATDLDDEALVRLIDRVLMFYIRTADKLQRTSVWRENLEGGLDYLKQVIIDDSLGLASELESQMQHVVDQYECEWANALNDPEKLKRFRTFVNDRRADPDVHFVREREQRRPAAPLHLIPTVEEAV

SEQ ID NO: 21875 - protein, 265 aa, Pyrococcus horikoshii OT3
MKRIFVQNRELVVPGTLLAQGPYKNGRGTFREGSRIYSTVIGLVDIKGNTIRVIPLEGPYIPEVGDNVIGKIVDVKFSSWVVDIGAPYLANLKIQDFTDEKIDLLRTDLRKFFDIGDIIYGKVKAITEVNNIDLTTKGMPFNGGPLKGGQIVKITPSRVPRVIGRGGSMINMIKKLTMTRIIVGQNGWIWVNGKNEALEKLAIEAILKIDRESHTKGLTDRIKSLLLSRLQELKEKGVIEEIPELEEEPQEETEVNNNDGETRRT

SEQ ID NO: 21876 - protein, 251 aa, Streptomyces turgidiscabies
MTARIRTARGRGTIGVRALVGPTGVGKSAAATALARDTGAPVLVADRIQCFTDLVVTSGRAADAHVLEVDRIWLSDRTVSDGDYALGEASEDLLSRLGSLVTDRGLVVLEGGSISLLLRFAELMENLPYSVSVDLLPIFDKSYYSARQIARARKMLLPDSSGRSLLTEFAAAWRTPGQRRFAASVSGLDSICEWCAKHSVEPEEVADVDLSEKMLGELSTMLGERYAAHGFTQERLFLKTFDHHVRNSPDA

SEQ ID NO: 21877 - protein, 296 aa, Corynebacterium efficiens YS-314
MGKIVDRGIMAKVTAIKLDGNLYRDEIFADLAQRVAALKEKGIVPGLATVLVGDDPASHSYVKMKHRDCEQIGVNSIRRDLPADISQEELFAVIDELNADDSCTGYIVQLPLPKHLDENAVLERIDPAKDADGLHPVNLGKLVLNEPAPLPCTPNGSISLLRRFGIELNGAKVVVIGRGVTVGRPIGLMLTRRSENSTVTLCHTGTKDLAAETRAADVIVAAAGQPHMLTADMVKPGAAVLDVGVSRKDGKLLGDVHPDVWEVAGAVSPNPGGVGPLTRAFLVHNVVERAEKLAGL

SEQ ID NO: 21878 - protein, 173 aa, Pseudomonas syringae pv. tomato str. DC3000
MSLHELNTLPGVTANPEAPTRQFVFNHTMLRVKDITQSLDFYTRVLGFSLVEKRDFPEAEFSLYFLALVDKAQIPDDDAARNEWMKSIPGILELTHNHGTESDANASYHNGNSDPRGFGHICVSVPDVKVACERFEALGVDFQKRLSDGRMNSLAFIKDPDGYWVEIIQPTPL

SEQ ID NO: 21879 - protein, 246 aa, Saccharomyces cerevisiae
PKLVLVRHGQSEWNEKNLFTGWVDVKLSAKGQQEAARAGELLKEKKVYPDVLYTSKLSRAIQTANIALEKADRLWIPVNRSWRLNERHYGDLQGKDKAETLKKFGEEKFNTYRRSFDVPPPPIDASSPFSQKGDERYKYVDPNVLPETESLALVIDRLLPYWQDVIAKDLLSGKTVMIAAHGNSLRGLVKHLEGISDADIAKLNIPTGIPLVFELDENLKPSKPSYYLDPEAAAAGAAAVANQGKK

SEQ ID NO: 21880 - protein, 520 aa, Pseudomonas syringae pv. tomato str. DC3000
MLDANLKAQLKSYLERVTRPIEIVASLDDGAKSQEMLALLNDVISVSKDVTLNDSGTDARTPSFSLSSPGHDISLRFAGIPMGHEFTSLVLALLQVGGYPPKVSAETIEQVRALQGEFHFETYFSQSCQNCPDVVQALNLMAVLNPGIKHVAIDGALFQDEVTERKIMSVPSIYLNGELFGQGRMGLEEILAKIDTGAGARQAEKLNAKQSFDVLVVGGGPAGSAAAVYAARKGIRTGVAAERFGGQVLDTMAIENFISVQHTEGPKLAVALEEHVKQYEVDIMNLQRADKLIPGAAGELHEVKFASGASLKAKTVILATGARWREMNVPGEQQYRNKGVAYCPHCDGPLFKGKRVAVIGGGNSGVEAAIDLAGIVSHVTLLEFDVQLRADAVLQRKLHSLPNVTVLTSAQTTEVTGDEQKVNGLRYKNRTTGEEITIPLEGIFVQIGLLPNSEWLKGALELSPRGEIVVDARGETSVSGIFAAGDVTVTPYKQIIIALGEGAKASLSAFDHLIRTSAPA

SEQ ID NO: 21881 - protein, 372 aa, Salinibacter ruber DSM 13855
MPAPFARSVLTFSTALMHENGALANGNQTNGHQHPDLAAFEDVDFSEAEMRDVVVIGTGPAGWTAALYTARADLSPLIFMGPEPGGQLTTTTDVENYPGFPEGLMGPEMMDRFQDQAERFGTESRYGTVTHVDFRERPFRLLIDGETPVYAQTAIISTGASARYLGLENEQRLIGKGVSACATCDGSFFRGETVAVVGGGDSAMEESTFLTKFAEKVYVLHRREELRASEIMQQRAFENDKIEFVWNTEVIDVLGESAVEGIEVINNETGETRLMGDVTGFFLAIGHTPNTGPFEGWVQMDETGYIQTEGASTYTDVPGVFACGDAQDSTYRQAVTAAGTGCKAAIDAERWLSEHGAAEAPRADANRQPVEA

SEQ ID NO: 21882 - protein, 529 aa, Arabidopsis thaliana
MEASISFLGSTKPNISLFNPSSNVLPRRDFPLPALKLKKVSVLPRILHQKRLIRAQCSDGFKPEEDDGFVLEDVPHLTKFLPDLPSYPNPLKESQAYAIVKRTFVSSEDVVAQNIVVQKGSKRGVHFRRAGPRERVYFRSDEVKACIVTCGGLCPGINTVIREIVCGLNNMYGVNNILGIQGGYRGFYSKNTMNLTPKVVNDIHKRGGTFLQTSRGGHDTAKIVDNIQDRGINQVYIIGGGGTQKGAEKIYEEVERRGLQVAVSGIPKTIDNDIAVIDKSFGFDTAVEEAQRAINAAHVEVESVENGVGIVKLMGRYSGFIAMIATLANRDVDCCLIPESPFFLEGKGGLFEFIEERLKENRHMVIVIAEGAGQDYVAQSMRASETKDASGNRLLLDVGLWLTQQIKDHFTNVRKMMINMKYIDPTYMIRAIPSNASDNVYCTLLAQSAVHGAMAGYSGFTVGPVNSRHAYIPISVTEVTNTVKLTDRMWARLLASTNQPSFLTGEGALQNVIDMETQEKIDNMKISSI

SEQ ID NO: 21883 - protein, 109 aa, Geobacter metallireducens GS-15
MASEKVLTFSDDNFDTDVLKATVPVLVDFWATWCAPCKAIAPVIDAIADEYDGKVKVGKVNVDDNPGTPGKYGVRGIPTVILFKDGKVVDQVVGAVPKAQLEALIKKAL

SEQ ID NO: 21884 - protein, 471 aa, Arabidopsis thaliana
MAMSDLPNDLVEEIISRVPVKSIRAVSSTCKNWNTLSNDHSFTRKLFGKTITTKENECLVVMMMDSKVYLMSVNLHRIHKENDDNNIKSSIMHKAKLISLNDDDILNNTYIIFHCNGLLLLLGFTDDGIKLVVTNPHLGQTRWIKPRKANYQFCDKYAIGYEKKKNNSLRTNKMLLFHKESFCFRIYWFEIYNFNSASWNVFYFTRDWELPYSQGVSLKGNTYWFAREINIRGERIDDPPDFLICFDFTTERFGPRLHLPFHSHSDDTVILSSVREEQLAVLIKRFDLWRMEIWVTTKIEPKEVSWNKLFLAVDMIPLITAFQFCNVSFFIDEKKNVVVVLGKDVLNTRNIANIIGNDGYFKQVDLGESTNKYCYPLVCSYVPSSVQIKQATRVMHHHHIVLRAVVRAVRDSDRERKLNNGREHKISRRTRIHERILFRMLKLDEEAIGIRSRSVPRDRYQQGFASSPCRA

SEQ ID NO: 21885 - protein, 326 aa, Escherichia coli
KTFSEAIISGEWKGYTGKAITDVVNIGIGGSDLGPYMVTEALRPYKNHLNMHFVSNVDGTHIAEVLKKVNPETTLFLVASKTFTTQETMTNAHSARDWFLKAAGDEKHVAKHFAALSTNAKAVGEFGIDTANMFEFWDWVGGRYSLWSAIGLSIVLSIGFDNFVELLSGAHAMDKHFSTTPAEKNLPVLLALIGIWYNNFFGAETEAILPYDQYMHRFAAYFQQGNMESNGKYVDRNGNVVDYQTGPIIWGEPGTNGQHAFYQLIHQGTKMVPCDFIAPAITHNPLFDHHQKLLSKFFAQTEALAFGKSREVVEQEYCDQGKDPAT

SEQ ID NO: 21886 - protein, 1260 aa, Aspergillus oryzae
MEQKTVPLNPESVRAPLVDVSNRVNNCPSPNLVQGEESMGGLQYLSSPQPMSIVTSPPEQKRYVDNNCLSPTANPKTSSKRNSTLSANSVISNQGKRKTHVGPWQLGRNLGEGTTGRVRLAKHKYTGQTAAIKIVSKTSAAMTQSNSIAEMDRNRGLHGKSGTRHIPSGIEREVVIMKLIEHPNVVRLYDVWENRGEIYLVLEYVEGGELFNYITENGPLQEFEAVKLFRQILAGLGYCHRFGICHRDLKPENILLDSQGNVKLADFGMAALQREGYWLKTSCGSPHYAAPEIVKGDEYRGNKADLWSCGIILFALLTSYLPFDGQDLSSTLKLVKTAKVEIPSNVSYEAADLIHKILQKKPEKRIDMADVWKHPLLRRYECLDPVMHNPYIGPAPSWSVKECGPRISRHELESESDILRNLQTLWHDVEREVLIERLLDPEPTLERMFYNALVRFRDEHLENWPGQSLEYSASDYHHISKDSNGTFSRRDNDRSKGSRRRGQVPMSKVAQLRSNAIQEPKSCATVGSYDPFRSPCHVVPEKEGHTYVTIHRDVPDHGGRKEESDSIAEGSVISEEEFRDQTPCPPSSPFAIVQNKKKPSSLKSFHSRTSHTGNRRQLNGLSAPRSASYKRNVCFRHVRNRSQGSTTAMKPKGAPINVPDKDMSENSLMSIDPGPFADRESSPLLPAQPAVVRRPGVALRTCAPQKKVRESDFIWKDDARQVSHELSQICEEAFNRASLSTGCTTTSTCMSAETPATSVSMASPEASHSRIATSNSKAPVTPSRCGESPRSYTAAELTETRRKLIAHSTQDGTEDVPGYLVAVIKHLDRLIEQDKARQRERVYTPEPEAQPSELSQDAGCLPKISEELHNRQSNSATQYKPYRPGLTTSTGTNTGRPSRNGIGTIRMVPQSSVPSIETIQPLTIRKKSEGPSPNIHHEPFADGSNEENLAPCRYSSMNSFHSRRPCELDPIAEIPPKSEKRNAARYPDNKKWSWLPIKHQPPTETVCKNLRPLHPVDRTVTVHEVNPSADSLTNQPETPAGKSKGGFFKKFMKGKASNPKYPTTGQYHLINTIRTSSNRPVPDSQATETTPILSHPTEPPRLINADKPLPQRPGTSRKPVNWFARMFQFTPATKALALNTSKMKGRKEVHRILREWKPYGITVHYDKADGIIYGKVSRSNIRRIRPVAFSAEFYTVLEDGRRGNLSLVRFKQERGAVSSFNKVIDTLEKFMKRRGLLVEDPVRAQQMMKVLDKYQDPQGK

SEQ ID NO: 21887 - protein, 269 aa, Providencia rettgeri
AILVVAATDGPMPQTREHILLGRQVGVPYIIVFLNKCDMVDDEELLELVEMEVRELLSQYDFPGDDTPVVRGSALKALEGNPEWEAKIVELAGHLDTYIPEPERAIDKPFLLPIEDVFSISGRGTVVTGRVERGIIKVGEEVEIVGIQDTVKTTCTGVEMFRKLLDEGRAGENVGVLLRGTKREEIQRGQVLAKPGSIKPHTKFESEVYILSKDEGGRHTPFFKGYRPQFYFRTTDVTGTIELPEGVEMVMPGDNINMIVTLIHPIAMD

SEQ ID NO: 21888 - protein, 107 aa, Lilium longiflorum
RAAPAQASMVAPFVGLKSSSAFPVTQKPATGLPTLPSNGGRVQCMKVWPIVGKKKFETLSYLPTLPVEALLKQIEYLIRSGWVPCLEFSLVGFVSRDYHQSPGYYDG

SEQ ID NO: 21889 - protein, 531 aa, Saccharomyces cerevisiae
MRVYQFCRPFQLFTCFLCYLLVFVKANKEKISQKNYQVCAGMYSKEDWKGKIDPFISFNLKKISGLSDESDPGLVVAIYDFQDFEHLGVQLPDEEMYYICDDYAIDIGICEEENRDEFIVQDVVYDPYTSTNRSLANPIMTFSQNEVGLHDTRYPIKETGFYCVTAFRSSTSTKFNAVVNFRNAYGQLAGTEINKLPLYGLLAVAYVVAMALYSFAFWKHKHELLPLQKYLLAFFVFLTAETIFVWAYYDLKNEKGDTAGIKVYMVFLSILTAGKVTFSFFLLLIIALGYGIVYPKLNKTLMRRCQMYGALTYAICIGFLIQSYLTDMEAPSPLILITLIPMALALIIFYYMIIRSMTKTVIYLKEQRQIVKLNMYKKLLYIIYASFLSVLAGSIVSSFIYVGMNTIDMIEKNWRSRFFVTDFWPTLVYFIVFVTIAFLWRPTDTSYMLAASQQLPTDPENVADFDLGDLQSFDDQDDASIITGERGIDEDDLNLNFTDDEEGHDNVNNHSQATGQCLPLQQNNATSSRFD

SEQ ID NO: 21890 - protein, 270 aa, Proteus vulgaris
ILVVAATDGPMPQTREHILLGRQVGVPYIIVFLNKCDMVDDEELLELVEMEVRELLSQYDFPGDDTPVIRGSALKALEGEAEWEAKIVELAEALDSYIPEPERAIDKPFLLPIEDVFSISGRGTVVTGRVERGVIKVGEEVEIVGIKPTVKTTCTGVEMFRKLLDEGRAGENVGVLLRGTKREEIERGQVLAKPGSIKPHTKFESEVYILSKDEGGRHTPFFKGYRPQFYFRTTDVTGTIELPEGVEMVMPGDNINMIVELIHPIAMDDG

SEQ ID NO: 21891 - protein, 313 aa, Oenococcus oeni PSU-1
MTQKYDVVIIGAGPAGMTTATYASRANLSVMMINKGIYGGQMNDTAEVENYPAFDSILGPDLAEKMYASSTRFGAEYTFGEVQNVIDHGKTKTIVTDDEQYEAKVVIVASGATHRHIGVPGEDKYSGRGVSYCAVCDGAFFKNEQIVVIGGGDSAVEEASYLANLAKDVTIVHRRDQLRASRIAQKRAFDTDNIDFSWNKRTEEIIGDDEKVTGVKVLDKISNQESVIKTNGVFIYVGIDPNTQGLENLGILDEKGWVLTDDNMQTKVPGIYAVGDVRKDSIRQIAAAVGDGAVAGKILFDYIQSLSDTEIEA

SEQ ID NO: 21892 - protein, 363 aa, Salmonella enterica subsp. enterica serovar Typhi str. CT18
MSKNYHIAVLPGDGIGPEVMAQALKVMDAVRSRFDMRITTSRYDVGGIAIDNHGHPLPKATVEGCEQADAILFGSVGGPKWENLPPESQPERGALLPLRKHFKLFSNLRPAKLYQGLEAFCPLRADIAANGFDILCVRELTGGIYFGQPKGREGSGQYEKAFDTEVYHRFEIERIARIAFESARKRRRKVTSIDKANVLQSSILWREIVNDVAKAYPDVELAHMYIDNATMQLIKDPSQFDVLLCSNLFGDILSDECAMITGSMGMLPSASLNEQEFGLYEPAGGSAPDIAGKNIANPIAQILSLALLLRYSLDADEAATAIEQAINRALEEGVRTSDLARGAAAVSTDEMGDIIARYVAEGV

SEQ ID NO: 21893 - protein, 273 aa, Haemophilus influenzae
AILVVAATDGPMPQTREHILLGRQVGVPYIIVFLNKCDMVDDEELLELVEMEVRELLSQYDFPGDDTPIVRGSALQALNGVAEWEEKILELAGHLDTYIPEPERAIDQPFLLPIEDVFSISGRGTVVTGRVERGIIRTGDEVEIVGIKDTAKTTVTGVEMFRKLLDEGRAGENIGALLRGTKREEIERGQVLAKPGSITPHTDFESEVYVLSKDEGGRHTPFFKGYRPQFYFRTTDVTGTIELPEGVEMVMPGDNIKMTVSLIHPIAMDQGLR

SEQ ID NO: 21894 - protein, 523 aa, Salmonella enterica subsp. enterica serovar Typhi str. CT18
MSQQVIIFDTTLRDGEQALQASLSAKEKLQIALALERMGVDVMEVGFPVSSPGDFESVQTIARTIKNSRVCALARCVEKDIDVAAQALKVADAFRIHTFIATSPMHIATKLRSTLDEVIERAVYMVKRARNYTDDVEFSCEDAGRTPVDDLARVVEAAINAGARTINIPDTVGYTMPFEFAGIISGLYERVPNIDKAIISVHTHDDLGIAVGNSLAAVHAGARQVEGAMNGIGERAGNCALEEVIMAIKVRKDIINVHTNINHHEIWRTSQTVSQICNMPIPANKAIVGSGAFAHSSGIHQDGVLKNRENYEIMTPESIGLNQIQLNLTSRSGRAAVKHRMEEMGYKDTDYNMGHLYDAFLKLADKKGQVFDYDLEALAFINKQQEEPEHFRLDYFSVQSGSSDIATASVKLACGEEIKAEAANGNGPVDAIYQAINRITGYDVELVKYDLNAKGQGKDALGQVDIVVNHHGRRFHGVGLATDIVESSAKAMVHVLNNIWRAAEVEKELQRKAQNKENNKETV

SEQ ID NO: 21895 - protein, 1035 aa, Debaryomyces hansenii CBS767
MISRVVARSARANRLSTLTRSVPRAYNLNLKLAASNRFLASKADTSSADYEKVYDPSAKTVSLGNLDTFARRHLGPTPENVKTMLSALGYKDLDEFLSKAIPEHVLYKRALQIQPQQGFTELEMLEHLHNLANKNKIVKSFIGKGYAGTKVPPVIQRNLLESPEWYTSYTPYQPEISQGRLESLLNYQTMVTSLTGLNMANASLLDEGTAAGEAMSLSFHSLKGKRGKYAVDTNLHPQTLDVMKSRAENIGVEIVELPLSTQEGLEELERIASDSCGALVQYPGTDGSLNNYTKVGEIVHAHKGLFAMATDLLALTLIKSPAEFNADIALGTSQRFGVPFGYGGPHAAFFATNMKYSRKIPGRIVGLSKDRLGKPALRLALQTREQHIKREKATSNICTAQALLANMAAMYAVYHGPKGLKDIASRVYGYTTVLANEISNNSQHEIVNDKWFDTLTVKLGGGVKSDEILNKALNEYNINLFKAGEDKVSLCLDETVEEKDLIALVDVFTGNDLFSTSSISELPKLPTELLRTDEILAHPVFNTHRSETSMLRYLHLLQSRDLSLANSMIPLGSCTMKLNATVEMQTLSMPGFNQIHPFAPLNQAQGYKELVDEFEKDLNDITGFDATTNMPNSGAQGEYTGLSLIRQYHKSKGEYEQRNICLIPVSAHGTNPASAAMCGLKVVPVKCLNNGSIDVDDLKVKAEKHAENLCSIMITYPSTYGLFEPGIKTAIDLVHNNGGLVYLDGANMNAQVGLTSPGDLGADVCHLNIHKTFALSHGGGGPGQAPVCVKEHLKPFLPKHHFLDTPHSTNESIQAVNSAPYGSASVIPVSYSYIKMLGAKALPHVSSIAMLNANYMLEKLKDDYQIMFVDHSASTDEGLKHCAHEFILDLREFKAVGVEAIDVAKRLQDYGFHAPTMSFPVAGTLMIEPTESENLEELDRFINSLLSIRKEINAMANKEPLGQVLKNAPHSLNDIVSTSQADWEARGYTREQAAYPLPFLKESKCWPSVSRVDDTYGDMNLMCTCPSVEEVAADQ

SEQ ID NO: 21896 - protein, 128 aa, Vibrio parahaemolyticus RIMD 2210633
MKFLHTMIRVVDLDKSIEFYTKVLGMSVLDRFENQEYRYSLVFVGSPDQPDGATIELTYNWDTGSYDLGNAFGHMALGCEDIYAACEKIKALGGNVTREPGPMKGGETHIAFIKDPDGYPIELIQTKQ

SEQ ID NO: 21897 - protein, 99 aa, Zea mays
MARTQSAITCGQVSSAIAPCLSYARGTGSAPSASCCSGVRNLKSAASTAADRRAACNCLKNAARGVSGLNAGNAASIPSKCGVSIPYTISTSTDCSRVN

SEQ ID NO: 21898 - protein, 374 aa, Anabaena variabilis ATCC 29413
MTPTAQTTASARRVVFPFTAIVGQEEMKLALLLNVIDPKIGGVMIMGDRGTGKSTTIRALADLLPEIPVVANDPFNSDPSDPDLMSDEVRQKSGAGAEIPIEFKKVQMVDLPLGATEDRVCGTIDIEKALSEGVKAFEPGLLAKANRGILYVDEVNLLDDHLVDVLLDSAASGWNTVEREGISIRHPARFVLVGSGNPEEGELRPQLLDRFGMHAEIHTVKEPALRVQIVEQRSEFDQNPPTFLEKYNSEQTALQEKIVNAQKLLPEVKLDYDLRVKISEVCSELDVDGLRGDIVTNRAAKALTAYEGRTEVTVDDIRRVITLCLRHRLRKDPLESIDSGYKVEKVFARIFGVEILEEESSQKNGTGQIKTGVR

SEQ ID NO: 21899 - protein, 585 aa, Zea mays
MGTRPRGVVLAPWAVVLVLALRLAGASHVIHRSLEAEAPPSVPASIVSPLLRTGYHFQPPMNWINDPNAPLYYKGWYHLFYQYNPKGAVWGNIVWAHSVSRDLINWVALEPAIYPSIPSDKYGCWSGSATILEDGTPAILYTGIDRPDINYQVQVLALPKDASDPLLREWEKPEEYNPVATPAAGINATQFRDPTTAWRHAGHWRMLVGSVRGARGMALVYRSRDFRTWTKAKHPLHSAALTGMWECPDFFPVSGPGMQAGLDTSAPGRKYVLKSSLDLTRYDYYTIGSYDGGKDRYYPDDPAGDYHHRRRYDYGNYYASKTFYDPVERRRVLLGWANESDSVPDDKAKGWAGIHAIPRKIWLDPTGKQLLQWPIHEVEKLRGKAVSVDAKLVKPGDHFEVTGIATYQADVEVSFELEAGTSLLDKAEAFDPAYDDDAQKLCGVKGADARGGVGPFGLWVLASADLQERTAVFFRVFRDGHGKPKVLMCTDPTKSSLSPDLYKPTFAGFVDADISSGKIALRSLIDRSVVESFGAGGKTCILSRVYPSIAVGKDAHLYVFNNGEVDVTVSGLTAWEMKKPLMNGA

SEQ ID NO: 21900 - protein, 439 aa, Bacteroides fragilis NCTC 9343
MKVLKFGGTSVGSAQRMKEVAKLITDGERKIVVLSAMSGTTNTLVEISDYLYKKNPEGANEIINKLEAKYKQHVDELYATEEYKQKGLEVIKSHFDYIRSYTKDLFTLFEEKVVLAQGELISTAMVNYYLQECGVKSVLLPALEYMRTDKNAEPDPVYIKDKLQAQLDLYPDAEIYITQGFICRNAYGEIDNLQRGGSDYTASLVGAAIHASEIQIWTDIDGMHNNDPRIVDKTAPVRQLHFEEAAELAYFGAKILHPTCIQPAKYANIPVRLLNTMDPHAPGTLISNDTEKGKIKAVAAKGNITAIKIKSSRMLLAHGFLRKVFEIFESYQTSIDMICTSEVGVSVSVDNTKHLNEILDDLKKYGTVTVDKDMCIICVVGDLEWENVGFEAKALDAMRDIPVRMISFGGSNYNISFLIRECDKKVALQSLSDMLFNGK

SEQ ID NO: 21901 - protein, 517 aa, Neisseria meningitidis Z2491
MTQANRVIIFDTTLRDGEQSPGAAMTKEEKIRVARQLEKLGVDIIEAGFAAASPGDFEAVNAIAKTITKSTVCSLSRAIERDIRQAGEAVAPAPKKRIHTFIATSPIHMEYKLKMKPKQVIEAAVKAVKIAREYTDDVEFSCEDALRSEIDFLAEICGAVIEAGATTINIPDTVGYSIPYKTEEFFRELIVKTPNGGKVVWSAHCHNDLGLAVANSLAALKGGARQVECTVNGLGERAGNASVEEIVMALKVRHDLFGLETGIDTTQIVPSSKLVSTITGYPVQPNKAIVGANAFSHESGIHQDGVLKHRETYEIMSAESVGWATNRLSLGKLSGRNAFKTKLADLGIELESEEALNAAFARFKELADKKREIFDEDLHALVSDEMGSMNAESYKFISQKISTETGEEPRADIVFSIKGEEKRASATGSGPVDAIFKAIESVAQSGAALQIYSVNAVTQGTESQGETSVRLARGNRVVNGQGADTDVLVATAKAYLSALSKLEFGSAKPKAQGSGTI

SEQ ID NO: 21902 - protein, 89 aa, Glycine max
MRIRAKAIITHLMAVHGDDDPAEMDASNLWTINTYEAVGNGGTLDRMHNGHRLLLTGSAELAKCRIVIGDCDGPMLAMETVTSMEIKLY

SEQ ID NO: 21903 - protein, 555 aa, Burkholderia xenovorans LB400
MSQAIEVKVPDIGDYKDIPVIEVLVKAGDTVEKEQSLVTLESDKATMDVPSSAAGVVKEVKVKVGDNVSEGSLIVVLEGAEGGAAAPAPAPAAAPAAAPAPAPAAAPAAAPAPAPAASGGGLQEVKVPDIGDYKDIPVIEVAVKVGDRVEKEQSLVTLESDKATMDVPSSAAGVVKEVKVKVGDTVSEGSVIVVVEAEGGAAAPAPAPKQQAVEQPSDAPATPSPAPAAPSALAQAPVIPAGEGGARHASHASPSVRKFARELGVDVTQVQGTGPKGRITQADVTAFIKGVMTGQRAAPAGAAAPAAAGGGELNLLPWPKIDFTKFGPVDPKPLSRIKKISGANLHRNWVMIPHVTNNDEADITELEALRVQLNKENEKAGVKITMLAFVIKAVVSALKQFPTFNASLDGDNLVFKQYFHIGFAADTPNGLVVPVIRDADKKGLIDIAREMAELSKAARDGKLKPDQMQGGCFSISSLGGIGGTNFTPIINAPEVAILGLSRGATKPVWDGKQFVPRLILPLSLSYDHRVIDGAAAARFNAYLGAILADFRRVIL

SEQ ID NO: 21904 - protein, 233 aa, Caulobacter crescentus CB15
MTRLKVHVERHAVSRIGWLRAAVLGANDGIVSTASLVVGVAAAEATRGPILLAAGAGLVAGAMSMAAGEYVSVASQADSEAADLARERAELATQPEEELEEMTAIYVARGLTPDLARQVAEQLNAGDALAAHARDELGISEHVTARPVQAALTSAATFAVGAAMPLVVSLLAPLPVIIPTISVATLVFLAVLGWLGARTGGASPWKPMLRVTFWGALALLVTAVIGKLFGAVV

SEQ ID NO: 21905 - protein, 482 aa, Shewanella sp. ANA-3
MLLKDPSLLRQQCYINGQWCDAQSKETVAIANPATGAVIASVPVMGQAETQAAIAAAEAALPAWRALTAKERGVKLRRWFELLNENSDDLALMMTSEQGKPLAEAKGEVTYAASFIEWFAEEAKRVYGDTIPGHQGDKRIMVIKQPVGVTAAITPWNFPAAMITRKAAPALAAGCTMVVKPAPQTPFTALALAVLAERAGIPAGVFSVITGDAIGIGNEMCSNPVVRKLSFTGSTQVGIKLMEQCAPTLKKLSLELGGNAPFIVFDDANIDAAVEGAMIAKYRNAGQTCVCANRIYVQAGVYDEFARKLSIAVGKLKVGEGIGEGVTTGPLINCAAVEKVQSHLEDALSKGATVVAGGKPHSLGGNFFEPTVLTNVDSSMRVAREETFGPLAPLFKFTDVDDVIKQANDTEFGLAAYFYGRDISLVWKVTEALEYGMVGVNTGLISTEVAPFGGMKSSGLGREGSKFGIEEYLEIKYICMSV

SEQ ID NO: 21906 - protein, 108 aa, Moorella thermoacetica ATCC 39073
MAKPINVNQNDFEAEVLSAPLPVVVDFWAVWCGPCRMMAPVLEQLAADYDGNVKFAKVNVDENQELAARYGIMSIPTLVIFKDGAEAGRIVGYMPKEKLQEQLEAAIH

SEQ ID NO: 21907 - protein, 383 aa, Erwinia carotovora subsp. atroseptica SCRI1043
MFEPMELTNDAVIKVIGVGGGGGNAVEHMVRERIEGVEFFAVNTDAQALRKTAVGQTIQIGSGITKGLGAGANPEVGRNSAEEDREALRAALEGADMVFIAAGMGGGTGTGAAPVVAEVAKDLGILTVAVVTKPFNFEGKKRMAFAEQGIAELSKHVDSLITIPNDKLLKVLGRGISLLDAFGAANDVLKGAVQGIAELITRPGLMNVDFADVRTVMSEMGYAMMGSGVARGEDRAEEAAEMAISSPLLEDIDLSGARGVLVNITAGFDLRLDEFETVGNTIRAFASDNATVVIGTSLDPEMNDELRVTVVATGIGMDKRPEITLVTNKQASQPVMDHRYQQHGMTPLAQEKPAAKVVNDQNPQTNKEPDYLDIPAFLRKQAD

SEQ ID NO: 21908 - protein, 132 aa, Saccharomyces cerevisiae
MSGGKGGKAGSAAKASQSRSAKAGLTFPVGRVHRLLRRGNYAQRIGSGAPVYLTAVLEYLAAEILELAGNAARDNKKTRIIPRHLQLAIRNDDELNKLLGNVTIAQGGVLPNIHQNLLPKKSAKATKASQEL

SEQ ID NO: 21909 - protein, 229 aa, Synechococcus elongatus PCC 7942
MTALDDKTIVRDYFNATGFDRWSRIYGDGEVNFVQKNIRIGHQRTVDTVLSWLEADGNLSDRSFCDAGCGVGSLSLPLAQRGAQAVYASDISAKMVEEARERASQIPNLNNIQLEVSDLASLSGRYDTVICLDVLIHYPESDAAAMLSHLCSLAEQRVLVSFAPKSPVLNVLKRIGQFFPGASKTTRAYQHSETAIAAALAANGFQVQRRAFNKAPFYFSLLLEAVRTA

SEQ ID NO: 21910 - protein, 106 aa, Helicobacter pylori J99
MSHYIELTEENFESTIKKGVALVDFWAPWCGPCKMLSPVIDELASEYEGKAKICKVNTDEQEELSAKFGIRSIPTLLFTKDGEVVHQLVGVQTKVALKEQLNKLLG

SEQ ID NO: 21911 - protein, 336 aa, Codonopsis lanceolata
MPPVSNQVICVTGAGGFIASWMVKLLLEKGYSVRGTVRNPDDPKNSHLRDLEGAKDRLTLCKADLLDYQSLLEAIIGCDGVFHTASPVTDDPEQMVEPAVIGTKNVIVAAAEAKCRRVVFTSSIGAVYMDPNRSPDAVVDETCWSDLEFCKNTKNWYCYGKAVAEQAAWDEAKVRGVDLVVVNPVLVLGPLLQHTVNASIVHVQKYLTGSAKTYANSVQAYVHVRDVALAHILLFETPSASGRYLCAESVLHRGEVVEILAKFFPEYPIPTKCKDDGKPRAKPYKFSNQKLKDLGLEFTPVKQGLYETVKSLQEKGHLPVLSPPPQQTDDSIRIQS

SEQ ID NO: 21912 - protein, 497 aa, Synechococcus elongatus PCC 7942
MPRGVAPAFAGRKPKGWAWASTAVPDFQGGFKRLINRFQGSKLWLACVPLAATIAVFWGVAANAQGSADPVPSAQFLVNNLWLMVATVLVIFMNAGFAMVETGLCRQKNAVNVLAKNLIVFTLAATAYWFIGYSLMYGSPVVDGFLYFGKGGPLGFFFDPTVSAETIKNDGLISSLDFLFQAAFAGTAATIVSGSVAERIKFVDFIIFSLILTAVIYPIAGSWQWNVGSGWLNKAGFIDFAGSTVVHSVGGWAALIGAITLGPRMGKFQDGRPGALPGHNLAIATLGALILWIGWYGFNGGSVLAFNTAVPYVAVTTTLGGAAGGISATITSWSTSGKPDLSMVINGILAGLVGVTAGCDGFGMGGSFIVGLIAGVLVVFSVYTFENLKIDDPVGACSVHLVCGIWGTLAVGLFNLEKGLFYGGGFGQLGSQILGIISYGVWTVVASVIIWNILKALLGLRVSPEEELQGLDIGEHGMEAYSGFAKDASNALSSISE

SEQ ID NO: 21913 - protein, 311 aa, Helicobacter pylori J99
MIDCAIIGGGPAGLSAGLYATRGGVKNAVLFEKGMPGGQITGSSEIENYPGVKEVVSGLDFMQPWQEQCFRFGLKHEMTAIQRVSKKGSHFVILAEDGKTFEAKSVIIATGGSPKRTGIKGESEYWGKGVSTCATCDGFFYKNKEVAVLGGGDTAVEEAIYLANICKKVYLIHRRDGFRCAPITLEHAKNNSKIEFLTPYVVEEIKGDASGVSSLSIKNTATNEKRELVVPGLFIFVGYDVNNAVLKQEDNSMLCECDEYGSIVVDFSMKTNVQGLFAAGDIRIFAPKQVVCAASDGATAALSVISYLEHH

SEQ ID NO: 21914 - protein, 297 aa, Haloarcula marismortui ATCC 43049
MTTVIDGNEIGDQITEGVAACTDTLVSEGVTPGLATVLMSDDGASETYVSMKQRACNEIGIEGFHHQISADESAEALFSTIDELNADPAVHGILVQMPVPDHVPKRDVLERIDPMKDVDGFHPENVGRLVAGNARYKPCTPHGIQKMLAETGVVTEGKDVVVVGRSDIVGKPMANLLIQYGPGGNATTTVCHSRTDDLADKTRNADIVIAAAGVPEMIDGSMLSAGTTVIDVGINRVDADTEKGYELVGDVDFESAKEKADAITPVPGGVGPLTIAMLLYNTVKAASLQSGVDIRLP

SEQ ID NO: 21915 - protein, 318 aa, Geobacter metallireducens GS-15
MAPKQLRIGTRASQLALWQANWVKGELEKRYPGMAVELVKIKTMGDKILDVPLAQVGGKGLFVKEIEEAMLRGEIDIAVHSMKDVPTEFPEGLGLYCITEREDPRDAVISRGVKFADLPQGARIGTSALRRQAQILKVRPDLQMVVIRGNVETRIRKLTDENLDAVILAAAGLNRLGFADQVSEYLPVELSLPAIGQGALGIECRLDDETIKDTIAFFNHPDTAHAVRAERALLWRCEGGCQVPIAAHGQVSGDTLTLTGFVASVDGTRSVKDTISGPVTECEKLGIALAEKLLADGAHEILAEVYQREVAREKEIPV

SEQ ID NO: 21916 - protein, 176 aa, Rhodobacter sphaeroides 2.4.1
MTVRPHLALAFACLAGPALAAGPPPVTFDSIDGGQIRLDELRTAGPVLVVNTASLCGFTPQYDDLQALWDRYRDAGLTVLAVPSNDFKQELDDAGAVRDFCATNFDLTLPMTTITPVTGAEAHPFYRWLAEEHGVEPRWNFHKVLIDRDGDLVASWSSPVRPTDREIVGRIEALLP

SEQ ID NO: 21917 - protein, 227 aa, Triticum aestivum
MGGGGGTEEELTAQETALYDRQIRVWGVDAQKRLSKAHVLVCGVNGTTIEFCKNIVLAGVGSLSLMDDHIVTEDDLSANFLIPHDICMHGVSSRAEACCESLKDFNPMVRVAVAIGDPSLIDEGFVDRFDIIVVSCASLKTKLFINDNCRKRSKHIAFYSVECKDSCGEIFVDLQNHIYLQKKPGGEPEQQELSYASLQEAISVPWKNLPKKTTKLYYAMRGHDTKT

SEQ ID NO: 21918 - protein, 480 aa, Photobacterium profundum SS9
MTESVVRENQLIKRTLDDLPQPKGWPLLGNFLQLQSKNLHQVLEQWCLEYGDTYKVDIAGLLFVVIADPVVVKDILRRRPKSFNRTASLERVFKELGIHGVLSANGESWKRQRRLIMPAFSKKSLASFFPLLEQTTERLRLRLVKKRGQDTLAIHDDLRRFTVDITTSLVFGHDTRLLEHDGDGLQKHLEVIFPQLNSRTRMPFPYWQYIKFKKDRKLDQALIEVEKYALKIVEQTRDELQFNPQLADAPETILQAMVAASDDDNRLTNEELFANILTLLLAGEDTTSNLIAWMLYFISQRPDIQCKINEEAEQIRLKHKGQINVQGLDELTYLEAVARETLRLKSTAPMISAETADQVTLLDGTELPAGTGLFLMTRLGGLNKEHFKDAEQFRPERWQEEAVAAEACPHKATSHFPFGGGARHCPGETLAFMETKMVIAMLCQQFDISQPESPPVVEEYAITMRPKNLQICLRLKPVGR

SEQ ID NO: 21919 - protein, 596 aa, Gracilaria tenuistipitata var. liui
MNINSNSDLREVTGAFALMDSLIKNDVKYVFGYPGGAILPIYDELYKWENQGLITHILCRHEQGASHAADGYARSTGKVGVCFATSGPGATNLVSGIATAQLDSVPLVLITGQVARSFIGTDAFQEVDIFGITLPIVKHSYVVRDSRDMSRIVSEAFYIAQHGRPGPVLIDIPKDVGLEKFFYQPINPGDINLLGCRPFMKPKDNQIIKILNLLYESSQPLLYVGGGSIISGAHDVIKQFAYRFQIPICTTLMGKGIIDESDNLCLGMLGMHGTAYANFAVSECDLLIALGARFDDRVTGKLDEFACNAKVIHIDIDPAEIGKNRVPQVAILGDVKQVMVQILSYLDNSSNFVFNSQQTYSWKDRISMWRDQYPLLIPKHVTNLSPQEVIFYLSRIQTNAYFTTDVGQHQMWAAQFVSVLPRHWMSSSGLGTMGYGLPAAIGVQVAHPSEAVICISGDASFQMNLQELATISQYNLPIKIIIINNKWQGMVRQWQQAFYGERYSHSNMEKGAPDFVLLAQSFGILGLELEHRYDMNKVLHRFVNHDGPCLLNCKVREEENCYPMVAPGKSNSQMIGISKPIKNKNSSILKLETDSL

SEQ ID NO: 21920 - protein, 326 aa, Escherichia coli
KTFSEAIISGEWKGYTGKAITDVLNIGIGGSDLGPYMVTEALRPYKNHLNMHFVSNVDGTHIAEVLKKVNPETTLFLVASKTFTTQETMTNAHSARDWFLKAAGDEKHVAKHFAALSTNAKAVGEFGIDTANMFEFWDWVGGRYSLWSAIGLSIVLSIGFDNFVELLSGAHAMDKHFSTTPAEKNLPVLLALVGIWYNNFFGAETEAILPYDQYMHRFAAYFQQGNMESNGKYVDRNGNVVDYQTGPIIWGEPGTNGQHAFYQLIHQGTKMVPCDFIAPAITHNPLFDHHQKLLFKFFAQTEALAFGKSREVVEQEYCDQGKDPAT

SEQ ID NO: 21921 - protein, 887 aa, Vibrio cholerae O1 biovar eltor str. N16961
MDVIFFQGRMTMNEKYAALKSNVSMLGRLLGQTIQAADGDVILAKVETIRKLSKSARAGNQADRELLIEEIKNLPNHQLTPVARAFNQFLNLTNIAEQYHTISRHCESHVNELDAIGSLFAKLAQKSVSKFDTAQAIRDLNIELVLTAHPTEITRRTMINKLVKINECLSKLELSDLSPKERHKTERRLEQLIAQSWHSDVIRQQRPTPLDEAKWGFAVVENSLWHAVPEFLRELDEQVKSYLGEGLPIDARPVHFSSWMGGDRDGNPFVTHTITREVLLLSRWKAADLYLTDINELVSELSMTKCNEAVRALAGEEHEPYRAILKPIRSLLQETIEILDAKLNGQKLAVKAPLQTADQLWEPLYACYQSLHECGMGVIADGSLLDTLRRIKAFGVHLVRLDVRQESSRHAEVISELTRHLGIGDYNQWSEQDKIAFLTTELNSKRPLLPRDWQPSPQVKEVLDTCKIIAAQSKDAFGAYVISMARTASDVLAVHLLLQEAGCPYRMDVCPLFETLDDLNNAESVIRQLMNIDLYRGFIQNHQMVMIGYSDSAKDAGVMAAGWAQYRAMEALVKVGEEAGIELTLFHGRGGTIGRGGAPAHAALLSQPPKSLKGGLRVTEQGEMIRFKLGLPEVAVNSFNMYASAILEANLLPPPEPKNEWRALMDILSEISCNAYRKVVRGEPDFVPYFRQATPELELGKLPLGSRPAKRNPTGGVESLRAIPWIFSWSQNRLILPAWLGAGEAIQIAINEGHQALLEEMCREWPFFSTRLGMLEMVYTKCSVSIACHYDERLVEPTLRPLGEKLRAQLQQDIKVVLNVENNENLMQSDPWGQESIRLRNIYIEPLNMLQAELLYRTRQSELPAPELEEALMVTIAGIAAGMRNTG

SEQ ID NO: 21922 - protein, 407 aa, Synechocystis sp. PCC 6803
MVLRVAVVGGGPAGSSAAEILVKAGIETYLFERKLDNAKPCGGAIPLCMVDEFDLPPEIIDRRVRKMKMISPSNIEVNIGQTLKDDEYIGMCRREVLDGFLRERAEKLGTKVINGTVYKLDIPSKDSDPYTLHYADHSVGGTTGEMKILKVDVVIGADGANSRIAKAIDAGDYNYAIAFQERIRLPEDKMAYYDELAEMYVGDDVSPDFYAWVFPKYDHVAVGTGTMKVNKARIKDLQAGIRTRAAKKLEGGEIIKVEAHPIPEHPRPRRVVGRVALVGDAAGTVTKSSGEGIYFAAKSARMCAETIVATSNNGQRVPTEADLKQYIKQWDKRYGATYLVLDILQRVFYRTDATREAFVEMCSDIDVQKLTFDSYLYKTVVPANPLVQMKITAKTIGSLLRGNALAP

SEQ ID NO: 21923 - protein, 862 aa, Burkholderia xenovorans LB400
MPQDGARNQHIEETALMKIIVIGHGMVGHKLVECLAEDAAHGLDITVLCEESRPAYDRVHLSEFFAGKTADDLSLVEPGFFERRNVLLKLNAKAVAIDRDARTVTVSTGETLPYDKLVFATGSYPFVPPVQGRERTDCFVYRTIDDLEAMRECGARSKTGTVVGGGLLGLECAKALRDMGLQTHVVEFAPRLMAVQVDDGGGRVLRTKIEELGVTVHTQKNTTAIVDGEAGTHRMQFADGSHLDTDMIVFSAGIRPRDDLARESGLTLGARGGIVIDNACRTSDPHIYAIGECALWNGQLFGLVAPGYEMARAVAKQLLGGAAEFAGADMSTKLKLMGVDVASIGDAHGSTPGSRAYQFSDERKQVYKKLVVSECGKYLLGGVMVGDAGEYGALLQMMLNRIELPASPEFLILPQADGNAKPALGVEALPAGAQICSCNNVSKGELCAAVCAGATDIGALKGATGAGTSCGGCVPLVTQVMKAEMKKQGLAVNNHVCEHFPYSRQELYHIVRVEGVRSFGALLAKHGHGLGCDICKPLVASILASCWNEFVLKKEHASLQDTNDYYLANIQRDGTYSVVPRMAGGEVTPDGLIAVGQVAKKYGLYTKITGGQRVDLFGARVEQLPLIWEELIAAGFESGHAYGKSLRTVKSCVGSTWCRYGVGDSVGLAVEMENRYKGLRTPHKIKFGVSGCTRECAEAQGKDVGIIATEKGWNLYVCGNGGMKPRHAELLASDLDKETLVRYIDRFLMFYVRTADRLQRTSVWRDNLEGGLEYLIDVVVNDRLGVAGELESEMQHVVDTYECEWKKAVTDLETRKRFRHFVNSGESDSNLAFVEERGQIRPATPAERRSKLAAIPVVAETV

SEQ ID NO: 21924 - protein, 533 aa, Ustilago maydis
MSIANASSSTASHDLDAADADPCPSACTSVSALCNMSTLPSPRPFGYRPTYVPAMVASGVSAVTVTTNSHRPPSKSHSISSVDSLASVSSNAPSTPTHDADDVRFEMAVIPKLVRASADAYLDRVGKPLPPSPAPQIVATSATTKTNAQAARSVAAAAAAAAAAAAVPPSHSALRNENHKNAISFRVGSKYKVCEIIGEGAYGVVCSAIHRATGQKVAIKKIQPFEHQMFALRTLRELKLLRFFQECDVSENIISILDIIKPSTYEAFTEVYLVQELMETDLHRVIRTQELSDDHCQYFTYQTLRALKPMHCADVIHRDLKPSNVLLNANCDLKVCDFGLARSVLTADQDTGFMTEYVATRWYRAPEIMLTFKQYTKAIDAWAVGCILAEMLTGRPLFPGRDYHQQLSLILDVLGTPTLEEFQNINSRRSRDYIRSMPFRKRREFRTLFPKASPEAIDFLQKTLTFDPRNRLTVEECLQHPYLSAYHDPDDEPGAPRLDPDFFYFDMQKESITKEDLRKELWYQVQEFQPLLR

SEQ ID NO: 21925 - protein, 326 aa, Escherichia coli
KTFSEAIISGEWKGYTGKAITDVLNIGIGGSDLGPYMVTEALRPYKNHLNMHFVSNVDGTHIAEVLKKVNPETTLFLVASKTFTTQETMTNAHSARDWFLKAAGDEKHVAKHFAALSTNAKAVGEFGIDTANMFEFWDWVGGRYSLWSAIGLSIVLSIGFDNFVELLSGAHAMDKHFSTTPAEKNLPVLLALIGIWYNNFFGAETEAILPYDQYMHRFAAYFQQGNMESNGKYVDRNGKVVDYQTGPIIWGEPGTNGQHAFYQLIHQGTKMVPCDFIAPAITHNPLFDHHQKLLFKFFAQTEALAFGKSREVVEQEYCDQGKDPAT

SEQ ID NO: 21926 - protein, 579 aa, Yarrowia lipolytica CLIB122
MATEHVEHAENAKQSPQPSFSGSESGRIGRYQIIKTLGEGSFGKVKLAYHLATHEKVALKIINRKTLAKSDMQGRVEREISYLRLLRHPHIIKLYDVIKSKDEIIMVIEFAGKELFDYIVQRGKMPEDEARRFFQQIISAVEYCHRHKIVHRDLKPENLLLDENLNVKIADFGLSNIMTDGNFLKTSCGSPNYAAPEVISGKLYAGPEVDVWSCGVILYVMLCGRLPFDDEFIPNLFKKISNGVYTIPPYLSAGAKHLLQQMLVVNPLNRITVQGIMEDPWFKQGIAEYLVPRDLKPDQVEIDDKVVGALSDTMGYDRDQVYEALKAPKSDGTEIRDAYDLMKENRQQLEKDSTVFDKVDESGKPKHQFSRKNPPALTFDSHHMPTIVDHSDLRTPNTTIAVLPSSLPAYHRANMMAHGPATLRKLNPISSRKSKTRWHFGIRSKSYPLDVMGELYRALKNLGAEWAKPSENDLWTIRVRWRYTPEKDESDSTTKPDSGLLKMQIQLYLLEQNSYLVDFKFDGWECETESGEIKTRDVAQVSNSKSANETFTFSAYPFLHLATRLIMELAVSSQKESEK

SEQ ID NO: 21927 - protein, 128 aa, Pseudomonas aeruginosa PAO1
MRILHTMIRVGNIDRSIDFYTRVLGMTLLRKNDYPDGQFTLAFVGYGNEADSAVIELTHNWGVDAYEIGTGYGHIAIEVDDAYQACDDIRYNGGQVTREAGPMKHGTTVIAFVTDPDGYKIELIQKSS

SEQ ID NO: 21928 - protein, 397 aa, Xylella fastidiosa 9a5c
MSASFSPHTITLIKSTVPLLAEHGTTIIEAMYHRLFEDPQIEALFNQANQKNGTQIHALAGAILAYARNIDNPGVLASAIERIAQKHVGYAIHPEHYPHVATALLGAIKKVLGDVATSEVLEAWGEAYWFIANLLKDREAVIREGIMTKNGGWIHWRRFVISKRIPESETITSFMLHPEDGGPVVPHQAGQYLTFRFDAAGMPGMKRNYSISCGPNSDHYRITVKREHGTGASAFLHDQAKVGTIIECTPPVGDFFLPSVIERPIVLLSGGVGLTPMVSMMEQIAEAHPDAQVWYVHGTQNRETHAMDAHIRALVSRHKHMKATTFYTQRREADDAEAGFITIDWLRANTPFQKADFYLCGPRPFLRTFVRDLIGAGVPAVQVHYEFFGPMDEEMAA

SEQ ID NO: 21929 - protein, 497 aa, Lactobacillus reuteri
MKFSELGLSDSLLKAIKRSGYEEATPIQEQTIPMVLEGKDVIGQAQTGTGKTAAFGLPIIENVDTENPNIQAIIISPTRELAIQTQEELYRLGKDKHVRVQVVYGGADIRRQIKSLKQHPQILVGTPGRLRDHINRHTVKLDHIKTLVLDEADEMLNMGFLEDIESIIKETPDDRQTLLFSATMPPEIKRIGVQFMSDPETVRIKAKELTTDLVDQYYVRARDYEKFDIMTRLIDVQDPDLTIVFGRTKRRVDELSKGLIARGYNAAGIHGDLTQDKRSKIMWKFKNNELDILVATDVAARGLDISGVTHVYNYDIPSDPDSYVHRIGRTGRAGHHGVSLTFVTPNEMDYLHEIEKLTRVRMLPLKPPTAEEAFKGQVASAFNDIDELIAQDSTDRYEEAAEKLLETHNATDLVAALLNNMTKEAASEVPVKITPERPLPRRNKRNNRNGNRNNSHGGNHYRRKNFRRHQHGSHRNDNHGKSHSSRHSFNIRHRKEN

SEQ ID NO: 21930 - protein, 331 aa, Edwardsiella tarda
MTIKVGINGFGRIGRFVFRAAQERNDIEVVGINDLIDVDYMAYMLKYDSTHGRFNGTVEVEGGNLIVNGKTVRVTAERNPEDLKWDEIGVDVVAEATGLFLTDETARKHITAGAKKVVLTGPSKDATPMFVNGVNFDTYAGQDIVSNASCTTNCLAPIAKVLNDKFGIESGLMTTVHATTATQKTVDGPSAKDWRGGRGASQNIIPSSTGAAKAVGVVLPEVNGKLTGMAFRVPTANVSVVDLTVNLVNGASYEDICKAMKEASEGELKGVLGYTEDAVVSQDFIGEVCTSVFDAKAGIALTDKFVKVVSWYDNEIGYSNKVLDLIAHISK

SEQ ID NO: 21931 - protein, 206 aa, Triticum aestivum
  misc_feature (168)..(168): Xaa can be any naturally occurring amino acid
MASRRRTLLKVIILGDSGVGKTSLMNQYVNKKFSNQYKATIGADFLTKEVQFEDRLFTLQIWDTAGQERFQSLGVAFYRGADCCVLVYDVNSMKSFDNLNNWREEFLIQASPSDPDNFPFVLLGNKVDVDGGNSRVVSEKKAKAWCASKGNIPYFETSAKDGINVEEXFQCIVKNALKNEPEEELYMPDTVDVVGGNRGQGSSGCC

SEQ ID NO: 21932 - protein, 286 aa, Burkholderia xenovorans LB400
MTAKLIDGLALSKTLRADVAARAAALTARGHQPGLAVVLVGDNPASEVYVRNKVKACHDNGLGSSFDRYPADLPEAELLARIDELNRDPRIHGILVQLPLPPHIDSHKVIEAIAPEKDVDGFHVANAGALMTGQPLFRPCTPYGVMKMLAAYEIPLQGANAVVIGRSNIVGKPMALLLLEAGATVTICHSKTRDLAAHTRNADVVVAATGLRNILTADMVKPGAAVIDVGMNRDEAGKLCGDVDFAGVKEVAGYITPVPGGVGPMTITMLLVNTIEAAEREAAANA

SEQ ID NO: 21933 - protein, 591 aa, Caulobacter crescentus CB15
MRPFATCKGAARTRSLVSFPRTSAALPRFAEWLDQDVTSVTARSLPTLGVRLAICAATALIYALAVDLQGGLLWGLAVASAEAAVFICSSPQRADRKISHAQRLSYVAAVAWMNIVWWSLAIMLWRQDHPALRMAALCVVCAFLVHAQAFTARSKTLLLIVGGGSATLLLVLCGVLNDFPPSERLALCAAAIILIIYTAKAAQTNGQQGRALELAKSQAEAASQAKSEFLALMSHELRTPLNGMLGLSQALKLEPLEPGEREQVELLEESGRTLLALLNDVLDMAKIEAGKLDIAPTQEDLSRLAERVVRINQAQAREKGTEITLEIDPATPRALLFDPLRVRQCLGNLVSNAVKFTPAGQIRVRVTCEAGDQPDRMLAKIIVSDTGVGMGPAVLARIFTPFEQADPTIARRTGGTGLGLNITRRLAQMMGGSVSVRSTEGKGSTFTLTFGCRLPSAGAAETGGPLSGEHPLRLLVVDDYAVNRKVIAMMLAPLGCEIVEADNGQRALDLLAEREVDAVLLDFNMPVMGGLETTRRLRADPRWRKLPIVCLTAGVMDDERAAAATAGMDGFIEKPIEMSTLVSTLARVARR

SEQ ID NO: 21934 - protein, 320 aa, Persea americana
MDSFPVINMEKLEGQERAATMKLINDACENWGFFELVNHSIPVELMDEVERLTKEHYKKCMEQRFKELMASKVEGAVVDANDMDWESTFFIRHLPVSNLSEIPDLTDEHRKVMKEFAEKLEKLAEQVLDLLCENLGLEKGYLKMAFAGTTTGLPTFGTKVSNYPPCPRPELFKGLRAHTDAGGLILLFQDDRVAGLQLLKDGEWVDVPPMNHSIVINLGDQVEVITNGKYKSVMHRVVAQTDGNRMSLASFYNPGSDAVIFPAPALVEKEAEEKKEVYPKFVFEDYMNLYAGLKFQAKEPRFEVMKMKAVETANLSPITT

SEQ ID NO: 21935 - protein, 361 aa, Burkholderia mallei ATCC 23344
MSEKVYRIAVIPGDGIGVEVMPEGLRALDAVSRRFGLRFAYEPIEWASCDYYAKHGQMMPDDWKTQLSGMDALLFGAVGWPETVPDHISLWGSLIKFRREFDQYVNLRPARLFDGVPCPLAGRKAGDIDFMIVRENTEGEYSAVGGTMFEGTEREFVVQQAVFTRHGTERVLKFAFELAQRRAKRLTVATKSNGIAISMPWWDARAAEMAARYPDVTWDKQHIDILCARFVMQPDRFDVVVASNLFGDILSDLGPACTGTIGIAPSANLNPERNFPSLFEPVHGSAPDIAGKHIANPIAMIWSAAMMVDFLGAGTGRAREAHDAIVAAIEHVLKHGPRTRDMGGRASTREVGDAIVAHLLG

SEQ ID NO: 21936 - protein, 482 aa, Pseudomonas aeruginosa PAO1
MSLEQTGHAPATSGIDFESVDADYFQHRQLKKGAAGWVLLVGLGVAYVISGDYAGWNFGLAQGGWGGMFLATLLMATMYLCMCFSLAELSSMIPTAGGGYGFARSAFGPWGGFLTGTAILIEYAIAPAAIACFIGAYCESLFGVGGWLIYLVFYIVFIGIHILGAGEALKLMFVITAVAAIALGVFIVAMVPHFDSANLFNIPQTAATGASSFLPFGYVGVWAAIPYAIWFFLAVEGVPLAAEETKNPKRDLPRGLIGAMLVLLAFAALILVVGPGAAGAKELMGSGNPLVEALESAYKGSTWMSQFVNLVGLAGLIASFFSIIYAYSRQIFALSRAGYLPRSLSLTNRKKAPVLALVVPGVIGFGLSLTGQGDLLILVAVFGATISYVLMMAAHITLRIRRPDMQRPYRTPGGILTSGVALALACVAVVAGFLVDPRVVVGAVAIYAVLIGYFALYSRHHLVSGTPEEEFAAIQAAEQDLR

SEQ ID NO: 21937 - protein, 172 aa, Zea mays
MSSSNCPSPLPTVTKLQVDSVTFPPSVISPASSNPLFLGGAGVRGLDIQGKFVIFTVIGVYLDPVSVPSLSVKWKGKTTEELTESVPFFREIVTGSFEKFIKVTMKLPLTGQQYSEKVTENCVAIWKSLGIYTDSEAKAVERFLEVFKDETFPPGASILFALASKGSLTVAF

SEQ ID NO: 21938 - protein, 182 aa, Burkholderia sp. 383
MSTIYDIPVNAIDGAQTTLRPYEGKVLLVVNVASKCGLTPQYEGLEALYEGKRAEGLEVLAFPANNFKGQEPGTDAEIQSFCTGTFGVKFPLFSKISVIGDDKHPLYRSLTQAQPQATGDGPFRTRLEGYGIQPNPAPEVLWNFEKFLVSRTGEVVARFSPDTTADDPKLVAAIDAELAKAA

SEQ ID NO: 21939 - protein, 180 aa, Bacteroides fragilis YCH46
MKAFFSFVAALVLSLSMAAQNKSFYDFTVKTIDGKEYPLSGLKGKKVLVVNVASKCGLTPQYAELQELYDQYKDQNFVIIGFPANNFMGQEPGTNEEIAKFCSVNYDVTFPIMAKISVKGKDMAPLYHWLTEKKLNGKQDAPVQWNFQKFMIDENGNWVGFVAPKESPFSETIISWIEKK

SEQ ID NO: 21940 - protein, 294 aa, Bradyrhizobium sp. BTAi1
MSILIDKNTKVICQGFTGKNGTFHSEAAIAYGTKMVGGTSPGKGGSTHLGLPVFDTVKEAREATGADASVIYVPPPGAADAICEAIDAEVPLIVCITEGIPVLDMVRVKRSLQGSKSRLIGPNCPGVMTAGECKIGIMPANIFKPGSVGIVSRSGTLTYEAVFQTTSEGLGQTTAVGIGGDPVKGTEFIDMLEMFLADPKTESIIMIGEIGGSAEEDAAQFIKDEAKRGRKKPMVGFIAGVTAPPGRRMGHAGAIISGGKGDAGSKTAAMEAAGITVSPSPARLGKTLVEKLKS

SEQ ID NO: 21941 - protein, 203 aa, Solanum demissum
MDILGNLYIDPLPLVIPTTTSSTTFDNNSNEKVMLLLASKIPKRRGDRKKFHETRHPVYRGVRWKNFEKWVSEVRVPAKKSRIWLGTFPNAEMAAKAHDVAVMALKGRSACLNFADSTWRLPVPASAAVKDIQKAAAEAAEAFRVSESLERENSEEVVINNDDHYVVDSGWRLVIPASAVARDIQKAVAEAFCPSESSKGEYF

SEQ ID NO: 21942 - protein, 411 aa, Bradyrhizobium sp. BTAi1
MTEIRVPTLGESVTEATIGRWFKKAGDAVAVDEPLVELETDKVTIEVPAPSAGTLGEIIAKDGETVAVGALLGQINDGAVAAKPAAAAPAPAKPAAAPAAAAPAPAKALPADTPQAPSVRKLSAESGVDATTVPGSGKDGRVTKGDMLAAIERAASAPTPVNQPAAAVQVRAPSPADDAAREERVKMTRLRQTIARRLKDVQNTAAMLTTFNEVDMTNVMALRSQYKDVFEKKHGSKLGFMGFFTKAVVQALKDIPAVNAEIDGSDLIYKNYYHIGVAVGTDKGLVVPVVRDCDHKSIADIEKGIADFGRRARDGQLKIDEMQGGTFTITNGGIYGSLMSTPILNAPQSGILGMHKIQERPVVVGGKIEIRPMMYLALSYDHRVIDGKEAVTFLVRVKESLEDPARLVLDL

SEQ ID NO: 21943 - protein, 106 aa, Pelargonium zonale
MAKCIALFLLALIALSMLQTMVMASNGELGQSLSKNRYGPGSLKSSQCNPECTRRCSKTQYHKPCMFFCQKCCRKCLCVPPGFYGNKAVCPCYNNWKTQQGGPKCP

SEQ ID NO: 21944 - protein, 728 aa, Oryza sativa (japonica cultivar-group)
MSLPAISLYTSPPPGAVYSSEFDPSSRGSSPPCSTAPPSTSHRPPAAAGGLSCLFSSPAAAASPPRAPPHDELGALWQDRSDEPAFAGGGGGYSSSPLKWRDLHHHHHHSPVSVFQGPSSSPAASRSPPASWLAGRDRDRERLFAGFVRNALGSCVDYAPALSPRSEVGGGELAFELDENLAEASPACEPCARELLAGAQARHRIFHEELVVKTFFEAEKAHRGQTRASGDPYLQHCVETAVLLANIGANSTVLQHCVETAVLLANIGANSTVVSAGLLHDTIDDSFIDYDHIFHMFGAGVADLVEGVSKLSHLSKLARDNNTASRIVEADRLHTMLLAMADARAVLIKLADRVHNMKTLEALPLGKQQRFAKETMEIFVPLANRLGIASWKDQLENLCFKHLNPEEHKDLSSKLTKSFDEVLITSAVDKLDRGLRDAGLSYHNLSGRHKSLYSIHNKMLKKNLTMDEIHDIHGLRLVFEKEEDCYRALDVVHELWPQVPGRFKDYISRPKLNGYRSLHTVVMSENVHPFEVQIRTKEMHLQAEYGFAAHWRYKEGTCRHSFVLQMVEWARWVLTWQCEAMNKERPASLGDSDAIRPPCPFPMHSEDCPYSYTRQCDHDGPIFVILLEHDKMSVQEFQANSTVMNLMDRVGTNTPRWSPYRIPMKEDLRPKVNHEPISDLNRKLSMGDVVELTPALPHESLPNYREEIQRMYDRGGFALATRGGSSRR

SEQ ID NO: 21945 - protein, 306 aa, Xylella fastidiosa Ann-1
MYRSDVSPLIHHQLIEESLVMSDKSHVFDVTDADFETAVLKRSLETPVLVDFWAPWCAPCRSLIPILEKLVAEYRGGFELAKINVDQEQQVAAALQVRSVPMVYLVKDGQLVDGFPGAKPETQVREFLTKHGILPARSAAFGEDTPAISLDPEAEVARLRQALAAEPENNDLKLDLALALLKTNVADEAAGLIDALPAKLATDDRMLRAKAWLRFIEVLNGAPSLDVLQAACAADASDFDQRHLLGVHLLLDGQCEAALEHFLEMLRQNRDFKDGLPRKALIDAFYLIEDKELVGRYRRKMSALLF

SEQ ID NO: 21946 - protein, 935 aa, Staphylococcus aureus subsp. aureus Mu50
MNMKKKEKHAIRKKSIGVASVLVGTLIGFGLLSSKEADASENSVTQSDSASNESKSNDSSSVSAAPKTDDTNVSDTKTSSNTNNGETSVAQNPAQQETTQSSSTNATTEETPVTGEATTTTTNQANTPATTQSSNTNAEELVNQTSNETTSNDTNTVSSVNSPQNSTNAENVSTTQDTSTEATPSNNESAPQNTDASNKDVVSQAVNPSTPRMRAFSLAAVAADAPAAGTDITNQLTDVKVTIDSGTTVYPHQAGYVKLNYGFSVPNSAVKGDTFKITVPKELNLNGVTSTAKVPPIMAGDQVLANGVIDSDGNVIYTFTDYVDNKENVTANITMPAYIDPENVTKTGNVTLTTGIGTNTASKTVLIDYEKYGQFHNLSIKGTIDQIDKTNNTYRQTIYVNPSGDNVVLPALTGNLIPNTKSNALIDAKNTDIKVYRVDNANDLSESYYVNPSDFEDVTNQVRISFPNANQYKVEFPTDDDQITTPYIVVVNGHIDPASTGDLALRSTFYGYDSNFIWRSMSWDNEVAFNNGSGSGDGIDKPVVPEQPDEPGEIEPIPEDSDSDPGSDSGSDSNSDSGSDSGSDSTSDSGSDSASDSDSASDSDSASDSDSASDSDSASDSDSASDSDSASDSDSASDSDSASDSDSASDSDSASDSDSASDSDSASDSDSDSDSDSDSDSDSDSDSDSDSDSDSDSDSDSDSDSDSDSDSDSDSDSDSDSDSDSDSDSDSDSDSDSDSDSDSDSDSDSDSDSDSDSDSDSDSDSDSASDSDSDSDSESDSDSDSDSDSDSDSDSDSDSDSESDSDSDSDSDSESDSDSDSDSDSDSASDSDSGSDSDSSSDSDSDSTSDTGSDNDSDSDSNSDSESGSNNNVVPPNSPKNGTNASNKNEAKDSKEPLPDTGSEDEANTSLIWGLLASLGSLLLFRRKKENKDKK

SEQ ID NO: 21947 - protein, 449 aa, Arabidopsis thaliana
MTMSENSRNLEAGLLLRKNQNDINECRITAVVLFSTFVSVCGSFCFGCAAGYSSVAQTGIINDLGLSVAQYSMFGSIMTFGGMIGAIFSGKVADLMGRKGTMWFAQIFCIFGWVAVALAKDSMWLDIGRLSTGFAVGLLSYVIPVYIAEITPKHVRGAFVFANQLMQSCGLSLFYVIGNFVHWRNLALIGLIPCALQVVTLFFIPESPRLLGKWGHEKECRASLQSLRGDDADISEEANTIKETMILFDEGPKSRVMDLFQRRYAPSVVIGVGLMLLQQLSGSSGLMYYVGSVFDKGGFPSSIGSMILAVIMIPKALLGLILVEKMGRRPLLLASTGGMCFFSLLLSFSFCFRSYGMLDELTPIFTCIGVVGFISSFAVGMGGLPWIIMSEIFPMNVKVSAGTLVTLANWSFGWIVAFAYNFMLEWNASGINTYYYIIYYRVIKLSKKN

SEQ ID NO: 21948 - protein, 326 aa, Escherichia coli
KTFSEAIISGEWKGYTGKAITDVLNIGIGGSDLGPYMVTEALRPYKNHLNMHFVSNVDGTHIAEVLKKVNPETTLFLVASKTFTTQETMTNAHSARDWFLKAAGDEKHVAKHFAALSTNAKAVGEFGIDTANMFEFWDWVGGRYSLWSAIGLSIVLSIGFDNFVELLSGAHAMDKHFSTTPAEKNLPVLLALIGIWYNNFFGAETEAILPYDQYMHRFAAYFQQGNMESNGKYVDRNGNVVDYQTGPIIWGEPGTNGQHAFYQLIHQGTKMVPCDFIAPAITHNPLFDHHQELLSKFFAQTEALAFGKSREVVEQEYCDQGKDPAT

SEQ ID NO: 21949 - protein, 591 aa, Arabidopsis thaliana
MAISNVISVLLLLLVLINLSNQNIKGIDAFHQIYEELQSESVESVNHLHRPSFHFQPPKHWINDPNGPVYYKGLYHLFYQYNTKGAVWGNIIWAHSVSKDLVNWEALEPALSPSKWFDIGGTWSGSITIVPGKVPIILYTGVNQNETQLQNYAIPEDRSDPYLRKWIKPDDNPIAIPDYTMNGSAFRDPTTAWFSKDGHWRTVVGSKRKRRGIAYIYRSRDFKHWVKAKHPVHSKQSTGMWECPDFFPVSLTDFRNGLDLDYVGPNTKHVLKVSLDITRYEYYTLGKYDLKKDRYIPDGNTPDGWEGLRFDYGNFYASKTFFDYKKNRRILWGWANESDTVEDDILKGWAGLQVIPRTVLLDSSKKQLVFWPVEEIESLRGNYVRMNNHDIKMGQRIEVKGITPAQADVEVTFYVGSLEKAEIFDPSFTWKPLELCNIKGSNVRGGVGPFGLITLATPDLEEYTPVFFRVFNDTKTHKPKVLMCSDARPSSLKQDTGLLAKDRMYKPSFAGFVDVDMADGRISLRSLIDHSVVESFGALGKTVITSRVYPVKAVKENAHLYVFNNGTQTVTIESLNAWNMDRPLQMNDGAL

SEQ ID NO: 21950 - protein, 202 aa, Prunus mume
LTHEIRGTLDRHTILKTTLVELGRTLALEECALWMPTRTGLELQLSYTLRQQNPVGYTVPIHLPVINQVFSSNRALKISPNSPVARMRPLAGKHMPGEVVAVRVPLLHLSNFQINDWPELSTKRYALMVLMLPSDSARQWHVHELELVEVVADQVAVALSHAAILEESMRARDLLMEQNIALDLARREAETAIRARNDFLAV

SEQ ID NO: 21951 - protein, 326 aa, Escherichia coli
KTFSEAIISGEWKGYTGKAITDVLNIGIGGSDLGPYMVTEALRPYKNHLNMHFVSNVDGTHIAEVLKKVNPETTLFLVASKTFTTQETMTNAHSARDWFLKAAGDEKHVAKHFAALSTNAKAVGEFGIDTANMFEFWDWVGGRYSLWSAIGLSIVLSIGFDNFVELLSGAHAMDKHFSTTPAEKNLPVLLALIGIWYNNFFGAETEAILPYDQYMHRFAAYFQQGNMESNGKYVDRNGNVVDYQTGPIIWGEPGTNGQHAFYQLIHQGTKMVPCDFIAPAITHNPLFDHHQKLLSKFFAQTEALAFGKSREVVEQEYRDQGKDPAT

SEQ ID NO: 21952 - protein, 728 aa, Oryza sativa
  misc_feature (709)..(709): Xaa can be any naturally occurring amino acid
MGKSSKKSAVEVAPTSVSVSEGKSGKKGKRNAEDEIEKAVSAKKQKTVREKVVPSKEEAKKVKKQPPPKKVESSSSEEDSSESEEEVKAQPKKTVQPKKAAQPAKEESSDDSSDDSSSDDEPAKKPVARPNKAALSTNSSSSDDSSDESLSDDEPVKKPAAPLKKPVALATNGSKKVETDSSSSDSSSDEESDEDDKKTAAPVKKPSVAAIQKKTQESDSSDSDSDSESDEDVPTKAPAVAKKKEESSESSDSESDSDSDDEAAKTIIPAKAAAVKKEEESSDSSDSDSESESDSDEPAKPTIPAKRPLTKDTKKGQSKDESEDSSDESSEESGDEPPQKKIKDSTTSGTTKPSPKATKKEISSDDESDEDDSSDESSDEDVKQKQTQAKKVQAPVAQESSSSDESSEEDSDMESDEPAKTPQKKIYVSKSFFILQETAVSVGSNKSATKPGQEEPKTPASNQNQATGSKTLFVGNLPYNVEQEQVKQFFQEAGEVVDIRFSTFEDGNFRGFGHVEFATAEAAKKALELAGHDLMGRPVRLDLARERGAYTPGSGRDNSSFKKPAQSSGNTIFIKGFDTSLDIHQIRNSLEEHFGSCGEITRVSIPKDYETGASKGMAYMDFADNGSLSKAYELNGSDLGGYSLYVDEARPRPDNNREGGFSGGRDFNSSGRGGRRGGRGDGSRGRGDRGRGRGFGRGDRGHGGRGTPXKQSAGTPSAGKKTTFGDDD

SEQ ID NO: 21953 - protein, 159 aa, Bacillus cereus ATCC 10987
MWKTTDLCDEFEKELQICRQSFRSFGKKEQFHGKIATVKVKDDNVLVKEGLQTLPEGTVLVVDGGASTNCALLGDNLAAIAEERKLAGIIVNGYVRDSSELKNVNIGILALGTMPNRSVKEGKGERNISLQFGGVEWKPNDYVYADEDGVIISEKSLHR

SEQ ID NO: 21954 - protein, 249 aa, Zea mays
  misc_feature (35)..(35): Xaa can be any naturally occurring amino acid
MDGGGGAGGAEGELTAQETALYDRQIRVWGVDAQXEFCKNIVLAGVGSLSLMDDNVVTEEDLNANFLIPPDESIYGGRSRAQVCCESLIDFNPMVRVSVEKGDPSLIDGEFLDKFDIVVLSRASLKTKLLINENCRKRSKHIAFYTIDCKDSCGEIFVDLQKHSYVQKKPGGATEQQELTYSSLQEAISEPWNSLPKKTGKLYFAMRVLEDYELSEGRSPGETTLSDIDAVLARRKDMCDKMVLKFFLS

SEQ ID NO: 21955 - protein, 202 aa, Prunus mume
LTHEIRSTLDRHTILKTTLVELGRTLGLQECALWMPSRAGMNLQLSHTLNYQIQVGSTVPINLPVVNEVFTSSRAIRIPYTCPLARIRPLVGRYVPPEVVALRVPLLNLSNFQINDWPDLSAKSYAIMVLILPTDSTRKWRDHELELVDVVADQVAVALSHAAILEESMRARDQLMEQNIALDLARREAEMAIHARNDFLAV

SEQ ID NO: 21956 - protein, 326 aa, Escherichia coli
KTFSEAIISGEWKGYTGKAITDVVNIGIGGSDLGPYMVTEALRPYKNHLNMHFVSNVDGTHIAEVLKKVNPETTLFLVASKTFTTQETMTNAHSARDWFLKAAGDEKHVAKHFAALSTNAKAVGEFGIDTANMFEFWDWVGGRYSLWSAIGLSIVLSIGFDNFVELLSGAHAMDKHFSTTPAEKNLPVLLALIGIWYNNFFGAETEAILPYDQYMHRFAAYFQQGNMESNGKYVDRNGNVVDYQTGPIIWGEPGTNGQHAFYQLIHQGTKMVPCDFIAPAITHNPLFDHHQKLLSKFFAQTEALAFGKSREVVEQEYRDQGKDPAT

SEQ ID NO: 21957 - protein, 318 aa, Spirogyra sp.
KVGINGFGRIGRNFIRCWHGRDDSPLEVIAINDTGGVKQAAHLLKYDSMLGIFNADVKIADDNSISVDGKIIKVVSDRNPLNLPWGEMGIDLVIEGTGVFIDGPGAGKHIEAGAKKVLITAPGKGPIPTYVVGVNADKYVHSEPIISNASCTTNCLAPFVKILEEKFGIIKGTMTTTHSYTGDQRLLDASHRDLRRARAAALNIVPTSTGAAKAVSLVLPSLKGKLNGIALRVPTPNVSVVDLVIQTEKKTFAEEVNAAFREAAAGPMKGVLAVCDEPLVSIDFRCSDVSCTIDSSLTMVMGDDMVKVVAWYDNELGY

SEQ ID NO: 21958 - protein, 336 aa, Desulfitobacterium hafniense Y51
MSVRVAINGFGRIGRLTLRAILKQSLPVEVVAINDLGNPDLLAHLFKYDSLHGILPNSVEIDGNTMLVDGKSIAILSERNPLDLPWRKLGVDIVIESTGRFTKRAAASQHLTAGAKKVVISAPAKNEDITIVMGVNDDQYQPQEHHIISNASCTTNCLAPVAKVLLDAFGIEQGMMTTTHSVTNDQRILDLEHSDWRRSRAAYQSIIPTTTGAAQAVTLVIPELAGKMNGLAVRVPTPNVSLVDFVANLTKSTTKEEVNAALRESAEGKLKGYLEYTELPLVSRDFNGNSASSIVDGLSTMMIGERMVKVLAWYDNEWGYSNRIVDLVKLIVMKGL

SEQ ID NO: 21959 - protein, 131 aa, Arabidopsis thaliana
  misc_feature (91)..(91): Xaa can be any naturally occurring amino acid
  misc_feature (105)..(105): Xaa can be any naturally occurring amino acid
MASSMLSSTAVVTSPAQATMVAPFTGLKSSASFPVTRKANNDITSITSNGGRVSCMKVWPPIGKKKFETLSYLPDLSDVELAKEVDYLLRXNKWVPCVEFEFEHXFFLPAETPVTGTDLGRFHLPSVKVEV

SEQ ID NO: 21960 - protein, 318 aa, Sphagnum cuspidatum
  misc_feature (313)..(313): Xaa can be any naturally occurring amino acid
KVGINGFGRIGRNFIRCWHGRKDSPLEIVVINDTGGLKQASHLLKYDSMLGTFAADVKVDGNDSISVDGKTIKVVSDRNPLNLPWGELGIDLVIEGTGVFVDKEGAGKHLKAGAKKVLITAPGKGAIPTYVVGVNADEYNHGDEIISNASCTTNCLAPFVKVLDEKFGIIKGTMTTTHSYTGDQRLLDASHRDLRRARAAALNIVPTSTGAAKAVALVLPNLKGKLNGIALRVPTPNVSVVDLVVQVEKKTFAEEVNAAFRDASAGPLKGILAVCDEPLVSVDFRCSDVSSTIDSSLTMVMGDDMVKVVAWYXNEWGY

SEQ ID NO: 21961 - protein, 133 aa, Glycine max
  misc_feature (116)..(116): Xaa can be any naturally occurring amino acid
MASSFMASVALKPAGFTGEKSSVRGLPSLSRNSSSFRVVASGGKMIKTDKPYGINGGMALREGVDASGMKGKGKGVYQFVDKYGANVDGYSPIYDTKDWSSTGDVYAGGTTDLAIXTVTLLEILAGSTLLVYN

SEQ ID NO: 21962 - protein, 283 aa, Sphagnum cuspidatum
  misc_feature (279)..(279): Xaa can be any naturally occurring amino acid
GVKQASHLLKYDSMLGTFNADVKVDGNDGISVDGKIIKVVSDRNPLNLPWGELGIDLVIEGTGVFVDKEGAGKHLQAGAKKVLITAPGKGAIPTYVVGVNEEQYSHRDEIISNASCTTNCLAPFVKVLDEKFGIIKGTMTTTHSYTGDQRLLDASHRDLRRARAAALNIVPTSTGAAKAVALVLPNLKGKLNGIALRVPTPNVSVVDLVVQVEKKTFAEEVNAAFRDASAGALKGILAVCDEPLVSVDFRCSDVSSTVDSSLTMVMGDDMVKVVAWYDXEWGY

SEQ ID NO: 21963 - protein, 458 aa, Carboxydothermus hydrogenoformans Z-2901
MIKFGTDGWRGIIAKDFTFASLEKVTLGLAAYLQEKYRAGAVVVGYDCRFLSEHFAETVAEILLKSGFDVYLPEKFVPTPYVAFAINKLKAIGGVMLTASHNPPEYNGFKFIPDYAGPALPDITDRLEQLINAGAVPSLKEKGKKLTLNLESAYVDHLKKLTGLNYGQGTVVVDPMYGAGQGYLEKVLTDFGYTVSTIRNYRDPLFGGSMPEPKQKELKPLVEAIKNKKADLGLALDGDADRFGIVEGERLFTANEVLILTYHYLIESGRGGDVARTVPTTHLLDKMARANGFNVIETPVGFKYIGKALREGAVLGGEESGGLSIAGHVPEKDGILADLLAVKIREFFKKPLTEVLEDVYTRYGRSYTRRDDYRTTPEQKEEILKRLSSLKLTEIAGEKVLRESRVDGMKWELASGSFVLVRASGTEPVFRIYGEAESEEKLDLLLNEIKMVVLGTVL

SEQ ID NO: 21964 - protein, 284 aa, Pseudomonas syringae pv. syringae B728a
MTAKLIDGKAIAASLRQQIAKRVAERSQQGLRTPGLAVILVGSDPASQVYVSHKRKDCEEVGFISQAYDLPADTTQAALTDLIDRLNEDAAVDGVLLQLPLPAHLDASLLLERIRPDKDVDGFHPYNVGRLAQRIPLLRPCTPKGIMTLLESTGVDLYGLDAVVVGASNIVGRPMAMELLLAGCTVTVTHRFTRDLAGHVGRADLVVVAAGKPGLVKGEWIKPGAIVIDVGINRQEDGKLVGDVVYETALPRAGWITPVPGGVGPMTRACLLENTLYAAETLHD

SEQ ID NO: 21965 - protein, 585 aa, Aspergillus oryzae
MLSPPHLKPAVPSASLLRYLRSQSENTHVFISACGTSRKPQVHNQPSRMLALRNTSSWANIKPLRCRAALETNLLSVSTISRSRGSSRCRASLGQSPSPITVFSRATHTKSRPLLRRLFDLRRSKAAAEAKLNRAGSPALVDEGAEGLNFGRGLAAKASNELRLRCTEFDNNGNVTLVNGEFRKSELIAKYGLLPRDLRKIDSSTLPHILVRPSAILINLLHLRVLIKADRVLVFDAYGSTDSYMQSLFVYDLEGKLRQKQSQGAQALPYEFRALEAVLISVTAGLEEEFNGVREPVVRVLRALEEDIDRDKLRHLLIYSKKLGSFEQKARLVRDAIDDLLEADDDLAAMYLTERAEGVQRQEHDHQEVEMLLESYHKVCDEIVQESGNLVTGIRNTEEVVKAILDANRNSLMLLDLKFSIGTLGLATGTLFSALYGMNLKNFIEESDFGFGGVSVICFAITAVVCVYGLAKLRKLQRVRMWGEAGVGGSPMVSLPTRNSALTAHRSNWRADSIEPVWGSLPGEGRAERIRRLKDSAAAAAAKSAATEPTAQRAAASWNAAKSQPKQSGESATNEAAANIGGDSA

SEQ ID NO: 21966 - protein, 488 aa, Psidium guajava
MARVVMSNMSPAMSSTYPPSLSPPSSPRPTTLPVRTIPGSYGWPLLGPISDRLDYFWFQGPETFFRKRIEKYKSTVFRANVPPCFPFFSNVNPNVVVVLDCESFAHLFDMEIVEKSNVLVGDFMPSVKYTGNIRVCAYLDTSEPQHAQVKNFAMDILKRSSKVWESEVISNLDTMWDTIESSLAKDGNASVIFPLQKFLFNFLSKSIIGADPAASPQVAKSGYAMLDRWLALQLLPTINIGVLQPLVEIFLHSWAYPFALVSGDYNKLYQFIEKEGREAVERAKAEFGLTHQEAIHNLLFILGFNAFGGFSIFLPTLLSNILSDTTGLQDRLRKEVRAKGGPALSFASVKEMELVKSVVYETLRLNPPVPFQYARARKDFQLKSHDSVFDVKKGELLCGYQKVVMTDPKVFDEPESFNSDRFVQNSELLDYLYWSNGPQTGTPTESNKQCAAKDYVTLTACLFVAYMFRRYNSVTGSSSSITAVEKAN

SEQ ID NO: 21967 - protein, 383 aa, Salmonella enterica subsp. enterica serovar Typhi str. CT18
MFEPMELTNDAVITVIGVGGGGGNAVEHMVRERIEGVEFFAVNTDAQALRKTAVGQTIQIGSGITKGLGAGANPEVGRNAADEDREALRAALEGADMVFIAAGMGGGTGTGAAPVVAEVAKDLGILTVAVVTKPFNFEGKKRMAFAEQGITELSKHVDSLITIPNDKLLKVLGRGISLLDAFGAANDVLKGAVQGIAELITRPGLMNVDFADVRTVMSEMGYAMMGSGVASGEDRAEEAAEMAISSPLLEDIDLSGARGVLVNITAGFDLRLDEFETVGNTIRAFASDNATVVIGTSLDPDMNDELRVTVVATGIGMDKRPEITLVTNKQVQQPVLDRYQQHGMAPLTQEQKTVAKVVNDNAPQAAKEPDYLDIPAFLRKQAD

SEQ ID NO: 21968 - protein, 496 aa, Shewanella sp. ANA-3
MLTMTHYVNGEHTAASTRSQEIFEPATGECRGQVSLASRDEVSAAIAIAKSAFDTWSQVTPLNRARVLFKFKALVEQHMDELAQLITLEHGKVLDDARGELIRGLEVVEFACGIPHLLKGEHTEQVGGGVDAWSVNQALGVVAGIAPFNFPVMVPMWMFPIAIACGNTFIMKPSEKDPSAVMRIAELLTQAGLPAGVFNVVNGDKEAVDTLLSHEDIQAVSFVGSTPIAEYIYSTASKHGKRVQALGGAKNHMLLMPDADLDQAVSALMGAAYGSAGERCMAISVVLAVGDVGDKLVDKLLPQIQQLKVGNGLTPEMEMGPLISRQHLAKVTEFVDAGVKEGATLVVDGRQLTVADHQQGYFLGACLFDNVTPEMRIYREEIFGPVLSIVRVKDYASALALINQHEFGNGTAIFTQSGEAARHFCHHVQVGMVGVNVPIPVPMAFHSFGGWKRSLFGPLHMHGPDGVRFYTKRKAITARWPVGKQTQAEFVMPTMK

SEQ ID NO: 21969 - protein, 299 aa, Propionibacterium freudenreichii subsp. shermanii
MNSPVDPTSTPAWAELENLHRSLDVDFRKWFAEEPNRAQQFTLRAGDLTVDLSRNYLNQQVRDTLVSLAAQVDLAGRRDAMFRGDRINTTEDRSVLHVALRLPKGAELDVDGVNVVDQVHEVLDREISFTEAVRSGERGGVTGKPITTVVNIGIGGSDLGPVMVYEALKPYKHDRIECRFISNIDPADMYEKTHDLDAETTLFIVASKTFTTLETMTNARMAKNWLINSLQSSGAIDGTADSRARAIKRHFVAVSTNAEKVSEFGIDHANMFGFWDWVGGRYSVDSAVGLSALIAIGPD

SEQ ID NO: 21970 - protein, 166 aa, Erythrobacter sp. NAP1
MSWPAAIAVTLGALIFMEFFAWYAHKYIMHGWGWGWHRDHHEPHDNKLEKNDLFAVVFGTINAGMYIFGALYWDALWWAALGVNLYGVIYALVHDGLVHQRFGRYVPKNAYAKRLVQAHRLHHATIGKEGGVSFGFVLARDPAKLKAELKRQSQSGEAIVRESAGA

SEQ ID NO: 21971 - protein, 327 aa, Propionibacterium freudenreichii subsp. shermanii
NGFGRIGRNFFRAMVDQKADLDIVAVNDLTDTKTLAHLLKYDSILGRFPGEITYDDNSITVDGHKIQVCEERDPANLPWKDLGVEVVVESTGLFTDGEKAKAHIAAGAKKVIISAPAKNVDATFVIGVNEQEYDTSKHNIISNASCTTNCLAPLAKVFEDEFGIERGVMTTIHAYTGDQRLLDAPHKDLRRARAAAINLIPTKTGAAQAVALVIPALKGKFDGLAVRVPVPTGSLTDLSFIPGREVTVEEINAAVKKAAEGPLKGILAYTEDPIVSTDIVTDPHSSIFDASETKVIGNLVKVLSWYDNEWGYSNRLVDITELVADKL

SEQ ID NO: 21972 - protein, 532 aa, Erwinia carotovora subsp. atroseptica SCRI1043
MSEQVIIFDTTLRDGEQALQASLSVKEKLQIAFALERMGVDVMEVGFPVSSPGDFESVQTIARNIKNSRVCGLTRCVEKDIDVAAEALRVAEAFRIHTFIATSPMHIATKLRSTLDEVIERAIYMIKRARNYTDDVEFSCEDAGRTPIPDLCRVVEAAINAGARTINIPDTVGYTMPHEFGNIIASLYQHVPNIDKAIISVHTHDDLGLAVGNAMAAVHAGARQVEGTLNGIGERAGNCSLEEVIMAIKTRHDILNVHTNINHQEIYRTSQLVSQICNMPIPANKAVVGANAFAHSSGIHQDGVLKNRENYEIMTPESIGLKEVQLNLTSRSGRAAVKHRMEEMGYQDNDYNLDDLYSAFLKLADKKGQVFDYDLEALAFISRQQEEPEFYHLDYFSVQSGSSVMATASVKLICGEETQSEAATGNGPVDAVYQAINRITGYQVSLVKYQLTAKGQGRDALGQVDIVADYQGRRFHGVGLATDIVESSAQAMVNVLNNIKRAQQVEKEIQRLQQHNNQQQNDSKQQNSQETV

SEQ ID NO: 21973 - protein, 363 aa, Erwinia carotovora subsp. atroseptica SCRI1043
MTKSYHIAVLPGDGIGPEVMAQAHKVLDAVRQRFGIRITTSEYDVGGIAIDRQGTPLPQATVAGCEQADAILFGSVGGPKWEHLPPAEQPERGALLPLRKHFKLFSNLRPARLYQGLEAFCPLRSDIAAKGFDILCVRELTGGIYFGQPKGREGSGQYERAFDTEVYHRFEIERIAHIAFESARKRRSIVTSIDKANVLQSSILWREIVTEVAKAYPDVKLSHLYIDNATMQLIKDPSQFDVMLCSNLFGDILSDECAMITGSMGMLPSASLNEQGFGLYEPAGGSAPDIAGKDIANPIAQILSLALLLRYSLGADDAAEAIEKAVNTALAEGYRTADLASASNAIGTSEMGDVIARFVAQGA

SEQ ID NO: 21974 - protein, 470 aa, Chlorobium tepidum TLS
MVVMKFGGTSVGSAAAMRQVIANVAEKKKSSAPLVVLSACSGITNKLIQIADAAGSGCLEEAQQLVGEVRQFHLDLIGELIESEELQQEVIAKIEVYLTRLERLTEGIEIVGELTERSKDRFCSFGELLSTSVFAAALNEAGVSCKWIDVRTVMITDDRFGFARPLAEICQKNTSEIIKPLLDAGTVVVTQGYIGATESGRTTTLGRGGSDLSAALFGAWLHSESIEIWTDVDGVMTTDPRIVPEAKSIRVMTFSEAAELAYLGAKVLHPDTIAPAVQKNIPVYVLNTWHPDSKGTLITNDPELLAGKSHGGLVKSIAVKKAQAILNIRSNRMFGRHGFMSELFDVFERFGISVEMISTSEVSVSLTVDDAVVSEPLIKALGALGEVEIEHKVATVSVVGDNLRMSKGVAGRIFNSLRNVNLRMISQGASEINVGVVVDESDVQAAVASLHCEFFAESQCDAIFEKPAGS

SEQ ID NO: 21975 - protein, 488 aa, Bacillus subtilis subsp. subtilis str. 168
MSVITEQNTYLNFINGEWVKSQSGDMVKVENPADVNDIVGYVQNSTAEDVERAVTAANEAKTAWRKLTGAERGQYLYKTADIMEQRLEEIAACATREMGKTLPEAKGETARGIAILRYYAGEGMRKTGDVIPSTDKDALMFTTRVPLGVVGVISPWNFPVAIPIWKMAPALVYGNTVVIKPATETAVTCAKIIACFEEAGLPAGVINLVTGPGSVVGQGLAEHDGVNAVTFTGSNQVGKIIGQAALARGAKYQLEMGGKNPVIVADDADLEAAAEAVITGAFRSTGQKCTATSRVIVQSGIYERFKEKLLQRTKDITIGDSLKEDVWMGPIASKNQLDNCLSYIEKGKQEGASLLIGGEKLENGKYQNGYYVQPAIFDNVTSEMTIAQEEIFGPVIALIKVDSIEEALNIANDVKFGLSASIFTENIGRMLSFIDEIDAGLVRINAESAGVELQAPFGGMKQSSSHSREQGEAAKDFFTAIKTVFVKP

SEQ ID NO: 21976 - protein, 331 aa, Yarrowia lipolytica CLIB122
MLVLLTGGSGFIAAHILDGLVKRGIPVVTTVRSDNKAKFLAEKYPGHDLKFEIVPDVAQKDAFNNALKNHKITHILHTASPFFLNPKDPQKEILDPAINGTRGILEAAQEHGPGVEHVVITSSNAAITYYDARHKDPETVYTEKCWSNVPWEEAINNPASTYKASKQFAEEAMWNFQKEKNPKFRLTAINPPYVFGPMKHDVSAATLNTSNKIVWDIIKSSTIGKAGPTYWVDVRDVAEGHIRALERPEESANSRWYTVGGIFTPQDVLDVLNEMDEFKGKIPVGEPGSGVPLHSTIPKYDNSLTNKQSGLKYHTLEESVKDLAKQLNTLE

SEQ ID NO: 21977 - protein, 340 aa, Salinibacter ruber DSM 13855
MAHQLTLLPGDGIGPEVTEATLQVIEAAGVDIDWDRHRVIGANAVERGRPALPSDIVDSIQERGTALKGPVTTPVGQGFTSVNVQLRQRLDLYSNVRPATSLEGLDTPFDDVDLIIFRENTEGLYSGIEYYDERLDIADSIARVTKRGAERIIRFCFEYAQAHGREHVTLAHKANILKKTSGLFLDIGRDLAAEYPDIEFEDSIIDNLCMQLVTNPENYDCIVSTNLFGDILSDLTAGLVGGLGVTPGANIGDELAVFEAVHGSAPDIAGQNVANPTAMTRTAAMMLQHIGEDEAAAAIEQSLFAMYRDGDTLTQDVGGDASTSEFADALSDRVASKVEA

SEQ ID NO: 21978 - protein, 229 aa, Brassica napus
MLRSSFRLLYITRTNLLVRASPSSLSRLPSKFTSAKPLVCSHHQIPLSTTGAIHSSFEHSMAASSEPKSIYDFTVKDAKGNDVDLSIYKGKVLLIVNVASQCGLTNSNYTELAQLYQKYKDHGFEILAFPCNQFGNQEPGSNEEIVQFACTRFKAEYPIFDKVDVNGDKAAPIYKFLKSSKGGLFGDGIKWNFAKFLVDKDGNVVDRYAPTTSPLSIEKDLKKLLGVTA

SEQ ID NO: 21979 - protein, 314 aa, Nocardioides sp. JS614
MSAPLRVGTRASVLATTQSGLVADQLREALGREVELVTVSTEGDRTQAAGIPLQGGSATGVFVAALRDALLRGEVDVAVHSLKDLPTYPTEGITLAAVPVREDPRDVVVARDGLTLGELPVGSRVGTGSPRRVAQLHALGLGLEVVGIRGNVDTRIGKVRSGECDAVILARAGLARIGRLEAVTEVLDPLQMLPAPGQGALAVECRTDDPLAAQVAAALDDPRVRAAVTAERAVLATLEGGCSAPIGALAEIVEGEDGDELWVRSVALSPDGALSVRRSASGSPSDAAGVGTRLGEQMLADGADRLGDPAEVQQ

SEQ ID NO: 21980 - protein, 360 aa, Salinibacter ruber DSM 13855
MVWWWRALGPSGEGQPGPLPSSLFPVIDPSRPTMQDIECLGVYTSGGDAPGMNACLRAVVRTAIANDIAVMGIRRGYEGMIEADFVEMERRSVSNILQSGGTILKSARSEAFRTEEGRRAAANSLRENGIDALVAIGGDGTFRGASKLYDEHGLGVVGCPGTIDNDLYGTDQTIGYDTALNTAIDNIDRIRDTADAHNRLFLVEVMGRDAGFIALNSGIGGGAELILIPETITEMDMVKERILSLMTAQRRSTIVVVAEGDELGGAQGIERALRDDAAFSDIELRSTILGHTQRGGAPTASDRVLASRLGVAAVESLMDGHSDVMVGMTNNEIKLTPLRNVYGRRKSIDYDLLKLTQILS

SEQ ID NO: 21981 - protein, 374 aa, Cryptococcus neoformans var. neoformans B-3501A
MSPVRVPSHGDGWASTPQTKQVYYIASIPADGIGPEVVEAAITVLKAIAKKRGTFQLDFTNFDWSSETYKKTGRYVPDNHLDILRKFDAILFGAVGAPDVPDHISLWGLRLAICQPLQQYANVRRTRVLPGTESPLRNCKPGQLDWVIVRENSEGEYAGHGGRSHNGYNHEVATEISIFTRVGVERIARFAFQLAQSRPRKKLTYVTKSNAQRNGMVMWDEVVNEVAKEFPDVELDHMLVDAMTVRMVLHPESLDTIVATNLHADILSDLAAALAGSIGIAPTANLDPSRQNPSMFEPIHGSAFDITGKGIANPVATFWTAVEMLEWLGEKEAGQQLMEAVEAVCVDGIKTKDLGGSATTKEVTDAVVKRILQG

SEQ ID NO: 21982 - protein, 347 aa, Xanthomonas campestris pv. vesicatoria str. 85-10
MKQTVLVTGGSGYVACRLVKQLLEAGDTVHATVRSLHDSPKLRPLRQLQADHPDQLRLFEADLLVPGSFVGAMQGCSVVHHVASPFLMPEKIKNGRTQLLEPALQGVRNVLTTVNATSSVERVVLTSTIGAIFGDYRDVLDMPGQTLSEAFFNTTSSLDHNPYHYSKVVAEQEAWAMYRAQQRWDLVCINPGLVLGPSPAAGSDSGSLFLLDELMRGLFFYGVPDLSFATVDVREVANAHIAAAKRPSAHGRYIVASAQMISFLEIARFLRKVHRRPYLLPRLQIPGLALRLLGPFFGLSPKYIRNHLGIRFGLDNRRSRQELGVDYRPVEQTLHEHYASWDRQRRA

SEQ ID NO: 21983 - protein, 294 aa, Lactococcus lactis subsp. lactis Il1403
MNVSLWYNSSMNLIDGKALAAKMQAELKVKVDKLKEADNVPGLAVILVGEDPASQIYVRNKARQATAIGLNSSVVRLPETVSEQELLDLIEQYNQSEQWHGILVQLPLPEHISEEKVLLAIDPEKDVDGFHPMNMGRLWSGNPLMIPSTPAGIMEMFREYDVELSGKRAVVIGRSNIVGKPMAQLLMMADATVTIAHSKTENLRELTKEADVLVVAIGRDRMIKAEDVKEGAVVIDVGMNRDEDGKLHGDVDFDEVKDVASLITPVPGGVGPMTITMLMEQTVRAASRKMNENK

SEQ ID NO: 21984 - protein, 119 aa, Arabidopsis thaliana
MAFTPKIITCLIVLTIYMASPTESTIQCGTVTSTLAQCLTYLTNSGPLPSQCCVGVKSLYQLAQTTPDRKQVCECLKLAGKEIKGLNTDLVAALPTTCGVSIPYPISFSTNCDSISTAV

SEQ ID NO: 21985 - protein, 441 aa, Xylella fastidiosa Ann-1
MMPRSLTHPSDVPAMSSPYKSSSHMAKETLLYAQSGGVTAVINATAAAVITEARSHRVKVLAARNGILGALREDLIDTSKESITAIRALTHTPGGAFGSCRFKLKSLEADHDKYERLLEVFKAHNVRWFLYNGGNDSADTALKVSQLAKTFDYPLHCIGVPKTIDNDLAITDASPGFGSAAKYTAVSICEAARDVAAMAETSTKVFIYEAMGRHAGWLAAAAGLAGQGQEEAPHIILLPERTYDETAFLAKVQQVVDRVGWCVVVASEGIRSNDGRFVADAGGTTDAFGHTQLGGVAAYLASRVKQALGLKVHWTLPDYLQRSARHIASKTDWEQAQAVGKAAVRYALEGMNAVMPVIVRTSDTPYRWKIEPAALTKIANHEKTLPASFLRRDGFGISERARTYFEPLIRGEAPMPYERNGLPRHVHLKNQSVQKRLPAWE

SEQ ID NO: 21986 - protein, 885 aa, Zymomonas mobilis subsp. mobilis ZM4
MTKPRTINQNPDLRYFGNLLGQVIKEQGGESLFNQIEQIRSAAIRRHRGIVDSTELSSRLADLDLNDMFSFAHAFLLFSMLANLADDRQGDALDPDANMASALKDIKAKGVSQQAIIDMIDKACIVPVLTAHPTEVRRKSMLDHYNRIAGLMRLKDAGQTVTEDGLPIEDALIQQITILWQTRPLMLQKLTVADEIETALSFLRETFLPVLPQIYAEWEKLLGSSIPSFIRPGNWIGGDRDGNPNVNADTIMLSLKRSSETVLTDYLNRLDKLLSNLSVSTDMVSVSDDILRLADKSGDDAAIRADEPYRRALNGIYDRLAATYRQIAGRNPSRPALRSAEAYKRPQELLADLKTLAEGLGKLAEGSFKALIRSVETFGFHLATLDLRQNSQVHERVVNELLRTATVEADYLSLSEEDRVKLLRRELSQPRTLFVPRADYSEETRSELDIIQAAARAHEIFGPESITTYLISNGESISDILEVYLLLKEAGLYQGGAKPKAAIEAAPLFETVADLENAPKVMEEWFKLPEAQAIAKAHGVQEVMVGYSDSNKDGGYLTSVWGLYKACLALVPIFEKAGVPIQFFHGRGGSVGRGGGSNFNAILSQPAGAVKGRIRYTEQGEVVAAKYGTHESAIAHLDEAVAATLITSLEAPTIVEPEFSRYRKALDQISDSAFQAYRQLVYGTKGFRKFFSEFTPLPEIALLKIGSRPPSRKKSDRIEDLRAIPWVFSWSQVRVMLPGWFGFGQALYDFEDTELLQEMASRWPFFRTTIRNMEQVMARSDMTIAKHYLALVEDQTNGEAIYDSIADGWNKGCEGLLKATQQNWLLERFPAVDNSVQMRRPYLEPLNYLQVELLKKWRGGDTNPHILESIQLTINAIATALRNSG

SEQ ID NO: 21987 - protein, 283 aa, Cryptococcus neoformans var. neoformans B-3501A
MLARTLLKPSQSTYRLTIRAMSTSAEQLVIPSRSPSNNVAILTLNRPKALNALSTPLFNALNAELEKAETDESVRAIVITGGDKVFAAGADIKEMKDKEFAEAYTSNFLGSWNQIASIRKPIVGAVAGYALGGGCELAMLCDILVASPTAVFGQPEITLGIIPGMGGSQRLTSLIGKARAMDMVLTGRKIDAETAERWGLVSRVTKEGESVTEEAVKVAENVSKFGKVAVQAGKEAVNGSLDLPLEQGLRLERRLFQQLFATKDQKEGMAAFAEKRKPTWSDK

SEQ ID NO: 21988 - protein, 326 aa, Escherichia coli
KTFSEAIISGEWKGYTGKAITDVLNIGIGGSDLGPYMVTEALRPYKNHLNMHFVSNVDGTHIAEVLKKVNPETTLFLVASKTFTTQETMTNAHSARDWFLKAAGDEKHVAKHFAALSTNAKAVGEFGIDTANMFEFWDWVGGRYSLWSAIGLSIVLSIGFDNFVELLSGAHAMDKHFSTTPAEKNLPVLLALIGIWYNNFFGAETEAILPYDQYMHRFAAYFQQGNMESNGKYVDRNGNVVDYQTGPIIWGEPGTNGQHAFYQLIHQGTKMVPCDFIAPAITHNPLFDHHQKLLFKFFAQTEALAFGKSREVVEQEYCDQGKDPAT

SEQ ID NO: 21989 - protein, 498 aa, Zymomonas mobilis subsp. mobilis ZM4
MIFGRVKPLDAILETAKKKSLHRSLGAFQLTMLGIGAIIGTGIFVLTAEAAQKAGPGMMLSFIIAACVCGVAAFCYAEMAAMVPVSGSAYTYSYAVMGELVAWMVGWALILEYAVAASAVSVGWSGYVVGLIEHLTGSHLPASVLVFTKGPFNGGIINLPAAFIALLIMSLLIRGTKESATASAILVVIKITALSLFIFLAIPAMKMENFHPFAPLGFSGISAAAASIFFAYVGFDAVSTAAEETKDPQRNMPIGLVGSLAICTLFYMLVSAGVIGGVGAQPVFDAAHQHALPAGSSEMAAACSTLKDSHVVCSNEALAWSLRKIGWNKVGNLIALAAGFALPSVILMMIFGQTRIFFVMSRDGLLPGFFAKVHPRFKTPYIVTVMTGLAVATFSAFFPVGILADISNAGTLFAFAMVAIAVLVLRHTDPKRHRPFKTPCVYLIAPLAALGCLYLFVSLPLMTLKMFFGWTVVGLVVYFLYGYRHSNIARNISDDEEA

SEQ ID NO: 21990 - protein, 326 aa, Escherichia coli
KTFSEAIISGEWKGYTGKAITDVLNIGIGGSDLGPYMVTEALRPYKNHLNMHFVSNVDGTHIAEVLKKVNPETTLFLVASKTFTTQETMTNAHSARDWFLKAAGDEKHVAKHFAALSTNAKAVGEFGIDTANMFEFWDWVGGRYSLWSAIGLSIVLSIGFDNFVELLSGAHAMDKHFSTTPAEKNLPVLLALIGIWYNNFFGAETEAILPYDQYMHRFAAYFQQGNMESNGKYVDRNGKVVDYQTGPIIWGEPGTNGQHAFYQLIHQGTKMVPCDFIAPAITHNPLFDHHQKLLSKFFAQTEALAFGKSREVVEQEYRDQGKDPAT

SEQ ID NO: 21991 - protein, 413 aa, Cryptococcus neoformans var. neoformans B-3501A
MTAIQRPISVFARPLLPSSSRLRLAPPAIARQRFLATVRDGPAVGSKPPTAVLMMNMGGPSTVPEVHDFLSRLFHDNDLIPLPFQPLLAPLIAKRRTPSIEEQYSAIGGGSPILKWTQVQGAAMCSLLDELNPKSAPHKPYVAFRYAKTLTEDALAEMKQDGVQRAVAFSQYPQYSSSTTGSSLNELYKQVKQLGWGGNGEVKWSVIDRWPTHPGLVEAFAHNIKAALQTYPEDRRGDVTILFSAHSLPLDIVNRGDPYTAEVAATVWAVMSKLNFSNPWRLTWQSKVGPKAWQGPQTAAAIEGYAKAGTKDICLVPVAFTSDHIETLYELDIEVKEEAEKLGVHLTRASSLNDSPIFIRALADIVSNHLKDYDAGLIGPASKQLLSADPRHVSPRSQETRRWLASGGTNMAA

SEQ ID NO: 21992 - protein, 989 aa, Arabidopsis thaliana
MSDYGEKTCPLCAEEMDLTDQQLKPCKCGYQICVWCWHHIMDMAEKDQSEGRCPACRTPYDKEKIVGMTVDQERLASEGNMDRKKIQKSKPKSSDGRKPLTSVRVVQRNLVYIVGLPLNLADEDLLQRKEYFGQYGKVLKVSMSRTATGLIQQFPNNTCSVYITYGKEEEAIRCIQSVHGFILDGKALKACFGTTKYCHAWLRNVACNNQDCLYLHEVGSQEDSFTKDEIISAHTRVQQITGATNTMQYRSGSMLPPPLDAYTSDSSTGNPIAKVPSSTSVSAPKSSPPSGSSGKSTALPAAASWGARLTNQHSLATSALSNGSLDNQRSTSENGTLATSTVVTKAANGPVSSSNSLQKAPLKEEIQSLAEKSKPGVLKPLQQKIVLDPESKRTTSPNRDPSSNQISCLVESSYNSRVIDKPSAVENSLEHTSEIAEDVFDVGKLSADVAWMGITTNSRDETPGVPVVIGTHCDLGSITQSDNDVQNLEQCRKQSPTNTYAEADISLNGIHGSRPEWDWRSGLQSQIDVKEPLEVNDFSSFNNNRRGIAEAVSHSTSKFSSSISILDSNHLASRSFQNRETSCGMDSKTGSSFEIGSDRLHLPNGFSEKAMSNMEHSLFANEGRSNIQNTEDDIISNILDFDPWDESLTSQHNFAKLLGQSDHRASTLESSNLLKQHNDQSRFSFARHEESNSQAYDNRSYSIYGQLSRDQPLQEFGANRDMYQDKLGSQNGFASNYSGGYEQFATSPGLSSYKSPVARTQVSAPPGFSAPNRLPPPGFSSHQRGDLSSDIASGTRLLDSANLLRNAYHVPPPSGNLNAAGDIEFIDPAILAVGRGRLHNGMETADFDLRSGFSSQLNSFDNDARLQLLAQRSLAAQQVNGFHDPRNVNNFSSSFSDPYGISSRPTDQTQGTGLSPFTQLPRQASANPLLSNGHWDNKWNEPQSGNNLGITQLLRNERMGFNDNVYSGFEEPKFRRPGPGDPYNRTYGI

SEQ ID NO: 21993 - protein, 491 aa, Candida albicans SC5314
MAPKLNNPNLFQNKPFINGQWYDSKSTSTFKVYDPATQELIIELPDQTPEEIDEAIAITHKAFQTYQRTPVYERAKWLRRMYELMIENLQDLATLITWENGKCLADALGEIKYAASYFEWFSEECKRNYGHTIQPSNQNNKVITYKQPVGPVGLLCPFNFPSAMGARKAAPALAAGCTCILKPDGQTPLSSLALAYLAQQAGFPDGCFNVVLTSVTNTPMCGLKFCQSPKLKKISFTGSTNVGKLLMQQSSSTLKKLSMELGGNAPIIVFNDCNLDLAVDQSITSKFRSLGQTCVCANRIYVEKGVYDEFCNKFVEKVNQFKIGNGFEPGVTHGCLINTKAIEKVEDHVQDAVEKGAKLIVEGGRLPQLGENFYSPSVVKDVTQDMKVVKEETFGPLAAIIPFDSKEQVLQWCNDTPYGLASYIFSENLNTVWYMSEFLENGMVSVNTGLFTDAALPFGGVKESGFGREGSLYGMDDYTVIKSITLGNVYN

SEQ ID NO: 21994 - protein, 345 aa, Thermus thermophilus HB8
MERRSVQKKELLSTPVVPIDIKAFDAGPILEAMGKTAFQARNLHRAAEIYLRMLEDDCAVILTLAGSLVSAGQGLIVHDLIRKGLVDVIVATGANIVDQDFFEALGHRHYQGDPRADDEALRRLWIDRIYDTYIDEEELRHTDYTVAEIADGLEPRPYSSREFIWHMGRYLAERGLGEKSIVRAAYEEGVPIFVPAFSDSSAGFGLVYHQVKRPEAHVTIDSVADFRELTEIKLKAGTTGLVMLGGGVPKNFAQDIVVAAEVLGHRVEMHKYAIQITVADERDGGLSGSTLSEAQSWGKVDARLSQMVFAEATLAFPLLASYVWHRAPARAKRRYAELFREKAPA

SEQ ID NO: 21995 - protein, 497 aa, Nicotiana tabacum
MSTIMAKMMSGSTPINPGSTGRTSSPSLTPPPASLPVRTIPGGYGWPLLGPISDRLNYNWFQVPNTFFTKRIEKHKSTVFRTNVPPCFPFFLGVNPNVVAVLDVKSFSHLFDMEIVEKANVLVGDFMPSVQYTGDMRVCAYLDTSEPKHTQIKNFSLDILKRSSKTWVPTLVNELNTMFETFESDISKSNSASLLPTMQKFLFNFFSLTLLGANPSASPEIANSGYVMLDPWLAIHLAPTVSIGVLQPLEEIFVHSFSYPFFLVKGGYEKLIQFVKNEAKEVLNRGKSEFGLTEQEAIHNLLFILGFNAFGGFSIFLPTLLGNLGDEKNAELQEKLRNEVREKVGLKPENLSFESVKEMELVQSFVYETLRLSPPVPTQYARARKDFKLSSHDSVYEIKKGELLCGYQPLVMRDPKVFDNPEKFVLERFTKEKGKELLNYLFWSNGPQTGRPTESNKQCAAKDIVTLTASLIVAYVFQRYDSVSFSSGSITSVKKAS

SEQ ID NO: 21996 - protein, 412 aa, Carboxydothermus hydrogenoformans Z-2901
MKRVVVTGLGLISPLGIGIKENWDNLMKGVSGVREVSSFDTTGFATRIAAEVRDFDPLKFIDKKEARRMDRFTQFAVAATKLAIEDAGLELSKINPERAGIFIGSGIGGIKTLEEQAAILREKGPDRVSPFFVPMMIANMAGGQIAITFGLTGPNETIVSACASGANAVGDAFRCLQRGEVDVAIAGGAEAAITPLSFAGFCSMKAMSTRNDEPEKASRPFDKDRDGFVMGEGAGILILETLEHALARGARIYGEIVGYGVTSDAYHITAPDPEGKGAARAMELALKDARLNPEDIDYINAHGTSTPLNDKVETLAIKKVFGDHAYKLMVSSTKSMTGHLLGAAGGIETIYSILAVFFNQVPPTLNCDEPEEGLDLDYVPNTGRDTVVKAALSNSLGFGGHNVSLIVKKFNG

SEQ ID NO: 21997 - protein, 954 aa, Vibrio parahaemolyticus RIMD 2210633
MTELLQSLSTQNEFVGRHNGPKLSDQQKMLEAINAVSLDALISETVPANIRLEQPMTLAEAKSEADMLATMKQFAKQNQVKRTFIGQGYYNTFTPNVILRNVLENPGWYTAYTPYQPEISQGRLESLLNFQQMVIDLTGMEIANASLLDEATAAAEAMTLCKRAGKSKSNVFFVADDVHPQTIEVVKTRAKFIGFEVLVGSLESLPEQDVFGALVQYPSTTGEVRDLTDIIAKAQANKTLVTVATDLLACTLLKPAGEMGADVAIGSAQRFGVPMGYGGPHAAFMATRDKHKRTMPGRVIGVSIDAKGNQALRMAMQTREQHIRREKATSNICTAQALLANMASFYAVYHGAEGLRTIARRTHHMTAILAAGLTKGGFELAHNSFFDTITINTGEKTQDLYTKALAADINLRVLPGKLGISLDETTTVADVEALFAIFGVKEDVTALSTEVAGNEFAAIPEALRRTSEYLTHPVFNTYHSETQMMRYLKQLENKDFSLTHGMIPLGSCTMKLNAAAEMIPITWPEFGSIHPFAPAEQAAGYAALAKDLKEKLCEITGYDAFSLQPNSGASGEYAGLIAIQRYHESRGEGHRNVCLIPSSAHGTNPATASMVSMKVVVVKCDDEGNIDIDDLAAKIEKHKDNLSSIMITYPSTHGVYEEKVKEVCEMVHAAGGQVYLDGANMNAQVGLTSPGFIGSDVSHLNLHKTFCIPHGGGGPGMGPIGVKSHLAPFLPGHIENGVEGEDFAVSAADFGSASILPISWAYIAMMGEAGLSNATKVAILNANYVMERLRPHYPVLYRGKNGRVAHECIIDIRPLKEETGISEEDIAKRLMDYGFHAPTMSFPVAGTLMVEPTESEDLAELNRFCDAMISIREEMTKVKNGEWPLENNPLVNAPHTQVDLSAEEWDRPYSRELGCFPSKATKSWKYWPTVNRVDNVYGDRNLICSCPSIDNYED

SEQ ID NO: 21998 - protein, 305 aa, Prochlorococcus marinus
RIGRNFMRCWLSRGENTGLDLVGVNVTSDPKTNAHLLKYDSILGQIKDAEIDYTDDTFVINGKTIKCFSDRNPMNLPWREWGIDLVIESTGVFNTFEGASKHLQVGAKKVILTAPGKGEGVGTFVVGVNADQYRHDDFNVLSNASCTTNCLAPIVKVLDQSFGINKGLMTTIHSYTGDQRILDNSHRDLRRARAAAMNIVPTSTGAAKAVALVYPEMKGKLTGIAMGVPTPNVSAVDLVFESGRSITADSINAAPKSASEGSMKGIIKYGDTPLVSSDYAGTNDSTIVDTALTMTIGDNLGKVVA

SEQ ID NO: 21999 - protein, 957 aa, Salmonella typhimurium LT2
MTQTLSQLENRGAFIERHIGPDAAQQQEMLNAVGAESLNALTGQIVPKDIQLATPPQVGEAATEYAALAELKAIAGRNKRFTSYIGMGYTAVQLPPVILRNMLENPGWYTAYTPYQPEVSQGRLEALLNFQQVTLDLTGLDMASASLLDEATAAAEAMAMAKRVSKLKNANRFFVASDVHPQTLDVVRTRAETFGFDVIVDDAAKALDHQDVFGVLLQQVGTTGEIHDYSALITELKSRKVVVSVAADFMALVLLTAPGKQGADIVFGSAQRFGVPMGYGGPHAAFFAAKDEFKRSMPGRIIGVSKDAAGNTALRMAMQTREQHIRREKANSNICTSQVLLANIASLYAVYHGPVGLKRIANRIHRLTDILAAGLQQKGLKLRHAHYFDTLCVEVADKAAVLARAEAAEINLRSDIHNAVGITLDETTTRENVAQLFNVLLGDSHGLNIETLDKDVALDSRSIQQSMLRDDAILTHPVFNRYHSETEMMRYMHSLERKDLALNQAMIPLGSCTMKLNAAAEMIPITWPEFAELHPFCPPEQAEGYHQMISQLSDWLVKLTGYDAVCMQPNSGAQGEYAGLLAIRHYHESRNEGHRDICLIPASAHGTNPASAHMAGMQVVVVACDKNGNIDLDDLRAKAEQHAANLSCIMVTYPSTHGVYEETIREVCEVVHQFGGQVYLDGANMNAQVGITSPGFIGADVSHLNLHKTFCIPHGGGGPGMGPIGVKAHLAPFVPGHSVVQIEGMLTRQGAVSAAPFGSASILPISWMYIRMMGAEGLKQASQVAILNANYIASRLKDAYPVLYTGRDGRVAHECILDIRPLKEETGISELDIAKRLIDYGFHAPTMSFPVAGTLMVEPTESEGKAELDRFIDAMLAIRAEIDQVKAGVWPLEDNPLVNAPHIQSELVAEWAHPYSREVAVFPAGVADKYWPTVKRLDDVYGDRNLFCSCVPISDYQ

SEQ ID NO: 22000 - protein, 399 aa, Streptomyces coelicolor A3(2)
MAAPQNYLAVIKVIGVGGGGVNAINRMIEVGLKGVEFIAINTDAQALLMSDADVKLDVGRELTRGLGAGANPAVGRKAAEDHREEIEEVLKGADMVFVTAGEGGGTGTGGAPVVANIARSLGALTIGVVTRPFTFEGRRRANQAEDGIAELREEVDTLIVIPNDRLLSISDRQVSVLDAFKSADQVLLSGVQGITDLITTPGLINLDFADVKSVMSEAGSALMGIGSARGDDRAVAAAEMAISSPLLEASIDGARGVLLSISGGSDLGLFEINEAAQLVSEAAHPEANIIFGAVIDDALGDEVRVTVIAAGFDGGQPPSKRDNVLGSSSAKREEPTPARPSESRPSFGSLGSVKPKEEPEPAPVPEPVADLPVSPPPVPPSRTYSDSAAEELDVPDFLK

SEQ ID NO: 22001 - protein, 424 aa, Thermus thermophilus HB8
MKSEPLSYLGKDGGPWEIFTEQVDRVVPYLGRLAPLAESLKRPKRVLIVDVPVRLDDGSVAYFEGYRVHHNTARGPAKGGVRYHPEVTLSEVMALAGWMTIKNAAVGLPYGGGKGGIRVDPRKLSPGELERLTRRYTSEIGILLGPDRDIPAPDVNTGEREMAWMMDTYSMNVGRTVPGVVTGKPIALGGSLGRRDATGRGVFITAAAAAEKIGLQVEGARVAIQGFGNVGNAAARAFHDHGARVVAVQDHTGTVYNEAGIDPYDLLRYVQEFGGVRGYPKAEPLPAADFWGLPVEFLVPAALEKQITEQNAWRIRARIVAEGANGPTTPAADDILLEKGVLVVPDVIANAGGVTVSYFEWVQDFNSYFWTEEEINARLERVLRNAFGAVWQVAQEKKIPLRTAAYVVAATRVLEAQALRGLYP

SEQ ID NO: 22002 - protein, 419 aa, Thermus thermophilus HB8
MPLKAYRPPEDPGLWDTYLEWLERALKVAEAHPTTLEYLAHPKRLVTLSLPVVMDDGKVRIFQGYRVVHDIARGPAKGGVRLDPGVTLGQTAGLAAWMTLKAAVYDLPFGGAAGGIAVDPKGLSPQELERLVRRYTAELVGLIGPDSDILGPDLGADQQVMAWIMDTYSMTVGSTVPGVVTGKPHALGGSEGRDDAAGLGALLVLEALAKRRGLDLRGARVVVQGLGQVGAAVALHAERLGMRVVAVATSMGGMYAPEGLDVAEVLSTYEATGFLPRLDLAPEEVFGLEAEVLVLAAREGALDGDRARQVQAQAVVEVANFGLTPEAEAYLLGKGALVVPDLLSGGGGLLASYLEWVQDLNMFFWSPEEVRERFETRVARVVDAVCRRAERGGLDLRMGALALALERLDEATRLRGVYP

SEQ ID NO: 22003 - protein, 230 aa, Streptococcus agalactiae A909
MVKLVFARHGESEWNKANLFTGWADVDLSEKGTQQAIDAGKLIQAAGIEFDLAFTSVLKRAIKTTNLALEAADQLWVPVEKSWRLNERHYGGLTGKNKAEAAEQFGDEQVHIWRRSYDVLPPDMAKDDEHSAHTDRRYASLDDSVIPDAENLKVTLERALPFWEDKIAPALKDGKNVFVGAHGNSIRALVKHIKQLSDDEIMDVEIPNFPPLVFEFDEKLNLVSEYYLGK

SEQ ID NO: 22004 - protein, 484 aa, Streptococcus pneumoniae R6
MEWTTERRYRLYQDWTQEEIQHIKENMAQSPWHTHYHVEPKTGLLNDPNGFSYFDGKWILFYQNFPFGAAHGLKSWAQLESDDLVHFKETGIKVLPDTPLDSHGAYSGSAMQFGDNLFLFYTGNVRDENWIRHPYQIGALMDKEGKITKIDKILIDQPADSTDHFRDPQIFNFKGQYYAVVGGQDLEKKGFVRLYKAVNNDYTNWQAVGDLDFANDRTAYMMECPNLVFVEEHPVLLYCPQGLDKKVLDYDNIFPNMYKIGASFDPKNAKMVDVSQLQNMDYGFEAYATQAFNAPDGRALAVSWLGLPDVSYPSDRFDHQGTFSLVKELTIKDDKLYQYPVAAIKDLRASEEAFSNRSQTKNTYELELNLEANSQSEIVLLADKEGKGLSINFDLVNGQVTVDRSQAGEQYAQEFGTTRSCPIENQATTATIFIDNSVFEIFINKGEKVFSGRVFPHADQNGILIKSGNPTGTYYELDYGRKTN

SEQ ID NO: 22005 - protein, 691 aa, Candida albicans SC5314
MALEQSLAQLSLATVASPENGKALPTKSLIFKPKTAKTATPIPLFVFALQDTTTPSNLIAKSAGVKEPRLAKDDLVEEFFKTTTKEVSIANLSKELAGKIKIVIDDNVLKAAKNEELLKLSTQSSAAVLSAKTVVEFLQSTGIEIIEVDFSAEPTQAPASASPGGSGAAASSKKEKKDDAKLEDAKLIGITVDKEKDFSSWYTQVVTKGEMLDYYDVSGCYILRPNSYFVWETIQDWFNARIKKLGVQNTYFPMFVSQRVLEKEKDHIEGFAPEVAWVTRAGNSELDEHIAIRPTSETVMYPYYAKWIRSHRDLPLKLNQWNSVVRWEFKHPQPFLRTREFLWQEGHTAHLTKDAAANEVLQILDYYAGVYEELLAVPVVKGKKTENEKFAGGDYTTTVEGFIAATGRGIQGGTSHHLGTNFSKMFNISVENPEGSEKPRIFAYQNSWGLSTRVIGVMIMTHSDNKGLVLPPRIAQYQAVVIPVGLTSKSTDAQRKEINEGAEKIEQSLRANGIRVTGDYREIYNPGWKFADWELKGVPLRFEFGPKDLAGNQVTIVRRNDGKKYTVKLDELDTEVPKLLDQMHDDLLTKAKQEFDEHRVKVDEWKDFVPTLNKKNVILSPWCGDADCEDDIKDSSAKKDDGEEEEVDEKAPSMGAKSLCIPFEQPELKEGQKCVKCDRKAVTYCMFGRSY

SEQ ID NO: 22006 - protein, 399 aa, Rickettsia sibirica 246
MALIIQKFGGTSVANIDRIKKIVPIIKTEIAKNNQVIVVVSAMAGVTNQLVTLCNEVSSLNNISQFAEYDVALSSGEIVTASLLALALQEEDIKARSFLAWQLPMLTDNNHSKALVESITTDLLEKYLQLNTIPIIAGFQGINKSNRLTTLGRGGSDTTAALIAAAMKADRCDIYTDVEGIFTADPRIIPNAKKIKEIDFLEMLELASSGAKVLHPRAGELVMRYKIDMRVLSTFSPDTEGTLITSKDKNMENGIINSITSNKNLLKIFVKSISLSFLQVANMITQNNNHIEFMQTNNEEYSFITNLTDKNNLQALLTNLKEDKQIQDFTFDTEIATISLIGYGIKNDCKLLETILSKLTNDNIDVHMIQLSEVKITLFINDQDAEKTIFNLYNLFKIS

SEQ ID NO: 22007 - protein, 216 aa, Bacteroides fragilis YCH46
MKPIISPSILSADFAYLAKDIEMINRSEADWVHIDIMDGVFVPNISFGFPVLKYVAKLTSKPLDVHLMIVNPEKFIPEVKALGAHIMNVHYEACPHLHRVVQQIREAGMQPAVTINPATPIALLQDIIRDVYMVLVMSVNPGFGGQKFIEHSVEKVKELRELIERTGSKALIEVDGGVNLETGARLIAAGADALVAGNAIFAAENPEGMIHAMKGL

SEQ ID NO: 22008 - protein, 322 aa, Xanthomonas campestris pv. vesicatoria str. 85-10
MSAFSASPAKHSRLLILGSGPAGWTAAVYAARANLKPVVITGLQQGGQLMTTTEVDNWPGDPHGLMGPDLMSRMQAHAERFETEVIFDHIHTADLSQRPFRLIGDGAEYTCDALIIATGATAKYLGIPTEEAFKGRGVSACATCDGFFYKDQDVVVVGGGNTAVEEALYLSNIARKVYLVHRRDTLRAEKIMQDKLFAKVAAGKIETVWHHAIDEVLGNDAGVTGVRVKSTIDGSTRDIDAHGFFVAIGHHPNTQLFDGQLAMNNGYLEIRSGLNGAATETSVAGVFAAGDVADQHYRQAITSAGFGCMAALDAERYLDKSA

SEQ ID NO: 22009 - protein, 231 aa, Populus tomentosa
MVMAGSNSLSADKQESSLSSLLSDSSGSQQDSPSSNEKVLLAASRPKKRAGRRIFKETRHPIFRGVRKRNGDKWVCELREPNKKSRIWLGTYPTPEMAARAHDVAALAFRGKSACLNFADSAWRLPAPISNEAKDIRRAASEAAELFRTSDLGGQVMEDHTTENRGEVCSSTNDDIRDLPSENVSYIDEEAEFNLPGLLANMAEGLLLSPPHYTGDWNDGEIDADWSLWSS

SEQ ID NO: 22010 - protein, 392 aa, Arabidopsis thaliana
  misc_feature (164)..(164): Xaa can be any naturally occurring amino acid
MASASFVKPNTLSSPWIGQRSFAHTSASSSPPPRVSFAIRAGAYSDELVKTAKSIASPGRGILAIDESNATCGKRLASIGLDNTEDNRQAYRQLLLTTPGLGDYISGSILFEETLYQSTKDGKTFVDCLRDANIVPGIKVDKGLSPLAGSNEESWCQGLDGLAXSRSAEYYKQGARFAKWRTVVSVPCGPSALAVKEAAWGLARYAAISQDNGLVPIVEPEILLDGDHPIERTLEVAEKVWSEVFFYLAQNNVMFEGILLKPSMVTPGAEHKNKASPETVADFTLTMLKRRVPPAVPGIMFLSGGQSEAEATLNLNAMNQSPNPWHVSFSYARALQNSVLRTWQGKPEKIEASQKALLVRAKANSLAQLGKYSAEGENEDAKKGMFVKGYTY

SEQ ID NO: 22011 - protein, 439 aa, Bacillus cereus ATCC 14579
MAVENITMPQLGESVTEGTISKWLVNVGDHVNKYDPLAEVMTDKVNAEVPSSFTGIVKELIAGEGDTLAVGEVVCVIQVEGADEVAATAVEEKTKEEPKAEVATSEKAPKVKQPTDGKPRFSPAVLKLAGEHNVDLDLVEGTGANGRITRKDILKLVESGNIPQAGAAKKEEAVAAVVEARPEAPKAAPVAQKVEAAKPVSVPTMPGDIEIPVTGVRKAIAANMLRSKHEAPHAWMMIEVDVTNLVSYRNSIKGDFKKREGFNLTFFAFFVKAVAQALKEYPQINSMWAGDKIVQKKDINLSIAVATEEELFVPVIKQADEKTIKGIAREITELAGKVRTKSLKADEMQGGTFTINNTGSFGSVQSMGIINYPQAAILQVESIVKRPVIMDNGMFGARDMVNLCLSLDHRVLDGLICGKFLGRVKEILENMSENNTSVY

SEQ ID NO: 22012 - protein, 231 aa, Populus tomentosa
MVLAGSNSFSADKQESSLSSLLSDSSGSQQDSPCSNEKVLLAASRPKKRAGRRIFKETRHPIFRGVRKRNGDRWVCELREPNKKSRIWLGTYPTPEMAARAHDVAALAFRGKSACLNFADSAWRLPAPISNEAKDIRRAAGEAAELFRTSDLGGQVMEDHTTEDRGEVCSSTNDDIRDLPSENVSYIDEEAESNMPWLLANMAEGLLLSPPHYTGDWNDGEIDADWSLWSS

SEQ ID NO: 22013 - protein, 544 aa, Acholeplasma laidlawii
MYEFKFADIGEGIHEGTVLQWNFKVGDKVKEGETLVIVETDKVNAELPSPVDGTIVSLGAKEGEEIHVGQIIVTIDDGTGTPAAAPAPAQVSAPTPAPAAAPQVAAPAASGDIYDFKFADIGEGIHEGTILQWNFKVGDKVKEGETLVVVETDKVNAELPSPVDGTILKLGKAEGEVIHVGETVVLIGQNGATLEQAQAPKAEAPVSEPKKGAGVVGEIEVSDDIIGGSEEVHVVATTGKVLASPVARKLASDLGVDIATIKGSGEQGRVMKDDVQNSKAPAEAQAPVQQTQAPAQAAASVAPSFAAAGKPQGDVEVVKITRLRKAVSNAMTRSKSIIPETVLMDEINVDALVNFRNEAKGLAESKGIKLTYMAFIAKAVLIALKEFPMFNASFNHDTDEVYIKKFINLGMAVDTPDGLIVPNIKNADRLSVFELASQVRSLADDTIARKISMDQQTGGTFTITNFGSAGIAFGTPVINYPELAILGIGKIDRKPWVVGNEIKIAHTLPLSLAVDHRIIDGADGGRFLMRVKELLTNPTLLLLS

SEQ ID NO: 22014 - protein, 326 aa, Thermoanaerobacter tengcongensis MB4
MAEKLYIEALAEAIKEEFERDPNVFMMGEDIGIYGGAFGVTKGMYPKYKDKLIETPISEASIVGAGVGAALVGMRPIVEIMFSDFMMDAMEWIVNQAAKLRYMTGGQLKVPLVIRSPMGSGTGAAAQHSQSLPAMFAHIPGLKVVMPATPYDVKGLFKAAVRDDNPVIFFEHKLLYWTKGEVPEGDYIVPIGKADVKREGKDITIIAGSITVIRSLEAAEKLKGEGIDVEVIDVRSLSPLDTETIVNSVIKTGKVLIVEDDNKSYGWGAEVLSRIVESDAFDYLDYPIQRLGGKDVPIPYNPKLERAAVPQVEDIIEAVKAIFGKE

SEQ ID NO: 22015 - protein, 232 aa, Nicotiana tabacum
MGYWQAKVVPKIKQIFDKNGPKKAAAAEACKTFDEAKALYSKEFEDKKTELQPKVVEIYEAAAVEIKTLVKEPKVSGLKKHSTEVQKLLDELVKIEFPGSKAVSEASSNFGPSYVFGPVLFVFRESSTFIVTENKKVEEAAVPVAASSSEEEAAASVAAASEAEAIAAAPVEVKKKEIVVEAEAKKEEEPAPAPAAEVAPAPAAEVAPAADVAPAKVEERAPAAAAPEPPKA

SEQ ID NO: 22016 - protein, 414 aa, Thermoanaerobacter tengcongensis MB4
MANVKLMPKLGMTMTAGKVVRWLKKEGEKVEAGEPLLEIETDKVTMEEEAGYTGTLLKILVREGEEVPINQPIAIIGGEGEDIEEILKTLKVSEGVEEEKKEEKIKVKIEEKPEEVKREEISKPRATPAARKIAREHGIDLSEVIGSGAHGRIHRKDVEEYIRKRTEIVPSQVTVEQKVEKKEEIPSYRVIPFTGMRKIIAEKMQKSINTAPHFYVTMEVKMREILKLRETLNSKLKEDEAKISLNTLLMKAAGIAIKDYPIFNSYVEEGQIILRNEINIGLAVALDEGLIVPVIREVDKKGLKEIAREEKALIQKAREGKLTPDEYTGGSFTISNLGMFDVVRFAAIINPPEVAILAVGKIREIPVVEEGQIEIEPIMEMTLSSDHRVIDGALAAKFLRRIKEILEDPLQFML

SEQ ID NO: 22017 - protein, 159 aa, Synechococcus sp. RS9917
MSVNVSAVTVRAADGSEKSLGDYSGQVLLIVNVASRCGFTKQYAGLQALQDAYGSKGLQVLGFPCNDFGAQEPGTLDEIKSFCSTTYGASFELFDKVHATGSTTEPYTSLNQTNPAGDVAWNFEKFLVGKDGTVIGRFKSGVTPEDPELKAAIETALAA

SEQ ID NO: 22018 - protein, 342 aa, Pseudomonas syringae pv. tomato str. DC3000
MTLPDSSLSDTAHFPLAAVVGADDLKLALCLTAIDPRIGGVLIEGPRGMAKSTLARGLADLLASGQFVTLPLGATEERLVGTLDLDAALAEGRARFSPGVLAKADGGVLYVDEVNLLADHLVDLLLDVAASGVNLVERDGISHRHAARFVLIGTMNPEEGELRPQLLDRFGLNVALSGQTLPVERSQIIRRRLDFDADPLSFCQHWQAQQDALKQRCEQARLLLPSIELDDHSLAVITERCFAAGVDGMRADLVWLRAARAHAAWRSVGQIDEQDIEAVAEFALRHRRRDPAPPPQNQQAEPPETSPKPDKPESGQGNWGELPAQAVVTGSRREVPSWPKKP

SEQ ID NO: 22019 - protein, 644 aa, Oryza sativa
MATTAAAAAAALSAAATAKTGRKNHQRHHVLPARGRVGAAAVRCSAVSPVTPPSPAPPATPLRPWGPAEPRKGADILVEALERCGVSDVFAYPGGASMEIHQALTRSPVITNHLFRHEQGEAFAASGYARASGRVGVCVATSGPGATNLVSALADALLDSVPMVAITGQVPRRMIGTDAFQETPIVEVTRSITKHNYLVLDVEDIPRVIQEAFFLASSGRPGPVLVDIPKDIQQQMAVPVWDTSMNLPGYIARLPKPPATELLEQVLRLVGESRRPILYVGGGCSASGDELRWFVELTGIPVTTTLMGLGNFPSDDPLSLRMLGMHGTVYANYAVDKADLLLAFGVRFDDRVTGKIEAFASRAKIVHIDIDPAEIGKNKQPHVSICADVKLALQGLNALLQQSTTKTSSDFSAWHNELDQQKREFPLGYKTFGEEIPPQYAIQVLDELTKGEAIIATGVGQHQMWAAQYYTYKRPRQWLSSAGLGAMGFGLPAAAGASVANPGVTVVDIDGDGSFLMNIQELALIRIENLPVKVMVLNNQHLGMVVQWEDRFYKANRAHTYLGNPECESEIYPDFVTIAKGFNIPAVRVTKKSEVRAAIKKMLETPGPYLLDIIVPHQEHVLPMIPSGGAFKDMILDGDGRTVY

SEQ ID NO: 22020 - protein, 517 aa, Zea mays
ARLGVDIIEAGFPASSPDDLDAVRSIAIEVGNPPTASAGTVHVPVICGLSRCNRKDIDAAWEAVRHARRPRIHTFIATSEIHMQHKLRKTPEQVVAIAREMVAYARSLGCPDVEFSPEDAGRSNREFLYHILEEVIKAGATTLNIPDTVGYTLPYEFGKLIADIKANTSGIENAIISTHCQNDLGLATANTLAGARSGARQLEVTINGIGERAGNASLEEVVMAIKCRGELLDGLYTGINSQHITLTSKMVQEHSGLHVQPHKAIVGANAFAHESGIHQDGMLKYKGTYEIISPDDIGLTRANEFGIVLGKLSGRHAVRSKLVELGYEISDKEFEDFFKRYKEVAEKKKRVTDEDIEALLSDEIFQPKVIWSLADVQATCGTLGLSTATVKLIAPDGEERIACSVGTGPVDAAYKAIDQIIQIPTVLREYGMTSVTEGIDAIATTRVVVTGDVTNNSKHALTGRAFNRSFSGSGAAMDIVVSSVRAYLSALNKMCSFAGAAKASGEVPESASVQSAE

SEQ ID NO: 22021 - protein, 171 aa, Vibrio cholerae O1 biovar eltor str. N16961
MEYNTSALCDIYLDQVDVVEPMFSNFGGCASFAGQITTIKCYEDNGLIRETLEQDGLGRILLIDGGGSLRRALIDAELAALAEENEWEGIVVYGSVREVDELEEMSIGIQAIASIPVGATSQGIGEVDIPVNFGGVTFLPEDYLYADNTGIIISQEPLSADLGEEEEDELL

SEQ ID NO: 22022 - protein, 167 aa, Streptococcus pyogenes MGAS8232
MPNLYDFTVKAQNGNDLSLAAYKEKVVLIVNTATKCGLTPQYQALQALYDTYHDKGFEVLDFPCNQFLNQAPGDAEEINHFCSLTYHTTFPRFAKIKVNGKDADPLFTWLKEEKSGPLGKRIEWNFTKFLIDQNGQVIKRYSSKTDPKLIEEDLKALLDKIQCYHHL

SEQ ID NO: 22023 - protein, 128 aa, Arabidopsis thaliana
  misc_feature (79)..(79): Xaa can be any naturally occurring amino acid
  misc_feature (95)..(95): Xaa can be any naturally occurring amino acid
  misc_feature (110)..(110): Xaa can be any naturally occurring amino acid
  misc_feature (114)..(114): Xaa can be any naturally occurring amino acid
MASSMFSSTAVVTSPAQATMVAPFTGLKSSASFPVTRKANNDITSITSNGGRVSCMKVWPPIGKKKFETLSYLPDLSDXVELAKEVDYLFRNKWXPCVEFEFEHGFFYRXAREXFPGYFCVGQFWRFP

SEQ ID NO: 22024 - protein, 229 aa, Glycine max
KGCTGVFHVATPMDFDSKDPENEVIKPTINGLLDIMKACVKAKTVRRLVFTSSAGTVDVTEHPNPVIDENCWSDVDFCTRVKMTGWMYFVSKTLAEQEAWKYAKEHNIDFISVIPPLVVGPFLMPTMPPSLITALSLITGNESHYHIIKQGQFVHLDDLCLGHIFVFENPKAEGRYICCSHEATIHDIAKLLNQKYPEYNVLTKFKNIPDELDIIKFSSKKITDLGFKF

SEQ ID NO: 22025 - protein, 920 aa, Streptococcus pyogenes MGAS8232
MPLKKLESSNNQAIIAEEVALLKEMLENITRRMIGDDAFTVIESIMVLSEKQDYIELEKVVANISNQEMEVISRYFSILPLLINISEDVDLAYEINYQNNTDTDYLGKLALTIKDLAGKDNGKDILEQVNVVPVLTAHPTQVQRKTILELTTHIHKLLRKYRDAKAGVISLEKWRQELYRYVEMIMQTDIIREKKLQVKNEIKNVMQYYDGSLIQAVTKLTTEYKNLAQKHGLELDNPKPITMGMWIGGDRDGNPFVTAETLCLSATVQSEVILNYYIDKLAALYRTFSLSSTLVQPNSEVERLASLSQDQSIYRGNEPYRRAFHYIQSCLKQTQIQLTNQPAARMSSSVGLNTSACPSPASLENPILAYDSPVDFKADLKAIEQSLLDNGNSALIEGDLREVMQAVDIFGFFLASIDMRQDSSVQEACVAELLKGANIVDDYSSLSETEKCDVLVQQLMEEPRTLSSAAVAKSDLLEKELAIYTTARELKDKLGEEVIKQHIISHTESVSDMFELAIMLKEVGLVDQQRARVQIVPLFETIEDLDNACDIMAAYLSHDIVKSWIATNRNYQEIMLGYSDSNKDGGYLASGWTLYKAQNELTAIGEEHGVKITFFHGRGGTVGRGGGPSYDAITSQPFGSIKDRIRLTEQGEIIENKYGNKDVAYYHLEMLISASINRMVTQMITDSNEIDSFREIMDSIVADSNMIYRKLVFDNPHFYDYFFEASPIKEVSSLNIGSRPAARKTITEITGLRAIPWVFSWSQNRIMFPGWYGVGSAFKRYIDRAQGNLERLQHMYQTWPFFHSLLSNVDMVLSKSNMNIAFQYAQLAESQDVRDVFYEILDEWQLTKNVILAIQDHDDLLEDNPSLKHSLKSRLPYFNVLNYIQIELIKRWRNNQLDENDEKLIHTTINGIATGLRNSG

SEQ ID NO: 22026 - protein, 404 aa, Salmonella typhimurium LT2
MKRAVITGLGIVSSIGNNQQEVLASLREGRSGITFSQELKDAGMRSQVWGNVKLDTTGLIDRKVVRFMSDASIYAYLSMEQAVADAGLAPEVYQNNPRVGLIAGSGGGSPKFQVFGADAMRSPRGLKAVGPYVVTKAMASGVSACLATPFKIYGVNYSISSACATSAHCIGNAVEQIQLGKQDIVFAGGGEELCWEMACEFDAMGALSTKYNDTPEKASRTYDAHRDGFVIAGGGGMVVVEELEHALARGAHIYAEIVGYGATSDGADMVAPSGEGAVRCMQMAMHGVDTPIDYLNSHGTSTPVGDVKELGAIREVFGDNSPAISATKAMTGHSLGAAGVQEAIYSLLMLEHGFIAPSINIEELDEQAAGLNIVTETTERELTTVMSNSFGFGGTNATLVMRKL

SEQ ID NO: 22027 - protein, 182 aa, Clostridium thermocellum ATCC 27405
MVLIDYSKLSKEVAYALRHAPWEYGLELDAEGWVDINQLLSSLHECEKWKKVSEHDLHVMIEKSDKKRYEISNGKIRALYGHSIPQRIIKEQKCPPEVLYHGTARRFVKSIKEKGLQPQGRQYVHLSADVETALQVGKRRDIKPVLLIVNALEAWSEGIKFYLGNDKVWLADAIPSKYIRFE

SEQ ID NO: 22028 - protein, 232 aa, Mycobacterium avium subsp. paratuberculosis K-10
MPCNTGQPRGPLIAPSILSADFSRLADEAAAVTGADWLHVDVMDNHFVPNLTIGLPVVQSLLATTTIPMDCHLMIENPDRWAPPYAEAGAHNVTFHAEATDNPIGVARDIRAAGAKAGISVKPGTPLEPYLEILPQFDTLLIMSVEPGFGGQSFIPEVLGKVRTARKLIDAGELTILVEIDGGINADTIEQAAEAGVDCFVAGLAVYGADDPAAAVEALRRQALGASQHLRR

SEQ ID NO: 22029 - protein, 489 aa, Bacillus cereus ATCC 10987
MPQDRKAEVQKHAYERKEIMPDNSQSLPRHMQKELPHEFSVNPLFAREGESVVPRFHISDEGMLPETAYQIVHDEITLDGNARLNLATFVSTWMEPAAEQLYAKSFDKNMIDKDEYPQTAEIEERCVRILANLWHSPSPLTTMGVSTTGSSEACMLGGLALKRRWQNARKSEGKPLDRPNIVFSSAVQVVWEKFANYWEVEPRYVKVSPEHPQLDPQGVLAAVDENTIGVVPILGETYTGLYEPVAEIAKALDDLQARTGLDIPMHVDAASGGFIAPFLQPDLVWDFQLPRVKSINVSGHKYGLVYPGLGWIIWREAEDLPEDLIFRVSYLGGNMPTFALNFSRPGAQVLLQYYNYLRLGKSGYYDIQRASQKVALFLSKAIQKMEPFELLSDGSDIPVFAWRLKEGYTSNWNLYDLSRQLRVFGWQVPAYPLPPDMESVTIMRVVVRNGFSMDLAHLFLRNLKQTVAFLDSLDGPMPHDTKCNNGFHH

SEQ ID NO: 22030 - protein, 342 aa, Aspergillus oryzae
MSLYQNIALNGSFALHGLRHPLDMYSSLGPTLSEATFGLLGYSFEPSRDIGDLSGKVLFVTGGNAGLGKETVLQLAQHNPSRIYLAARDATKAREAISSIQDIISASVDIRHIQLDLSSFQSTRDAAEKFCSECDRLDILILNAGTMANPPELTKEGFEIQFGTNHIGHFLLTKLLLPTLKKTVGSPASDVRIVTLSSVGSHAAPSLDVMTSTSALLDSHTLVRYSASKAANILFASELARRYPEILSVSVHPGVVSSELYRHTGAMNAISKFGVGLLSTVFRSIRTGAMNQLWAAGTKREQLVNGAYYVPIGVRGSSRFTDDADMARKLWEWTENQIAEKS

SEQ ID NO: 22031 - protein, 336 aa, Mycobacterium sp. KMS
MSTALVIGANGFLGSHVTRQLVDGGHEVRAMVRPNAKTVGIDDLDVTRFVGDIWDDATLREAMTGCDDVYYCVVDARGWLRDPAPLFRTNVEGTRNVLDVARDMPLRRFVFTSSYVTVGRRRGRRSTEDDVADVRRVTPYVRSRIEGEELVLSNARERGLPAVAMCVSTTYGSGDWGRTPHGAIIAAAAFGKLPFVMSGIELEAVGIDDAARALILAAEKGRAGERYLISEKMISNAEVARIAAEAAGVAPPAKSIPLPVSYVLATLGSVKSRLRGTDERLSLESLRLMRAEAELDHSKAVRELGWQPGPVEESIREAARFWVNLRNVRRESKTQA

SEQ ID NO: 22032 - protein, 425 aa, Mycobacterium avium subsp. paratuberculosis K-10
MTRLDSVERAVADIAAGKAVIVIDDEDRENEGDLIFAAEKATPEMVAFMVRYTSGYLCVPLDGAICDRLGLLPMYAVNQDKHGTAYTVTVDARNGVGTGISASDRATTMRLLADPTSIAEDFTRPGHVVPLRAKDGGVLRRPGHTEAAVDLARMAGLQPAGAICEIVSQKDEGSMAQTDELRVFADEHDLAMITIADLIEWRRKHEKHIERIAEARIPTRHGEFRAIGYTSIYEEVEHVALVRGEIAGPNSDGDDVLVRVHSECLTGDVFGSRRCDCGPQLDAAMAMVAREGRGIVLYMRGHEGRGIGLMHKLQAYQLQDAGEDTVDANLKLGLPADARDYGIGAQILVDLGVRSMRLLTNNPAKRVGLDGYGLHIIERVPLPVRTNAENIRYLMTKRDKMGHDLAGLDDFHESVHLPGEFGGAL

SEQ ID NO: 22033 - protein, 388 aa, marine gamma proteobacterium HTCC2207
MFELVESIPKNADIKVIGVGGGGGNAVRHMMEGNIDGVQFICANTDAQSLNDLSNATVLQLGGTLTKGLGAGANPEVGRQAALEDKERIAQAIEGADMVFITAGMGGGTGTGAAPVIAEVAKQMGILTVGVVTRPFAFEGRKRMDIANQGIAQLKERVDSLIIVPNEKLLQVLGKDMTVLNAFKQANNVLFGAVQGIADLILLEGLINVDFADVRTVMSEMGMAMMGTGEASGEDRAIIAAESAIKCPLLEDVNLQGAKGILVNITSGYDLTLGEFEDVGNIIRDFSDEDATVIVGSVFDPELTDSLRVTVVATGLKEPGEKRPPMSVVVDNPPRTSRGEVDYDSLVKPTVTRRGQGAGQSTARKMDLQADPELDYLDVPAFLRKQAD

SEQ ID NO: 22034 - protein, 205 aa, Pseudomonas aeruginosa PAO1
MSVVFVAASKLPTPFGEFTMHGFLDEESGKEHVALSMGDIADGAPVLGRLHSECLTGDALFSLRCDCGFQLEGALAAIAEEGRGVLLYLRQEGRGIGLLNKIRAYELQDGGADTVEANLQLGFGADQRDYAMCQPMLAHLGVSSLRLMTNNPRKVKALESYAITVAERVPLQKGLNKHNRRYLATKAGKLGHMLGSLHQGEAETT

SEQ ID NO: 22035 - protein, 554 aa, Erwinia carotovora subsp. atroseptica SCRI1043
MRYTGAQLIVRLLEQQGITTVAGIPGGAALPLYDALSQSQTIRHVLARHEQGAGFMAQGMARASGRAAVCMASSGPGATNLITAIADAKLDSIPLVCITGQVPSSMIGTDAFQEVDTYGISIPVTKHNYLVRDINELPRVIPEAFRIAQSGRPGPVWIDIPKDIQNATIELSELPDIFPLDTPPTIAQQEIERAAAMINAAQRPILYLGGGIISGVAHEQAVQLAERASLPTTMTLMALGAMPVDHPLSLGMLGMHAARSTNLILEQADLLIVLGARFDDRAIGKAEQFCPQASIIHIDIDPAELGKIRQPHVAINADVAEVLDHLLPHITPQQRGVWRATVSGLQQEFPFSMPNADDPLSHYGLVQATAQALTDDAIITTDVGQHQMWVAQSYPLRRPRQWLTSGGFGTMGFGLPAAIGAALAEPDRTVVCFSGDGSLMMNIQEMATAAEEGLNVKIVLMNNQSLGLVHQQQDMFFQQRIFAADYRYNTNFLAIAAGFGFATCDLNAAADPQAALKEALNQPGPALIHVRIDANEKVFPIVPPGAANIDMIGD

SEQ ID NO: 22036 - protein, 116 aa, Arabidopsis thaliana
LVEKFGIDPNNAFAFWDWVGGRYSVCSAVGVLPLSLQYGFSMVEKFLKGASSIDQHFQSTPFEKNIPVLLGLLSVWNVSFLGYPARAILPYSQALEKFAPHIQQVSMESNGKGVSI

SEQ ID NO: 22037 - protein, 436 aa, Ashbya gossypii ATCC 10895
MLRSTLRVTSRAARPLAASMGRSSAVHAGAAAQAKLYSQIQMGAMHGPALQHLCGLRYASTSVQVPPMAESLTEGSLKEFTKQVGEYIEQDELLATIETDKIDIEVNAPVSGTVTKLNFKPEDTVTVGEELAQIEEGAAPAGGQKPAAKEETSAPQEAAPASPAAKEEKPQAAKPAQAAPAKEQPKQAAAQSSTVSAGASVSGFARTERRVKMNRMRMRIAERLKEAQNTAASLTTFNEVDMSALLEMRKLYKDEILKTKGVKFGFMGLFAKAVALAQKEVPAVTGGIEGDQLVYRDYTDISIAVATPKGLVTPVVRNVESLSVLEIEQEISRLGQKAREGKITLEDMAGGNFTISNGGVFGSLYGTPIINTPQTAVLGLHGVKERPVTVNGQIVSRPMMYLALTYDHRMLDGREGVTFLKTIKELIEDPRKMLLV

SEQ ID NO: 22038 - protein, 595 aa, Pseudomonas putida KT2440
MCGLAGELRFTPIDQAPRPADLAAVERITHHLAPRGPDAWGFHSQGPIALGHRRLKIMDLSDGSAQPMVDNTLGLSLAFNGAIYNFPELREELQALGYSFWSDGDTEVLLKGYHAWGAALLPKLNGMFALAIWERDNQRLFLARDRLGVKPLYLSRNGERLRFASTLPALLKGGDIDPMLDPVALNHYLNFHAVVPAPRTLLANVQKLEPGTWMRIDRHGEVERQVWWQLHYGPHPDERELDLEGWTTRVLDATRDAVAIRQRAAVDVGVLLSGGVDSSLLVGLLREVGVDDLSTFSIGFEDAGGERGDEFQYSDLIAKHYGTRHHQLRIAEHEIIDQLPAAFRAMSEPMVSHDCIAFYLLSREVAKHCKGVQSGQGADELFAGYHWYPQVDGADDAYAAYREAFFDRSHAEYRDTVQAPWLLETDAAGDFVREHFARPGAPAAVDKALRLDSTVMLVDDPVKRVDNMTMAWGLEARTPFLDYRLVELSARIPARFKLPDGGKQVLKQAARRVIPHEVIDRKKGYFPVPGLKHLEGATLGWVRELLTDPSQDRGLFNPTMLDRLLSNPHGQLTPLRGSKLWQLAALNLWLSEQGI

SEQ ID NO: 22039 - protein, 54 aa, Arabidopsis thaliana
VGVRALGSNPLKSTKKGHGEKNVPVHIGGTLIRDGEWLYADSDGILISKTELSV

SEQ ID NO: 22040 - protein, 511 aa, Glycine max
  misc_feature (362)..(362): Xaa can be any naturally occurring amino acid
MYRNAASRLRAIKARSCSSSSRVPASARFASSVATQQSSSSGLGGLFGWLTGDRTSSLPSLGFPLPGVTLPPPLPDYVAPGKTIITTLPNGLKVASETSPSPTASIGLYVDCGSIYESPISFGATHLLERMAFKTTRNRSHFRVVREVEAIGGNVQASASREQMGYTFDALKTYVPEMVELLVDCVRNPVFLDWEVNEQLLKVKAEIGEASKNPQDLLLEAIHSAGFSGALANPLLASESAVNRLNSTILEEFVAENYTAPRIVLAASGVEHEELLSIAEPLLSDLPSVPRPEEPKSVYTGGDYRCQKESGRTHFALAFELPGGWHKLKDAMVLTVLQMLLGGGGSFSAGGPGKGMYSRLYXKFLNEYPQVHEISAFNNIYNDTGIFGIQVTTGSDFVSKAIDIAANEILAVATPGQVDQVQLDRAKQATKSAILMNLESRMVVSEDIGRQILTYGERKPVEDFLKAVDEVTSKDITSISRKLICSPLTMASYGDVLYVPSYESVSLKFRA

SEQ ID NO: 22041 - protein, 375 aa, Pyrocystis lunula
MLRRSQALVVHNGSGMCKAGFAGDDAPRAVFPSIVGRPRHTGVMVGMGQKDSYVGDEAQSKRGILPLKYPIEHGIVTNWDDMEKIWHHTLYNELRVAPEEHPVLLTEAPLNPKANREKMTQIMFETFNTPAMYVAIQAVLSLYASGRTTGIVLDSGDGVSHTVPIYEGYALPHAILRLDLAGRDLTDYMMKILTERGYSFTTTAEREIVRDIKEKLAYVALDFEQEMQTAASSSALEKSYELPDGQVITIGNERFRCPEALFQPSFLGMESAGVHETTYNSIMKCDVDIRKDLYGNVVLSGGSTMFPGIAERMNKELVALAPSTMKIKIIAPPERKYSVWIGGSILASLSTFQQMWISKEEYDESGPSIVHRKCF

SEQ ID NO: 22042 - protein, 448 aa, Psychrobacter arcticus 273-4
MSISQAIEKIEARYAHQPEFIQAVKEVAITIAPLYDSHPEYDTFKVFERLVEPDRVIAFRINWENDKGEVQVNRGWRVQFSNALGPYKGGIRFHPTVNQSVLKFLGFEQIFKNALTGLPMGGAKGGSDFDPKGKSDNEIRRFCYAFMRELHPYINKDTDVPAGDIGVGGREISYMFAMYKNLTREYGGVLTGKGVGFGGSLMRTEATGYGAVYFLENMLTAQNEHIAGKRVLISGAGNVSLHAAEKVHMLGGVVVTVSDSQGTLYDEKGLNQEKINWLKEQKAKSQPLADYVAVYGGEWFAGQKPWHIKGDIAIPSATQNEVNEGDAKLMVENGIKYVVEGANMPLTAEAIDHIRLHRVHYAPGKAANAGGVAVSGLEMSQNSVRQYKSFEQIDARLKCIMKNIHDSAAEASGKYHQTDKGYIDYMTGANIVGFERVADALVAYGILN

SEQ ID NO: 22043 - protein, 131 aa, Saccharomyces cerevisiae
SGGKGGKAGSAAKASQSRSAKAGLTFPVGRVHRLLRRGNYAQRIGSGAPVYLTAVLEYLAAEILELAGNAARDNKKTRIIPRHLQLAIRNDDELNKLLGNVTIAQGGVLPNIHQNLLPKKSAKATKASQEL

SEQ ID NO: 22044 - protein, 370 aa, Epidendrum stamfordianum
SDSGKDAGRLSAAWQLYKTQEELVKVAKEYGVKLTMFHGRGGTVGRGGGPTHIAILSQPPDTIHGSLRVTVQGEVIEQSFGEENLCFKTLQRYTAATLEHGMQVPFSPKPEWRALMDEMAIVATDEYRSIVFQEPRLVEYFRLATPELEYGRMNIGSRPSKRKPSGGIESLRAIPWIFAWTQTRFHLPVWLGFGAAFKHVIQKDLKNLQILREMYNEWPFFRVTIDLIEMVFTKGSPGIAALYDKLLVSPELLSFGEQLRAKYEETKRLLLKVAGHKELLEGDPYLKQRLRLRNPYITTLNVCQAYTLKRIRDPSYHLTGKPHPSTEMMNSNNQAAELVKLNPTSEYAPGLEDTLILTMKGIAAGMQNTG

SEQ ID NO: 22045 - protein, 280 aa, Moorella thermoacetica ATCC 39073
MPAQILDGKKIAAEVRAEVKEEVSRLKAEGINPGLAVVLVGEDPASQVYVRNKHRACEEVGIYSEVHRLPAATSQAELLKLIDQLNKDPKIHGILVQLPLPDHIDEKKVIDAIALEKDVDGFSPANVGNLVIGDKCFYPCTPHGCMVLLEKAGIDPKGKKAVVVGRSNIVGKPVAMMLLARHATVTICHSRTRDLAAECRQADILIAAVGKPELITGDMIKEGAVVIDVGINRVGEKKLVGDVHFESAAQKAGWITPVPGGVGPMTIAMLLKNTVEAARR

SEQ ID NO: 22046 - protein, 112 aa, Thiomicrospira crunogena XCL-2
MKLVVAIIKPFKLDDVRESLHEIDVHGMTVTEAKGFGRQKGHTEIYRGAEYAIEFLPKVRIEIAVPEEKVESVIEAIGNAARTGKIGDGKIFVSPIEQAVRIRTEEKGEVAL

SEQ ID NO: 22047 - protein, 414 aa, Thiomicrospira crunogena XCL-2
MEQILELSYALDTFYFLMSGALVMWMAAGFAMLEAGLVRTKNTTEILAKNVGLFAIACIMYMLVGYNIMYGDAINSVIPGLSFLLGGDNATAAVVAGGDGAPYYSNMSDFFFQVVFVATAMSVVSGAVAERMKLMSFFVFAIVLTSVIYPVQGYWKWGGGFLDQLGFLDFAGSGIVHMTGAAAALAGVLLLGARKGKYGPNGESKAIPGANLPLATLGTFILWLGWFGFNGGSELKISNVEEANAVSMIFVNTLLAAAAGVVGALLASKIKFGKADLTMMLNGALAGLVAITAEPLTPSALEATLIGLVGGIIVVAAILILDNKFKIDDPVGAISVHGVVGIYGLLAVTFTNPDSSLVAQLIGIAAIFSWVFITSLIVWAIIKAVMGIRISEEDEFEGADQSECGMEAYPEFTK

SEQ ID NO: 22048 - protein, 503 aa, Photorhabdus luminescens subsp. laumondii TTO1
MEQVQNYVNGQLIPSYSTRFSPVFNPATGKQIRQVALSTAHEVEQAIEIAHQAYREWSKISPLKRARVMFQFKTLLEANIDKLARLISEEHGKIYSDAIGELTRGLEVVEFACGIPHLQKGEHSANTGTGVDSHSLMQPLGVCVGITPFNFPAMVPMWMFPIALATGNTFVLKPSEKDPSLALELASLLKQSGLPNGVFNVINGDKEAVDILLTDPHVQAVSFVGSTPVAEYIYTTASAHGKRCQALGGAKNHCILMPDADLDMASSAIAGAAFGAAGERCMALSVVLAIGDETADALIEKLRQQINKISVGPGIVATTENDMGPVISAQHQAKICDYIDSGEKQGASLLIDGRQLKVPGYENGYFIGPTLFDNVTPEMKIYQEEIFGPVLSIVRVPDYATALTLINCHQYGNGTAIFTRDGETARQFSEDVQAGMVGINIPIPVPMAFHSFGGWKRSIFGPLNVHGNDGVRFYTRMKTVTSRWPASIRLEHHSSNFVMPTME

SEQ ID NO: 22049 - protein, 156 aa, Corynebacterium diphtheriae
MSILDTEVTLINGEKASMDQWAGHCLLIVNTASECGYTPQLETLEELYEDYAMRGFFVIGVPCNQFGEEEPGKDAQVARRYEEKFGVRFPLLAKSDVNGPNTIELYKKLKGDGPDIEWNFEKFIVAPSGEVVGRFAPSLDPDDMKIINVLEEYLPI

SEQ ID NO: 22050 - protein, 298 aa, Streptomyces antibioticus
MDLTGRRAVVTGGASGLGAETVRALAAAGAEVTVATRRPLSAEPLVQELAAAGGAGRVTAEALDLSDPASVESFARAWRGPLDILVANAGIMALPTRTLAPNGWEMQLATNYLGHFALATGLHAALRDAGSARIVVVSSGAHLDAPFDFEDAHFARRPYDPWVAYGQSKAADVLFTVGARRWAADGITVNALNPGYILTRLQRHVDDETMRAFGVMDDQGNVKPLPYYKTPEQGAATSVLLAASPLLKGVTGRYFEDNQEARTVQGQEDQPGGVAAHALDPEAADRLWEYGTDALRAA

SEQ ID NO: 22051 - protein, 629 aa, Salmonella enterica subsp. enterica serovar Typhi str. CT18
MAIEIKVPDIGTDEVEITEILVKVGDKVEAEQSLITVEGDKASMEVPSPQAGVVKEIKVSVGDKTETGALIMIFDSADGAADAAPAQAEEKKEAAPAAAPAAAAAKDVHVPDIGSDEVEVTEVMVKVGDTVEAEQSLITVEGDKASMEVPAPFAGTVKEIKVNTGDKVSTGSLIMVFEVAGEAGAAAPAKAEAAPAAAAPAAATGVKDVNVPDIGGDEVEVTEVMVKVGDKVTAEQSLITVEGDKASMEVPAPFAGTVKEIKISTGDKVKTGSLIMVFEVEGAAPAAAPAKQEAAAPAPAAKAEKPAAPAAKAEGKSEFAENDAYVHATPLIRRLAREFGVNLAKVKGTGRKGRILREDVQAYVKDAIKRAEAAPAAAGGGIPGMLPWPKVDFSKFGEVEEVELGRIQKISGANLSRNWVMIPHVTHFDKTDITDLEAFRKQQNAEAEKRKLDVKYTPVVFIMKAVAAALEQMPRFNSSLSEDGQRLTLKKYINIGVAVDTPNGLVVPVFKDVNKKSVTELSRELTTISKKARDGKLTAGEMQGGCFTISSIGGLGTTHFAPIVNAPEVAILGVSKSAMEPVWNGKEFVPRLMMPISLSFDHRVIDGADGARFITIINNMLSDIRRLVM

SEQ ID NO: 22052 - protein, 469 aa, Triticum aestivum
MDPTVPNSGDHAASTPTNTTVTLPPLTLRDAPRLPALPSGATTIPNPISSHPYFHPPPTFYISPGDVSLRHAFFDLSSGSPNPLVAYRRAGPRESLAVDPARARAALVTCGGLCPGLNTVLRELVVGLHELYGVLDVFGVAAGYRGFYGADDDHVRLDPASVDDWHKKGGTALKTTRGGFDLNKIVDGIVARGYTQVYAIGGDGTMRGAVAIFEEFKRRGLRISITGIPKTVDNDIGIIDRSFGFQTAGEIAQQAIDAAHVEAVSAVNGIGLVKLMGRSTGHIALHATLSSRDVDCCLIPEIDFHVEGKGGLFEFLYERIKKKGHAVVVVAEGAGQEVIPRTDDQKREQDESGNMLFLDVGPWLKSELGRWWKREHPTELFTVKYIDPTYMIRAVPANATDNLYCTLLAHSAIHGIMAGFTGFVPGPINGNYSYIPLEDIAVAKNPVDVNDHKWAWVRSVTDQPDFLKP

SEQ ID NO: 22053 - protein, 152 aa, Brassica napus
MESSPAAAAKPARGAGGRKGGDRKKSVSKSVKAGLQFPVGRISRYLKKGRYAIRYGAGAPVYLAAVLEYLAAEVLELAGNAARDNKKNRINPRHLCLAIRNDEELGKLLHGVTIASGGVLPNINPVLLPKRSASQTEKPEKAAKAAKSPKKA

SEQ ID NO: 22054 - protein, 533 aa, Oryza sativa
  misc_feature (35)..(35): Xaa can be any naturally occurring amino acid
  misc_feature (58)..(58): Xaa can be any naturally occurring amino acid
MEAVGVAPAPAGVPEKKLLEVKESRKAAPAAPSTXSMAAKWAMKKKLVGGDAGYVLEXDVPHLTDYLPELPTYPNPLQDNPAYSVVKQYFVNTDDTVTQKIVVHKTSARGTHFRRAGPRQRVYFQSDEVNAAIVTCGGLCPGLNTVIRELVCGLYDMYGVTSVVGIEGGYKGFYSRNTVALTPKSVNDIHKRGGTVLGTSRGGHDTGKIVDSIKDRGINQVYIIGGDGTQKGASVIYEEVRRRGLKCSVVGVPKTIDNDIAVIDKSFGFDTAVEEAQRAINAAHVEAESAENGIGVVKLMGRNSGFIAMYATLASRDVDCCLIPESPFYLEGKGGLLEFIEKRLKDNGHMVIVVAEGAGQDLIAKSMNFVDTQDASGNKLLLDVGLWLSQKIKDHFKKKRNFPITLKYIDPTYMIRAVRSNASDNVYCTLLAHSALHGAMAGYTGFTVAPVNGRHAYIPFYRITEKQNKVVITDRMWARVLCSTNQPCFLSHEDVEHLKHDDDEHHLHNTQLLEGESSPVKDSSKCNGTAAPV

SEQ ID NO: 22055 - protein, 124 aa, Glycine max
MASSLLVRVASCMVVVWMFSFGHIIPLAEAEIPCGRVQITVAPCIGYLRGPGGGVPAPCCNGVKSINNQAKTTPDRQGVCRCLKSTVLSLAGLNLATLSALPSKCGINLPYKITPTIDCNTVKY

SEQ ID NO: 22056 - protein, 286 aa, Rickettsia prowazekii
MVNNIIDGKALANEILADLKLEIQGFKEKTKTSPKLAIVLVGDNPASMIYVKNKIKNAHQVGIDTLLVNLSTNIYTDDLILKINELNLDKGISGIIVQLPLPSSIDENKILSAVLPSKDSDGFHPLNVGYLHSGINQGFIPCTALGCLAVIKKYAPNLNGKDAVIVGRSNIVGKPLSALLLQENCSVTICHSKTCNLSSITSKADIVVVAIGSPLKLTAEYFNPEAIVIDVGINRISHNKIAGDVDFENVKSKVKYITPVPGGIGPMTIAFLLKNTVKAFKNAIAL

SEQ ID NO: 22057 - protein, 508 aa, Aspergillus oryzae
MVHLSRVKRGKQAQKPQQEQDQGESAASPYVYGTHYATEELPEHVMSEREMPADVAFRLIKDELSLDGNPLLNLASFVTTYMEDEAQNLMTDAMSKNFIDFEEYPQTAHIQNRCINMIAHLLNAPTTEGDGELDTIGTSTIGSSEAIMLATLAMKKRWQNKRKAEGKDWTRPNIVMNSAVQVCWEKAARYFDVEEKYVYCTDTRYVIDPKTAVDMVDENTIGICAIMGTTYTGQYEDVKAINDLLKAKNIDCPIHVDAASGGFVAPFVRPELEWDFRLEKVVSINVSGHKYGLVYPGVGWVFWRSPEYLPEELIFNVNYLGSNQATFTLNFSKGASHVIGQYYQLIRLGKHGYRSIMQNLTKTSDYFADELKKLGFLIMSDGNGRGLPLVAFRMKPDDDRLYDEFALAHVLRQRGWIVPAYTMAPHSNQLKLMRVVLREDFTIHRCNILLEDIKAALKSLQEMDAEMIQKYTLHLRAHSAKKLPQQHAHYKNEKHSLQGKTGKTHGVC

SEQ ID NO: 22058 - protein, 259 aa, Arabidopsis thaliana
  misc_feature (249)..(249): Xaa can be any naturally occurring amino acid
PTRPMELTEEERQKKERKEKALKEKGEGNVAYKKKDFGRAVEHYTKAMELDDEDISYLTNRAAVYLEMGKYEECIEDCDKAVERGRELRSDFKMIARALTRKGSALVKMARCSKDFEPAIETFQKALTEHRNPDTLKKLNDAEKVKKELEQQEYFDPTIAEEEREKGNGFFKEQKYPEAVKHYSEAIKRNPNDVRAYSNRAACYTKLGALPEGLKDAEKCIELDPSFTKGYSRKGAIQFFMKEYDKAMXTYQEGLKHDP

SEQ ID NO: 22059 - protein, 282 aa, Triticum aestivum
  misc_feature (191)..(191): Xaa can be any naturally occurring amino acid
MKLNIANPTTGCQKKVEIDDDQKLRNLYDKRISQEVVGDLLGEEFKGYIFKIMGGCDKQGFPMKQGVLTSGRVRLLLHRGTPCFRGFGRRNGERRRKSVRGCIVSQDLSVINLVIVKKGENDLPGLTDTEKPRMRGPKRASKIKKLFNLGKDDDVRSYVNTYRRTFLNKKGKKVSKAPKIQRLVTPLTLQXRKRARIARQEEEVRQEESEAAEYQNCFTAERAKGRPTTWPRGSTFCCNKPAALLKWYNPPTCWKINRYFSWVMFLNSTLQRSLFRIFSGLT

SEQ ID NO: 22060 - protein, 663 aa, Aspergillus oryzae
MCGLTAFLTVGGIPGCVHYANNCPGLEKQLEESLDLVNHRGPDARGRWFSTDHRVGLGHVRLSIVDLSSAGNQPFHDSEGAIHAVVNGELYDHEEHRTELAQEYDFKSNSDCEIVIALYRHYGISFLNKLRGEFALVLYDANRKLFLTARDRYGIKSLYYTMVGNRLLVATEMKSFLPFGWKPEWDVTAIREGAWMNGSQMLFKGVQRYMVSQNFNPPERTVYPHSEEEVIERVRELMLDAVRVRLRADVGLGIYLSGGLDSSAIAGMAVKLVQEGTKLGNDTSGERSKIDCFTVQFEKDSGFDESDIARRTAEWLGVGYHPVYLDEEAIAARLEDTVWYSEIPAANVNGMGRLAVAEAAHAMGKKVILTGEDSDEHFSGYSDLLPNFLLEPDYSWPQSLAKQSDFAEAWKVMEERNQILAMGMDEVAGPTKRMLNNTTLCARLSTFTTLPYSSWTDQLALRSPATAFAENFGVQVLHKMMEKWHPLHSTQYQWMKSVLANYILRYIGDNVDMVHQIETRPPFLDHYVTEYANNIPPSLKIKYDPESKTFREKNILREAMKPFVTEEIYNRTKHPFVGPFTYQEDGPVHKSLKRLLTEENVNQLGFFDNDRVQSNLVKAFRDKDGVCFQRALAVAQYVVLGQRFGVKKAQDPGCSETSSGPYV

SEQ ID NO: 22061 - protein, 113 aa, Arabidopsis thaliana
  misc_feature (49)..(49): Xaa can be any naturally occurring amino acid
  misc_feature (93)..(93): Xaa can be any naturally occurring amino acid
NDPRRRGGNHSGGEYIFSHHHPHEAGGVNLGKGQTPTAQATKVAPFTGXKTTANYPGTRTDNNDITSITSNGGRVSSTKERPPIGKKKIETLXYLTEQSDVETAKEGDNQSRN

SEQ ID NO: 22062 - protein, 256 aa, Ashbya gossypii ATCC 10895
MQSNARQRELIREFLAVTSATSAAAETYLERNHWSLDHALDDFYTQSGGGGRAEQYSAELVATFERYAAGGAMDTEALVRYVGDLGFQLEDVATLCLARLLKVEELTADISRFQFLSTWHGLGCSSLPDMRAAVDALELRLRTDAAYFRALYAYTFGLGLDAGGRRLSVETAIAYWSLFFLDHTYAVTVPAPRLRSWFEFLRAGDHSVSRDTWDMFPRFAQRFPDDTELLEHYNELASWPLVIDEYYEWVKGRNQL

SEQ ID NO: 22063 - protein, 365 aa, Pseudomonas aeruginosa PAO1
MALNTIDELIEDIRQGKMVILMDDEDRENEGDLIMAAECVRTEDINFMVKHARGLVCMPMTRERCERLGLPLMVQRNGSGFGTKFTVSIEAAEGVTTGISAADRARTVQAAAAKNAVAADIVSPGHIFPLMAQPGGTLARAGHTEAACDLARMAGFEPSGVICEVMNDDGSMARRPELEAFAAEHGIKIGTIADLIHYRLIHERTVERIAEQPLDSELGHFNLITYRDSVEGDVHLALTLGKVCAEEPTLVRVHNMDPLRDLLQVNQPGRWSLRAAMTKVAEAGSGVVLLLGHQIGGDDLLAHVREIASAPAPAPKATTTYSTVGAGSQILRDLGVRKMRLLSAPMRFNAISGFDLEVVEYLPAE

SEQ ID NO: 22064 - protein, 500 aa, Bacillus anthracis str. A2012
MDTTLRDGEQSPGVNLNEQEKLQIARQLERLGIHVMEAGFAAASEGDFQSVKRIANTIQNATVMSLARAKESDIRRAYEAVKGAVSPRLHVFLATSDIHMKYKLCMSKEDVLDSIYRSVTLGKSLFPTVQFSAEDATRTARDFLAEAVEVAIRAGANVINIPDTVGYTNPEEYYALFKYLQESVPSYEKAIFSCHCHDDLGMAVANSLAAVEGGALQVEGTINGIGERAGNAALEEVAVALHIRKDFYKAEPSMTLKEIKATSTLVSRLTGMVVSKNKAIVGANAFAHESGIHQDGVLKEVTTYEIIEPALVGESQNLFVLGKHSGRHAFTEKMKELGYEFTNDERDAVFEAFKKLADRKKEITEEDLRALMLGEAAFAAQQYNITQLQVHFVSNSTQCATVVLKDEEGNVFEDAATGSGSIEAIYNAIQRILGLECELADYRIQSITQGQDALAHVHVELKEGAHQVSGFGVAQDVLEASARAYVHAAGKLKSFIQLVK

SEQ ID NO: 22065 - protein, 105 aa, Archaeoglobus fulgidus DSM 4304
MERLNSERFREVIQSDKLVVVDFYADWCMPCRYISPILEKLSKEYNGEVEFYKLNVDENQDVAFEYGIASIPTVLFFRNGKVVGGFIGAMPESAVRAEIEKALGA

SEQ ID NO: 22066 - protein, 289 aa, Pseudomonas aeruginosa PAO1
MSDTPYIFDVTGANFEQLVIENSFHKPVLVDFWADWCAPCKALMPLLAQIAESYQGELLLAKVNCDVEQDIVMRFGIRSLPTVVLFKDGQPVDGFAGAQPESQIRALLEPHVKAPALPDEDPLEVAQALFAEGRIGDAEATLKALLAENNENAAALILYARCLAERGELEEAQAILDAVKSDEHKQALAGARAQLTFLRQAADLPDSAELKSRLAADAGDDEAAYQLAVQQLARQQYEAALDGLLKLFLRNRGYQDDLPRKTLVQVFDLLGNDHPLVTAYRRKLYQALY

SEQ ID NO: 22067 - protein, 333 aa, Erythrobacter sp. NAP1
MARFPFSAIVGQDEMKQALLIAAVDPSVGGVMVFGDRGTGKSTAARALAGLLPPITAHQNCAYGGSKEDAERYPDVCGGGPLRKRPVPFVDLPLGATEDRVIGSLDLERALRSGEKGFEPGLLAKAHRGFLYIDEINLLEDHLVDLLLDVAASGENVVEREGLSVRHPARFVLIGSGNPEEGELRPQLLDRFGLSVEVRTPTDIETRVEIMRLVAANERDPQAFAAKWAGEDEKILKQIARGKKRLEKLEPGEDVLTDAAHLCLAVGADGLRGELTLMRAARALAALKGAKAVRREHLIAVAPSALRHRLRRDVLDETGSTVRITRAIDELFG

SEQ ID NO: 22068 - protein, 297 aa, Streptomyces lividans
MDLTGRRAVVTGGASGLGAETVRALAAAGAEVTIATRHPQSAEPLVQEAAAAGAGRVHAEALDLSDVASVDSFARAWRGPLDILVANAGIMALPTRTLTPYGWEMQLATNYLGHFALATGLHAALRDAGSARIVVVSSGAHLGTPFDFEDPHFARRPYDPWAAYGNSKTADVLFTVGARRWAADGITANALNPGYILTRLQRHVDDETMRAFGVMDDQGNVKPLPYYKTPEQGAATSVLLAASPLLNGVTGRYFEDNQEARTVEDGDVQPGGVAAHALDPEAADRLWEYGADTLSAG

SEQ ID NO: 22069 - protein, 663 aa, Oryza sativa
MSSKFLAMYLLLALLSHGTYSYSATTASGWEDQDFFRHCPVSRCSDGGPEIRFPHGLQSSNTSSACGASCAKLACSGQDTILHHPFLGPCKVTSIDYKEAIMSIIPLVYSSSPCPLQKLIFDNLQPYDYHRCKLYSWAPAKIVRCSKEFTPNGTSPVDGYAFMNNADYITGPISCPSEASHFSYLVDARLCMYVLPLDCRIVSRGSIPIPGPAYSDIGGPTFKERAEKFINFAETTVSWYSDDEVTINCTECERQKHRCAFSSQRNRTFCMSREHHGTIANFSKSNPITLLSILLQCADFPFSVYSATSSAAAFVVLSLIIATVLYISLKSRYDEEVHLKVEMFLRTYGTSKPTRYNFSDVKKIARRFKEQLGQGGFGSVYKGELPNGVPVAVKMIEHTTGNGEEFINEVATIGQIHHINIVRLLGFCSDGTRHILIYEFMPNESLEKYIFLHDPNTSQELLAANKMLDIALGIARGMEYLHQGCNQRILHFDIKPHNILLDYNFNPKISDFGLAKLCARDQSIVTLTKARGTMGYIAPELYSRNFGEISYKSDVYSFGMLVLEMVSGRRNSDPSIQNQNEVYFPEWIYEKVITGQDFVLSREMTEEDRLKVRQMALVALWCIQWNPRNRPSMTKVVNMLTGRLQNIEVPPKPFVSYESHAVP

SEQ ID NO: 22070 - protein, 257 aa, Pseudomonas syringae pv. tomato str. DC3000
MDYETILSEVVGSVGLVTLNRPKALNALNARLIDELNHALDQFEADSAIGCIVLTGTQKAFAAGADIKEMVELSYPQIYLDDLFRESDRVAARRKPMVAAVAGFALGGGCELALMCDFILAAENARFGQPEINLGVLPGMGGTQRLTRAVGKAKAMEMCLTGRLIDAHEAERAGLVSRVLPLDQLLPEALAVAATIAAKSLPVAMMVKESVNRAFEVSLAEGIRFERRVFHAAFASHDQKEGMQAFIDKRQPDFKDC

SEQ ID NO: 22071 - protein, 411 aa, Zea mays
MNALAATSRNFKQAAKLLGLDSKLEKSLLIPFREIKVECTIPKDDGTLASYVGFRVQHDNARGPMKGGIRYHHEVDPDEVNALAQLMTWKTAVANIPYGGAKGGIGCSPGDLSISELERLTRVFTQKIHDLIGIHTDVPAPDMGTNSQTMAWILDEYSKFHGYSPAVVTGKPVDLGGSLGRDAATGRGVLFATEALLAEHGKGIAGQRFVIQGFGNVGSWAAQLISEAGGKVIAISDVTGAVKNVDGLDIAQLVKHSAENKGIKGFKGGDAIAPDSLLTEECDVLIPAALGGVINKDNANDIKAKYIIEAANHPTDPEADEILSKKGVLILPDILANSGGVTVSYFEWVQNIQGFMWDEEKVNAELRTYITRAFGNVKQMCRSHSCDLRMGAFTLGVNRVARATVLRGWEA

SEQ ID NO: 22072 - protein, 213 aa, Psychrobacter arcticus 273-4
MRGVNKVIIIGNLGADPEARQFNNGGSVTNISVATSEQWTDKQSGEKREATEWHRISLFNRLGEIAAQYLRKGSKVYIEGSLRTRKYQDPNGQDRYITEIRAEQMQMLDGATGGSGDGSGFASNNQQGGYGNQGGGFSNQGGQNDYGQQGGNQPAHQGGYNQGGGAAQGGHQNIFNNQKAPAQQKPFDQPTQAPAQSKPTAMLDGPVDDDIPF

SEQ ID NO: 22073 - protein, 528 aa, Xanthomonas campestris pv. vesicatoria str. 85-10
MTTHAATTQGKFHKRLSLTDLTFIGLGSIFGSGWLFSASHVSSIAGPAGIVSWILGGIAVLLLGLVYCELGAALPRAGGVVRYPEYSHGALLGSLTGFITLIAFSSLIAIEVEAARQYAAAWFPWLSQPHSTHPSVAGWLVQLALLVLFFVLNYFSVKTFALANNIVSIFKFLVPILVIVLLMQHFDAGNLSVHGFAPSGMAGVEAAISAGGIIFAYLGLTPIVSVASEVRDPQRNIPIALILSVALSTVIYVLLQLAFLGSIPAAQLAQGWACIDKAFSLPYHDIALALGMAWLAALVICDAMVSPSGTGNIYMNATPRVVYGWARSGGFLPVLTRVDPASGIPRPALWLSLGLSIFWTLPFPSWETLIGVVSAALVLSYAVAPITVAALRRSAPDLPRPFFVRGLPVMGPLSFMVAALIVYWSTWPTLSWLLGLQVLAFVLYVLFRLPLRQGRARLVRQVRASLWLIVFFVLVMLVSWAGTFGGHGWIAHPFDTLSVAVIAFCIYHWGARSGLRSDELALEEDDGE

SEQ ID NO: 22074 - protein, 293 aa, Methylocapsa acidiphila
MALAQAHELRGRLAASSRIDGDAIEIVVIKTSGDVIQDRALSEAGGKGLFTKELDFALMRGEVDIAVHSAKDLPTSLPGEIAIAGYLPREDVRDAWISPKAAHPLELPAGAVVGTASLRRGAMVKRLRPDLSIVLLRGNVETRLGKLAAGEVDATLLALAGLKRLGLEDRATAVLDAGEFVPAAGQGAIAITLRAGDQAALDALAPVLDAATGAALAAERAFLHVLDGSCKTPIGAHARLAGDEINFHGVVLKPDGSQFFEVVLSGSAREAAALGAAAGDDVRARLPAAFFED

SEQ ID NO: 22075 - protein, 398 aa, Silicibacter pomeroyi DSS-3
MVPTLGESVTEATVSTWFKKVGDSVAQDEMLCELETDKVSVEVPAPASGVLTEIVAAEGATVNASAKLAVISGSASGASPAPAAPAAAVTPAVATGKDIANAPSAEKAMAEAGITPAQVTGTGRDGRIMKEDVTAAVAAAAAAPAPAAAAPAPAAAPRAPALAEDAAREERVRMTRLRQTIARRLKDAQNTAAILTTYNEVDMTEVMALRNTYKDAFEKKHGVRMGFMSFFTKACCHALKEVPEVNAEIDGQDIVYKNYVHMGVAAGTPQGLVVPVIRDADQMSFAEIEKAIAEKGKRARDGKLSMAEMQGGTFTISNGGVYGSLMSSPILNPPQSGILGMHKIQDRPMVINGEIKIRPMMYLALSYDHRIVDGKGAVTFLVRVKEALEDPRRLLMDL

SEQ ID NO: 22076 - protein, 327 aa, Photobacterium profundum SS9
MADMTLLEAVNLALHHEMEHDPKVVVLGEDVGDNGGVFRATVGLKAKFGLKRVIDSPLAEALIGGVTVGMASQGLRPVAEFQFQGFVFPAMEHLMCHAARMRNRTRGRLICPAVFRAPFGGGIHAPEHHSESIEALFAHIPGFKVVIPSSPQRAYGLLLASIRCNDPVMFFEPKRIYRTVKSYVNDNGKALPLDTCFTLRKGRDLTLVTWGACVVESLQAASTLSSQGIEVEVIDLASIKPIDMATIIHSLEKTGRLLVVHEASKTCGVGAEILARTAEHAMCLLKAPPKRVTGMDTIMPYYRNEDFFMIQEEDIVIAARELVEGWK

SEQ ID NO: 22077 - protein, 331 aa, Vibrio cholerae O1 biovar eltor str. N16961
MIFDSQSSRVSMIKKIGVLTSGGDAPGMNAAIRGVVRTALGAGLEVFGIYDGYQGLYEDRIKQLDRSSVSDVINRGGTFLGSARFPQFREVEVREKAIENLKKHGIEALVVIGGDGSYMGAKKLTEMGFPCIGLPGTIDNDIAGTDYTIGYLTALNTVIEAIDRLRDTSSSHQRISIVEIMGRHCGDLTLTSAIAGGCEYIITPETGLNMEQLISNIKDGIAKGKKHAIIALTELMMDANKLAKEIESATGRETRATVLGHIQRGGKPTAFDRVLASRMGNYAVHLLMEGHGGRCVGIQKEQLVHHDIIDAIENMKRPVRTDLYKVAEELF

SEQ ID NO: 22078 - protein, 389 aa, Photobacterium profundum SS9
MEMKSFMLPDLGEGLAESEIVEWHIKSGDVVRVDQIVLTVETAKATVDIPAPYSGKIISRYGKEGDVINIGSLLLEIEEVGATAQSTISTTASTTAAKKEDAATVVGNVSHQSHHVDIDDFWVGSDQNTTHDNIITAMPSARLLAQRLGVDLHGIIGSGPDGLIVDADIYNECDKQLPGTEVLKGARRTMVNTMAESHHNVAAVTITEEALLADWLANEDISIRLIQAVINACQQEPALNAWFDAETMTRCVHSTVNVGIAVDSAHGLYVPVLRHADEYSPKGVRQWLDKTVKGIRDRRIGREQLQHATITLSNFGAIAGIYATPVVSPPQVAIVGAGRIIEKVIIKDGQPIAVKAMPLSMTFDHRACTGGEAARFIKALVEHLQQATV

SEQ ID NO: 22079 - protein, 433 aa, Arabidopsis thaliana
MRRRRCDLQPKRTRMCDLQPKRTSMCDLPPKLVGEKILTRIPITSLRAVRSTCKLWNALTKDRVLGKAAAQFLGFMTMDSKVCSVRFHLRRSKEEEEDTMDLSIKQVDLLNQVEISRVYHCDGLLLCVAKDNSRVVVWNPYLGQTRWIRPRTESNIGDSYALGYDINRNHKILRMVQTRNVSVYRYEIYDLRSNSWRVLEVTPNGEMDPNHPLYGVSVKGNTYFFAHEDSSSGEIDEDGDIIDLEDFLLCFDFTTETFGLRLPLPFHSTIDATVTLSCVRDQQLAVLYHNEGLHSDDRFTTVEFWVTTSIEPNSVSWSKFLTVDMRPLALTGVRFDNDMGATFFIDEDEKVAVVFDLDGYLSTESARYHTTFISGKDGFFKPVTLGVAPNVGEPCPRTGHIPTTYRPPLVCSSTYLPSLVQVNQQRKRKERHV

SEQ ID NO: 22080 - protein, 294 aa, Silicibacter pomeroyi DSS-3
MAVLIDENTKVICQGFTGSQGTFHSEQAIAYGTKMVGGVTPGKGGMEHLGLPVFNSVHEAKHVTEANATVIYVPPPFAADSILEAIDAQMEVIVCITEGIPVLDMMKVKRALEGSSSRLIGPNCPGVITPDACKIGIMPGHIHKRGSVGVVSRSGTLTYEAVKQTSDIGLGQSTAVGIGGDPIKGTEHIDVLEWFLADDETESIIMIGEIGGSAEEEAAQFLKDEAKKGRKKPVAGFIAGRTAPPGRRMGHAGAIVAGGKGGAEDKIEAMRSAGIVVADSPATLGEAVLEAIGK

SEQ ID NO: 22081 - protein, 600 aa, Synechococcus sp. RS9917
MALLVQKFGGTSVGSVERIQAVARRIANRRDEGHDLVIVVSAMGHTTDELTAKARALCSNPPQREMDMLLATGEQVSIALLSMALHALGVPAMSMTGAQVGIVTESAHGRARILDVRTDRLRSRLGDGQVVVVAGFQGTSQSSGGTAEITTLGRGGSDTSAVALAAALGADACEIYTDVPGVLTTDPRKVADAQLMEQISCDEMLELASLGAAVLHPRAVEIARNYGVTLVVRSSWSEEPGTTLTSRSARPIGREGLELGRPVDGAELVERQAVLALSHVPDQPGVAARLFEALSAGEVNVDLIIQATHEGNSNDITFTVAETDLESARRICTDLVDAMGGELVAEGGMSKLSISGAGIMGRPGIAAGLFDTLSRQGINLRLIATSEVKVSCVIAAAMGGKALRAASEAFELSERQLQINPPASGAGEPEVRGVALDRDQAQVSVRHVPDRPGTAAALCSALADAGISVDAIVQSERQHADGSRDISFTLKREDRAAADQALGSLLAQWPGALLEDGPAIARVSAVGAGMPATAGTAGRMFRYLAEAGLNIELIATSEIRTSCVVAEADGVAALQAVHAGFGLGGAVRHAAQGTASPLDS

SEQ ID NO: 22082 - protein, 477 aa, Bordetella parapertussis
MRTITSLIDGQWAGGAGDSENINPSDLSAPVCLVAQASAQQAAQAVEAARRAQPGWAATGLAARAQILKDIGRGIVANSQQLAHILASEQGKTLPEARGEVQRAADIFDYYAGEVFRLGGEMFPSIRAGVEVEISREPLGVVALITPWNFPIAIPAWKTAPALACGNAVVLKPSEFTPATAVMLAEIIRAAGVPDGVFNLVLGTGADVGQVLTGHPAVAGVSFTGSSATGRKIAASAVAGHKKLQMEMGGKNPLVVLDDADLEIALACALDGAFHATGQRCTASSRLIVTPGIHDRFVQELAQRVMALNVGHALDERSQIGPVSNGAQFDKDLSYIALARDEAQRVIGGAALQRAQRGYYLQPCLALDVSLDARIAREEVFGPLACVLRAQDYEHALAIANDTEYGLSAGICTQSLKHATHFRRHVQSGLAMVNMPTSGVDFHVPFGGRGASSYGSSEQGHYAREFFTSLKTSYIRP

SEQ ID NO: 22083 - protein, 218 aa, Zea mays
  misc_feature (182)..(182): Xaa can be any naturally occurring amino acid
MAFSAKPHCSCSTTTKPPTPVAHLSPPPSLSVRAAACAPRSAYGLSAAGVGGGKASPSTVRLRARAQRNARSLGCPDVEFSPEDAGRSNREFLYHILEEVIKAGATTLNIPDTVGYTLPYEFGKLIADIKANTSGIENAIISTHCQNDLGLATANTLAGARSGARQLEVTINGIGERAGNAXMAIKCRGELLDGLYTGINSQHITLTSKMVPPARPPL

SEQ ID NO: 22084 - protein, 192 aa, Glycine max
  misc_feature (54)..(54): Xaa can be any naturally occurring amino acid
  misc_feature (143)..(143): Xaa can be any naturally occurring amino acid
MLLDKNDIQETHYEVLHVKEHANYEEIRASYRSVVLSLHPDKLLKTSKTSSSNXQPERFLKVQKAWEILCNSSSRSFYDNELRSSRKDVLAADIAEDLSLRKDVLAADVAEDLSLQDMMIEDDGEALELFYQCRCGDYFSHAXRELKKMGYSLLRVGSGISVLNADTLPGSVILPCGSCSLKARLLINMDAN

SEQ ID NO: 22085 - protein, 917 aa, Pseudomonas chlororaphis
MLKKLGIKGRVLLLTLLPTSLMALVLGGYFTWMQQSDLQTQLLQRGEMIAEQLAPLVAPALAHQNTALLERIATQSLEQQDVRAVTFLAPDRTPLAHAGPSMLNQAPTGNGSQMLQRTGSDATRYLLPVFGRHRNLAGDLIPDESDRLLGWVELELSHNSMLLRGYRSLFASLMLITAGLICTGLLALRMGRTINNPLSQIKQAVTQLKDGNLETRLPLLGSQELDELASGINRMAGTLQNAQEELQHSIDQATEDVRQNLETIEIQNIELDLARKEALEASRIKSEFLANMSHEIRTPLNGILGFTHLLQKSELTPRQLDYLGTIEKSADSLLGIINEILDFSKIEAGKLVLDSIPFNLRDLLQDTLTILAPAAHAKQLELVSLVYRDTPLSLVGDPLRLKQILTNLVSNAIKFTREGTIVARAMLEEEHEDSVQLRISIQDTGIGLSNQDVRALFQAFSQADNSLSRQPGGTGLGLVISKRLIEQMGGEIGVDSTPGEGSEFWISLRLPKTRDDAEDLPAPPLLGRRVAVLENHELARQALQHQLEDCGLEVTPFNTLEALTNGVTGVHQTEQAIDLAVLGITTNDMPPERLNQHIWDLEHLGCKVLVLCPTTEQTLFHLSVPNPHSQLQAKPACTRKLRRALADLVNPKAVRSEPSEPIASRPPRVLCVDDNPANLLLVQTLLEDMGAKVLAVDSGYAAVKAVQNESFDLVMMDVQMPGMDGRQSTEAIRQWESERNCTPLPVIALTAHAMANEKRALLQSGMDDYLTKPISERQLAQVVLKWTGLALRNQGPERTGEPSGNGLELQVLDHDEGLRLAAGKADLAADMLAMLLASLEADREAIRAARAANDHNALIERVHRLHGATRYCGVPQLRAACQRSETLLKQEDIKAFAALDELERAINRLATEARINA

SEQ ID NO: 22086 - protein, 333 aa, Anabaena variabilis ATCC 29413
MNMQNLQNFRDYYEILGVTKDATNEDIKKNYRRLARQYHPDLNPGNKDAEEKFKIIGEAYEMLSDATKRAQYDQFSRYWKQKGFPKQTPKSKAWGDSRNGERNGNENVDPSQFTNFEDFLNQVIGVGSRRDSKNGASTNTTTDPFRSPKSRVEYTVPKNPARPARRDIEARLTLPFEKAYSGGNERIRLEDGRSLEVTMPPGMVTGQTIRLRNQGISGGDLYLKITVEPHPLFKLEGTNIFCQVPVTPSEAVLGGQVEAPTLDGPVKMTIPPGVRSGQRFRLANKGYPSDNGKRGDQLVEIQILTPKTISQEERELYEKLRQIETFKPRADLI

SEQ ID NO: 22087 - protein, 364 aa, Ustilago maydis 521
MASSNPQTVPCAYKTGRTLGQGTYAVVKEAVHIKTGQYYACKVISKKLMEGREHMVRNEIQALKRVSQGHRSIVTLVDYFETMNNLYLVTDLCVGGELFDRICERGNYYEKDAAHIVRTIVDAVVYLHDQGIVHRDLKPENLLFRDKTEESDLLIADFGLSRVVDDEKITVLSTTCGTPGYMAPEIFKKTGHGKPVDMWAIGVITYFLLCGYTPFDRDTTMEEMQAIINADYRFEPTQYWEDVSEDAKDFINKLLTIDPAKRLSAKEALQHRWLQEAAPTEGGAQPVASAEQKDLLPDIKSAFNAKRTFRKAVNGIRLINRLRTNEQQPNKEEIEKLRQTIREAEDESSNLDQVLLAQETRAAN

SEQ ID NO: 22088 - protein, 556 aa, Erythrobacter sp. NAP1
MSGSAPDPLHDAIRAAQLFIQNPTLFGGMVLRGASPARDALVAAIGEALPTRRLPGHVDDERLLGGIDIAASLAAGKPIETAGLLAEAQGGVLVVPMAERLDEAVAGRLAQALDDRRVALVLLDDGIEPEDAPPAALTERLAFLCDLSQSREWRGVELGAKASGEAAPLSDDALGAIATTGAALGVPSLRPLIHAAEAARAHAALEGRKEVAKPDLEAAARLVIAPRATQLPPQEPPPEEEQEPPPPPPESSDTPDDTDMPSPEQLEEMLVEAAAASIPRDLLEQLVNGKTPKRGASGTGQKRKAGLRGKPLGARAGMPRGGARLALIDTLRAAVPWQGVRRRERDADPDAPILMRKEDLRIRRYEEKAARVTIFAVDASGSAAAARLAEAKGAVELMLAQAYVTRSEVALIAFRGENADLLLPPTRSLTRARRALAELPGGGGTPLAMGLNAARELARSVTGKGRTPSLIVLTDGRANLDAGGQPGRKQAGEDAEVAAKAIAREGYDALVVDISARPGREGQELAANMQARYLALPRADAKALHSAISTNMREPA

SEQ ID NO: 22089 - protein, 342 aa, Streptomyces coelicolor A3(2)
MKVGVLTGGGDCPGLNAVIRAVVRKGVQEYGYDFTGFRDGWRGPLEGDTVPLDIPAVRGILPRGGTVLGSSRTNPLKQRDGIRRIKDNLAALGVEALITIGGEDTLGVATRLADEYGVPCVGVPKTIDNDLSATDYTFGFDTAVGIATEAIDRLHTTAESHMRVLVVEVMGRHAGWIALHSGLAGGANVILIPEQRFDVEQVCSWVTSRFRASYAPIVVVAEGAMPRDGDMVLKDESLDSYGHVRLSGVGEWLAKQIEKRTGNEARTTVLGHVQRGGTPSAFDRWLATRFGLHAVDCVHDGDFGKMVALRGTDIVRVPIAEATARLKTVDPALYEEVGVFFG

SEQ ID NO: 22090 - protein, 808 aa, Oryza sativa
MESAPASRVRREDVARAVAALLRWLQHHPTPAPEPIYLLVTLKRAPARRFEHTLRLPRSPFPSISLVSDRLPADLPDDIDPLPSPALGSLPPAARRGLGPPGRQGQGGGQGRPGRARRLADQAWADSAREAARRVELRVEGGTCRAVRVGHAAMAREEAVENVVAAVEAAAACVPRKWRNVRALHVKAPESVALPLYSAVGTGGGDDGGNGEAEDAKRKGVAVKEQGIVKRRKKSSSVSVGASEVVVARRHAGAASPAAAAATHLLGTKLPGTHSDGRHCTLLDAHSSDAAQNASPRSLLGAHSGDAARHGTPRLTEHLLQPNSGVLRFSTHAHFEPDKSGSDLPQVSELPFHKFLLRVCVITSSSMAAIHLFDLNAPPPEDGDELRGGEAIADEAGVNIAGDEGGGGAVADEEIAQNVGNIASDEGVQPQERKIRRWLSDKERYAVYIALHAKSKGGRLEKDTTKKVAEYFNVGIQVIQRIWKHAREQVALGLKVDVDNRKTRCCGPNKMEIDLSKIATIPLNRRSNLRSLANSLGVSIATVHQKFKLVVDMTKRKKTYYLLPEEEDPLRTVQNKNRIGKVMFLTAIARPRFDEEGNVTFSGKIGTWPFVKEVPAIRKSRNRTIGTLETKSIIVNRDVMRQFLIEKVIPAIQSLWPEEDIGDTIYIQQDNARTHVPPNDPHFLQAVAATGLNIQLKQPSNSPDMNVLDLGFFSSIQSLTNCSSPKTIQELIHAVQEEFDGYEASKINRVFLTLQLCMLEVMKDNGGNRYKIPHMNKQALEREGRLPSWLSCDARVYEKALDCLEQVG

SEQ ID NO: 22091 - protein, 454 aa, Bartonella quintana str. Toulouse
MSIDILMPALSPTMEEGKLSKWLKKEGDKVSSGDVIAEIETDKAMMEVEAVDEGTLGKIYVHEGSEGVKVNTVIAVLLEEGENPENILQPAATVQELRGGSPSLSSSMPEPPTFDTISDSDIPTGTRMVTMTVREALNQAMAEEMRRDEMVFLLGEEVAQYQGAYKVSQGLLEEFGARRVIDTPITEHGFAGLAVGAAFGGLRPIVEFMTFNFAMQAIDQIVNSAAKTRYMSGGQMSVPMVFRGPNGAAARVGAQHSQCYAAWYSHIPGLKVIMPYSAADAKGLLKAAIRDDNPVIFLENEILYGYQFEVPQIDDFILPIGRARVHKSGQDVTIVACGIGMHYALQALPEIEKLGIDVELIDLRTIRPMDLPTILASVKKTGRLVTVEEGYPQSSVGTEIATRVMQQAFDYLDAPVATISGKDVPMPYAANLEKLALPNTAEIIEAVKTVTYRV

SEQ ID NO: 22092 - protein, 327 aa, Gloeobacter violaceus PCC 7421
MAEVGVLLLNLGGPDKQEDVRPFLYNLFADPEIIRIPVPPLQKPLAWLISTLRAPKSRKNYQAIGGGSPLRAITNQQGRVLKKALAARGLDIEVYVGMRYWHPFTEEAVRKIKADGIRRLVLLPLYPQYSISTSGSSFKLLDQIWARDPSLKAIERITINSWYSRPGYIRAMGERVREGLDKFDNPDGVHILFSAHGVPRTYVDQDGDPYQRQTEETVDLVMQSLGRPNAHSLAYQSRVGPVEWLKPYTEDTINELAQKGVRSLLAVPVSFISEHIETLQEIEIEYREVAEAAGIHDFRRAKALNVNKTFIDDLAEMVIENLGVYSR

SEQ ID NO: 22093 - protein, 290 aa, Vibrio cholerae O1 biovar eltor str. N16961
MSILINKDTKVICQGFTGGQGTFHSEQAIAYGTQMVGGVSPGKGGTTHLGLPVFNTVREAVEVTGATATVIYVPAPFCKDAILEAIDAGIKLIVTITEGIPTTDMIDVKVKLEQTGVRMIGPNCPGVITPDECKIGIMPGHIHKKGKVGIVSRSGTLTYEAVKQTTDEGFGQSTCVGIGGDPIPGSNFIDILKMFQEDPATEAIVMIGEIGGTAEEEAAAFIKANVTKPVVSYIAGVTAPPGKRMGHAGAIISGGKGTAEEKFAALESAGVKTVKSLADIGKALREVTGW

SEQ ID NO: 22094 - protein, 817 aa, Xanthomonas campestris pv. vesicatoria str. 85-10
MKQPRLVVIGNGMAGIRTVEELLKLMPGMYHITVFGAEPHPNYNRILLSPVLAGEQEFDDIVLNPLQWYQDNGIHLHLNKEVTRIDRVRRRVIAADGTQAEYDRLLIATGSVPFVLPIPGNDLKGVIGYRDIQDTRTMIDTARTKQHAVVIGGGLLGLEAANGLKLRGMEVTVVHLAGWLLERQLDPVAGNLLQQALRARGLHFKLSTATSALLGNAQGEVIGVKFADGSEIPADLVVMAAGIRPNTRLAEEAGIHCSRGIVVNDSLQSFDPRVYAVGECANHRGIAYGLVAPLFEQAKVCANHLAQFGIGIYRGSVASTKLKVTGIDLFSAGDFMGGDGCEEIVLSDPAGGVYKKLVIRDDVLVGACLYGDTSDGGWYFKLLKDGTPIQAQRDQLIFGESALGDAGTGGQDRASAMADSDEVCGCNGVCKGTIVKAISEQGLFTVDEVKKHTKAASSCGSCTGLVEQILMNCLGSNFQETPKTKAVCSCTDLSHGEVRRAIREHKLLTHAQAYAFMEWRTPNGCATCRPAINYYMLSTWPHEAIDDPQSRFINERAHANIQKDGTFSVIPQMKGGVTNASELRRIADVADKYAVPMVKVTGGQRIDLLGVKKEDLVDVWRDLGMPSGHAYGKSIRTVKTCVGSEFCRFGTQNSTQMGIDLETMLANMWSPHKVKLAVSGCPRNCAESGIKDVGIIAVDSGWEIHIGGNGGIKTEVARFLVKVATADEVREYTGAFLQLYREQAYYLDRTVHYIARVGLDYIRAQVVDDAANRRALYERLLYSLEGLVDPWKARIAGERRQEYQPLRVAAPAATVEQ

SEQ ID NO: 22095 - protein, 404 aa, Vibrio cholerae O1 biovar eltor str. N16961
MTIEILVPDLPESVADATVATWHKKPGDMVARDEVIVEIETDKVVLEVPAPDAGVLEAILEQEGATVLSKQLLARLKPGAVAGEPTQDTPDATEPSPDKRHKASLTEESNDALSPAVRRLLAEHNLEANQVKGSGVGGRITREDIEAHLAANKAKPAAKAEAPIAALAPVVGRSEKRVPMTRLRKRIAERLLEAKNNTAMLTTFNEVNMKPIMDMRKQYQDVFEKRHGIRLGFMSFYVKAVTEALKRYPEVNASIDGDDLVYHNYFDVSIAVSTPRGLVTPVLKNCDTLSLAQIEKGIKELAEKGRDGKLTVDELTGGNFTITNGGVFGSLMSTPIINPPQAAILGMHKIQDRAMVVDGKIEILPMMYLALSYDHRSIDGRESVGFLVTVKELLEDPARLLLDV

SEQ ID NO: 22096 - protein, 929 aa, Thiomicrospira crunogena XCL-2
MAKELRDKQLRSRVKLLGSLLGEVIETQVGKTTLDAVEKLRKGYIQLHEKENPELRKELKAFIEAQTPDNLILIIRAFNLYFSLVNLAEEEHQFHERQSQLKSDGPLWMGSVLNTISEFKQEGLLAAEVEKLINKLCYIPVFTAHPTESKRRAVMENLRRIFLTLGELNEAEAYNNPYAQEEVIKKLQYQIQVLWKTDEVRRMKPTVEDEIRNGIYYFRQSLFKAVPTVYRYMERALARHYPEDNIQTPNFLNFGSWIGGDRDGNPFVTHETTINALLMQSRAAIYEYQKRVYELSSHLTQSRYISEIKQEVINRATIIDADLQERVFHKRSERFRDEPYRRFLYLIHGRLQENLNYIEAQLNAETAEKPKFGYNSEQEFLDDLELIYDSLCSHGDQEVADANLKDLIRLVQTFGFYLMRLDIRQESTVHTDAVADLLSHLGIDYLSLSEAERLDLLAQQVSSPTVIDTQHLDLKEMTLEVLEVFNVMRRMREEISEKAFNNYVISMTHEASHVMEVLFLAHQAGLAGYNAGEPYCKIRVSPLFETIQDLEHIVPVTSALFDNPTYHALLKASGNQQEIMLGYSDSAKDGGNLSSAWTLYQAQQQIMKLADEYKIDCRLFHGRGGTVGRGGGPTHSAILSQPTGTVRGEIKFTEQGEVLSYKYSNAETAMYELSMGITGLMKASKCLVKPAQQDNPQHLEAMQKLAKEGEHAFRELTDHTEGFFKFFYEATPVNEIGLLNIGSRPSHRKKGNLSKSSIRAIPWIFGWAQARLTFPAWYGTGSALHNWMKTQTPEQLKEMYENWPFFKGLLSNIQMALFKTDLIIGKDYSELGQDQKQAQHIYNMIAEEHVRSVETCLEISGNEYLMADTPQVALSLARRTPYLEPLNHIQVAVLKRYKDETLSDEEREEWLTPLLNSINAIAAGMRNTG

SEQ ID NO: 22097 - protein, 466 aa, Prunus persica
MASIAPKSFIGLRQASAEKPHFTIQAKPISLNPSIHRRLQVNAAKTSPKVTGRNLRVAVVGGGPAGGSAAETLAKGGIETFLIERKMDNCKPCGGAIPLCMVGEFDLPLDIIDRRVTKMKMISPSNVAVDIGQTLKPHEYIGMARREVLDQYLRNRASENGATVINGLFLKMEKPGDGEAPYVLHYTEYDGKVGGAGVKKNLEVDAVIGADGANSRVAKSIDAGDYEYAIAFQERIKIPDDKMVYYENLAEMYVGDDVSPDFYGWVFPQCDHVPVGTGTVTPQGNFKKFQLATRNRSKDKILGGKFLRVEAHPIPEHPRPRRLAGRVALVGDAAGYVTKCSGEGFYFAPKIIRMCAEPIVEGSENGKRMVNEADLRKYLEKWDKTYWPTYKVLDVLQKVFYRSNPAREAFVEMCADEYVQKMTFDSYLYKRVVPGNPWEDLKLAVNTIGSLVRANALRREMEKLNV

SEQ ID NO: 22098 - protein, 615 aa, Litchi chinensis
MGHSSQTWFNKSKSFAPSWALSCRIPGPMFQPLYSSRIFLNPVRRAGLFRALLLLNTVIAQGADPVESTSESILIKNFNSLYDYNNSTTFDPTSKSLILTQSSSSTLSYEPDSDSEPDFATVVASQRFFFTSPGSSNSIIESSPSIATLESSDTSVSMISHGVNQSLNNFSDRSLLKSWKSPSVKDSVAVPTYSPDPYLDFRQSMQEMVEARDLVDVRSNLDYLHELLLCYLALNPKTTLVELGGTLGLEECALWMPSRSGSSLQLSHTLRHQITVGSTVSINLPVVNQVFSSNRAIIIPHTSPLARIRPLAGRYVPPEVAAVRVPLLHLSNFQINDWPELSAKSYAIMVLMLPSDSARKWHVHELELVEVVADQVAVALSHAAILEESMRARDLVKEQNVALDLARREAEMAIRARNDFLAVMNHEMRTPMNAIIALSSLLLETGLTPEQRLMVETVLKSSNLLATLINDVLDLSKLEDGSLELEIKAFNLHAVFKEVMSFIKPIAAIKRLSVSVMLAPDLPLCAIGDEKRLMQTILNISGNAVRFIVHYTCGGCLQSPYFCGRERICFRSIHLCCFQHQCSGGCQVPQQTIPSVQNSNRFWRLSHQGQVVPFV

SEQ ID NO: 22099 - protein, 591 aa, Zea mays
MCGILAVLGVAEVSLAKRSRIIELSRRLRHRGPDWSGLHCHEDCYLAHQRLAIIDPTSGDQPLYNEDKTVVVTVNGEIYNHEELKAKLKTHEFQTGSDCEVIAHLYEEYGEEFVDMLDGMFSFVLLDTRDKSFIAARDAIGICPLYMGWGLDGSVWFSSEMKALSDDCERFITFPPGHLYSSKTGGLRRWYNPPWFSETVPSTPYNALFLREMFEKAVIKRLMTDVPFGVLLSGGLDSSLVASVASRHLNETKVDRQWGNKLHTFCIGLKGSPDLKAAREVADYLSTVHHEFHFTVQEGIDALEEVIYHIETYDVTTIRASTPMFLMSRKIKSLGVKMVISGEGSDEIFGGYLYFHKAPNKKEFHEETCRKIKALHLYDCLRANKATSAWGVEARVPFLDKSFISVAMDIDPEWKMIKRDLGRIEKWVIRNAFDDDERPYLPKHILYRQKEQFSDGVGYSWIDGLKDHASQHVSDSMMMNAGFVYPENTPTTKEGYYYRMIFEKFFPKPAARSTVPGGPSVACSTAKAVEWDASWSKNLDPSGRAALGVHDAAYEDTAGKTPASADPVSDKGLRPAIGESLGTPVASATAV

SEQ ID NO: 22100 - protein, 364 aa, Shewanella sp. MR-4
MSYQIAVLAGDGIGPEVMAEARKVLKAVEARFGLNIEYTEYDVGGIAIDNHGCPLPEATLKGCEAADAILFGSVGGPKWEKLPPNEQPERGALLPLRGHFELFCNLRPAKLHDGLEHMSPLRSDISARGFDVLCVRELTGGIYFGKPKGRQGEGESEEAFDTMRYSRREIARIARIAFEAARGRRKKVTSVDKANVLACSVLWRQVVEEVAVDFPDVKLEHIYIDNATMQLLRRPDEFDVMLCSNLFGDILSDEIAMLTGSMGLLSSASMNSTGFGLFEPAGGSAPDIAGKGIANPIAQILSAALMLRHSLKQEEAASAIERAVSKALNSGYLTGELLSSDQRHKAKSTVEMGDFIADAVKAGV

SEQ ID NO: 22101 - protein, 522 aa, Shewanella sp. MR-4
MSNRVIIFDTTLRDGEQALAASLSVKEKLQIAMALERLGVDVMEVGFPVSSPGDFESVQTIARTIKNSRVCALSRALEKDIDAAAQALSVAEQFRIHTFISTSTIHVESKLKRSFEQVLEMAVGAVKYARRFTDDVEFSCEDAGRTPIDNLCRMVEAAIHAGARTINIPDTVGYTVPSEFGGIIQTLFNRVPNIDQAIISVHCHDDLGMSVANSITAVQHGARQIECTMNGIGERAGNCSLEEIAMILATRKNLLGVETGINAKEIHRTSNLVSQLCNMPIQSNKAIVGANAFTHSSGIHQDGMLKAQNTYEIMTPESIGLNRNNLNMTSRSGRHVIKHRMEEMGYSEQDYNLDALYEQFLHLADKKGQVFDYDLEALAFMEAQAAEDNFYQLQQLVVQSDSTEGVATATVRIDVGGEIKTEAATGNGPVDAAYNAIARATDRRIDIISYKLGAKGEGQNALGQVDITAVYHEQNFHGVGLATDVVEASARALVHVMNLTCRADKVADYKQNMHKNRELGGV

SEQ ID NO: 22102 - protein, 263 aa, Photobacterium profundum SS9
MMSLLEENAVESIIHNHVAVITMNNPPANTWTETSLNQLKQLVCSLNQNKDVYALVITGQGEKFFSAGADLKLFANGDKTVAFDMARCFGEAFETLSSFRGVSIAAINGYAMGGGLEVALACDIRIAEQQAVMALPEAKVGLLPCAGGTQNLTLLVGEGWAKRIILCGERVTADHAFNIRLVEEVVPQGKALETAILLAESVANQSPSSVTACKTLIQHTRTAPLQHGLMKERELFVNLFDTEDQAEGVQAFLEKRKPNWKNQ

SEQ ID NO: 22103 - protein, 323 aa, Gracilaria tenuistipitata var. liui
MTEVLMFDALREATDEEMQNDSSVFILGEDVGHYGGSYKVTKDLHSKYGDLRVLDTPIAENSFMGMAIGAAITGLRPIVEGMNMSFLLLAFNQISNNAGMLRYTSGGNFQIPIVIRGPGGVGRQLGAEHSQRLEAYFQAIPGLKIVACSTPYNAKGLLKSAIRDNNPVIFFEHVLLYNLKDELPNDEYFLPLDKAELVRDGLDVTILTYSRMRHHVMQAVVDLVNDGYNPEVIDLISLKPLDITSIAQSLMKTHKLIIVEECMKTGGIGAEIIAQINDNYFDFLDAPIVRLSSQDIPTPYNGKLEKATVIYPQQIIEAVKSIV

SEQ ID NO: 22104 - protein, 244 aa, Tithonia rotundifolia
ANYGGDKQYGRETRHTGDYGNPIHSATGGQYDQEIRQTDEYGNPVRRTDEYGNPVHSATGGTMGDYGSTGLGQGTGGIGTGGYGTTGHQGLRTGLGHTTGGTDYTSGGRSTEQTGYQGLGTESAFGGTTGTFQNQPSATPVGGVGLSTGTGAGFRGTGIGTGVLHRSGSGSSSSSEDDGQGGRRKKKGVMQKIKEKLPGGHSQEEQYQSQTTTTAGGVGRAGYGETHEMKGMMEKIKEKLPGHH

SEQ ID NO: 22105 - protein, 227 aa, uncultured Pseudonocardia sp.
HVEYQTEKRHYAHVDCPGHADYVKNMITGAAQMDGAILVVAATDGPMPQTREHVLLARQVGVPYIVVALNKADMVDDEEIMELVEMEVRELLSDQDYPGDDLPIVRVSALKALEGDEKWAKAIVELMDAVDEAIPEPERDIEKPFLMPVEDVFTITGRGTVVTGRVERGIVKVNETVDIVGIRTNKTSTTVTGVEMFRKILDEGRAGENVGLLLRGIKREDVERGQV

SEQ ID NO: 22106 - protein, 300 aa, Brassica napus
  misc_feature (65)..(65): Xaa can be any naturally occurring amino acid
MAAGLSTTVTFNPLHRSFSSSSSVRLHHPRSLTGLPSSLRFRGFSVCYVVEEQRQSSPVDNDERXESSNAIDPELLALRLAEKLERKKSERFTYLIAAVMSSFGITSMAVMAVYYRFSWQMEGGAIPMSEMFGTFALSVGAAVGMEFWARWAHRALWHASLWNMHESHHKPREGPFELNDVFAIINAVPAISLLSYGFFNKGLVPGLCFGAGLGITVFGIAYMFVHDGLVHKRFPVGPIADVPYLRKVAAAHQLHHTDKFDGVPYGLFLGPKELEEVGGDEELDKEISRRIKLYKKSSSS

SEQ ID NO: 22107 - protein, 372 aa, Brassica napus
  misc_feature (204)..(204): Xaa can be any naturally occurring amino acid
RPTRPRISNRAGLGDETYFPRGITSTPPKLNMSEARAEAEAVMFGALDSLFEKTGIKPAEIGILIVNCSLFSPTPSLSAMIVNRYKMREDIKSYNLGGMGCSAGLISIELANNLLKANPNSCAVVVSTENITLNWYFGNDRSMLLCNCIFRMGGAAILLSNRRQDRSKSKYELVNVVRTHKGSDDKNYNCVYQKEDERGTIGVXSLSKELMSVAGDALKTNITTLGPMVLPLSEQLMFLISLVKRKLFKLKVKPYIPDFKLAFEHFCIHAGGRAVLDEVQKNLDLKDWHMEPSRMTLHRFGNTSSSSLWYEMAYTEAKGRVKTGDRLWQIAFGSGFKCNSAVWKALRAVSTEELTGNAWAGSVEDYPVKIVQ

SEQ ID NO: 22108 - protein, 464 aa, Salmonella typhimurium LT2
MPDNKKQGRSNKAMTFFVCFLAALAGLLFGLDIGVIAGALPFITDEFQITAHTQEWVVSSMMFGAAVGAVGSGWLSFKLGRKKSLMIGAILFVAGSLFSAAAPNVEVLIISRVLLGLAVGVASYTAPLYLSEIAPEKIRGSMISMYQLMITIGILGAYLSDTAFSYSGAWRWMLGVIIIPAILLLIGVFFLPDSPRWFAAKRRFHDAERVLLRLRDTSAEAKRELDEIRESLQVKQSGWALFKENSNFRRAVFLGILLQVMQQFTGMNVIMYYAPKIFELAGYTNTTEQMWGTVIVGLTNVLATFIAIGLVDRWGRKPTLTLGFLVMAIGMGILGTMMHIGIHSPSAQYFAIAMLLMFIIGFAMSAGPLIWVLCSEIQPLKGRDFGITCSTATNWIANMIVGATFLTMLNNLGNANTFWVYAGLNVLFILLTLWLVPETKHVSLEHIERNLMKGRKLREIGAHD

SEQ ID NO: 22109 - protein, 159 aa, Mycobacterium sp. KMS
MTIEPRATADLVDDIGPDVRSCDLQLRQFGRRPEFAGRVTTVRCFQDNALLKSVLSEPGDGGVLVIDGDGSLHTALVGDVIAALGRDNGWSGLIINGAVRDASTLRTLDIGIKALGTNPRKSTKTGAGERDVPVDFGGVTFTPGDVAYSDDDGIVVVTP

SEQ ID NO: 22110 - protein, 441 aa, Arabidopsis thaliana
MEKSQSSPTKDASTKQKNVDDWLPITSSRNAKWWYSAFHNVTAMVGAGVLSLPYAMSNLGWGPGVTIMIMSWLITFYTLWQMVQMHEMVPGKRFDRYHELGQHAFGEKLGLWIVVPQQLIVEVGVDIVYMVTGGKSLKKIHDLLCTDCKNIRTTYWIMIFASIHFVLAHLPNFNSISIVSLAAAVMSLSYSTIAWATSVKKGVHPNVDYSSRASTTSGNVFNFLNALGDVAFAYAGHNVVLEIQATIPSTPEKPSKIAMWKGVVVAYIVVAICYFPVAFVCYYIFGNSVDDNILMTLEKPIWLIAIANAFVVVHVIGSYQIYAMPVFDMLETFLVKKMMFAPSFKLRFITRTLYVAFTMFVAICIPFFGGLLGFFGGFAFAPTTYYLPCIMWLCIKKPKKYGLSWCINWFCIVVGVILTILAPIGGLRTIIISAKNYEFFS

SEQ ID NO: 22111 - protein, 297 aa, Escherichia coli CFT073
MKRQGTTLSANNHALKQYAFFAGMLSSLKKQKWRKGMSESLHLTRNGSILEITLDRPKANAIDAKTSFEMGEVFLNFRDDPQLRVAIITGAGEKFFSAGWDLKAAAEGEAPDADFGPGGFAGLTEIFNLDKPVIAAVNGYAFGGGFELALAADFIVCADNASFALPEAKLGIVPDSGGVLRLPKILPPAIVNEMVMTGRRMGAEEALRWGVVNRVVSQAELMDNARELAQQLVNSAPLAIAALKEIYRTTSEMPVEEAYRYIRSGVLKHYPSVLHSEDAIEGPLAFAEKRDPVWKGR

SEQ ID NO: 22112 - protein, 846 aa, Brassica rapa
MKGVRNIYHHSYTLSFLLVFLVMILFRPAFSINTLSPTESLTISSNRTLVSPGDVFELGFFRTNSRWYLGMWYKKVSERTYVWVANRDNPISNSIGSLKILGNNLVLRGNSNKSVWSTNITRRNERSLVLAELLGNGNFVMRDSNNKDASEYLWQSFDYPTDTLLPEMKLGFQPKTGLNRFLTSWRSSDDPSSGDFSYKLEAQRLPEFYLWNKELFRVHRSGPWNGIRFSGIPEDQKLSYMVYNFTENSEEVAYTFLLTNSSIYSRLIVSSEGYIERQTWNPTLGMWNVFWSFPLDSQCESYRMCGPYSYCDVNTSPVCNCIQGFNPSNVEQWDLRSWSGGCIRRTRVSCSGDGFTRMKNMKLPETTMATVDRSIGVKECEKKCLSDCNCTAFANADIRNGGTGCVIWTGRLDDMRNYVADHGQDLYVRLAAADLVKKRNADGKIISSTVAVSVLLLLIMFCLWKRKQKRAKASATSIANRQRNQNLSMNGMVLLSKREFSVKNKIEELELPLIELEAVVKATDNFSNCNKLGQGGFGIVYKGRLLDGQEIAVKRLSETSVQGTDEFMNEVTLIARLQHINLVQILGCCIEADEKMLIYEYLENLSLDSYLFGKTQRSKLNWKERFDITNGVARGLLYLHQDSRFRIIHRDLKVSNILLDKNMIPKISDFGMARIFARDETEANTMKVVGTYGYMSPEYAMNGIFSEKSDVFSFGVIVLEIVTGKRNRGYNFLSYAWSHWKEGRTLELVDPVIVDSSLPSTFQPEEVLKCIQIGLLCVQELAEHRPTMSSVVWMLGSEATEIPHPKPPGCCIGRSPYELEPSSSRQCDEDESWTVNQYTCSVIDAR

SEQ ID NO: 22113 - protein, 495 aa, Oryza sativa
MSAVSGIDSPSSKLLQFEGKLKDGFARSNNSEHENGAGTVSISSKKSKHRVDSEKKPHVDISGVIDSDSQKCNSEQIHSANGIVSRDVNHDHIENCKVESNDFPLNTISETRYPTDNWNSSQFALSNDGSPVLNNQSTPQTGHGYGDNDLTYIDWPAIDNFEDVDNLFRRCDSTYGQQQLPNTDELSWIPSSDAMYSSDVAMQPGFESSYSDYGILDDLSAFNCTEDKSLTTADPSSAAYQRDAMELLSSDQICTGQENLDMIGNRYSSENAMEQPEDQKFSIASGSQLSSSQNLLNQKNHLDSTSPMQKKVASSASGQLISDNVTGHPGHQTLTRRASYPCENHEIGKRSLGKRGLGHSDVAMGTSMVVDGSFVSSISSDNSVEENSFRQLQDAVSQLDVKTKMCIRDGLYRLARSAQNRQVFPNTMNNNGDSHNVKDMQNAETSGKFVDPGSIETQTNPIDRSIALLLFHQPSEHVTGAVDEAASLKSHLAAV

SEQ ID NO: 22114 - protein, 117 aa, Triticum aestivum
MASMKVTWVVVIMCMAVVGAPMMAQAMTCNDVTVNMAQCLSYLMQGGTPSTLYCSGVKNILGSAVTTVDKQTVCNCLKADAARYNINDQYAQALPGFCKVNVPYKISRSTNCASIRF

SEQ ID NO: 22115 - protein, 393 aa, Triticum aestivum
  misc_feature (43)..(43): Xaa can be any naturally occurring amino acid
  misc_feature (221)..(221): Xaa can be any naturally occurring amino acid
  misc_feature (292)..(292): Xaa can be any naturally occurring amino acid
  misc_feature (322)..(322): Xaa can be any naturally occurring amino acid
  misc_feature (369)..(369): Xaa can be any naturally occurring amino acid
QVCTKKQAGTGPEFPGYRRPTRPMRTMEMEEKAKREIKILRLXIHPHIIRLYEVIYTPTDIFVVMEYCKYGELFDCIVEKGRLQEDEARRIFQQIISGVEYCHRNMVAHRDLKPENLLLDSKYNVKLADFGLSNVMHDGHFLKTSCGSPNYAAPEVISGKLYAGPEVDVWSCGVILYALLCATRPVPFDDDNIPKLFNKIKGGFYILPSHLSALARDLIPXRMLVVDPMRRITIRDIRDHPWFQNRLPRFLAVPPPDTAQPAKMEIAEDTLQEVANLGYDKDHVCESLCNRXINEETVAYYLLLENRFRATSGYLGANYQQXNESASPSTRNYLPRSNDSQGSGLRPYYRVETKWALGLQSRAQPRAIXIEVLKALKELNVRWKKNVDYNMKC

SEQ ID NO: 22116 - protein, 104 aa, Streptococcus pneumoniae R6
MAKAITDATFEQETKDGLVLVDFWATWCGPCRMQGPILDKLSEELSEDVLKIVKMDVDENPNTARAFGIMSIPTLLFKKDGQVVKQVAGVHTVEQIKAIIAELS

SEQ ID NO: 22117 - protein, 495 aa, Pseudomonas aeruginosa PAO1
MSIAIDPSVSAFLRSPHGLLIDGESGPARSGADMPLYDPATGAELARVARAGAEDVDRAVAAARRAFEGNWAGQRPADRERLLLRLAERIEAHGEQLAQLETLNNGKSINLSRALEVGASVEFIRYMAGWATKIEGRSLDLSIAAVPGARYRAYTVPEPVGVVGAIVPWNFPLLMAIWKIVPALACGCTVVLKPADETPLTALRLGQLCLEAGIPPGVVNIVTGTGAEAGAALAAHPGIDKLAFTGSTPVGKLIGHAAVENMTRFSLELGGKSPVIILDDTSLDMAAAGSAGAIFFNQGQVCTAGSRLYVQRKRFDQVLERLAAIAGDLSIGPGLDPTTQINPLVSARQQERVLGMIESGVAEGASVVCGGARQGETGFYVQPTILADVTPGMQVVREEIFGPVLVATPFDDLDEAVRLANDSIYGLGASIWSNDLRQVMDLVPRIKAGTVWVNAHNLLDPSMPFGGFKQSGIGREMGHAAIEAYTENKSVCIAY

SEQ ID NO: 22118 - protein, 323 aa, Streptococcus pneumoniae TIGR4
MKLNRVVVTGYGVTSPIGNTPEEFWNSLATGKIGIGGITKFDHSDFDVHNAAEIQDFPFDKYFVKKDTNRFDNYSLYALYAAQEAVNHANLDVEALNRDRFGVIVASGIGGIKEIEDQVLRLHEKGPKRVKPMTLPKALPNMASGNVAMRFGANGVCKSINTACSSSNDAIGDAFRSIKFGFQDVMLVGGTEASITPFAIAGFQALTALSTTEDPTRASIPFDKDRNGFVMGEGSGMLVLESLEHAEKRGATILAEVVGYGNTCDAYHMTSPHPEGQGAIKAIKLALEEAEISPEQVAYVNAHGTSTPANRKRRKWCYRSCSW

SEQ ID NO: 22119 - protein, 322 aa, Schizosaccharomyces pombe
MTHNKVVIIGSGPAGHTAAIYLARGELKPVMYEGMLANGIAAGGQLTTTTDVENFPGFPDGINGTTLTENFRAQSLRFGTEIITETVSKLDLSSRPFKYWLEGAEEEEPHTADSVILATGASARRLHITGEDTYWQAGISACAVCDGAVPIYRNKPLAVVGGGDSAAEEAQFLTKYGSKVYVLVRRDKLRASPIMAKRLLANPKVEVLWNTVAEEAQGDGKLLNNLRIKNTNTNEVSDLQVNGLFYAIGHIPATKLVAEQIELDEAGYIKTINGTPRTSIPGFFAAGDVQDKVFRQAITSAGSGCQAALLAMHYLEELEDTD

SEQ ID NO: 22120 - protein, 109 aa, Buchnera aphidicola str. Bp (Baizongia pistaciae)
MTNCIVELTDGIFKQYILESKKAVLVDFWAEWCNPCKILAPILEDIAKEYEHKLIVTKINIDKNPNTAPKYSIRGIPALLLFKNSELVGTKVGALSKVQLKDFLNLYLK

SEQ ID NO: 22121 - protein, 114 aa, Dasypyrum breviaristatum
KARPCKVVEVSTSKTGKHGHAKCHFVAIDIFNGKKLEDIVPSSHNCDVPHVDRQDYQLIDITDDGYVSLLTESGNTKDDLKLPTDDVLLGQIKTGFADGKDLILSVMSAMGEEQ

SEQ ID NO: 22122 - protein, 506 aa, Rubrivivax gelatinosus PM1
MGAPEAFTATAEIGHFIGGRAVPSTSGRRQAVYNPATGAVARQVALASADEVNAAVAAAQAAFPAWADTPPLRRARVLNKFLQLLNEQRDTLAAMITAEHGKVFTDAQGEVTRGIEIVEFACGAPQLLKTDFTDQVGTGIDNWVLRQPLGVVAGITPFNFPVMVPMWMFPMAIATGNSFVLKPSERDPSPSLFIAELLKQAGLPDGVFNVVQGDKLAVDTLLTHPDVKAVSFVGSTPIAQYIYETGAKHGKRVQALGGAKNHMVVMPDADLEQSVDALIGAAYGSAGERCMAISVAVLVGDVADQIVPKLAERAKALKVKNGMELDAEMGPIVTPQALERIEGYIAHGVDEGAKLVVDGRGLKVPGHEQGFFTGGTLFDHVTPEMKIYKEEIFGPVLACVRVPDFASAVALVNAHEFGNGVACFTRDGHVAREFSRRIQVGMVGINVPIPVPMAWHGFGGWKKSLFGDMHAYGEEGVRFYTKQKSVMQRWPESTPKGAEFVMPTSK

SEQ ID NO: 22123 - protein, 359 aa, Moorella thermoacetica ATCC 39073
MSSRLTRLRELMEREGITALWVHQDENRRYLSGFTGDSGTLLITPTAQYLLTDGRFTEQAREEAPDFQIIDLGPHPWEQLGQTLAAAGIEKLFFEAEHLTYATYEEFLEKARDWPRPVSLAPVKGLVARLRQVKDAEEIAVLEKAIAIADAGYNHLLSILRPGLTERDIALELEYFMGKQGSRGPSFTTIIASGPRSALPHGVASDRVLQPGDMIVMDFGAVYGGYHSDLTRTVALAPVTAEWRRLYDIVLEAQQQAIAALRPGIQGREADAVAREAIAAAGYGDYFSHGLGHGVGLAIHEDPTLSSRSEVKLAPGMVVTVEPGVYLPGRGGIRIEDVVLIQEGGARVLSRAPKEFIEL

SEQ ID NO: 22124 - protein, 365 aa, Buchnera aphidicola
HVDHGKTTLTAAITTVLSKKFGGSARAFDQIDNAPEEKARGITINTSHVEYDTEFRHYAHVDCPGHADYMKNMITGAAQMDGAILVVAATDGPMPQTREHILLGRQVGVPYIIVFLNKCDMVDDEELLELVEMEVRDLLTQYDFPGDDTPIIRGSALKALEGDPEWESKIIDLSKFLDSYIPEPKRAVDQPFLLPIEDVFSISGRGTVVTGRVEKGIIKVGEEVEIVGIKKTTKTTCTGVEMFRKLLDEGRAGENVGVLLRGTKRDEIERGQVLAKPGSIHPHTTFESEVYVLSKEEGGRHTPFFKGYRPQFYFRTTDVTGSIELPEGIEMVMPGDNIKMTVTLINPIAMADGLRFAIREGGRTV

SEQ ID NO: 22125 - protein, 367 aa, Geobacillus stearothermophilus
MELFKYMETYDYEQVLFCQDKESGLKAIIAIHDTTLGPALGGTRMWMYNSEEEALEDALRLARGMTYKNAAAGLNLGGGKTVIIGDPRKDKNEAMFRAFGRFIQGLNGRYITAEDVGTTVADMDIIYQETDYVTGISPEFGSSGNPSPATAYGVYRGMKAAAKEAFGSDSLEGKVVAVQGVGNVAYHLCRHLHEEGAKLIVTDINKEVVARAVEEFGAKAVDPNDIYGVECDIFAPCALGGIINDQTIPQLKAKVIAGSADNQLKEPRHGDIIHEMGIVYAPDYVINAGGVINVADELYGYNRERAMKKIEQIYDNIEKVFAIAKRDNIPTYVAADRMAEERIETMRKARSPFLQNGHHILSRRRAR

SEQ ID NO: 22126 - protein, 169 aa, Streptomyces avermitilis MA-4680
MTTDNAATSVLDTEIDALQGGSADLSQYAGKAVLIVNVASKCGLTPQYAGLERLQERYAAQGFTVLGVPCNQFLGQEPGTSEEIAEFCSATYGVTFPLTEKVEVNGDARHALYESLVGFADGEGHTGDIRWNFEKFLIGRDGKVVARFSPQTEPESAEVVTAVERQLAG

SEQ ID NO: 22127 - protein, 351 aa, Wolbachia endosymbiont of Aphthona nigriscutis
VVANTDAQALEKSLCDKKIQLGINLTKGLGAGALPDVGKGAAEESIDEIMEHIKDSHMLFITAGMGGGTGTGAAPVIAKAAREARAAVKDRAPKEKKILTVGVVTKPFGFEGVRRMRIAELGLEELQKYVDTLIVIPNQNLFRIANEKTTFSDAFKLADNVLHIGIRGVTDLMVMPGLINLDFADIETIMSEMGKAMIGTGEAEGEDRAISAAEAAISNPLLDNVSMKGAQGILINITGGGDMTLFEVDAAANRVREEVDENANIIFGATFDQAMEGRVRVSVLATGIDGRNNKSETSPISQSEDSEKEKFKWPYSHSESTQDKTLETKPTEQVSEGAKWGSNIYDIPAYL

SEQ ID NO: 22128 - protein, 365 aa, Buchnera aphidicola
HVDHGKTTLTAAITTVLSKKYGGSARAFDQIDNAPEEKARGITINTSHVEYDTELRHYAHVDCPGHADYMKNIITGAAQMDGAILVVAATDGPMPQTREHILLGRQVGVPYIIVFLNKCDMVDDEELLELVEMEVRDLLTQYDFPGDDTPIIRGSALKALEGDADWESKILDLSKFLDTYIPEPKRAIDQPFLLPIEDVFSISGRGTVVTGRVERGIVKVGEEVEIVGIKKTTKTTCTGVEMFRKLLDEGRAGENVGVLLRGTKRDEIERGQVLAKPGSIHPHTTFESEVYVLSKEEGGRHTPFFKGYRPQFYFRTTDVTGSIELPEGVEMVMPGDNIKMTVTLIHPIAMADGLRFAIREGGRTV

SEQ ID NO: 22129 - protein, 356 aa, Salinibacter ruber DSM 13855
MSDRMSRVRGRLNDLEADAIFLTSMPKIRWACGFTGSSGLLIVGPDSASFVTDGRYTDQARSEVDGADVHIARDGLSACVKEVGLLESFSRVAFQADHVSVARRDALVDEHGEVEWIPKTGLLTQLAGSKTEDEVSRIRRAQSITENVFREITDLIEPGMTEREIGAEIVYRHLKKGAESMAFDPIVASGPNGARPHARPTDRSLHAGDMIVIDMGCFRDGYASDMTRTVALGEPEDTARRGYEAVLEAQHAALDAARAGMTGRELDAVARGSLEAAGLAEHFTHGLGHGLGLQVHEWPRVSHTADDELPEGACVTIEPGVYLPEKQYGVRIEDIIVLREDGCENLTRSPKELMVL

SEQ ID NO: 22130 - protein, 189 aa, Wolbachia endosymbiont of Aphthona nigriscutis
LTVGVVTKPFGFEGVRRMRIAELGLEELQKYVDTLIVIPNQNLFRIANEKTTFSDAFKLADNVLHIGIRGVTDLMVMPGLINLDFADIETIMSEMGKAMIGTGEAEGEDRAISAAEAAISNPLLDNVSMKGAQGILINITGGGDMTLFEVDAAANRVREEVDENANIIFGATFDQAMEGRVRVSVLATG

SEQ ID NO: 22131 - protein, 365 aa, Buchnera aphidicola
HVDHGKTTLTAAITTVLAKKYGGSPRAFDQIDNAPEEKARGITINTSHVEYDTLSRHYAHVDCPGHADYIKNMITGAAQMDGAILVVAASDGPMPQTREHILLGRQVGVPYIIVFLNKCDAVDDEELLELVEMEVRDLLTQYDFPGDDTPIVRGSALKALEGVPEWEEKIIDLANLLDSYIPEPIRSIEKPFLLPIEDVFSISGRGTVVTGRVERGIIKVGEEVEIVGIKPTSKTICTGVEMFRKLLDEGRAGENVGVLLRGTKRDDIERGQVLSKPGTITPHIKFESEVYVLSKEEGGRHTPFFKGYRPQFYFRTTDVTGYVELPEGIEMVMPGDNVKMVVTLIHPIAMSDGLRFAIREGGRTV

SEQ ID NO: 22132 - protein, 335 aa, Saccharophagus degradans 2-40
MPRIAINGFGRIGRNVLRAIYERNLQNEMQVVAINDLGSPDINAHLLKYDTVHGRFGFDVEASEGAIRVNGDEIKITAERNPADLPWAALNVDIVFECTGLFVARDKAALHLDAGAKNVLISAPGKDVDLTVVYGVNHESITADHKVLSNASCTTNCLAPMTSALHSAIGVKTGLMNTIHSYTNDQRVTDAYHSDTLRARAAALNMIPTKTGAAAAIGLVIPDLAGKLDGLSIRVPTVNVSCLDFTFEAARDTTVEEVNQVLRDAAAGPLKGVMDVNTIPLVSSDFNHDAHSCIVDLSHTRVMGNQVKVLAWYDNEWGFSNRMLDTTMAIVKANA

SEQ ID NO: 22133 - protein, 572 aa, Pseudomonas syringae pv. tomato str. DC3000
MSKTIADHLAQTLAAAGVSHIWGVSGDSLNGLTDSLERIDSINWMHTRHEEVAAFAAGAQAASSGKLAVCAGSCGPGNLHLINGLYDCHRNRVPVLAIAAHIPSSEIGLDYFQETHPQELFKECSHFVELVSNPEQFPRVLERAMRAAISQKGVAVIVLPGDVALSESPDVPAKWVEATPPVVVPADTDLQSMANMLNDSKAVTLLCGAGCAGAHEQILALADTLGAPIVHALRGKQHVEYDNPFDVGMTGLIGFSSGYHAMLSCDTLVILGSSFPYRNFYPEKANIIQIDLDPTQLGRRTPVALGLVGGVRETLDALQPKLKPHTDRRFLDKALKHYAKAREDLDELATPTPNGTPIHPQYLTRLVDEQADADAIFTVDVGTPTLWAARYLHMNGKRSLLGSFNHGSMANALPQALGAKAEHPDRQVVALCGDGGLSMLLGDLLSIRQLNLPIKMVVFNNSSLGFVDMEMKASGYVPHGTDLHETNFAGIALGAGILGLRVENAEELPAALRKAFDHPGPVLIDVVTAKQELGIPPKIKLAQAKGFSLYMMRAIMSGRGSEVLELAKTNLR

SEQ ID NO: 22134 - protein, 578 aa, Corynebacterium diphtheriae
MAKNFAEQIVESLENQGVKRIYGLVGDSLNPIVDAVRTSNIEWIHVRNEETAAFAAEAESLLTGELAVCAASCGPGNTHLVQGLYDANRNGAKVLAIASHIPSRQIGSHFFQETHPEALFAECSGYCEMANSALQGEVILHHAIQSTMAGKGVSVLVLPGDVTMQDVEDDTFTGSRISNARPIMYPDPAEAADLVKAINEAKTVTLFCGAGVRYARKEVLELAEKIKAPIGHALGGKMYIQYDNPFDVGMSGLLGYGACHDASNDADLLILLGTDFPYNDFLPRKNVAQIDIDGSHIGRRTRISHPVVGDVAATISNILPHIEEKTDRSFLDRMLKKHHRKLNDVIEAYTSGVEKHTPIHPEFVANIIDEIAADDAVFTIDTGMCNVWGARYITPNGKREMIGSFRHGTMANALPQAIGASAANPRRQVVTFSGDGGLGMLMGELLTVKLHNLPIKTVVFNNSSLGMVKLEMLVQGMPEHETDHEHVDFDAIAAAVGIEHIKITDPAKARQQLQAAFDYDGPVLIDIITDPNALSIPPNITMDMLMGFSRAATRTVFGGGVGHMVDMAKSNLRNIPKP

SEQ ID NO: 22135 - protein, 490 aa, Helianthus tuberosus
MDFLIIVSTLLLSYILIWVLGVGKPKNLPPGPTRLPIIGNLHLLGALPHQSLAKLAKIHGPIMSLQLGQITTLVISSATAAEEVLKKQDLAFSTRNVPDAVRAYNHERHSISFLHVCTEWRTLRRIVSSNIFSNSSLEAKQHLRSKKVEELIAYCRKAALSNENVHIGRAAFRTSLNLLSNTIFSKDLTDPYEDSGKEFREVITNIMVDSAKTNLVDVFPVLKKIDPQGIKRGMARHFSKVLGIFDQLIEERMRTGRFEQGDVLDVCLKMMQDNPNEFNHTNIKALFLDLFVAGTDTTSITIEWAMTELLRKPHIMSKAKEELEKVIGKGSIVKEDDVLRLPYLSCIVKEVLRLHPPSPLLLPRKVVTQVELSGYTIPAGTLVFVNAWAIGRDPTVWDDSLEFKPQRFLESRLDVRGHDFDLIPFGAGRRICPGIPLATRMVPIMLGSLLNNFDWKIDTKVPYDVLDMTEKNGTTISKAKPLCVVPIPLN

SEQ ID NO: 22136 - protein, 365 aa, Buchnera aphidicola
HVDHGKTTLTAAITTVLAKKYGGSARAFDQIDNAPEEKARGITINTSHVEYDTSLRHYAHVDCPGHADYIKNMITGAAQMDGAILVVAATDGPMPQTREHILLGRQVGVPYIVVFLNKCDMVDDEELLELVEMEVRDLLTQYDFPGDKTPIIRGSALKALEGDCIWESKIIDLANILDTYIPEPKRSIDQPFLLPIEDVFSISGRGTVVTGRVERGIIKVGEEVEIVGIKPTSKTICTGVEMFRKLLDEGRAGENVGVLLRGTKRDDIERGQVLSKPGTITPHIKFESEVYVLSKEEGGRHTPFFKGYRPQFYFRTTDVTGYVELPEGIEMVMPGDNVKMVVTLIHPIAMSDGLRFAIREGGRTV

SEQ ID NO: 22137 - protein, 527 aa, Photobacterium profundum SS9
MYWRGRSDSNGYRNSAIRFCDNGSSKKDIAMIKSVPLFIDGEFRQSVTEEWVDVTNPATNDVIAELPCATEPEMVEAITSAANAFQSWKAVAVPDRARLMLRYQHLLKEHHDELATLLSQETGKILADAKGDVWRGIEVVEQAANIASNMMGEMVENVATDIDTYSITQPLGVCCGITPFNFPAMIPLWMFPIAIASGNTFVLKPSEQVPLTSIRLAELFEQAGAPKGVLQIIHGRKQQVDFLLSHPDIRTISFVGSVPVAQYIYQTGTQHFKRVQAFAGAKNHMVVMPDANKAQVISNLVGASVGAAGQRCMAISVAVFIDGAKEWIPDLKNEMEKIQPGCWDDANAGYGPLISAPAKTRVLGLIQEGKDQGAVCELDGSQCTVDGFPNGNWIGPTLFSGVKTNMSIYQQEIFGPVLMCIEVDTLEDAIALVNNNPYGNGTSIFTASGGAARKYQHEIQVGQVGINVPVPVPLPFFSFTGWRGSFYGDLHAYGKQAVRFYTETKTVTARWFDDDIPSGPNFTIHLK

SEQ ID NO: 22138 - protein, 320 aa, Arabidopsis thaliana
MDGDELTEQETALYDRQIRVWGAGAQRRLSKSHVLVSGIKGTVAEFCKNIVLAGVGSVTLLDDRLVTTEVFNANFLILPDENAYVGKTVAEICCDSLKDFNPMVHVSIEKGDLSTLGVDFFEKFDVVVIGYSSRATKKAVNEKCRNLAKDVAFYTVDCRGSCGEIFVDLQNYKYTKKKLDETVECELTFPSFQEAVSVPWKPMPRRTAKLYFAMRVIELFEETEGRKPGECSLSDLPRVLKLKKELCEGNSVSENHIPDILLERLVSNNTEFPPACAIIGGILGQEVIKVISGKGEPLKNFFYFDAEDGKGVIEDLSHKL

SEQ ID NO: 22139 - protein, 244 aa, Triticum aestivum
  misc_feature (39)..(39): Xaa can be any naturally occurring amino acid
  misc_feature (48)..(48): Xaa can be any naturally occurring amino acid
MALAARLVSRSRQLYSVQAALGNGGATQVRSFAKDAAPXDRPPVGGDXISWKGIFFEVKKKFETALGVLKKEKITIDPDDPAAVSRYAQVMKTVREKADLLSDSQRIKYTIETFTKGIPDARTYLNTLQQLRIKSGLIDHLGIEPLMMEALEKIEKDIKKPLLRSDKKNMATLLAEFDKINKKLGIRKEDLPKIEEELELEIAKSELSELKKECVEAMETQLKREEFQDEEMPDVRKLDIRNFL

SEQ ID NO: 22140 - protein, 361 aa, Methylobacillus flagellatus KT
MISPTIEIIEEMRQGRMVILVDEEDRENEGDLVLAAQFTTAEHINFMAKHGRGLICLTLTEERCKQLNLPAMVQKNGSGMGTNFTVSIEAATGVTTGISASDRARTIQAAVAPNAKPTDIVSPGHIFPVAAQNGGVLVRAGHTEAGCDLAALAGLTPASVICEILKEDGSMARLPDLIEFAKQHNLKIGTIADLIQYRNEHECLVKRAAERDVITPYGPMRLIAYADMIAKETHLALVKGEITPDKEVLVRVHEPLSVFDLIDESSRSHSWNTLQAMRKIQEAEAGIVILLHNGEGAEDLVERIKFADEPVRIRQDLRNYGIGSQILLDLGVRKMKLLAAPRKMPSIVGFGLEITGYVEAP

SEQ ID NO: 22141 - protein, 231 aa, uncultured Pseudonocardia sp.
ISIAHVEYQTEKRHYAHVDCPGHADYVKNMITGAAQMDGAILVVAATDGPMPQTREHVLLARQVGVPYIVVALNKADMVDDEEIMELVEMEVRELLSAQDYPGDDLPIVRVSALKALEGDDKWAEAIVELMDAVDEAIPEPERDLEKPFLMPVEDVFTITGRGTVVTGRIERGIVKVNETVDIVGIRPNKTSTTVTGVEMFRKILDEGRAGENVGLLLRGIKREDVERGQV

SEQ ID NO: 22142 - protein, 529 aa, Bdellovibrio bacteriovorus HD100
MTHSVYEALLNSNAVIEFDNQGYILWANPNFLNLMEYELDEIEGRHHSIFLPEFHQHELEYQEMWNQLAEGHAQAGEFKRLTKKNREVWIQGSYTPVRNLQGEISKIVKMAVDITEKKSLADNLEKKNKELLGAATKAKAATDAKTVFLANMSHEIRTPLNSIIGITDTLAETPLDNQQASFVEILQRANHQLMTIINDILDLSKVEAGEMELRPLPFNLQRLLDELEAVLGFRAKEKGLKLSLAIDPDVEEYFVGDADRLRQVLMNLLNNSLKFTNNGEISLQVSVNRTVHKGNLLFCVTDTGIGISKQKFKDIFQPFTQADTTTTRKYGGTGLGLSITKNIVQMMNGHIWFESQPGQGTSFFFTISVPSTTERKTTMHNPWQGRYQLTDVNHNISSSRRRILVVDDVEDNRHLFGIYLQKTAHAVSYASGGLEAVEMVAKEHYDIIFMDVQMPGMDGYEATRRIRDMEIQMNRTPAKIFACTANAFQEDVRKSLSAGCDLHLSKPVRKDTMLKAISSCFNDAQEAIY

SEQ ID NO: 22143 - protein, 231 aa, uncultured Pseudonocardia sp.
ISIAHVEYQTEKRHYAHVDCPGHADYVKNMITGAAQMDGAILVVAATDGPMPQTREHVLLARQVGVPYIVVALNKADMVDDEEIMELVEMEVRELLSDQDYPGDDLPIVRVSALKALEGDEQWADAIVELMDAVDEAIPEPERDIEKPFLMPVEDVFTITGRGTVVTGRIERGIVKVNETVDIVGIRPNKTSTTVTGVEMFRKILDEGRAGENVGLLLRGIKREDVERGQV

SEQ ID NO: 22144 - protein, 240 aa, Prunus avium
MDMFFSQLSDSVDQPQSSLLSDASVTTRGASCSDGDVILASSRPKKRAGRRVFKETRHPVYRGVRRRNNDKWVCEMREPNKKKSRIWLGTYPTAEMAARAHDVAALAFRGKLACINFADSAWRLPVPASMDTMDIRRAAAEAAEGFRPVEFGGVCSGSSDEKERMVVQVEEKNKKGSVNLERSRSLSLSYWDEEEVFHMPRLLHDMAEGLLLSPSQCLGGYMNLDDMGTDADVKLWSFSI

SEQ ID NO: 22145 - protein, 210 aa, Triticum aestivum
FSPTPPDGRPLASLAEAFNCLYALSRQSFPPHRSLLKRLNCLRIFSRLKFWCPAPAMGSRRYDIDTRRCGIHSAPTKSMYLDAQQVVNCQATVRDHDVGSCAVKHHFPSPIVSWIEDLSSFGNASFGPDSEYVDEQARASVGQSSTSSNLHDMQISVRLTDEFMELAKENTSKNLETCGILGASFRDGTYFVTMLIIPKQEGTAHSVCSN

SEQ ID NO: 22146 - protein, 378 aa, Anabaena variabilis ATCC 29413
MQMNKVLINDTTLRDGEQAAGVAFSVEEKIAIAKFLDAIGVDEIEVGIPAMGKAEQEAIANIVKLNLSANLLGWNRAVISDIQASIACGLQRVHISIPVSAIQIAAKFHGQWQVVLQKLHDSISFAVDQGLFVSIGGEDSSRAEESFLLDVVLAAQEWGASRFRFCDTVGILDPFTTHAKIKQLVASLTIPVEMHTHNDFGLATANALAGIKAGALSVNTTVNGLGERAGNAALEEVVMALKHLYHHDLGIDTRRLLEISQLVVSASGHPVPPWKAIVGENTFAHESGIHAHGVLQNPQTYEPFAPEEVGRERRLVVGKHSGRHLLSSILQQHDIILNHEETQSVLDAVRQESVEKKRSLTPQELLHLVQTKQHFRAC

SEQ ID NO: 22147 - protein, 372 aa, marine gamma proteobacterium HTCC2207
MVLNTIEELIEDIRQGKMVILMDDEDRENEGDLVMAAPMVRAQDINFMATHARGLICLTLHEDRCKQLELAMMVNSSQNNASHGTPFTLSIEAAEGVTTGISAADRARTVQAAVASSARPEDIVQPGHIFPLKAQPGGVLSRAGHTEAGCDMAKMAGFEPAAVIVEIMNEDGTMARRDDLEVFAQKHDLKIGTIADLIHHRLVTEKTTTCISERAVSTSFGDFTLKTYHDDVHGEKHFALVMGDVIGEEPVLVRVHTNRSARDLLAIEDSSTFKSWSFHKALERVAAEGRGVVVLLYYPESSEDIDRSIEQILNPGQARSQQASEVVYQQVGTGSQILRDLGIQKMRLMSAPFKFTGISGFDLEVVEHVDYE

SEQ ID NO: 22148 - protein, 413 aa, Cryptococcus neoformans var. neoformans JEC21
MTAIQRPISVFARPLLPSSSRLRLAPPAIARQRFLATVRDGPAVGSKPPTAVLMMNMGGPSTVPEVHDFLSRLFHDNDLIPLPFQPLLAPLIAKRRTPSIEEQYSAIGGGSPILKWTQVQGAAMCSLLDELNPKSAPHKPYVAFRYAKTLTEDALAEMKQDGVQRAVAFSQYPQYSSSTTGSSLNELYKQVKQLGWGGNGEVKWSVIDRWPTHPGLVEAFAHNIKAALQTYPEDRRGDVTILFSAHSLPLDIVNRGDPYTAEVAATVWAVMSKLNFSNPWRLTWQSKVGPKAWQGPQTAAAIEGYAKAGTKDICLVPVAFTSDHIETLYELDIEVKEEAEKLGVHLTRASSLNDSPIFIRALADIVSNHLKDYDAGLIGPASKQLLSADPRHVSPRSQETRRWLASGGTKMAA

SEQ ID NO: 22149 - protein, 175 aa, Brassica napus
VDPRVRLIALRCPEYHEKVRERIVKQLKTCPKIYREFVEMDSSKKRANDLPKDYSEYVKNMSKNGVWGDNVTLQAAADTFGVKIVVITSEKEVPSMEIVPKSLTLERVVYLSHLVGVHYNSIYLKGSETDPAPMELPGKSKNKSENDKETQGRNENDKHKNNEKKKNDRSKNKKK

SEQ ID NO: 22150 - protein, 208 aa, Candida glabrata CBS 138
MIARKKNILKVIILGDSGVGKTSLMHRYVNDKYSQQYKATIGADFLTKEVVLDDDKVVTMQVWDTAGQERFQSLGVAFYRGADCCVLVYDVTNAKSFENIKSWKDEFLVHANISSPESFPFVILGNKVDIEDSKKVVSEKAGQELAKSLGDVPLFLTSAKSAINVDTAFEEIAKSALQQNQNDAHAFEDDFNDAINIQLEGESNSCSC

SEQ ID NO: 22151 - protein, 239 aa, Magnaporthe grisea 70-15
MKFNISNPSTGAQKLVEVEDERKLRFFMEKRMGAEVSAEPLGDEWKGYILKITGGNDKQGFPMKQGVLLPNRTRLLLSDGHSCYRARRTGERKRKSVRGCITGMDLSVLAVSIAKRGEQDIPGLTDVVHPKRLGPKRATKIRKFFDLSKEDDVRKYVIRREVQPKGEGKKPYTKAPKIQRLVTPQRLQHKRHRIALKKRQSEKVKDAANEYAQILAKRVAEAKATKADARKRRASSMRK

SEQ ID NO: 22152 - protein, 322 aa, Yarrowia lipolytica CLIB122
MSRSKFTEYKQAARNFWVPEPHFTEKDYPDLTGKTYVITGGHSGVGLEATKLLIGKGAKVIIVGRNKEKAQDVLKELPDGKFDFAEADLADLTTISTAGDYITKNYPEIHGVILNAGVMTPPYSKTAQGHELQWGTNVVGHQAIMKYLTPIVIKTAKTSPPGTVRLVWVSSSAVVISGLPGGINFDDINYEKEENPSPHVLYSQSKIGNAYQAYLWSKNHPDSGVISVSVDPGNLKSNLQRHSSEFLKKAFNYVLYPAQYGAYTELAALLAPDVHDGEHLIPWGVPGHLRWDVDEGRKGEKGEHLWKKLEGDVKDFVKESYP

SEQ ID NO: 22153 - protein, 432 aa, Thermotoga maritima
LFKPNYHFFPITGWMNDPNGLIFWKGKYHMFYQYNPRKPEWGNICWGHAVSDDLVHWRHLPVALYPDDETHGVFSGSAVEKDGKMFLVYTYYRDPTHNKGEKETQCVVMSENGLDFVKYDGNPVISKPPEEGTHAFRDPKVNRSNGEWRMVLGSGKDEKIGRVLLYTSDDLFHWKYEGAIFEDETTKEIECPDLVRIGEKDILIYSITSTNSVLFSMGELKEGKLNVEKRGLLDHGTDFYAAQTFFGTDRVVVIGWLQSWLRTGLYPTKREGWNGVMSLPRELYVENNELKVKPVDELLALRKRKVFETAKSGTFLLDVKENSYEIVCEFSGEIELRMGNESEEVVITKSRDELIVDTTRSGVSGGEVRKSTVEDEATNRIRAFLDSCSVEFFFNDSIAFSFRIHPENVYNILSVKSNQVKLEVFELENIWL

SEQ ID NO: 22154 - protein, 415 aa, Acidobacteria bacterium Ellin345
MTRRVVVTGLGLICGVGNTVDEVWANLLAGKSGVARITEFNDDIEKYACKIAAQVKNFDPLNFVEKKEAKKMARFIHLALAAAHEAMASSGLQVTDDLAERVGVHIGSGIGGFDVIEREHKACLEGGPRKISPFFIPAAIVNLAAGHVSIKYNAKGPNEATCTACTSSAHAIGDAFKIIQREDADVMICGGSEAAVTSMGVGGFAAMRALSTRNDDPERASRPWDKDRDGFIIGEGAGIMVLEELEFAKARGAKILAEVVGYGMSGDANHITQPAPEGDGGFRVMRNAMRDAKITPDQVGYVNAHGTSTPIGDVLESVAIKRAFGDFAKKLAVSSTKSMTGHLLGGAGGLEAGITALALRDQIIPPTINLDHPDAECDLDYVPHTARKIQMEHAISNSFGFGGTNGCLVFKRWSE

SEQ ID NO: 22155 - protein, 439 aa, Streptococcus pneumoniae R6
MINKTFTVEKANRFIAENKHLVNTQYKPEEHFSAEIGWINDPNGFVYFRGEYHLFYQFYPYDSVWGPMHWGHAKSKDLVTWEHLPVALAPDQDYDRNGCFSGSAIVKDDRLWLMYTGHIEEKTGVRQVQNMAFSDDGIHFEKISQNPVATGSDLPDELIAADFRDPKLFEKDGRYYSVVAAKHKNNVGCIVLLGSDNLVEWQFESIFLKGVEHQGFMWECPDYFELDGKDCLIMSPMRYQREGDSYHNINSSLLFTGKVDWGEKCFIPESVQEIDHGQDFYAPQTLLDDQNRRILIAWMQTWGRTLPTHDQEHKWACAMTLPRILRLEDGKLRQFPVKKGQYQIQIDKDCHYHLGNDTDYLEFGYDSNVQQVYIDRSHLIQKILGEEEQDTSRRYVDIEAKELEVVLDKNSIEIFVNQGEASLTATYYLTVPAELSRID

SEQ ID NO: 22156 - protein, 950 aa, Neisseria meningitidis Z2491
MKLSELFNPNEFAARHLSFGDEAALLAAVDEKSMDEFVGNTVPQSIRMPSELDLPEALTEADALAKLKGIASKNMINKSYIGLGYYPTRVPNVILRNVLENPGWYTAYTPYQAEIAQGRLEALLNFQQVCIDLTGFPVAGASLLDEATAAAEAMAMAHRVGKVKSERFFVDERVYPQTLDVMKTRAKYFGFELVVGDFAQADEGEYFGALFQYVGKDGDVQDLQDVIGRLKAKGTIVAVAADIMSLVLLKSPAELGADIALGNTQRFGVPMGFGGPHAAYFAFKDEFKRSAPGRIIGVSKDASGKPALRMALSTREQHIRREKATSNICTAQALLANLAGMYAVYHGPKGVKRIADRIHALASAFADALVSDGLNVVHKVFFDTVTVDFGNKEKADQVFAAALESGYNLRRVNDTQVAAAFHETSACEDLVDLYRAFTGKDTFAFADDVKGRLNAELLRQDDILQHPVFNSYHTEHEMLRYLKKLEDRDLAMNRSMISLGSCTMKLNATAEMLPITWAEFSDIHPYAPEAQTAGYRELLADMENSLKAITGFDAISLQPNSGAQGEYTGMLSIRRYQEAQGEAHRNICLIPKSAHGTNPATAAMLGLKVVVVDTDEHGNVNIDDLKAKAEQHRDALSAIMITYPSTHGVYEEGIRDICRIIHENGGQVYMDGANLNAQIGIMQPAEVGADVLHMNLHKTFCIPHGGGGPGMGPIGLKAHLAPFAPGHTLTDTHSASAGQTAVAAAAYGSASILPITWMYLTMMGKQGMEQATRWALLNANYVAKRLSEDYPILYTGKNGRVAHECIVDLRPLKAESGITETDIAKRLMDYGFHAPTVSFPVAGTLMIEPTESESKAELDRFIATLKSIRREVQKVIDGEWPKDDNPLVNAPHTAADITGNWAHPYSREEAVFPLPFVREHKFWPFVNRVDDVYGDRNLVCSCPPMENYED

SEQ ID NO: 22157 - protein, 247 aa, Brassica napus
  misc_feature (66)..(66): Xaa can be any naturally occurring amino acid
  misc_feature (234)..(234): Xaa can be any naturally occurring amino acid
VQIRPPHSPVEASHEPVTLPRAGRLVLTPLRRFNVIIISPLFVSLPLGIHLLLFLSLAVTRMLHIXLFSRALHPRHYARAPSSARFPMYAGDTSKVVIPGTAIVLVEPCDHSYSGRDRVSGTEIEVNPKTMKATGFVKKPGVLVGDLKRLAILKEFGDESPDLGLGDRTSDHDFMSICKEGYMVHETKSATTVPIERLKNRIIFHDGRLVQRPTPLNALIIYLWLPFGFMLSIXRVYFNLPLPERFV

SEQ ID NO: 22158 - protein, 466 aa, Shigella flexneri 2a str. 301
MDQKLLTDFRSELLDSRFGAKAISTIAESKRFPLHEMRDDVAFQIINDELYLDGNARQNLATFCQTWDDENVHKLMDLSINKNWIDKEEYPQSAAIDLRCVNMVADLWHAPAPKNGQAVGTNTIGSSEACMLGGMAMKWRWRKRMEAAGKPTDKPNLVCGPVQICWHKFARYWDVELREIPMRPGQLFMDPKRMIEACDENTIGVVPTFGVTYTGNYEFPQPLHDALDKFQADTGIDIDMHIDAASGGFLAPFVAPDIVWDFRLPRVKSISASGHKFGLAPLGCGWVIWRDEEALPQELVFNVDYLGGQIGTFAINFSRPAGQVIAQYYEFLRLGREGYTKVQNASYQVAAYLADEIAKQGPYEFICTGRPDEGIPAVCFKLKDGEDPGYTLYDLSERLRLRGWQVPAFTLGGEATDIVVMRIMCRRGFEMDFAELLLEDYKASLKYLSDHPKLQGIAQQNSFKHT

SEQ ID NO: 22159 - protein, 675 aa, Mesorhizobium loti MAFF303099
MCGIAGIVALNAAAASPSREALMRMVGTLAHRGPDEHGLYRDKRAGLAHARLSVVDLSSGQQPLADTGDTSWIVFNGEIFNYVELREKLIALGHRFRTRSDTEVALHAYRAWGEAAFERMNGQWAIAIWDSIAGRLVLSRDRFGICPLHFCEHAGRLYFASEVKAIFAADPTIPRAFDPAGLDQTFTLWTVVPPQGVFQGIHELVPGHVRIYQDGTVREQVFWQPSYPENIGALQGEFTGSCDDAVDRVRDALEAATALRMVRADVPVGCYLSGGLDSSLVATLGRRFAGRRFQTFSLRFADAEYDETRFQRLVAEATGSEHHEVVVSRGDIAAIFPEVIHHTERPILRTAPAPLFLLSRLVRERGIKVVLTGEGADEMFAGYDLFREAKVRRFWGRQPASTRRSRLLERLYPYLTRSPVQQQAMARQFFGRGIEAYDAPGFAHDTRWRSTGAIKRLFSADLRAESQRRDAVSELLARLPAAFSRWSHLAQDQYLEVQTLMSGYLLSSQGDRMLMAHSVEGRFPFLDDELVRLANSLPPSYKLRVLDEKHVLKRVAQPIVPSEIVTRKKQPFRAPNALCFAADAAPEYIREALSETAIRKANVFDPVSVTRLLDKCQARTGDGDLSNADNMALVGVLSTQLLHQQFVASCPSATHVRGLSVDVDREHREERLHVA

SEQ ID NO: 22160 - protein, 101 aa, Brassica napus
  misc_feature (6)..(6): Xaa can be any naturally occurring amino acid
  misc_feature (11)..(11): Xaa can be any naturally occurring amino acid
  misc_feature (21)..(21): Xaa can be any naturally occurring amino acid
  misc_feature (51)..(51): Xaa can be any naturally occurring amino acid
  misc_feature (58)..(58): Xaa can be any naturally occurring amino acid
  misc_feature (62)..(62): Xaa can be any naturally occurring amino acid
  misc_feature (75)..(75): Xaa can be any naturally occurring amino acid
  misc_feature (88)..(89): Xaa can be any naturally occurring amino acid
  misc_feature (92)..(92): Xaa can be any naturally occurring amino acid
  misc_feature (94)..(94): Xaa can be any naturally occurring amino acid
  misc_feature (96)..(96): Xaa can be any naturally occurring amino acid
  misc_feature (98)..(99): Xaa can be any naturally occurring amino acid
EKEEVXAYSMXSSATVVTSPXQATMVVPFTGLKSSSAFPVTRKANNDITSXVSNGGRXNCMXAWPPIGKKKFETXSYLPDLTEAELPXXVDXLXRXKXXPC

SEQ ID NO: 22161 - protein, 306 aa, Helicobacter pylori J99
MEKLVIGSRGSELALWQANHIKERLKKECSMESEIRIVKTTGDKILDAPLNKIGGKGLFTKELEELLLKGAIDLAVHSLKDVPVVFEKGLDLACITKRADVRDTFLSVKFPDLMSLPKGAKVGTTSLRRSMQIKFKRKDLDTESLRGNVQTRLKKLECGEFDAIILAEAGLCRLNVQGAKYRKAFSVKEMIPSMGQGALGVEMLKNHKHFITLQKLNNEESAFCCHLEREFIKGLNGGCQIPIGVHANLMGDEVKIRAVLGLPNGKEVIAKEKQGDKTKAFDLVQELLEEFLQSGAKEILEKAQLF

SEQ ID NO: 22162 - protein, 575 aa, Kineococcus radiotolerans SRS30216
MQNTQTPSPMPFGKYTPFQDQIRVELPDRTWPTRTITKAPRWCAVDLRDGNQALIDPMNSERKLRMFTLLVQMGYKDIEVGFPSASQTDFDFVRTLIENDLIPDDVRIQVLTQAREHLIERTYESLRGAKQAIVHLYNSTSVLQRRVVFGMDEDGIVDLALQGARLCRKFEETIPGTTVYYEYSPESYTGTELEFAARICNAVVAVFEPTPERQVIVNLPATVEMATPNVYADSIEWMSRHLDQRENVIISLHPHNDRGTGVAAAELGYLAGADRIEGCLFGNGERTGNVDLVTLGMNLFSQGIDPQIDFSDIDHIRRTVEHCNQLPVGERVPYGGDLVFTAFSGSHQDAIKKGLEAMERDAAAAGKTVDEIPWAVPYLPIDPRDVGRSYEAVIRVNSQSGKGGVAYLLKAEHQLDLPRRLQIEFSRVIQERTDAQGGEVSAAQIFDVFSDEYLPSGSGTPEWGRFALRGTRSVSVVDGADTLEVDLHDDGAENTVRGTGNGPIAAFCAALGSRGVDVRVLDYAEHALSAGGDAQAAAYVECAVAGRVLWGVGIDHNITTASLKAIVSAVNRALR

SEQ ID NO: 22163 - protein, 131 aa, Thiomicrospira crunogena XCL-2
MRLLHTMLRVGDLQKSIDFYTNVLGMKLLRQKEYPKGEFTLAFLGYGSEEDHTVIELTYNWGVSSYDLGEGYGHIAIEVDDVYDAAEAVKKAGGKIIREAGPMNAGSTIIAFAEDPDGYQIEFIGADHTRA

SEQ ID NO: 22164 - protein, 333 aa, Oryza sativa
WSYQTYSRWSPMGAARVVAEGGATVFRGADYSLPRTTVALALWLGGIHFNVFLVLASLFLFPLRVAAMVVAFQLLFMLIPLNDKDKLGRKIARFICRYAMGYFPISLHVEDYKCFDPNRAYVFGFEPHSVLPIGVAALADLVGFMPLPKIKVLASSAVFYTPFLRQIWTWLGLIPATRKNFQSYLGAGYSCIIVPGGVQEILHMDHDSEIAFLKSRKGFVKIAMQSGCPLVPVFCFGQSYAYKWWRPKGKLFVKIARAIKFTPIVFWGRYGTPIPFPTPMHVVVGRPIEVEKNSQPTIDEINEVHEQFTVALQDLFDKYKTETGYPGLHLRVL

SEQ ID NO: 22165 - protein, 229 aa, Psychrobacter arcticus 273-4
MISPSKPYLIAPSILSADFAKLGEEVERVLASGADVIHFDVMDNHYVPNLTFGSMICKALRDYGIEAPIDVHLMVSPVDSMIEQFLEAGASIITFHPEASSHIDRSLQLIKDGGAECGLVLNPATPLHYLDYVMDKVDQILLMSVNPGYGGQSFIEGTLEKVRQVRQRIITSGREIRLEVDGGIKASNIRAIAEAGADMFVAGSAIFNQEDYKAAIDAMRTELALANRE

SEQ ID NO: 22166 - protein, 92 aa, Haloarcula marismortui
MASKSGKTGSSGRFGARYGRVSRRRVAEIESEMNEDHACPNCGEDRVDRQGTGIWQCSYCDYKFTGGSYKPETPGGKTVRRSIRAALSEDEE

SEQ ID NO: 22167 - protein, 359 aa, Cryptococcus neoformans var. neoformans B-3501A
MPSNSRQHNIAVIPGDGIGIEVTASTLKVLRAVQKKVGGFELSFDELDYGSARYKAQGSYTPAGWLDHLRKSDAIFFGAVGDPDVPDHISLWELILPMRQTFQQYVNIRPSSILPGIPSRIVGTKPGDLDWIIVRENTEGEYAGQGGRTHVGTEWEVATELAVFTRKGVERVMRFAFETAQSRPKKLLTVVSKSNAQRYGLLLWDEVAEIVSKDFPDVKWDKMLVDAMTVRMVAKPTSLDTIVTTNLHGDILSDLAAGLSGSIGIAHSASLDPTRTSPSLFEPVHGAAFDIMGKDLANPIAAIMSAAEMLRWLGENEAADLVEKACKQSIADGQTTGDLGGKLKTSQVTEAVCKILETL

SEQ ID NO: 22168 - protein, 231 aa, uncultured Pseudonocardia sp.
ISIAYVEYQTEKRHYAHVDCPGHADYVKNMITGAAQMDGAILVVAATDGPMPQTREHVLLARQVGVPYIVVALNKADMVDDEEIMELVEMEVRELLSAQDYPGDDLPIVRVSALKALEGDDKWAEAIVELMDAVDEAIPEPERDVEKPFLMPVEDVFTITGRGTVVTGRIERGIVKVNETVDIVGIRPNKTSTTVTGVEMFRKILDEGRAGENVGLLLRGIKREDVERGQV

SEQ ID NO: 22169 - protein, 320 aa, Aspergillus oryzae
MTFHPDTLPNLKGKVFIVTGGNSGIGYYTVTHLAEHGAHVYLCARSLEKGTAAIANIKEMHPSANINLLQMDFMDLTSVVAAAKHFLTLETALHGLVNNAGIMATPFEITKDGHEAQWQTNYLAHWVLTEHFLPLMLLTAKGLYPGSVRIVNLTSSGHLGAPKGGINFKDLSLKDSGPWARYGQSKLANILHAKALHKAYGPGSPSARNGEGEIWVSSVHPGLVETNLATSVEDSGSGMTCVFSVLRMFGLMWSADKGSWTSLFCVASQDMKAEQSGTYLEIFRRFGEPRWQSDMANDWKLVKRLEEWTREVVRKEGWVL

SEQ ID NO: 22170 - protein, 526 aa, Oryza sativa (japonica cultivar-group)
MASESESNGHHHAGDEARAENSGAGCLHGGDDGGGTPRTTPEIRYTKLFINGRFVDAASGKTFETRDPRTGDVIARVAEGDKEDVDLAVKAAREAFDHGEWPRMSGSERGRVMAKYAEVVERHADELAALESLDAGKPLAAARAVDVGECVGILRYFAGAADKIHGETLKMSRQLQGYTLREPLGVAGLIVPWNFPAIMFFSKVSPALAAGCTVVVKPAEQTPLSALFLAHLSKQAGVPDGVINVVTGFGPTAGAAISSHMDVDVVAFTGSTEVGRLIMEASAKSNLKPVALELGGKSPFIVFDDADLDKAVELAIGGNFFNKGEACVAGSRVFVQEGIYDRFEQKLADTMKSWVVGDPFDPRVNQGPQVDKAQYERVLGYIEQGKAEGATVLTGGKPCGKKGYYIEPTIFTNVKDDMVIAREEIFGPVMCLMKFKTVEEAIERANGTRYGLAAGLVTRDIDVANRMARSIRAGVVWVNCYFAMDRSCPFGGRKMSGFGKDDSMHALDKFLAVKSVVTPVHGSPWF

SEQ ID NO: 22171 - protein, 463 aa, Triticum aestivum
NEVAEVLDTFHVLAELPSDSFGAYVISMATAPSDVLAVELLQRECHVKKPLRVVPLFETPGALEAAPAALARLFSVEWYRNRINGKQEVMIGYSDSGKDAGRFSAGWQLYKAQEELIKVAKAFGIKLTMFHGRGGTVGRGGGPTHLAILSQPPETIHGSLRVTVQGEVIEQSFGEEHLCFRTLQRFTAATLEHGMHPPIAPKPEWRALMDEMAVVATEEYRSIVFQEPRFVEYFRLATPELEYGRMNIGSRPSKRKPSGGIESLRAIPWIFAWTQTRFHLPVWLGFGAAFKHVLQKDIRNLQALKEMYNEWPFFRVTIDLVEMVFAKGDPGIAALYDKLLVSDDLWPFGERLRANYEETKQLLLQVAGHKDLLEGDPYLRQSLRLRDSYITTLNVCQAYTLKRIRDPSFHSQPGPHLSKEIMESGKLAAELLKLNPTSEYAPGLEDTLILTMKGIAAGMQNTG

SEQ ID NO: 22172 - protein, 673 aa, Zea mays
  misc_feature (234)..(234): Xaa can be any naturally occurring amino acid
  misc_feature (311)..(311): Xaa can be any naturally occurring amino acid
  misc_feature (575)..(575): Xaa can be any naturally occurring amino acid
  misc_feature (587)..(587): Xaa can be any naturally occurring amino acid
  misc_feature (630)..(630): Xaa can be any naturally occurring amino acid
MGKSSKKAAAVAAAPAAVPKGKKREAEEEIEKAVSAKKQKAAPPAKAVPTSKKDAKKSKKQPPPKKAESSSSDSEEDSESEEEVKKVQPKKAPAPKIAKQESSDDDTSDETSESDEEPAKKPAAKPLAAVAKNGSKTVKQESSSDEDSSEDESDDDSDDEPAKKAAAKPLGAVAKNGLKKGKQESSSDGSSSDDESDDDVKPAAPLKKTSVTVAQKKKGDSSESDSDDDSDELXHYYIQEVPPKSKAPAATIKKEDSSESESESDSEVEDASKTQPAKRAASKMKDESSDDSDTDEDEEPPQKKQKEALSXQKKESSSEDEDDSSEESSDDEPTKVEEKKAPKVSENSGSEDESSEDESDKDSEEPANTPKKAAVHASEKKTATKEPKTPTGSQSESTEVNTLFMGNVPWKAEFDDVKEFFEDVGEVVDVRFPTHDDGNRKGFCYVEFVSAEAAAKAYKEKQSKELHGREVRLDFAKGRSTQTPRSGNDGSFQKAARGNSSSIFIRGFDKNLSEDEIRSSLEQHFSDCGEMTRVSIPTDHESGAIKGMAYIDFKDQDSVSKALELSGSDIGGGYXLYVDEAKPRGDXSRGGGRSGGRSGGRFGDRSGGRRGGGRFGERSGGRDGGGRFGXGRRGGRDGGRGRGGRGFGNKHRRWHSQCRYNSSCNCEVHCILV

SEQ ID NO: 22173 - protein, 414 aa, Frankia sp. EuIK1
MSRPTRPGTHSQRPGSPQPSKVPVTIIMKSGTSSPEPDPVRFCDTTLRDGEQTPGVAFTAREKIAIAVALDAAGVHQIEAGVPAMGPVEVDVLRRVVAAVDRAGVVAWCRADHRDIDAAVASGVTAAHLTIPVSDLHLHTKLGKDRAWARTRIRDCVLDATDRGLRVSVGFEDASRADDDFVIDLAGELRGLGVSRFRWADTLGVANPITLHTRLRALLDAVPAPWEIHAHDDFGLATANTIAAVQAGFTWVSTTVAGLGERAGNAPTEEVAMALRHLLGLPVDLDTAAFRPLARLVAGASRRPVPAGKAVVGDAVFDHESGIHVHGVLRAPATYEPFDPAEVGARRRLVLGKHSGRAAVRHAMDRDGIEAPDEDLEPIVGLVRAHATVYKQPLNSEQLRAMARRVRARGGRSR

SEQ ID NO: 22174 - protein, 231 aa, uncultured Pseudonocardia sp.
ISIAHVEYQTEKRHYAHVDCPGHADYVKNMITGAAQMDGAILVVAATDGPMPQTREHVLLARQVGVPYIVVALNKADMVDDEEIMELVEMEVRELLSAQDYPGDDLPIVRVSALKALEGDDKWAEAIVELMDAVDEAIPEPERDIEKPFLMPVEDVFTITGRGTVVTGRIERGIVKVNETVDIVGIRPNKTSTTVTGVEMFRKILDEGRAGENVGLLLRGIKREDVERGQV

SEQ ID NO: 22175 - protein, 159 aa, Bacillus anthracis str. 'Ames Ancestor'
MWKTTDLCDEFENELQICRQPFRSFGKKEQFHGKIATVKVKDDNVLVKEGLQTLPEGTVLVVDGGASTNCALLGDNLAAIAEERKLAGIIVNGYVRDSSELKNINIGILALGTMPNRSVKEGKGERNISLQFGQVEWKPDEYVYVDEDGVIISDKSLHR

SEQ ID NO: 22176 - protein, 494 aa, Euglena gracilis
MSATQLLGGYQTISERTAPQNKLAVVGAVAVIAVASGVAAGYALNLSMPPLLPPCAPLAHGHLSRTTWHRPTPAAVAFASASEGAQTFVAPAAQSSNTFATSSVAASIGMVMGAGAVLLARMNQKPVAMNAWTGSVYGVLSQLWRSHGPSMLMSVRQDHLHPWQGILAADESRPNKTCGARLKSIGVENTEENVHSSRSCVHRTWLQRGNILGVIMYEETLYQKDKNGKPFVQIINEAGAVAGVKVDTGIAPLPGADDEGYTMGLDGLRERCQEYYRQGARFAKWRAVLRIDSKGLPSDRSILANATGLAQYAAICQECGLVPIVEPEILMDGDHDIETAAAAAERVLVAVYDALATQGVLLEGTLLKPNMVTPGVDSGIKATPETLPIFTCALLATVPAAVAGISFLSGGSSEEDASLNLNAINAIPYERKPWALTFSFGRALQASTLKTWGGKDENIARLRRCSLSVPSQWPGKYQGSGQAGESLFVKGYKY

SEQ ID NO: 22177 - protein, 488 aa, Listeria monocytogenes str. 1/2a F6854
MADVRKLKNYINGEWVESKTDKYEDVINPATGEVLCQVPISTRAELDQAAVIAEQAFEKWSQVAVPRRARVLFGFQQLLIQHKEELARLITLENGKNLSEARGEVQRGIENVEFAAGAPTLMMGDSLASIATDVEAANYRYPVGVVGGIAPFNFPMMVPCWMFPMAIALGNSFILKPSERTPLLMEKLVELFSEAGLPKGVFNVVYGAHDVVNGILENEIIKAVSFVGSKPVGEYVYKTGSANLKRVQALTGAKNHTIVLNDADLEDTVTNVISAAFGSAGERCMACAVVTVEEGIADEFLEALRTAAQNVKIGNGLDDGVFLGPVIREENQKRTIAYIEKGIEEGAKLTVDGRETGLSEGHFVGPTILEDVTTDMTIWKDEIFAPVLSVIRVKNLQEAVRVANQSEFANGACIFTNNAKAIRYFREKIDAGMLGVNLGVPAPMAFFPFSGWKSSFYGTLHANGKDSVDFYTHKKVVTARYSLKGYEE

SEQ ID NO: 22178 - protein, 482 aa, Mycobacterium avium subsp. paratuberculosis K-10
MTLTPEASKTAVAPLTQEEAIASLGRYGYGWADSDVAGASAQRGLSEAVVRDISAKKNEPEWMLQTRLKALRIFERKPMPTWGSNLDGIDFDNIKYFVRSTEKQAASWEDLPEDIRNTYDRLGIPEAEKQRLVAGVAAQYESEVVYHQIREDLEAQGVIFMDTDTGLREHPEIFQEYFGTVIPAGDNKFSALNTAVWSGGSFIYVPPGVHVDIPLQAYFRINTENMGQFERTLIIADEGSYVHYVEGCTAPIYKSDSLHSAVVEIIVKPNARVRYTTIQNWSGNVYNLVTKRARAEAGATMEWIDGNIGSKVTMKYPAVWMTGEHAKGEVLSVAFAGEDQHQDTGAKMLHLAPNTSSNIVSKSVARGGGRTSYRGLVQVNKGAHGSCSSVKCDALLVDTISRSDTYPYVDIREDDVTMGHEATVSKVSENQLFYLMSRGLTEDEAMAMVVRGFVEPIAKELPMEYALELNRLIELQMEGAVG

SEQ ID NO: 22179 - protein, 402 aa, Desulfitobacterium hafniense DCB-2
MKANIAIVQAGGPTSVLNASLAGFLEAAASSERYHHVLGFCNGIEGLIKNQVMHLEGLSKAQLDALKSQPGAVLGAGRYPLTPERLSKVCCNLQLREISQLVLVGGNGTMWAADQIAEACPDVQVVGIPKTVDNDLWGTDHSPGYLSAAKFIGEAVRSLALDLWAMRNFERVRVVEVMGRNVGWLAAAGSLAQTSLPDYPPLHFYLPEHPFELEKFFTKVDEHLHRHPCLLVIVSEGIRLADGSPVAEFEIGRCKVPGGAAQMLSSELRNRGIPSRSEVLGILQRANTWSVCERDRQEAIFLGKQAIGVLGQGKSKVMLGLPAQTVDFAEDSKAQWVDLKSVAGLERPVAPCYLTESGIDPSFTAWLQNKMGEPLAEANSALQVWKLAAEQLSSNPVNRQSR

SEQ ID NO: 22180 - protein, 479 aa, Desulfitobacterium hafniense DCB-2
MKKEIRESLFIDGEWQEAINKEVKGVINPATGKVFCEIGYGEVDDALSAVDAADRAFGAWSKTSVRERADILNRTADLLRQRADHIGLILAAESGKPVPQAVGEVKFSAEYFQWFAEEIRRPYGQSIPSDAANKRHHVYTQPAGVALCLSPWNFPVSIQARKLAPALAAGCTVVARGSEVAPLSLIELFKCLQDAGIPKGVANSIQGPAAVTTAAMMKHPAVRVVSFTGSTPVGRSLMRQAADGVIRLALELGGNAPFIVFADADIEKAVEGAMIAKFRNNGQSCIGANRFYVHERIYDKFTALFAEKILRMKIGNPTEEVDLDLGPMVNLKDKARIESLIREAEALGAKPLVPKAEVPAEGYYVPPVILENVPESAALAREELFAPVAPLFKFADENEVIEKANSSDMGLAAYVYTNDLSRSIRVTESLKFGIIGLNNALPSVAYAPMGGVKQSGIGREGARIGLEEFMDVKYVATEI

SEQ ID NO: 22181 - protein, 134 aa, Circaea cordata
ERVRNGSWVGATGKVLKDVIAVGIGGSFLGPLFVHTALQTDPEAGKNARGRELRFLANVDPIDVARSISGLNPETTLVVVVSKTFTTAETMLNARTLREWISSALGSSAVAKHMVAVSTNLPLVEKFGIDPKNA

SEQ ID NO: 22182 - protein, 464 aa, Listeria monocytogenes str. 4b F2365
MLYSKENKESYLEPVFGSSAEDRDIPKYTLGKEPLEPRIAYRLVKDELLDEGSARQNLATFCQTYMEDEATKLMSETLEKNAIDKSEYPRTAELENRCVNIIADLWHAPKNQKFMGTSTIGSSEACMLGGMAMKFAWRKRAEKLGLDIYAQKPNLVISSGYQVCWEKFCVYWDIDMRVVPMDKDHMQLNTDQVLDYVDEYTIGVVGILGITYTGRYDDIYALNEKLEEYNSKTDYKVYIHVDAASGGFFTPFVEPDIIWDFRLKNVISINTSGHKYGLVYPGIGWVLWKDESYLPEELIFKVSYLGGEMPTMQINFSRSASHIIGQYYNFLRYGFEGYRTIHQKTSDVAQYLAHAVEQTGYFDIYNDGSHLPIVCYKLKDDANVKWTLYDLADRLQMRGWQVPAYPLPKNLENIIIQRYVCRADLGFNMAEEFIQDFQASIQELNNAHILFHDTQQSGVHGFTH

SEQ ID NO: 22183 - protein, 182 aa, Mesembryanthemum crystallinum
MASSMVSSAAVATVNRTPAQASMVAPFNGLKSVAAFPVTKKNNDITSVATNGGRVQCMQVWPPLGKKKFETLSYLPPLSEESLMKEVQYLLNNGWVPCLEFEPTHGFVYREHGNTPGYYDGRYWTMWKLPMFGCTDPSQVVAELEEAKKAYPEAFIRIIGFDNVRQVQCISFIAYKPASYDA

SEQ ID NO: 22184 - protein, 180 aa, Mesembryanthemum crystallinum
MASMMSNAAVVGRTTPAQASMVAPFTGLKSVSAFPVTKKSNDITSIASNGGRVQCMQVWPPLGKKKFETLSYLPPLSEESLMKEVQYLLNNGWVPCLEFEPTHGFVYREHGNTPGYYDGRYWTMWKLPMFGCTDPSQVVAELEEAKKAYPEAFTRIIGFDNVRQVQCISFIAYKPASYDA

SEQ ID NO: 22185 - protein, 359 aa, Glycine max
MAGSAIGFEGYEKRLEISFFEHGVFADPEGIGLRALSKDQLDEILKPAECSIVASLSNDYVDSYVLSESSLFIYPYKIIIKTCGTTKLLLSIPVILKLADALDIAVKSVRYTRGSFIFPGAQSFPHRSFSEEVSVLDSYFSNLGSGSKAYVMGDPSKSQIWHIYSASAQTKGSSEVVYGLEMCMTGLEKESASVFFKENTSSAALMTENSGIRKILPQSDISDFEFDPCGYSMNGIEGGAISTIHVTPEDGFSYASFEAVGYDFDEMALGELVERVLACFRPAEFSVALHIDMHGEKLNKFPLDIKGYYCGERSYEELGVGGAVVYQSFVQGCDGSTSPRSILKCCWSEDENEDEVREI

SEQ ID NO: 22186 - protein, 183 aa, Mesembryanthemum crystallinum
MASSLMSNAATTMAAATTTAQANMVAPFNGLKSVSAFPVTRKNNDITSVASNGGRVQCMQVWPPLGKKKFETLSYLPPLSEESLMKEVQYLLNNGWVPCLEFEPTHGFVYREHGNTPGYYDGRYWTMWKLPMFGCTDPSQVVAELEEAKKAYPEAFIRIIGFDNVRQVQCISFIAYKPASYDA

SEQ ID NO: 22187 - protein, 183 aa, Mesembryanthemum crystallinum
MASSLMSNAATTMAAATTTAQANMVAPFNGLKSISAFPVTRKNNDITSVASNGGRVQCMQVWPPLGMKKFETLSYLPPLSEESLLKEVQYLLNNGWVPCLEFEPTHGFVYREHGNTPGYYDGRYWTMWKLPMFGCTDPSQVVAELEEAKKAYPEAFIRIIGFDNVRQVQCVSFIAYKPASYGA

SEQ ID NO: 22188 - protein, 136 aa, Circaea cordata
VSIDGLPLPFESGEIDFGEPGTNGQHSFYQLIHQGRVIPCDFIGVMKSQQPVYLKGEVVNNHDELMSNFFAQPDALAYGKTPEQLKKENVSEHLIPHKTFTGNRPSLSILLPSLDAYRIGQLLAIYEHRVAVQGFI

SEQ ID NO: 22189 - protein, 112 aa, marine gamma proteobacterium HTCC2207
MKLITAIVKPFKLDEVREALGDLGVAGVTVTEVKGFGRQKGHTELYRGAEYVVDFLPKVKLEIALADEMVDSAVEAITNAAQTGKIGDGKIFISTLEEVIRIRTGETGAEAV

SEQ ID NO: 22190 - protein, 665 aa, Mesorhizobium loti MAFF303099
MCGIAGILLAPDAANTNALRAIGPMMMALRHRGPDGEAFWMSREAGIAFGHRRLAIVDLSEAGRQPMHSASGRYVITFNGEIYNFRDLRRELEGAGHHFRGTSDTEVMLCAIESWGLEAALARFAGMFAFGLWDLKNRTLHLARDRMGKKPLYVASTPEALVFASELKAITCFPGFTPELDVDAAATMLSKGWVPDDRCIWQGVFKLPPGSVLSVTAADFANARGAGSLAHRIRRWWSLADVACKAQRDPIAGSDEDLTTELDSLLRLAVKERMVADVPLGAFLSGGIDSSTVVALMQAQSPTPVRTFTIAFGESGFDEAPHAAAVARHLGTDHTELHLSPAAALEVIPELPRIWDEPFADESQIPTLLVSRLARRHVTVALSGDGGDECFAGYSRHFLATRLRRQHELPSSFRRMLAAGAGLLAQASQKDIFGSLPLSANMRHGLRGDRLNRLARLFAAANEDQLLQRLTESSTNKLIHHKPAASNASATQLDGLLSRLLFDDMTGYLPGDILVKLDRATMANSLEGRCPILDHRVVEFAWRLPTDAKVRSGKGKWILRQLLDRYVPRRLVDRPKQGFDVPVGAWLRGPLRDWATDIIATTRLSGDGVIDCAKVDACWRDHLHGNQDHFRDLWPLLMFQAWRNDAMRPSAPATHASYDIELTGD

SEQ ID NO: 22191 - protein, 325 aa, Bangia atropurpurea
GKTTLTAAISATLSTLGCTAAKRFDEIDAAPEEKARGITINTAHVEYETDNRHYAHVDCPGHADYVKNMITGAAQMDGAILVVSAADGPMPQTREHILLAKQVGVPTLVVFLNKEDQVDDEELLELVELEGRELLSQYDFPGDDIPFVAGSALLALEAVTNNPTVKKGEDKWVDKIFSLMEAVDTYIPTPERDVDKTFLMAVEDVFSITGRGTVATGRIERGIIKVGDTIEIVGLRETRTTTITGLEMFQKTLEEGLAGDNIGILLRGVQKKDIERGMVLAKPGTITPHTQFEAEVYILTKEEGGRHTPFFPGYRPQFYVRTTDV

SEQ ID NO: 22192 - protein, 337 aa, Nostoc sp. PCC 7120
MIRVAINGFGRIGRNFARCWLGRENTNIELVAVNDTSDPRTNAHLLKYDSMLGKLKNVDITADDNSITVNGKTIKCVSDRNPENLPWKEWEIDLIIEATGVFVSKEGATKHINAGAKKVLITAPGKNEDGTFVMGVNHHDYDHNLHNIISNASCTTNCLAPIAKVLNDKFGIIKGSMTTTHSYTGDQRLLDASHRDLRRARAAAINIVPTSTGAAKAVALVIPELKGKLNGVALRVPTPNVSMVDFVVQVEKRTITEEVNQALKDASEGPLKGILDYSELQLVSSDYQGTDASSIVDANLTLVMGNDLVKVMAWYDNEWGYSQRVLDLAELVAEKWV

SEQ ID NO: 22193 - protein, 487 aa, Triticum aestivum
  misc_feature (222)..(222): Xaa can be any naturally occurring amino acid
  misc_feature (254)..(254): Xaa can be any naturally occurring amino acid
MTSSPPPLSRILLPWHRLSLAACADDLNLWLLISSSVSLRWLSDKSAAVTTVGHGLGHVRTRSVYHFQPAKNWQNADPNGPMYHNGLYHFFYQYNPDGVTWGNGNLSWGHSVSVDLVNWFALDAALQPSRSFDANAGWSGSATILPDGSPVMLYTGIDARGDQVQNVAFPKNASDPLLVEWVKPEYNPVIPVPADIKRDDFRDPSTAWLGADGLWRIAVAAXVHDVGGATLIYRSKDFLRWERNADPLYLAHAXAGMVECPDLFPVSEPGVEVGLPASGAGARHVLKMSVMDTVQDYYVVGSYDDTADTFVPEDDDDCRSWRRLDYGHVYASKSFFDPSKNRRVLWGWANESDSVADDLVRGWSGVQTVPRKIWLDEDGKQLRQWPVEEIETLRSKRVNLLIPEVNAGGVNEIIGIVGEQADVEVVFEIPALEHADVLEPNWLLDPQSLCGEKGASVPGSVGPFGLLVMASRRHARRHTRRFLFKGV

SEQ ID NO: 22194 - protein, 491 aa, Helicobacter pylori J99
MELNQPPLPTEIDDDAYHKPSFNDLGLKESVLKSVYEAGFTSPSPIQEKAIPAVLQGRDVIAQAQTGTGKTAAFALPIINNLKNNHTIKALVITPTRELAMQISDEIFKLGKHTRTKTVCVYGGQSVKKQCEFIKKNPQVMIATPGRLLDHLKNERIHKFVPKVVVLDESDEMLDMGFLDDIEEIFDYLPSEAQILLFSATMPEPIKRLADKILENPIKIHIAPSNITNTDITQRFYVINEHERAEAIMRLLDTQAPEKSIVFTRTKKEADELHQFLASKNYKSTALHGDMDQRDRRSSIMAFKKNDADVLVATDVASRGLDISGVSHVFSYHLPLNTESYIHRIGRTGRAGKKGMAITLVTPLEYKELLRMQKEIDSEIELFEIPTINENQIIKTLHDAKVSEGIISLYEQLTEIFEPSQLVLKLLSLQFETSKIGLNQQEIDAIQNPKEKTPKPPNKKTQHEPAHSFKKSHHRDRHPKTNRYSKKHKRR

SEQ ID NO: 22195 - protein, 171 aa, Oryza sativa
MARNNGVAVMFAAVVVVAGALVAGAAAQSGCTSEMVSLAPCLDYMQGNASRPTASCCAALSSVVKSRPECLCAVLGGGASSLGVTVNTTRALELPAACGVKTPPPSECSKVGAPIPSPAPGGAAAPNAPPAAGTGSKTTPTTGASSAGESVGKAASVAMVIVSAAFAMLYA

SEQ ID NO: 22196 - protein, 325 aa, Bangia fuscopurpurea
GKTTLTAAISATLSTLGSTSAKKFDEIDAAPEEKARGITINTAHVEYETDNRHYAHVDCPGHADYVKNMITGAAQMDGAILVVSAADGPMPQTREHILLAKQVGVPTLVVFLNKEDQVDDEELLELVELEGRELLSQYDFPGDDIPFVAGSALLALDAVTKNPSIQKGEDKWVDKIFSLMEAVDTYIPTPERDVDKTFLMAVEDVFSITGRGTVATGRIERGIIKVGDTIEIVGLRETRTTTITGLEMFQKTLEEGLAGDNIGILLRGVQKKDIERGMVLAKPGTITPHTQFEAEVYILTKEEGGRHTPFFPGYRPQFYVRTTDV

SEQ ID NO: 22197 - protein, 322 aa, Coccidioides immitis RS
MTTDPSTYKLNHTMIRVKDPQKSLEFYKFLGFSQINKLDFEEAKFSLYFLAYDGPESLSGERHWTDRNGVLELTHNYGTENDPNYTVNNGNTEPHRGYGHIAISVDNIELACKRLEDAGYPFQKKLTEGRMRNIAFVKDPDGYWVELIRQTEDEKVSGAVTQTNPKLYRFNHTMLRVKDAEVSLKYYREVMGMELMRELKNEDAKFNLYFLGYPKSNPPARTDALNPVTEWEGVLELTWNYGTEKQEGKVYHDGNSEPQGFGHICVSVDDLDAACARFESLNVNWKKRLSDGRMKNVAFVLDPDGYWIEVIQNEKLKSRSKW

SEQ ID NO: 22198 - protein, 471 aa, Mycoplasma mycoides subsp. mycoides SC str. PG1
MCKNREFLFFIFNNFNSIFIGKASMKIVIIGGAASGMTVASRLKKADKKAQIIVIQKEKYVSLGACGLPYFVANPSLKSTDLLARTVEQFIEQDILVYSESVVKKIDAENQKVWYEKNDQLLELDYDKLVISTGAKPIVPPIKGIDLPNIFTLTRLEDATELKEKLKDKNIKKVAVIGSGFIGLECCEMLEHFNKEIVLIEKTSRLNQRVFDQEITDLLEQNLIKNNVEIIKENGLKSITQTKDKRLSLTLDQNEEIEVDLIILAIGFRPATEFLKDTKLEMLGNGAIVVDKHGRTNLKNIWSCGDCATVYHKITNQITYTPLATVARKFAKVVADDILNVNSEFVGTLQTAILKVFESELVSTGINETLAKELGYDIKTIFIKDADHPSYYPNPTPLALKLILNKKTNTLIGAQMYGSNLSVLRINFLISLIWNQIEINQELTQVDLPYSPPFSRVVDIIHIALEKLIKN

SEQ ID NO: 22199 - protein, 500 aa, Cryptococcus neoformans var. neoformans B-3501A
MPSLTQTKDLASLLSDASHFKQKGYINGEWVSASDGATFPLYNPATGAKLADMPHMPRSQVAEAINAAKAAFPAWAALTAYQRQNYLLKLFKEMEEHSEDLAIILCTENGKPLAESRVEISYGASFLTWNAAEALRTYGQTIPSPFPGTRNTVIKQPIGVCGLITPWNFPNAMITRKMAPALAAGCTVVIKAPAETPLSALAMCVLCERVGIPPGVVNVVTMDKGQREMAAGLELCENVKVSKISFTGSTPVGRLLMKQSSGTLKKLSFELGGNAAFIIFDDADLDLAVNGVILSKFRAAGQTCICANRIFVHSKIYDDFARRLVERVKAFKVGNGIEEGVTIGPLVSQRGVEKVERHVQDAVGLGAKVLVGGKRIDKGEGSCFYEPTVLVDVPRQCAVSNEETFGPLAPLFKFDDEDDVVERANSSEVGLAAYFFTKDLARTHRVAEKLEVGMVAVNTGAIAQACVPFGGVKQSGFGREGGPSGIDEFMVEKLITIGGL

SEQ ID NO: 22200 - protein, 669 aa, Gloeobacter violaceus PCC 7421
MTASVPLAFPITAVVAQEAIKLALLLAVTDPGLGGVAISGRRGTAKSVMARGIHALLPPIEVIAGCPANDDPDWPESWCDQCRRLYAQQTPQRAMRPVPFVQVPLGATEDRVIGTVDLEKSMRLGEPVFQPGLLAEANRGILYIDEINLLDNQIANLLLTTLSEGINRVEREGLSFEHACAMVLLATFNPEEGELREHLLDRIAICLPAEAQLSLEERLEVVDQARGYARDPAAFVAAHRGEIEELQTQIVLARQRLAEVSIEAEQIAYLVEEAVRGEVEGHRAELFALRAAKVHCALDGRTRVNAEDLRRAVELVIIPRSTVIPSEEPPPPPPPPPPPPTDEQEQDEDEQQDDDPEENDTDEQEEQEAPPSLPEDFVFDAEGVILDPRLLAFAQTVRRKSKSGARTKIYSDSRGRYVKPILPRGRVNRIAVDATLRAAAPHQKARREREPGRRVIVEAGDVRAKRLARKAGALITFVVDASGSMALNRMRSAKGAVLKLLTEAYQNRDKVALVPFRGEKADVLLPPTRSIAQARRRLESLPCGGGSPLAHALSQAIRLGVNAQSAGDVGQVIIVAITDGRGNIPLARSLGEPPGDDKPDIKGELLALAGRIRTLGFKLLVIDTENRFVSTGFAKELTTQAGGRYFYLPRASEQTLARATQDAIAELRD

SEQ ID NO: 22201 - protein, 479 aa, Treponema pallidum subsp. pallidum str. Nichols
MNTQQQRQLLQPRRRTYVSDIKRGIYDVKDAVTYTYSTGKGLNAQVVEKISRRKREPQWMLDLRLRSLRYFMKRPMPEWGADISDLDIQEIVHYIVSDFKPIAESWDDVPEEIKKTFDRLGIPEAERRSLAGVGAQYDSEVVYHNLRADLEQQGVVYLDMESAVHKHEDIVRAHFMHLIKPNEHKFAALHGAVWSGGSFVYVPKGVQVDLPLQSYFRLNANQSGQFEHTLIIVDEGASLHFIEGCSAPKYYKNALHAGAVELYVKKNARLRYSTIENWSRNLYNLNTKRAIVDEDGVIEWISGSFGSRVTMLYPMSILRGDRSRSEFTGITFASAGQYLDTGTKTVHLGRNTVSEVHARSISKNGGTANYRGLLSIGPKADGAKAVAECESLMLDNQSHTDTIPIIDVRTDNVDIGHEAKIGRISDRVVFYLMQRGLDEQTAISLIVRGFVEPVSKELPLEYAVELNNLISIELEGAIG

SEQ ID NO: 22202 - protein, 225 aa, Salmonella enterica subsp. enterica serovar Paratyphi A str.
MPEEARVQCKGFLFDLDGTLVDSLPAVERAWCSWADRFNLAHDEVLGFIHGKQAITSLRHFMAGKSEAKIAAEFTRLEQIEATETAGITALPGAVDLLNHLNKAGIPWAIVTSGSMPVARARHQVAGLPAPEVFVTAERVKRGKPEPDAYLLGAQLLGLAPQECVVVEDAPAGVLSGLAAGCHVIAVNAPADTPRLADVDFALDSLTQLSVAKQPNGDVVVLRKT

SEQ ID NO: 22203 - protein, 419 aa, Rhodobacter sphaeroides 2.4.1
MTVLLDTLPNGFRIVTEHMPGLHSASIGIWIAAGGRHERPEQNGIAHFLEHMAFKGTKTRSALRIAEEIEDVGGYINAYTSREMTAYYARVLEADTGLALDVIADIVLNPVFDPKEIEIERHVILQEIGQALDTPDDIIFDWLQEASYPGQAFGRTILGPEERVSTFGRADLTRFVGEHYGPDHMILAAAGGVDHGRIVAQAQALFGHLKPVGQRPMQPADFLGGERRELKSLEQVHFAMAFEAPNYRAPDVYAAQVYAMALGGGMSSRLFQKVREERGLCYSIFAQSGAYEDTGQITIYAGTSGEEVADLAGLTVDELKRATEDMSEAEVARARAQLKAGLLMGLESPSNRAERLARLLAIWGRVPGVDEAVEKIDAVTVGAVRDYAERMAQARSALALYGPAEAAPALAQIRERLAA

SEQ ID NO: 22204 - protein, 728 aa, Psychrobacter arcticus 273-4
MIQNLPKLSHPLVDDAQYNLLRSVGYLTGAERRDIVDACEFGDVAHIKDKRKSGEPYITHPIAVAEILAGFRLDRDTIIAAILHDTVEDTEVSDEQIETRYGKVVSRLVDGVTKLKSSTHNKQENKAATFHKILTATLADPRVLIIKLADRLHNMSTLDAVRPEKQRATAQETLDFYVPFARLMGLNDIADYIEVLCYRNLDSEMYNKISDKLLQHGLGRNFQREAIHRYLSIVLNNLDLDGMVKVLDNRVVIFRQFFRNRGEINALLRHYAFEIVLDNIEACDKLAYYLIKKYQIADSHIADNIRRPLPGGNQSLTLIYERDNDFVKVTILTKQMQSAARLGVIGAEHASDVSQSVIQASLRNMKDLVDEDCLSEGNPDFATAVSTINELMDYLHSSKIICYSPQGRAYELPQGATALDFAYAVGPMVGNVAVGANIDKKPAKLGTVVKNGQLVEIEVNSHSEPKAEWLGFVVTNKARVEILRWFKDLSVADKQHHGRQALDRALKTYQKSLDDLTDSDWKNLTEWRGLTEKSALFEQISSGTLLPQLVVTRLFSDEVCDIQSQERIDDMTQPQQLIVNASGVELDFANCCHPIYGDPIVGHLSRHGLVVHRHKCFSLDDIRKDNPYQVIQLRWHNDKAIKQSDSEDHGNKIRFPAYLKLSIAMSDEQISKVIYNLRQLNIGVEKVDVRGSDTIIHIVVRSRNHLAQGIRELRSLLGFPNIMRLYQL

SEQ ID NO: 22205 - protein, 327 aa, Gloeobacter violaceus PCC 7421
MPVKLFYEALKDAMAEEMRRDPNVYVLGEDVGHYGGSYKATKDLYKEFGELRLLDTPICENAFTGLAVGSAMTGLRPIIEGMNMGFLLLAFNQIANNGGMLRYTSGGQFKIPMVVRGPGGVGKQLGAEHSQRLEGYFNNVPGLKIVHTSTVYNAKGLLKAAIRDDNPVMFFEHVLLYNLKEDIPEEEYLLPLDKAEMVKEGRDVTVLTYGRMRHHCTEALQELAARDIDVEVIDLISLKPLDLETIGRSLKKTHRVVIVEEDMKSGGVGAEIVASIDEHYFDYLDAPVLRLASKDVPVPYNGRMEATVIPQPQDIVQAVENMLALRV

SEQ ID NO: 22206 - protein, 476 aa, Gracilaria tenuistipitata var. liui
MTINNFINQPYKYGFHTNIQSDSLPPGLNQKIVETISIKKNEPKYLKQFRINAYKKWQKMNEPQWGKLKYKQIEYDQITYYSSPKYKKSLQNLDEVDPEILDTFNKLGIPLNEQKKLTNVAVDAIFDSTSIATTFQKELGEVGIIFCSITEAVNKYPDLVKKYLGSVVPIGDNYFAALNSAVFSDGSFCYIPPNTHCPLELSTYFRINNKEAGQFERTLIIADENSYVSYLEGCTAPQFSNNQLHAAVVELIALKNATIKYSTVQNWYSGNSEGEGGIYNFVTKRGLCAGDDSKILWTQIETGSAITWKYPSCILTGSNTIGEFSSVALTNNYQQADTGSKMIHIGVNTKSKIISKGISAGHSINTYRGLVKIGPKATYARNYSQCDSLILGKSCQANTFPYIQVRNPSARIEHEASASRIGEEQIFYFLQRGIDIEEAISLMISGFCKDVLQELPMEFAMEADRLLNLKLEGTVG

SEQ ID NO: 22207 - protein, 345 aa, Lactococcus lactis subsp. lactis
MSKKIVTLAGDGIGPEIMSAGLSVLKAVSKKIDFEYELEAKDFGGIAIDKHGHPLPEETLQAVKNADAILLAAIGHPKYNNAKVRPEQGLLALRKELGLYANVRPLKIYPALKKLSPIRNVENVDFLVIRELTGGIYFGQHELADDKARDVNDYSADEIRRILHFAFKSAQSRPRKLLTSVDKQNVLATSKLWRKMADEIADEYPDVRLEHQLVDSCAMLLITNPQQFDVIVTENLFGDILSDEASSLAGSLGVMPSSSHGFNGLALYEPIHGSAPDIAGKGIANPVSMILSIAMMLRESFGQEDGAAMIEKAVTQTFTDGILTKDLGGTATTKEMTEAILKNCQ

SEQ ID NO: 22208 - protein, 231 aa, uncultured Pseudonocardia sp.
ISIAHVEYQTEKRHYAHVDCPGHADYVKNMITGAAQMDGAILVVAATDGPMPQTREHVLLARQVGVPYIVVALNKADMVDDEEIMELVEMEVRELLSAQDYPGDDLPIVRVSALKALEGDDKWAEAIVELMDAVDEAIPEPERDVEKPFLMPVEDVFTITGRGTVVTGRIERGIVKVNETVDIVGIRPNKTSTTVTGVEMFRKILDEGRAGENVGLLLRGIKREDVERGQV

SEQ ID NO: 22209 - protein, 231 aa, uncultured Pseudonocardia sp.
ISIAHVEYQTEKRHYAHVDCPGHADYVKNMITGAAQMDGAILVVAATDGPMPQTREHVLLARQVGVPYIVVALNKADMVDDEEIMELVEMEVRELLSDQDYPGDDLPIVRVSALKALEGDEQWANAIVELMDAVDEAIPEPERDIEKPFLMPVEDVFTITGRGTVVTGRVERGIVKVNETVDIVGIRPNKTSTTVTGVEMFRKILDEGRAGENVGLLLRGIKREDVERGQV

SEQ ID NO: 22210 - protein, 336 aa, Desulfitobacterium hafniense DCB-2
MSVRVAINGFGRIGRLTLRAILKQSLPVEVVAINDLGSPDLLAHLFKYDSLHGILPNSVEIDGDTMLVDGKSIAILSERNPLDLPWRKLGVDIVIESTGRFTKRAAASQHLTAGAKKVVISAPAKNEDITIVMGVNDDQYQPQEHHIISNASCTTNCLAPVAKVLLDAFGIEQGMMTTTHSVTNDQRILDLEHSDWRRSRAAYQSMIPTTTGAAKAVTLVIPELAGKMNGLAVRVPTPNVSLVDFVANLTKSTSKEGVNAALREAAEGKLKGYLEYTELPLVSRDFNGNSASSIVDGLSTMIIGERMVKVLAWYDNEWGYSNRIVDLVKLIVMKGL

SEQ ID NO: 22211 - protein, 349 aa, Cryptococcus neoformans var. neoformans JEC21
MDATTLTGHVKELNAANQAGKSDEVISLLKKLQAEVVPTEDLLRSSKAGVAVGKLRTHATPSVSSLAKEIVKKWRDAVEETKKKRKRAEGDEGKDVKKEKEEGNGKRVKAESMCALSPAAESGSDTHIHFAAGSLAATPSASTPASASTPDVKATSPPVRQPLSTIDSSRTTPRTAKSDGVADSLRADSSEGGSVDSVRDKCVIMIYDALALDSTAERAIGIERAANKAMNFSTGNDYRAKMRSLFLNLKDKGNPALRNEIVLGYVSTEKVASMSKDEMASESVRMLKEKIASDNLFKAKAVGVTQAETDAFKCGRCHQRKCTYYQMQTRSADEPMTVSRYLAHMIRWY

SEQ ID NO: 22212 - protein, 578 aa, Burkholderia vietnamiensis G4
MKASRFFIGTLKEAPADAEIVSHKLMVRAGMIRRVAGGIYNYLPIGLRSIRKVEAIVREEMNRAGALELLMPAVQPAELWQESGRWEQYGPELLRFKDRKDNDFVIGPTHEEVITDIARNQIKSYRQMPVNFYQIQTKFRDEIRPRFGVMRGREFLMKDAYSFDKDAAGLNESYRKMYDAYVRIFTRLGLEFRAVAADSGSIGGNFSHEFHVIADTGEDAIAYCPTSEFAANIEAAEALPLIAERAAPAQAMEKVATPGKAKCEAVAELLAIPLERTIKSIVLATDNEGAEPTIWLVMLRGDHDLNEIKVSKLPGLKNHRFATEQEIVEWFGTPPGYLGPVGTKKPVKVIADRTVANMSDFVVGANEVDYHIAGVNWGRDLPEPDVADVRNVKKGDPSPDGKGVIDICRGIEVGHVFQLGTKYSEAMGATFLDESGKPQPMLMGCYGVGVTRILGAAIEQNFDDKGIIWPESIAPFELVLCPMGYDRSEMVREAADKLYAELTAAGVDVILDDRGERPGVMFADWELIGVPHRLVIGERGLKDGKVEYQGRRDAEATLLPADAAAATVTEKIRAALAH

SEQ ID NO: 22213 - protein, 431 aa, Arachis hypogaea
GRGEFGVTYLCIDRGSRELLACKSISKRKLRTAVDVEDVRRKVAIMRHLPRSSSIVSLREACEDDNAVHLVMELCEGGELFDRIVARGRYTERAAAVVARTVVEVVQLCHRHGVIHRDLKPENFLFANKKENSPLKAIDFGLSVFFKPGEKFSEIVGSPYYMAPEVLKRNYGPEIDIWSAGVILYILLCGVPPFWAESEQGGAQAILRGLIDFKREPWPSISESAKSLVKQMLEPDPKLRLTAKQVLEHPWIQMLRRAPNIPLGDAVKSRLKQFSMMNRFQKKALRVIADFLSNEEVEDIKDIFQKMDTDNDGIVSIEELKAEFQNFGSQLAESEIQMLLEAVNTNGKGTLDYGEFVAVSLHLKRMANDEHLRKAFSYFDKDGNGYIEPDELRNALMEDGTDDCADVANDIFQEVDTDKDGRISYEEFVAM

SEQ ID NO: 22214 - protein, 182 aa, Mesembryanthemum crystallinum
MASSLMSNAATTMAAATTTAQANMVAPFNGLKSISAFPVTRKNNDITSVASNGGRVQCMVWPPLGMKKFETLSYLPPLSEESLLKEVQYLLNNGWVPCLEFEPTHGFVYREHGNTPGYYDGRYWTMWKLPMFGCTDPSQVVAELEEAKKAYPEAFIRIIGFDNVRQVQCVSFIAYKPASYGA

SEQ ID NO: 22215 - protein, 186 aa, Mesembryanthemum crystallinum
MASSMLSNAAVATTAASRSAGAQASMVAPFTGLKSVSAFPVTRKSSNDLSTVPSNGGKVQCMQVWPPLGKKKFETLSYLPPLSEESLLKEVQYLLNNGWVPCLEFEPTHGFVYREHGNTPGYYDGRYWTMWKLPMFGCTDPSQVVAELEEAKKAYPEAFIRIIGFDNVRQVQCVSFIAYKPASYDA

SEQ ID NO: 22216 - protein, 246 aa, Bifidobacterium longum DJO10A
MTYKLVLLRHGQSAWNKTNQFTGWVDVPLTEQGEAEAKRGGELLKEKNVLPDIVFTSLLRRAINTANIALDAADRLWIPVQRDWRLNERHYGALQGKNKTEIREEYGDEKFMLWRRSYATPPPEIDPNDQYAQNNDPRYAGDPVPEAECLANVVERVKPYFESAIEPELKAGKTVLIAAHGNSLRAIVKMLDNLSEEEIAKVNIPTAIPLLYELDENFKPIKPRGEYLDPEAAAAGAAAVAAQGQK

SEQ ID NO: 22217 - protein, 325 aa, Vibrio angustum S14
MNKDNKKYGVLLVNLGTPDAPTAAGVKQFLSQFLHDHRVVDMTRWLWCPILHGVILPIRSPKVAKLYQSVWMEDGSPLMVYSKRQQKALTETLQVPVELGMTYGNPSTQSGLERLKQQGCDKVLVLPLYPQYSGTTTAAVFDRIAKDLKSISYIPELRFINHYYDHPDYISALAETAKTVWAEKGEPDYLLCSYHGIPKRYADNGDPYPDHCNGTTELLAKMLEMPREKMSMSYQSIFGREEWLKPYTEGTIKSLAEKGVKRLDVMCPAFSVDCLETLEEIAEQCKEVFIEAGGVEFNLIPCLNDSQAHITMMENLVKQHVQGWE

SEQ ID NO: 22218 - protein, 509 aa, Glycine max
  misc_feature (217)..(217): Xaa can be any naturally occurring amino acid
  misc_feature (360)..(360): Xaa can be any naturally occurring amino acid
MSLYDAAFVDTELSKRTSIFGLRLWVVIGILVGSLIVITLFLLSLCLTSRRRHHHHHHKNPRPRHPSTTLPTPPISKEILEIVHVPPPPDTVHLPPPPPTKPDHPRSAATAALYSSGESRATASACETASSLGSVGPEVSHLGWGRWYTLRELEAATNGLCEENVIGEGGYGIVYRGLFADGTKVAVKKPLNNKISFEVFPVLVLYLSSSEINTSCXLIFRGQAEKEFKVEVEAIGRVRHKNLVRLLGYCVEGAYRMLVYEYVDNGNLEQWLHGDVGAVSPLTWNIRMNIILGTARGLAYLHEGLEPKVVHRDVKSSNILIDRQWNSKVSDFGLAKLLCSENSYVTTRVMGTFGYVAPEXYACTGMLTEKSDIYSFGILIMEIIPGRSPVNYSSPQGEVNLIEWLKTMVGNRKSEEVVDPKLPEMPFSKALKRALLIALRCVDPDATKRPKMGHVIHMLEADDLLFHTEQRTEGESSRSYQSEHKDSNLDKRTGGGVIDKSEDASTRWR

SEQ ID NO: 22219 - protein, 367 aa, Oryza sativa
MERELLETFEAAKKAADAAAGADDSPEADRCLDAMRRLRGLRVTTDVLVSTQVGKRLRYLTKHPHSDIQSMATDLLGYWKKVVIEEGKKNGTTENVGSTNSAARAEKAQPMKVDKSSASGSVKPEKREVNVRGQKPESIKVEKITNNDSKNQQVKVERAPKEATRTPDTKKPSSVPNGPPKLTSLVKCNDPTRDKIRELLADAFSRVHGETSKDDREEVRNILDEVDARDPFRVAVTVESALFERLGRSTGAHKAKYRSIMFNLRADNNTDFRRRVLLGQVRPERLVDISPEEMASDARKLENKQIKEKALFDCERGGAPKATTDQFKCGRCGQRKTTYYQLQTRSADEPMTTFVTCVNCNNHWKFC

SEQ ID NO: 22220 - protein, 941 aa, Pichia pastoris
MPDASLFNGTSFITLFAPNISLLQASIDFYTNFLGFAIRKNSNQKLFWLQLEEDQNNVSIQLILDPEHAASVSQIDQNIRNLTRSLYRKDWRSIQSNIAFKSSSLSKLVKLLKDGGHPVQQSPNEISPFEVYTVDPLGSLIGFSGFKNPFAVNERSLLPKVSEEKAYRAEDDSEKLLNPVRKTIGVMTSGGDSPGMNPFVRAVVRAGIYKGCKVFCIHEGYEGLVRGGEKYIKETQWHDVRGWLVEGGTNIGTARCKEFRERSGRLKACKNMIDMGIDALIVCGGDGSLTGADRFRSEWPSLIEELLQTEQISQQQFNTHQNLNICGAVGSIDNDMSSTDATIGAFSSLDRICRAIDYIDATANSHSRAFIVEVMGRHCGWLGLLAGLATSADYILIPEKPASSREWQDQMCDIVGKHRARGKRKTIVIVAEGAISNDLSPISCDQVKDVLVNRLGLDTRVTTLGHVQRGGTAVAFDRIYATLQGVEAVNAVLECDADTPSPMIAIKEDQITRVPLVDAVELTQQVAKSIESRNFKKAISLRDSEFVEHMKNFISTNSADHVPPSLPLEKRKKIAIINVGAPAGGMNSAVYSMATYCMSRGHVPYAIHNGFSGLARHESVRSINWLDIEGWGSLGGSEIGTNRTLPNDADIGMIAYFFEKYGFDGLILVGGFEAFISLHQLERARINYPSLRIPLVLIPATISNNVPGTEYSLGSDTCLNSFMEYCDVIKQSAAATRNRVFVVEVQGGNSGYIATHAQLACGAQISYVPEEGISLAQLEMDINSLKESFANDQGKTKSGRLILKSENASKVLTTEVISTIIDDEASGRFDSKTAIPGHVQQGGIPSPMDRVRASRFAIRAVSFIERHSDRCQTFKNSISFRQTDEITSTAVVLGIHKSQLRFTPIRQLYDFESDVPRRMRKNIFWSNVREISDMLSGRTSL

SEQ ID NO: 22221 - protein, 235 aa, Rickettsia sibirica 246
MKDIEYWEKNFESCKYSDQLIERLLFLNTQVKQPIDIREVQKGIYYARKYHGEQMRQSGDPYYSHPIAVTIMVAEFVAKEVPKLFTFRMLQAALLHDTIEDTELTEEIISNIFDEEVARHVAGLTRIKPWGKISSEKSLILLIKQKRYDTALIKLFDRIHNLQTLEAKSPEKAHKIIKETLKSFLVLSEILEIPSVSELIYAECYKNNLKFNINSTFNKIINFDSFPFSQNKLLP

SEQ ID NO: 22222 - protein, 524 aa, Rhodopseudomonas palustris CGA009
MTTTTQSEQDRVIIFDTTLRDGEQCPGATMTFEEKLNVARMLDDMGVDVIEAGYPFASDGDFEAVHEIAKRSKNSVICGLSRAAHKDIDRCAEAIKPAERGRIHTFLSTSPVHMKYKLQMEAAQVYEMVISSVTRARNHTDDVEWSAEDATRTEFDFLCRCIEAAIKAGATTINLPDTVGYAVPEEYRELFRKVRETVPNSDKARFSVHCHNDLGMAVANSMAGVAGGARQIECTINGIGERAGNAALEEVVMAMRVRQDRLPYWNRIETTMLTHASKTVSAATSFPVQYNKAIVGRNAFAHESGIHQDGMIKNAQTYEIMTPETVGVKGTSLVMGKHSGRAGLIHKMEELGYKLSRNQIEDVFVRFKALADRKKDVYDEDIEALVDEQLLHGQDQIKLMSLTVIAGTHGPQRATMKLDVDGQIRIEEAEGNGPVDAVFNCIKALVPHDAKLELYQVHAVTEGTDAQAEVSVRLSHEGRSMTARAADPDTLVASAKAYLGALNKIVAKRQRSVREDAPAVAVAG

SEQ ID NO: 22223 - protein, 126 aa, Arabidopsis thaliana
  misc_feature (2)..(2): Xaa can be any naturally occurring amino acid
  misc_feature (10)..(10): Xaa can be any naturally occurring amino acid
  misc_feature (12)..(12): Xaa can be any naturally occurring amino acid
  misc_feature (31)..(32): Xaa can be any naturally occurring amino acid
  misc_feature (39)..(40): Xaa can be any naturally occurring amino acid
  misc_feature (42)..(42): Xaa can be any naturally occurring amino acid
  misc_feature (52)..(52): Xaa can be any naturally occurring amino acid
  misc_feature (54)..(56): Xaa can be any naturally occurring amino acid
  misc_feature (59)..(59): Xaa can be any naturally occurring amino acid
  misc_feature (62)..(63): Xaa can be any naturally occurring amino acid
  misc_feature (65)..(65): Xaa can be any naturally occurring amino acid
  misc_feature (67)..(68): Xaa can be any naturally occurring amino acid
  misc_feature (72)..(73): Xaa can be any naturally occurring amino acid
  misc_feature (78)..(78): Xaa can be any naturally occurring amino acid
  misc_feature (80)..(82): Xaa can be any naturally occurring amino acid
  misc_feature (84)..(86): Xaa can be any naturally occurring amino acid
  misc_feature (88)..(88): Xaa can be any naturally occurring amino acid
MXSSMLSSTXGXTSPAQATMVAPFTGLKSSXXFPVTRKXXNXITFITSKGGXVXXXKVXPPXXKXKXXTLSXXLPDLXDXXXGXXXGXYLPKDSLKSAGIFLPAPPSPGYYPKSGTKYPTYRQENF

SEQ ID NO: 22224 - protein, 173 aa, Oryza sativa (japonica cultivar-group)
MDVGVGGKAAKKAVGRKLGGPKKKPVSRSVKAGLQFPVGRIGRYLKKGRYAQRVGTGAPVYLAAVLEYLAAEASHCLSLPLPNPSKPSMVLELAGNAARDNKKNRIIPRHVLLAIRNDEELGKLLAGVTIAHGGVLPNINPVLLPKKTAEKADKPAKASKDKAAKSPKKQARS

SEQ ID NO: 22225 - protein, 556 aa, Vibrio angustum S14
MCSVFGILDIKSDAAALRPIALEMSKKLRHRGPDWSGIYASEHAILAHERLAIVGLNSGAQPLYSPDKKLILAVNGEIYNHKEIRARYEGKYDFQTDSDCEVILALYQDMGEELLEELNGIFAFVLYDEEKDTYLVGRDHIGIIPLYQGFDENGNYYVASEMKALVPVCKTVSEFPPGCYYGSADAEPQRYYTRDWNEYAAVQGNSTSKEELTEALEAAIKRQLMTDVPYGVLLSGGLDSSITSAVAKRFAAMRIEDNDQSEAWWPQLHSFAVGLEGAPDLKAAREVADKIGTVHHEMTYTIQEGLDAIRDVIYHIETYDVTTIRASTPMFLMGRKIKAMGIKMVLSGEGADEIFGGYLYFHKAPNAKEFHEETVRKLLALNMFDCARANKSLAAWGVEGRVPFLDKEFIDVAMRLNPEDKMCGNGKMEKHILRECFEHYLPESIAWRQKEQFSDGVGYSWIDTLKEVAEEKVTDQQLETAAYRFPYNTPTTKEAYAYREIFEELFPLESAAKCVPGGPSIACSSAKAIEWDESFKNAADPSGRAIAAVHNEAYKK

SEQ ID NO: 22226 - protein, 474 aa, Streptococcus pneumoniae R6
MTRYQNLVNGKWKSSEQEITIYSPINQEELGTVPAMTQTEADEAMQAARAALPAWRALSAIERAAYLHKTAAILERDKEKIGTILAKEVAKGIKAAIGEVVRTADLIRYAAEEGLRITGQAMEGGGFEAASKNKLAVVRREPVGIVLAIAPFNYPVNLSASKIAPALIAGNVVMLKPPTQGSISGLLLAKAFEEAGIPAGVFNTITGRGSEIGDYIIEHKEVNFINFTGSTPIGERIGRLAGMRPIMLELGGKDAALVLEDADLEHAAKQIVAGAFSYSGQRCTAIKRVIVLESVADKLATLLQEEVSKLTVGDPFDNADITPVIDNASADFIWGLIEDAQEKEAQALTPIKREGNLLWPVLFDQVTKDMKVAWEEPFGPVLPIIRVASVEEAIAFANESEFGLQSSVFTNDFKKAFEIAEKLEVGTVHINNKTQRGPDNFPFLGVKGSGAGVQGIKYSIEAMTNVKSIVFDVK

SEQ ID NO: 22227 - protein, 492 aa, Arabidopsis thaliana
MGGDLKSQLSRESHVFGLKVWEVIGIAVALLIIAILSVLSCCLTSKKKSRRSKTGLPVIQTPPVVSKEIREVRVEHVSASNFAPGEGILLTIQDKNNKDSEKVMVHLDMRKKRSSSGRSGSFHHLEIIDKHSDSAEEVSASSSLYNIATPSPLSGLPESHLGWGHWFTLRDLETATNRFSKENVIGEGGYGVVYRGELMNGTPVAVKKILNQLGQAEKEFRVEVDAIGHVRHKNLVRLLGYCIEGTHRILVYEYVNNGNLEQWLHGAMRQHGYLTWEARMKVLIGTSKALAYLHEAIEPKVVHRDIKSSNILINDEFNAKVSDFGLAKLLGAGKSHVTTRVMGTFGYVAPEYANSGLLNEKSDVYSFGVVLLEAITGRDPVDYGRPAHEVNLVDWLKMMVGTRRSEEVVDPNIEVKPPTRSLKRALLTALRCVDPDSDKRPKMSQVVRMLESEEYPIPREDRRRSRTREGSMEINSDTDMSTPVSRSQSKRQ

SEQ ID NO: 22228 - protein, 453 aa, Listeria monocytogenes str. 4b F2365
MKVIKFGGSSLASGIQLNKVFQLVAEDPDRKIVVVSAPGKRFKEDTKVTDLLIDCAAKALLGEDTSELFESVIARYAGIALDTGMSDEIINQIRADLQATISSDKSDPDKFLDRMKASGEDNNAKLIAAYFKFKGLNANYINPKDAGLLVTDEHASAQVLPESYDRLFALREREGIIVFPGFFGYTKDGEISTFSRSGSDITGAIVANGAQAELYENFTDVDAVYAVNPAIVKNPKKVLELTYREMRELSYAGFSVFHDEALIPAFHAGIPVHIKNTNNPDSCGTRVVHERENNNGPVVGIASDDGFCSIYISKYLMNREIGFGRKVLQILEDAGLNYEHMPSGIDDLTIIIRENQFGEDTEQTIMSRLKEELNADQVIMQHGISLIMVVGETMRHNVGITSRASKALSDAKVNIEMINQGSSEVSIMFGVKEEQENTAVRALYNEFFSEVLV

SEQ ID NO: 22229 - protein, 396 aa, Erwinia carotovora subsp. atroseptica SCRI1043
MLDNHTIAIVKSTIPLLAETGPKLTAHFYDRMFTHNPELKDIFNMSNQRNGDQREALFNAICAYATNIENLAALLPAVERIAQKHTSFNIQADQYQIVGNHLLATLDEMFSPGQEVLDAWGKAYGVLANVFIQREDDIYRSTETKTGGWSGVRPFRIVNKQLQSSVITSFTLEPTDGQPIADFQPGQYLAIYIKHDSFANQEIRQYSLTHAPNGKSYRIAVKREAQGTVSGYLHDTAREGDIVHLAAPHGDFFLDIPTDTPVALISGGVGQTPMLGMLHTLKQQDHQAKVLWLHAAENGTAHAFTDEIEQTGQALPHFDHHIWYREPQQTDRPGEDYHHSGLMQLASLKGELTTPDMHYYLCGPVVFMQFVAQQLLAMGIPAEQLHYECFGPHKVV

SEQ ID NO: 22230 - protein, 95 aa, marine gamma proteobacterium HTCC2207
MQLTISGHHLEITEAIREYVNNKFAKLERHYEQITSTSVILTVEKLSQNAEATVHVSGAELFANSQHEDLYAAIDSLTDKLDRQLIKYKEKHRGR

SEQ ID NO: 22231 - protein, 235 aa, Arabidopsis thaliana
MSSYSIASAISRISPLIRYAYHYSPNSSTLQSQPQSTRRPKRFDQLCVFSMASEARESPANNPGLSTNRDEATKGYIMQQTMFRIKDPKASLDFYSRVLGMSLLKRLDFSEMKFSLYFLGYEDTTTAPTDPTERTVWTFGQPATIELTHNWGTESDPEFKGYHNGNSEPRGFGHIGVTVDDVHKACERFEELGVEFAKKPNDGKMKNIAFIKDPDGYWIEIFDLKTIGTTTVNAA

SEQ ID NO: 22232 - protein, 390 aa, Staphylococcus aureus subsp. aureus MRSA252
MLEFEQGFNHLATLKVIGVGGGGNNAVNRMIDHGMNNVEFIAINTDGQALNLSKAESKIQIGEKLTRGLGAGANPEIGKKAAEESREQIEDAIQGADMVFVTSGMGGGTGTGAAPVVAKIAKEMGALTVGVVTRPFSFEGRKRQTQAAAGVEAMKAAVDTLIVIPNDRLLDIVDKSTPMMEAFKEADNVLRQGVQGISDLIAVSGEVNLDFADVKTIMSNQGSALMGIGVSSGENRAVEAAKKAISSPLLETSIVGAQGVLMNITGGESLSLFEAQEAADIVQDAADEDVNMIFGTVINPELQDEIVVTVIATGFDDKPTSHGRKSGSTGFGTSVNTSSNATSKDESFTSNSSNAQATDSVSERTHTTKEDDIPSFIRNREERRSRRTRR

SEQ ID NO: 22233 - protein, 193 aa, Arabidopsis thaliana
  misc_feature (154)..(154): Xaa can be any naturally occurring amino acid
  misc_feature (175)..(175): Xaa can be any naturally occurring amino acid
LVSDSASSDNKSNLTLCSDVVASSSPVSQLCREASTSGHNPVCTTHSSWTVILKTASMASGAIRRFQDRVLGPSRTGISSSTSEIWLLGVCYKISEGESSEEADAGRVLAAFRQDFSSLILMTYRRGFEPIGDTTYTSDENWGCMRRSGQMLFXQALLFQRLGKAWRKKDPEPGXRKILKELELFGETEASAF

SEQ ID NO: 22234 - protein, 289 aa, Pseudomonas aeruginosa UCBPP-PA14
MSDTPYIFDVTGANFEQLVIENSFHKPVLVDFWADWCAPCKALMPLLAQIAESYQGELLLAKVNCDVEQDIVMRFGIRSLPTVVLFKDGQPVDGFAGAQPESQIRALLEPHVKAPALPDEDPLEVAQALFAEGRIGDAEATLKALLAENNDNPAALILYARCLAERGELEEAQAILDAVKSDEHKQALAGARAQLTFLRQAADLPDSAELKSRLAADAGDDEAAYQLAVQQLARQQYEAALDGLLKLFLRNRGYQDDLPRKTLVQVFDLLGNDHPLVTTYRRKLYQALY

SEQ ID NO: 22235 - protein, 378 aa, Neisseria meningitidis Z2491
MDWHERFPELEAQLGAPIENYAPPKHWTRKQLRSMGRVSYLCVDAAEQALTDAGLLGDESITDGRMGVACGSSSGSTKDIGDVGELLLTGMSRNFSANTYVRMMPHTAAANIGIFFGLKGRIIPTSSACSSGSQGIGYAYEAIKYGLTDMMLAGGGEEFFPSEVYVFDSLYAASRRNGEPEKTPRPYDANRDGLVIGEGAGIFVLEELEHAKRRGAIIYAELVGYGANSDAYHISTPRPDAQGAILAFQTALQHADLAPEDIGWINLHGTGTHHNDSMESRAVAAVFGNNTPCTSTKPQTGHTLGAAGAIEAAFAWGIADRKSNPEGKLPPQLWDGQNDPDLPAINLTGSGSRWETEKRIAASSSFAFGGSNCVLLIG

SEQ ID NO: 22236 - protein, 1017 aa, Schizosaccharomyces pombe
MFRACSKLQYHGVNTSLSRHLFLAKRNLSISSACLEAKNSQKFPALDTFEPRHIGPSKTDQQYQLESLGYKDFDSFLKDVIPDSVRTPESQLMAFGSVNPNEKNPPVNYSESEFTTLANNVANQNKLIKSFIGMGYYNVKLPAAIQRNVLENPEWYTQYTPYQAEISQGRLESMMNYQTMIADLTGLSISNASLLDEGTAAGEAMVMLMANDKKKRKTFLVDKNIYPNTLSVLRTRASGFGIKIELDNITPELITKSAKHVFGIFVQYPAADGSIFDYGHLAATARSFNMHVVAATDLLALTILKSPGEWGADVAVGSTQRFGLPMGYGGPHAGFFACSEEFKRKIPGRLIGLSKDRLENPAYRLALQTREQHIRREKATSNICTAQALLANMSAFYAIYHGPNGLQEIANRIYASTSFLKSALESSGYKIVNKSHFFDTLTIEVESADKVLAKALDHGYNLRKVDDSHVGLSLDETVCDKDIQALFSIFNINKSVDQYYMEIATSEPNGNSASTVDNLSICSLPENFRRTTLYLQHPVFNRYHSETELMRYIHHLQSKDLSLAHAMTPLGSCTMKLNAVTEMMPITNPLFANIHPYVPEEQAKGYRHVIEDLQLMLTTITGFDAACFQPNSGAAGEYTGLSVIRAYQRSIGQGHRNICLIPVSAHGTNPASAAMAGFTVIPVKCLNNGYLDMQDLKEKASKHADKLAAFMVTYPSTFGIFEPDVKEALEVIHEHGGQVYFDGANMNAMVGLCKAGDIGADVCHLNLHKTFCIPHGGGGPGVGPICVKKHLADFLPSHPVVSCGGKNGITSVSSSPFGSAGILPISWAYMRMMGLAGLRDASKAALLNANYMAKRLSSHYKLVYTNKNNLCAHEFILDAREFKATAGVDATDIAKRLQDYSFHAPTLSWPIANTLMIEPTESESMYEMDRFCDALISIRQEIREIEEGLQPKDNNLLVNAPHPQKDIASEKWDRPYTRERAVYPVPLLKERKFWPSVARLDDAYGDKNLFCTCSPVV

SEQ ID NO: 22237 - protein, 110 aa, Gloeobacter violaceus PCC 7421
MSAAVPVGDSNFKTEVLDSELPVLVDFWAPWCGPCRMVAPVVDEIAQQYSGKLKVVKVNTDENPQVASQYGIRSIPTLMVFKSGSKVDMVVGAVPKTTLATTLEKHIDIK

SEQ ID NO: 22238 - protein, 239 aa, Schizosaccharomyces pombe
MKLNISYPANGTQKLIEIDDDRRLRVFMEKRMGQEVPGDSVGPEFAGYVFKITGGNDKQGFPMFQGVLLPHRVRLLLRAGHPCYRPRRDGERKRKSVRGCIVGQDLAVLALAIIKQGEQDIPGLTDVTVPKRLGPKRASKIRRFFNLSKEDDVRQFVIRREVVPKKEGKKPYTKAPKIQRLVTPRTLQHKRHRFALKRRQAEKNREEAAEFAQLMAKRVAEAKQKREVVKARRASSLKK

SEQ ID NO: 22239 - protein, 178 aa, Frankia sp. CcI3
MTVHDFTVDAADGTSRSLGDYAGQTLLIVNVASKCGLTPQYEGLESLYRDLHGRGLEILGFPCNQFGGQEPGTDAEIQEFCATKFDVTFPVLGKIEVNGPDAAPLYTHLRSEAPGDFGPDAGFLYEHIKKTRPEAIGTDEIKWNFTKFLVDPDGKVVRRYEPTVTPEEIRKDLEATLA

SEQ ID NO: 22240 - protein, 435 aa, Neurospora crassa
  misc_feature (84)..(84): Xaa can be any naturally occurring amino acid
  misc_feature (155)..(155): Xaa can be any naturally occurring amino acid
  misc_feature (174)..(174): Xaa can be any naturally occurring amino acid
  misc_feature (226)..(226): Xaa can be any naturally occurring amino acid
  misc_feature (303)..(303): Xaa can be any naturally occurring amino acid
  misc_feature (328)..(328): Xaa can be any naturally occurring amino acid
  misc_feature (332)..(332): Xaa can be any naturally occurring amino acid
  misc_feature (345)..(346): Xaa can be any naturally occurring amino acid
  misc_feature (349)..(349): Xaa can be any naturally occurring amino acid
  misc_feature (356)..(356): Xaa can be any naturally occurring amino acid
  misc_feature (384)..(384): Xaa can be any naturally occurring amino acid
  misc_feature (422)..(422): Xaa can be any naturally occurring amino acid
  misc_feature (434)..(434): Xaa can be any naturally occurring amino acid
MRRVVVTGLGAITPLAVGIRPTWRRLLDSHSGIVSVADLEPQDKWKELTSTVGGLVPTPARNKQNVDEQHTWKAADWLEPSDQXRMSLFAQYSVAATEMALQDAGWKPTRQEDLEATGVCMGSGIGNLDDFYNTSVTYDKEGYKRVSPLFVPKIXINLGAGHIAMRYGFRGPNXSATTACTTGAHSIGDASRFIAFGDADVMVAGGSESCIHPLTFAGFGRSRSLXTAYNHDPTSACRPFDKDRAGFVVSEGAAVLILEELEHAKRRGARILAELTGYGCSGDAHHMTAPRDDGSGAFLSMNXALKNAGCQPGDVDYINAHATGTAVXDAAXAIAIRSLMMGEEXXDDXSRITVNXTKGAIGHLLGAAGAIESVFSILAIAEGXIPPTLNLTSPNVGVGFNFVPVQAQQKEVKVAMSNSFGXGGTNASLVFSKXE

SEQ ID NO: 22241 - protein, 184 aa, Arabidopsis thaliana
MAEVLRPEMLDISNDTSSLASPKLLHVLAVDDSMVDRKFIERLLRVSSCKVTVVDSATRALQYLGLDGENNSSVGFEDLKINLIMTDYSMPGMTGYELLKKIKESSAFREIPVVIMSSENILPRIDRCLEEGAEDFLLKPVKLADVKRLRDSLMKAEEGAFKNIMHKRELEANDIYSQLKRAKI

SEQ ID NO: 22242 - protein, 112 aa, Novosphingobium aromaticivorans DSM 12444
MKKVEAIIKPFKLDEVKEALHEIGVSGITVTEAKGFGRQKGHTELYRGAEYVVDFLPKVKLEVVVSDALVDRVVEAVAAAAQTGRIGDGKIFVIPVESALRIRTGERDDDAI

SEQ ID NO: 22243 - protein, 334 aa, Clostridium pasteurianum
MTKVAINGFGRIGRLALRRILEVPGLEVVAINDLTDAKMLAHLFKYDSSQGRFNGEIEVKEGAFVVNGKEVKVFAEADPEKLPWGELGIDVVLECTGFFTKKEKAEAHVRAGAKKVVISAPAGNDLKTIVFNVNNEDLDGTETVISGASCTTNCLAPMAKVLNDKFGIEKGFMTTIHAYTNDQNTLDGPHRKGDFRRARAAAVSIIPNSTGAAKAIAQVIPELKGKLDGNAQRVPVPTGSVTELISVLKKNVTVEEINAAMKEAANESFGYTEDEIVSADVVGISYGSLFDATLTKIVDVDGSQLVKTVSWYDNEMSYTSQLVRTLEYFAKIAK

SEQ ID NO: 22244 - protein, 448 aa, Listeria monocytogenes str. 1/2a F6854
MAKHRYLPMTEQDEKEMLDVIGVKSIDDLFQDIPEKIRFKRDYDLKPAKSEPALLRELSKLASKNANTSEYASFLGAGVYSHYIPTVVDHVISRSEFYTAYTPYQPEISQGELQAIFEFQTMIAELTGMDLANSSMYDGGTALAEAAMLASGHTKRKKILISGAVHPESSNVLKTYATGQHIEVEVIPELDGKTDIEALKKALSDDIAGFVVQYPNFYGQVEPLAELEKLVHENNSLLLVSSNPLSLGLLTPPGEFGADIVVGDSQVFGIPESFGGPHCGFFAVTNKLMRKVPGRLVGETVDENGKRGYVLTLQAREQHIRRDKATSNICSNQALNALASSVAMATLGKTGLVEMAKQNLDKSHYAKQKFREKGFEVLFSDGFFNEFVVKLSKPIKEVNESLLDEGIIGGYDLGFYEGKYKHHMLVAVTEMRTKEEIDAFVASLEGAK

SEQ ID NO: 22245 - protein, 488 aa, Listeria monocytogenes str. 1/2a F6854
MNLEETMPLVFERSIPGRIGFSLPESDVPETNAGDYFDQAYIRSIPADLPELSELEIMRHYTNLSNHNFGVDSGFYPLGSCTMKYNPKINEKVARFPGFANIHPNQPESSVQGALELLYDLQTSLVEITGMDEVTLQPAAGAHGEWTGLMLIRAFHEKNGDTKRTKVIIPDSAHGTNPASAAVAGFDVVTVKSNEKGLVDVADLKKVVGEDTAALMLTNPNTLGLFEKDIVEMAEIVHEAGGKLYYDGANLNAIMAKVRPGDMGFDVVHLNLHKTFTGPHGGGGPGSGPIGVKKELIPFLPTPVLTKKEDIYTFDYNYPDSIGRVKPYYGNFGINVRAYTYIRTMGPDGLKLVTEYAVLNANYMMRKLQEAYDLPFDQVCKHEFVLSGNRQKKLGVRTVDIAKRLLDHNFHPPTVYFPLIVGEAIMIEPTETESKETLDSFIDTMLKIAKEAEENPEIVQEAPHSTYVKRLDETRAARKPILRYQKEV

SEQ ID NO: 22246 - protein, 560 aa, Arabidopsis thaliana
MASSTALICDTEAWKDLKGHVEDIKKTHLRDLMSDANRCQSMMMEFDGLLLDYSRQRATVETMDKLLNLAKASQLTEKISRMFNGEHINSTENRSVLHVALRAPKDAVIKADGMNVVPEVWNVLDKIKEFSDKIRSGSWVGATGKPLKDVIAIGIGGSFLGPLFVHTALQTDPEALESAKGRQLRFLANIDPVDVARNISGLNPETTLVVVVSKTFTTAETMLNARTLREWITAALGASAVAKHMVAVSTNLALVEKFGIDPNNAFAFWDWVGGRYSVCSAVGVLPLSLQYGFSMVEKFLKGASSIDQHFQSTPFEKNIPVLLGLLSVWNVSFLGYPARAILPYSQALEKFAPHIQQVSMESNGKGVSIDGLPLPFETGEIDFGEPGTNGQHSFYQLIHQGRVIPCDFIGIVKSQQPVYLKGEVVSNHDELMSNFFAQPDALAYGKTPEQLQKENVSENLIPHKTFSGNRPSLSLLLPELTAYNVGQLLAIYEHRVAVQGFVWGINSFDQWGVELGKVLATQVRKQLHSSRTQGTAPEGFNYSTTTLLKRYLETSSEPQM

SEQ ID NO: 22247 - protein, 403 aa, Bifidobacterium longum DJO10A
MSEIAQNEFNDKTNIKVVGVGGAGGNAVNRMIAEGLQNVEFVAVNTDAKDLLRSDADVKISLSDKSSRGLGAGADPERGAKAAQDHQSDIEEALRGADMVFVTCGEGGGTGTGASPIVARAAHQQGALTIAVVTRPFSFEGPQRSASAEYGIDNLRKEVDALIVIPNDRLLELSDRSIGIIEAFKTADTALLAGVQGITDLISMNSYIHVDFNDVNSILRGAGTALFGIGSARGEDRATQAAEIAISSPLLEESIEGAHGALINIAGPTDLKLQEASAATELVRKAIHPEAQIIWGLALDDAYGDEVRVTVIAAGFDPVAAQDDDTQSTVTPVVPTAADPATPVAQPAPAPAPAAQPAATAQPAFTPATGDSASLPFDDPTSAHPNIAVNDPAGDLDIPDFLR

SEQ ID NO: 22248 - protein, 270 aa, Mycobacterium avium subsp. paratuberculosis K-10
MAEASANEKTGPDALVEQRGHTLIVTLNRPHARNALSTEMMEIMVQAWDRVDNDDDIRCCILTGAGGYFCAGMDLKAATKKPPGESFKDGSYDPSRIDALLKGRRLTKPLIAAVEGPAIAGGTEILQGTDIRVAGESAKFGISEAKWSLYPMGGSAVRLVRQIPYTVACDLLLTGRHITAAEAKEMGLIGHVVPDGQALAKALEIAEVIENNGPLAVQAILRAIRETEGMHENEAFKIDTQIGIKVFLSEDAKEGPRAFAEKRKPNFQNR

SEQ ID NO: 22249 - protein, 204 aa, Streptococcus pneumoniae TIGR4
MYDTIIIGAGPAGMTAALYAARSNLKVALIEGGLPGGQMNNTSDIENYPGYANISGPELAEKMFEPLENLGVEHIYGYVENVEDHGDFKKVMTDDQTYETRTVIVATGSKHRPLGVPGEEELNSRGVSYCAVCDGAFFRDQDLLVVGGGDSAVEEALFLTRFAKTVTIVHRRDQLRAQKVLQDRAFANEKNQLYLGFCSKGNQG

SEQ ID NO: 22250 - protein, 353 aa, Listeria monocytogenes str. 1/2a F6854
MSKLTKIQETLGKEKIEAVLVTSEFNRRYVSGFTGTSGVALILPEKAYFVTDFRYTEQAAKQAEGYEIVQHTGPIFDTVEDLLIKNDTKTLHFEADYVTVSEFKQMERVFNRQLIPLTGFFEEMRKVKTASELKAIRTACDIADAAFAHIIQFIKPGMAEIEVSNELEFFMRRAGATSSSFDTIVASGIRSALPHGVASDKKIEVGDFVTMDYGCYYDGYCSDMTRTIAVGEPAEKLKEIYQITLDAQLKVIDSLKPGMTGIEADAIARDYISSFGYGDAFGHSLGHGIGLEIHEGPNLSFKSPQKLEVGHVVTDEPGIYLPGIGGVRIEDDLLITETGNEILIHSPKELIIL

SEQ ID NO: 22251 - protein, 319 aa, Prunus persica
MENFPIINLEGLNGEGRKATMEKIKDACENWGFFELVSHGIPTEFLDTVERLTKEHYRQCLEQRFKELVASKGLEAVKTEVNDMDWESTFYLRHLPKSNISEVPDLEDQYRNVMKEFALKLEKLAEQLLDLLCENLGLEQGYLKKAFYGTNGPTFGTKVSNYPPCPKPELIKGLRAHTDAGGLILLFQDDKVSGLQLLKDGQWIDVPPMRHSIVINLGDQLEVITNGKYKSVEHRVIAQTDGTRMSIASFYNPGSDAVIYPAPTLVEKEAEEKNQVYPKFVFEDYMKLYAGLKFQPKEPRFEAMKAVETNISLGPIATA

SEQ ID NO: 22252 - protein, 407 aa, Pseudomonas fluorescens Pf-5
MAIEIKAPTFPESVADGTVATWHKQPGDAVKRDELIVDIETDKVVLEVLATADGVLGAIVKNEGDTVLSDEVLGSIVEGGAAAAAPAAAAAPAAAAAAPAAADGEDDPIAAPAARKLAEENGINIASVAGTGKGGRVTKEDVVAAVAAKKAAPAAAPAKAPAPAAGAPVFAAGDRVEKRVPMTRLRAKVAERLVEAQSNMAMLTTFNEVDMTEVMALRSKYKDLFEKSHNGVRLGFMSFFVKAATEALKRFPAVNASIDGSDIVYHGYADIGVAVSSDRGLVVPVLRNAELMSLAEIEGGIATFGKKARDGKLSMEEMTGGTFTITNGGTFGSMMSTPIVNPPQAAILGMHNILQRPMAINGQVVIRPMMYLALSYDHRLIDGKEAVTFLVTIKNLLEDPARLLLDI

SEQ ID NO: 22253 - protein, 147 aa, Arabidopsis thaliana
MKADPRKETGIKLVAVEISLTFGNRKWQPHKNSGAKDEEAKFNKRTKYKMRIRPRSSISKRRRLIGGLSAYTTDQSLRQLFAPFARLIKDQQTQRPKGFGFITFESEDDAQKALKALNGKIVNGRLIFVETAKEVEAPTTSLKSNKD

SEQ ID NO: 22254 - protein, 386 aa, Bacillus anthracis str. 'Ames Ancestor'
MLEFDTTQDQLANIKVIGVGGGGNNAVNRMIEHGVQGVDFIAVNTDAQALNLSKAETKMQIGGKLTRGLGAGANPEVGKKAAEESKEQIQEALRGADMVFVTAGMGGGTGTGAAPVVAQVAKELGALTVGVVTRPFTFEGRKRATQAASGIAAFKENVDTLIVIPNDRLLEIVDKNTPMLEAFREADNVLRQGVQGISDLIATPGLINLDFADVKTIMSNRGSALMGIGSGNGENRAAEAAKKAISSPLLETSIDGAQGVIMNITGGANLSLYEVQEAADIVASASDPEVNMIFGSVINEGLKDDIVVTVIATGFDDSIATQPPKPIIRPNVNHTQQQQQPVAQPPKQREVKREMKREEPVVHERHSDSDSDDIDIPAFLRNRRRR

SEQ ID NO: 22255 - protein, 479 aa, Saccharophagus degradans 2-40
MSQEQLDHLIRKDYAAGFITDVESDTLPPGLNEEVIAFISNKKNEPEWLLEWRLKAYRAWREMDEPDWAHVSYPKIDFDEISYYSAPKSMADKPKSLDEVDPELLRTYEKLGIPLHEQEMLAGVAVDAVFDSVSVGTTFRKKLFEAGVIFCPISEAVHEYPELVKKYLGSVVPQKDNYYAALNCAVFSDGSFVYIPKGVRCPMELSTYFRINESKTGQFERTLIIADEGSHVSYLEGCTAPMRDENQLHAAVVELVALDNAKIKYSTVQNWYPGDAEGKGGIYNFVTKRGIAHTNAHISWTQVETGSAVTWKYPSCVLKGDNSVGEFYSVALTNNHQQADTGTKMIHLGKNTRSTIISKGISAGKSSNAYRGLVRMNPGATGARNYTQCDSLLIGDKCAAHTFPYIESKNPSAVVEHEATTSKVSEDQLYLCQQRGIDAEKAVSMIVNGFCKEVFKELPMEFAVEAGKLLEVSLEGSVG

SEQ ID NO: 22256 - protein, 320 aa, Streptomyces coelicolor
MSDVRNVIIIGSGPAGYTAALYTARRSLKPLVFEGAVTAGGALMNTTEVENFPGFQDGIMGPELMDNMRAQADGFGAELIPDDVVAVDLSGEIKTVTDTAGTVHRAKAVIVTTGSQHRKLGLPNEDALSGRGVSWCATCDGFFFKDQDIAVIGGDTAMEEATFLSRFAKSVTIVHRRDTLRASKAMQERAFADPKISFVWDSEVAEVQGDQKLAGLKLRNVKTGELSDLPVTALFIAIGHDPRTELFKGQLDLDPEYLKVDAPSTRTNLTGVFGAGDVVDHTYRQAITAAGTGCSAAVDAEPFLAALSDEDKAEPEKTAV

SEQ ID NO: 22257 - protein, 444 aa, Neisseria meningitidis Z2491
MTDLNTLFANLKQRNPNQEPFHQAVEEVFMSLDPFLAKNPKYTQQSLLERIVEPERVVMFRVTWQDDKGQVQVNRGYRVQMSSAIGPYKGGLRFHPTVDLGVLKFLAFEQVFKNALTTLPMGGGKGGSDFDPKGKSDAEVMRFCQAFMTELYRHIGADTDVPAGDIGVGGREIGYLFGQYKKIRNEFSSVLTGKGLEWGGSLIRPEATGYGCVYFAQAMLQTRNDSFEGKRVLISGSGNVAQYAAEKAIQLGAKVLTVSDSNGFVLFPDSGMSEAQLAALIELKEVRRERVATYAKEQGLQYFENQKPWGVAAEIALPCATQNELDEEAAKTLLANGCYVVAEGANMPSTLGAVEQFIKAGILYAPGKASNAGGVATSGLEMSQNAIRLSWTREEVDQRLFGIMQSIHESCLKYGKVGDTVNYVNGANIAGFVKVADAMLAQGF

SEQ ID NO: 22258 - protein, 290 aa, Gibberella zeae PH-1
MADNAAREDALLDVEDKVHDKHSKPRGGKGRGKSGGGGGHGREVQVSKALSRLLRHQAANAGIQLDDEGFARLDTVLAWNPLRSLKVTFDDVQTAVSTDGKQRFTLKPNPDTNPSLDTKSTSPADYLIRANQGHSIKLESANLLTPVTVEAGNVPNRVLHGSFFYFWSAIVETGGLKPMNRNHVHCSAGTPEEGILSGMRRDAELIIEIDMEESLKDGIKWWLSDNGVLLTEGDEQGILSTKYFKLVTGRNIDVGVLWQDGQWVSDLPRGTKISPPFGKRGGRGGRQGGS

SEQ ID NO: 22259 - protein, 420 aa, Xanthobacter autotrophicus Py2
MRRVVVTGLGMVTPLGCGVEPTWRRLIAGESGVKAVSHFEVADLACKIAANVPRGDGSDGTFNPDQWMEPKEQRKVDEFIVYAMAAATQALDDAGWHPSSYEDQINTGVLIGSGIGGIEGIAESALLLKERGPRRISPFFIPGRLINLAGGYVSITHGLKGPNHAVVTACSTGAHAIGDAGRLIALGDADVMVAGGTESTVNRLALAGFAACKALCTAFNDDPTRASRPYDKDRDGFVMGEGAGVVVLEELEHAKARGARIYAELVGYGLSGDAFHITAPSPDGDGAFRCMQAALKRAGLTAGDIDYINAHGTSTMADEIELKAVERLLGNAAATTSMSSTKSSIGHLLGAAGAVEAIFSVLAIRDQIAPATLNLDNPSVETPIDLVPLKAKPRKIDAVLSNSFGFGGTNASLIFQRFDA

SEQ ID NO: 22260 - protein, 678 aa, Pseudomonas putida KT2440
MQQSPDHRPSPWHAGEKTLQEKVGVAERMEAFGQKVIRDHMPDQHRTFYHQLPFMVAASVDAQGRPWATLLEGPEGFVSSPDPRMLTIHTTLPADDPATPGLAAGQAVGLLGIELHTRRRNRINGQIRHAAQGQLQVAVEQAFGNCPQYIQLRDYTRVTEPALGRIDATTLDTSTVSMIQAADTFFVASYVEHAYGQRSVDVSHRGGRPGFIKVEGNRLTIPDYAGNLHFNTLGNLVVNPRAGLLFIDFKNGNVLQLYGRAEVLLDSPAIQAFEGAERLWTLQVEKVVWRPAAVALRWAFKEYAPTSLMTGTWAEADARLEQRQQQRQWLAWRVLRVEQESRDIRSFYLEPPAGCRVAFAPGQHLPVQVPRDGESALIRTYSLSSAPDDGFLRISVKAQGPASRYLHERVVAGDVLNVRPPMGSFTLDQQSTRPLVLIGAGVGITPLLAMLRQQLRTGQARRIHLFHGARSLADLPFQQELAALRQQAGDLLQVHRALSQPEGHAQVGRDYEFAGRLGIEQVKATLALDDYDFYLCGPGSFTQQLYEGLRGVHVPDARIHAEAFGPSTLRRHTDADQPVLQQPPAADEPVPVYFAASAKEARWVPGSGTLLELAEARGLAPEFSCRGGSCGTCKTRLVSGQVHYPNPPAELPEAGSVLICCAVPAKVEEGMQALVLDV

SEQ ID NO: 22261 - protein, 312 aa, Chlamydia muridarum Nigg
MTHVKLAIIGSGPAGYTAAIYASRALLTPILFEGFFSGIAGGQLMTTTEVENFPGFPQGVLGHQLMENMKMQAQRFGTQVIAKDITSVDFSVRPFVLKSGEDTFTCDACIIATGASAKRLSIPGAGDNEFWQKGVTACAVCDGASPIFRDRDLFVIGGGDSALEEAMFLTRYGKRVFVVHRRDTLRASKAMVNKAQANEKIVFLWNSEVVKILGDSLVRSIDIFNNVEKTTVTMEAAGVFFAIGHQPNTAFLGGQLSLDENGYIITEKGSSRTSVPGVFAAGDVQDKYYRQAITSAGSGCMAALDAERFLEK

SEQ ID NO: 22262 - protein, 471 aa, Mycoplasma mycoides subsp. mycoides SC str. PG1
MCKNREFLFFIFNNFNSIFIGKASMKIVIIGGAASGMTVASRLKKADKKAQIIVIQKEKYVSLGACGLPYFVANPSLKSTDLLARTVEQFIEQDILVYSESVVKKIDAENQKVWYEKNDQLLELDYDKLVISTGAKPIVPPIKGIDLPNIFTLTRLEDATELKEKLKDKNIKKVAVIGSGFIGLECCEMLEHFNKEIVLIEKTSRLNQRVFDQEITDLLEQNLIKNNVEIIKENGLKSITQTKDKRLSLTLDQNEEIEVDLIILAIGFRPATEFLKDTKLEMLGNGAIVVDKHGRTNLKNIWSCGDCATVYHKITNQITYTPLATVARKFAKVVADDILNVNSEFVRTLQTAILKVFESELVSTGINETLAKELGYDIKTIFIKDADHPSYYPNPTPLALKLILNKKTNTLIGAQMYGSNLSVLRINFLISLIWNQIEINQELTQVDLPYSPPFSRVVDIIHIALEKLIKN

SEQ ID NO: 22263 - protein, 579 aa, Coccidioides immitis RS
MAARRAVSRTIPTLSSRTLSSPRSSLSYLSSRTTSSSQALRPMAAARRLHATAQQLMPAATTSAASTATEYPTTHERIASPIDTCNFIDNKFVPSKATQWIDLHDPATNNLVTRVPQSTSEEMKAAVESAQKAFPAWRTTSIMARQQIMFKYVNLIRANWDRLAASITLEQGKTFADAKGDVLRGLQVAETACGITTQMTGELLEVAKDMETRTYREPLGVVAAICPFNFPAMIPLWCIPIATMTGNTLILKPSERDPGAAMILVELAKEAGFPDGVINVIHGAAKAVDFILDEPAIKAISFVGSNRAGEYIYTRGSANGKRVQANLGAKNHAAVLPDCNKNHALNAIVGAAFGAAGQRCMALSTLVMVGETKEWLPEIAERAKALNVNGGFEEGADLGPVITPASKQRIEEIIASAEKEGAKILLDGRGYKPAKYPNGNWVGPTIITGVKPHMTCYREEIFGPVLVCLEVDTVDEAIALINANEYGNGAAVFTRSGPTATRFQHELEAGQLGINVPIPVPLPMFSFTGNKKSIAGGGANTFYGKPGLNFYTQLKTVTSLWRSEDAINTKASVVMPTHQ

SEQ ID NO: 22264 - protein, 398 aa, Psychrobacter arcticus 273-4
MSKYTMPDDNQLQNNGQASFTVFGVGGGGGNAVEHMVQQGIRGVTFVCANTDKQALDRLTAPHKLQLGAKTNRGLGAGANPEVGREAAESDEEAIRALLEHSDMVFITAGMGGGTGTGAAPVVARIAKEMEVLTVAVVTTPFKFEGGKRIKAAKAGIEQLTNFVDSIITIPNDKLMSVYGNISMQDAFKKADDVLLHAVQGIAETIASEGMINIDFNDIRTAMTAKGHAMMGIGRASGDDRARQATEKAIRSPLLDDLRLENAKGLLVNVISSESLSLDEMSKISVIVEEITDIDEAHIFYGSVIDEKMGDDLHVTVIATGLTLDENAGEEPEVVEQPVPSVNSTQPVDPNLHTSALNSQKQSQAQYQENPIRSNTVPEQTKSKTNSIQDYLKRQQNK

SEQ ID NO: 22265 - protein, 478 aa, Nostoc sp. PCC 7120
MPVIASSIKFGTDGWRGVIGDEFTFERLALVAPVAAKVLYDTYYSTVGSRTIIVGYDRRFMAEDFARAVADAVTAVGFDVLLSEGYAPTPAFSWAAKQLNALGALVITASHNPGAYLGLKVKGYFGGSVSPEVTKDVEALLSTGVPPAATPGKLEKFDPWPSYTQGLEGKVDIAKIRKAIASGELTVFADVMHGAAATGLGRLLGERVQEINSDRDPLFGGGAPEPLPKYLSLLFETIRNHRETNPSSLSVGLVFDGDCDRIAAVDGNANFLSSQILIPILIDHLTQRRNFTGEIVKTVSGSDLIPKVAALHNLSIFETAVGYKYIADRMLAAPVLLGGEESGGIGYGSHIPERDALLSALYVLEAIVESGLDLGDYYRQLQEQTGFSSAYDRIDLPLASMDVRARLLQQLQSQPLTEIAGKAVIDCNTIDGYKYRLVDNSWLMIRFSGTEPVLRLYCEASTLKQVHQTLAWAKHWAE

SEQ ID NO: 22266 - protein, 539 aa, Malus x domestica
MASINPYCSSTALSPSPGHTILYPGTSLAANGRLSGFVTPSVSWKLFFHSKGSIKARALLGEDGLLSYPNGNPTGSEIQPDALGFGTVSAETTPTFSGFSSENDEGDLDHPIHGFSSIPEAIEDIRQGKMVIVVDDEDRENEGDLIMAASLATPEAMAFIVKHGTGIVCVSMKGEDLERLQLPLMVTQNEEKLCTAFTVSVDAKRGTTTGVSARDRAATVLALASRDSTPEDFNRPGHIFPLKYREGGVLKRAGHTEASVDLAMLAGLDPVAVLCEIVDDDGSMARLPKLLEFARAENLKIVSIADLIRYRRKRDKLVERAGVARIPTMWGPFEAYCYKSLLDGIEHIAMVKGEIADGQEILVRVHSECLTGDIFGSARCDCGNQLALAMKQIEAAGRGVLVYLRGHEGRGIGLGHKLRAYTLQDAGRDTVEANEELGLPVDSREYGIGAQILRDLGVRTMKLMTNNPAKYIGLKGYGLAIAGRVPLLAPITMENRKYLETKRAKMGHIYGSKSNGHVNGTIDESSSKIDNQSNDVSET

SEQ ID NO: 22267 - protein, 331 aa, Thermobifida fusca YX
MPVITYRQALRDTLRAEMHRDENVFLMGEEIGVFEGSYKITEGLLKEFGERRVRDTPIAEEGFVGAAVGAAMLGLRPVVEIMTINFSLLALDQIVNHAAKIYGMFGGQNSVPMVIRTPGGGGQQLGATHSQNVELYYAFVPGLKVVAPSTPADAAALLRAAIRDDDPVLFLENLGLYNTKGEVPDEEVVGEIGRAAVVREGTDITLVGYSRMAMIATQVADRLAEEGISVEVVDLRSLRPLDRETIVNSVKKTGCAVVAEDDWLTYGIGAEIAASIQEGAFDYLDAPVRRVAMAEVPLPYAKPLENAALPSAESVTTVIYETLRAVGRRVG

SEQ ID NO: 22268 - protein, 168 aa, Malus x domestica
MAGHSESKSIHDFTVKDAKGNDVDLSTYKGKVLLIVNVASQCGLTNSNYTELAQLYEKYKTQGLEILAFPCNQFGAQEPGTNDEIVEFACTRFKAEYPIFDKVDVNGDNAAPIYKFLKSSKGGLFGDSIKWNFSKFLVDKEGKVVDRYAPTTSPLSIEKDVKKLLGVA

SEQ ID NO: 22269 - protein, 525 aa, Zea mays
  misc_feature (302)..(302): Xaa can be any naturally occurring amino acid
LKQFVGRWKRSSRAACSDLNETLIYSDLKFLVYYGVCITFSFDLSLNLLVEEEDDDELFFVLVPAIYASLYSEKRPVHTSCRSGAQKVREMLDGHESWCKSEFRMEPEIFRAGARYLRKEGLLQDTSNMSIEEHLGIFMYMISQNASNAILQKEFQHSGETIHRKISEFFGIIPALTQRFVKLLSSLAIVYYVVMARASWNMNYEKILVDILHEHNHVKYRGQNGWAPEGWRSMTQMFNEKCPLAKFTKAQIQEKEKELKANYKVLKEARKQSGVGWSEAMGMIIAEPPIWANIIVSNPKVXRKFQSRPFPLYNQLSALYDGSCATGDLNFTSTQQHTSSRQQLHIQAEAEAEAEAMSSFRIDDDLGVNPDLNQISSNLHGLASSSTRVEIGGHDRTPASSEQRAESHGRKRKQSQIAGVLEEYLDYKRQHNDKLLDVVNQIDQQAEGCNKKEEYCIGKCVRVLESMEDITEEEMAAAMGVIKCEENREIFLNSQRPRVRLLWLRNEIDKQMSTNLNIFRCPPSL

SEQ ID NO: 22270 - protein, 439 aa, Nostoc punctiforme PCC 73102
MLESLGRIKNPLVRSIAAAATVSSVITLSAAVVIGVSNAKAKSAYQFGVYSSLFGTASGAVFGLVYTNKASGNKSTPDLKTLDSHVWQDWRNFVVVRKVKESEEITSFYLQPEDKGEITNFQPGQFLTIKLDIPGQDKPVIRTYSLSDYPENCEYYRLSIKREPAPNGLDVMPGIASNFMHDRIQEGSVILAKPPNGKFVLDVQKSIPAVLISNGVGITPMISMAKACSLLNPTRPIWFVHGARDGKFHAFRDEVREISRQNHNLNVHFRYSRPTPEDRGKYHSVGYVDAALIQELVRQEAEYFLCGSPSFMQSIMQGLKESGVPDSRVFFESFGKPMKSVSEKQTQTVTGDDKFAEIVFAKSGKTLTWQPSDGTILEFAEANDINPPFSCRVGVCGTCMCKIREGVVAYQEEPTATTDQGSVLICISQPGTSKLVLDI

SEQ ID NO: 22271 - protein, 284 aa, Listeria monocytogenes str. 1/2a F6854
MGEIIDGKKLAKEIQEKVTREVAELVKEGKQPGLAVVLVGDNQASRTYVRNKQKRTEEAGMKSVLIELPENVTEEKLLSVVEELNEDKTIHGILVQLPLPEHISEEKVIDTISFDKDVDGFHPVNVGNLFIGKDSFVPCTPAGIIELIKSTGTQIEGKRAVVIGRSNIVGKPVAQLLLNENATVTIAHSRTKDLPQVAKEADILVVATGLAKFVKKDYIKPGAIVIDVGMDRDENNKLCGDVDFDDVVQEAGFITPVPGGVGPMTITMLLANTLKAAKRIWKMN

SEQ ID NO: 22272 - protein, 79 aa, Arabidopsis thaliana
  misc_feature (68)..(68): Xaa can be any naturally occurring amino acid
MAGYMLSSATMVDCSAQATMVAPLNGLKSCADLPVTRMANNDITFMTRNGGRVNCMHVWTSIGKKKWXTLSHLTDLTES

SEQ ID NO: 22273 - protein, 548 aa, Vibrio angustum S14
MAIHPRAGQRAQQEDMHNIPALIANYFLIEPSAQDASQQVEFGTSGHRGTADKGTFNQHHIWAIAQAIAEVRAENGVMGPLFLGKDTHALSEPAFTSTLEVLVANNVQVVIQEGKGYTPTPGISHSILCYNKAHDDKADGIVITPSHNPPQDGGIKYNPVHGGPAESELTTAIERRANEIIANGLVDVKRVYIVDALASQLVVEQDLVAPYVADLVNVINMEAIQKSELKLGVDPLGGSGIEYWRQIAAHYALDLTLVNESIDPSFRFMSLDKDGVVRMDCSSPYAMAGLLAYKDNYDLAFGNDPDYDRHGIVTPAGLMNPNHYLAVCIDYLFRHRNDWAKQVAVGKTLVSSALIDRVVAALGRELVEVPVGFKWFVDGLFSGKLGFGGEESAGASFLRKDGTPWSTDKDGILLCLLAAEITAVTGKTPQEYYEELADKFGHSEYSRLQAVANKEQKAVLSKLSPEMVSAETLAGELITARLTHAPGNGAAIGGLKVTTENGWFAARPSGTEDIYKIYCESFKGKEHLALIEQEAQEIVSKVFADAGL

SEQ ID NO: 22274 - protein, 507 aa, Acidobacteria bacterium Ellin345
MLASVWRSGFRNAILIDSSPMRHVLALLALIAVALPALPQYDQPYRPQVHFSPREHWTNDPNGLVFFDGEYHLFFQYNPFGDVWGHMSWGHAVSKDLLHWEELPVAVPEKDGVMIFTGSVVVDHENSSGFCKPKTECLVAIYTGYQEHFPGGTRQAQYVAYSVDRGRTWTNYDKNPVIDLKMADFRDPSVFWDEERHRWVMAVSLPKEHDVQFYSSTNLKQWALLSEFGQLGDTDGDWECPDLLRVPSAQDPTKSTWALKVGLNPGAPQGGSGEQYFFGAFDGKTFTASHEKGAHGWTNYGKDDYCAINFNNIAKDEKPVLLGWMSNWEYAAKLPTSPWRGQMSLPRRLSFVKDVEGLGLKQEPVVETLRDGAATTLTSAPREAPFELQVTFDPKAEQIFGMRIYSDKEHYVEIGFDRKNQQLFMDRTKSSVTVAQEFPGTTVAPLTEGRGFDLHVIVDRSSVEAFAQDGTIAMNNLVFPTKPQVRVETFGSKPTSAQVWKLKSIWK

SEQ ID NO: 22275 - protein, 396 aa, Oryza sativa
MAAAEERDAAAASSLAEFHASRAGVRGLVESGATAVPPLFLPPGCGRERSTPPTPPRATAFAIPTVDLSLPRSATVPLVRAAATSCGFFHVTSHGVPRGTVASAVAAVRAFHEQPAASRSPCYSLAPVGGVAYSTIPIQQPPPQDGSSSDHRAATAASPLLPWRDSLVVRFGPGPEAPDLGRLPASCRDALPEYQRSLTVFGKEMAGLLSEALGGGGGGGGVGAERLEREMQVEGWLMACHYYPPCPEPERVVGSLEHTDPSLFTVLAQDAVGGLQVRREEEEGGGGGGEWVDVAPVAGALVVNVGDVLKMVSNEEYKSVEHRVVIKSSQDARVSIAVFFNPAKRDASDLFGPLPELLTAERPARFRRFSVPEFMRSRRESGHGKSSIDSFRIAAD

SEQ ID NO: 22276 - protein, 457 aa, Saccharophagus degradans 2-40
MNNANQQKAHLVIVGNGMATGRLLDELIKRDANAYNITVIGDEPEGSYNRIMLSPVLAGETELATIINKPAAWYAQNNIRFVAGVRANAINRQAQTVALADGSCIAYDELVIATGSRPALIPATNQHLQNIFSFRTIEDVNSIASCAQAGRKAVVVGGGLLGLEAAYGLAQKGVQVTLVHRSKGLLNRQLDSGAGEFLQQVMASKNIQFALGTEVAAFNSDALGGSGFASETLKSATLTNGETIECDLAVISTGITPNKELGQEAGLACGRAIIVDDYMTSSDNCISALGECCEHKGETFGLVEPIWHQCISLAEKLCFKRNVAFVNPVVATKLKVSGVQLFSAGEHLTGDDCREIKMVDVKNKIYRKIVLRNNRIVGVVLFGDTRSGADYFELMQQAVDVSSVAALLVMGKAFYAEQLQAAQNLNQCANQADFSQADSLNTASVTVSKNANNDIAA

SEQ ID NO: 22277 - protein, 151 aa, Thermoplasma volcanium GSS1
MIAMKGYSMSVDENNARARIVEADISLKDAVNIAHHIRGMKLDYAKQILEDVVSKKYAIPYFRYLDSVSHRPGKGPGRYPVKAAKVFIDLLSNVENNAEFKGMNTDSLIIKHVAANKGRMIKKYTPKAYGRAGANFKDLINLEVIVTEGDQ

SEQ ID NO: 22278 - protein, 112 aa, Thiomicrospira crunogena XCL-2
MKMVTSIIKPFKLDDVREALHDIGVHGMTVTDVKGYGRQKGHTEMYRGAEYVVDFLPKLKIEIAVSGDKVDQVIEAITQTAQTGKIGDGKIFVTSIEQTVRIRTGETGPEAL

SEQ ID NO: 22279 - protein, 279 aa, Streptomyces avermitilis MA-4680
MTASPEESVDSVDPVDPVDSLVLHATDNHVSRITLNRPDALNAITPDQRERLIRLLGDASADPAVRAVVITGTGRGFCAGADLRGGPPAGERTAGDVARVIRSGAQRLICAVLDCEKPVIAAVNGTAAGIGAHLAFACDLVLAADSARFIEVFVRRGLVPDGGGAYLLPRLIGPQRAKELMFFGDALTAADAGRLGLVNRVVPADDLEKTAREWSARLAAGPTRALALTKQLVNASLDTDRGSAFAAEAAAQEINMTTADAAEGVTSFVERRSPRFEGR

SEQ ID NO: 22280 - protein, 190 aa, Saccharophagus degradans 2-40
MKRKTNTIKQLLAPSFLLACTFTASTHAAEESAQCPSYLDHSFKKLHSTQTVNLCELYTGKPLLIVNTASHCGYTKQFGGLEKLYQSYKDQGLQVIGFASDDFKQAAKSEMEAATICYKNYGVTFTMLAPTTVTGEKANAVFSHLNANTSAPSWNFNKYLITKNGQNIEKFNSDVTPLASDLEKKVQKAL

SEQ ID NO: 22281 - protein, 198 aa, Chlorogloeopsis fritschii PCC 6912
MVVSIAKKYMNRGLSFQDLIQEGSLGLIRAAEKFDHEKGYKFSTYATWWIRQAITRAIADQSRTIRLPVHLYETISRIKKTTKLLSQEMGRKPTEEEIATRMEMTIEKLRFIAKSAQLPISLETPIGKEEDSRLGDFIESDGETPEDQVSKNLLREDLEKVLDSLSPRERDVLRLRYGLDDGRMKTLEEIGQIFNVTR

SEQ ID NO: 22282 - protein, 998 aa, Gloeobacter violaceus PCC 7421
MSEPTIDRELDLHTFWQDASEPAPDTTIPAVALANGKGHLDYTDRFAGRHIGPDGREVERMLSTLGFESLDALIERAVPAQIRMERPLRLPKGLSEYEVLARLRAIAAQNRVFRSFIGMGYAECITPLVIQRNILENPGWYTQYTPYQAEIAQGRLEALLNFQTMVIDLTGLEIANASLLDEGTAAAEAMAMSFGIKAKGRAKRFFVSEHCHPQTIAIVQTRALPLGIDVIVGDHRAFDFQVQPCFGALVQYPATDGALFDYRAFVEAAHRAGALVTVAADLLSLALLVPPGEFGADIAVGNTQRFGVPMGYGGPHAAYFATRDAYKRQIPGRIVGVSTDAHGQRALRLALQTREQHIRRDKATSNICTAQVLLAVMAGMYAVYHGPVGLRRIAARIHRLTRTLAAGLVRLGHLLGSAPYFDTLRVELNGIDTRTIVERAEARRLNLRVLDERTIGVSLDEATSTRDLEDLLAIFALEGEPDFTIAELAAEVSQVQAPEVFGRQSAYLTHPVFNRYHSETELLRYMRRLESRDLSLTTSMIPLGSCTMKLNATAEMLPVSWPEFAKLHPFVPLSQARGYQILFEQLEAALAEITGFTAVSLQPNAGSQGEYSGLLVIRAYHHSRGEAHRDVCLIPQSAHGTNPASAVMAGMQVVPVACDEQGNIDVADLEAKATTHAARLAALMVTYPSTHGVFEEAIVRICAIVHGRGGQVYMDGANLNAQVGLCRPGDFGADVCHLNLHKTFCIPHGGGGPGMGPIGVASHLAAFLPRHPVVSQVGGQAGIGAVAAAPWGSASILTISWVYIFLMGGPGLTEATKVAILNANYIAHRLAPHYPVLYKGAGGLVAHECILDLRKLKTTAGIEVDDVAKRLMDYGFHAPTVSWPVAGTIMIEPTESESLEELDRFCEALIAIRHEIAAIERGEADRADNPLKNAPHTAAVLLADSWEHPYSRAQAAYPAPWLYQHKFWPVVSRIDNVYGDRNLICSCLPMEAYAQDGK

SEQ ID NO: 22283 - protein, 203 aa, Anabaena planctonica NIES-810
VQSNLRLVVSIAKKYMNRGLSFQDLIQEGSLGLIRAAEKFDHEKGYKFSTYATWWIRQAITRAIADQSRTIRLPVHLYETISRIKKTTKLLSQEMGRKPTEEEIATRMEMTIEKLRFIAKSAQSPISLETPIGKEEDSRLGDFIESEGETPEDQVSKNLLREDLEKVLDSLGPRERDVLRLRYGLDDGRMKTLEEIGQIFNVT

SEQ ID NO: 22284 - protein, 431 aa, Thermobifida fusca YX
MSEIYMPRLSDTMEEGVISSWVKQVGDKVSVGDVLVEIETDKAVMEYEAYEDGYLVQQTVREGETVPIGAVIGVIADSPDAVPAAPEGGEGAEQKAEEPQQPAPAAQEAKEEQPTVPAPAAPAEQGGKPRPLSSPLARRLAREYGLDITKIQGSGPKGRVVRADVEAAAQQKREQEAAAPQPAAAKAPAPAAAPPQPEFEDLRASEEVPVTNIRRVIARRLTQAKQEIPHFYLRRRIDAEALREFRAQINEQLAPTGVKVSVNDLIVKAVATVLRDHPEVNSSWVDDKLLRHKRINVGIAVAVDTGLVVPVLHDADTLALSEVARRSRALVEKARDGKLSPQDMSGGTFSVSNLGMFGVESFSAVINPPEAAILAVGAMQQEPVVRDGEIVARHTIALELSVDHRAVDGAVGAAFLKDLAEVLESPMRIVL

SEQ ID NO: 22285 - protein, 203 aa, Gloeobacter violaceus PCC 8105
VQSNLRLVVSIALKYMNRGLSFQDLIQEGSLGLIRAAEKFDHEKGYKFSTYATWWIRQAITRAIADQSRTIRLPVHLYETISRIKKTTKLLSQELGRKPTEEEIATRMEMTIEKLRFIAKSAQLPISLETPIGKEEDSRLGDFSEADGETPEDKVAKNLLREDLEAVLNTLSPRERDVLRLRYGLDDGRMKTLEEIGQLFNVT

SEQ ID NO: 22286 - protein, 203 aa, Fischerella major NIES-592
VQSNLRLVVSIAKKYMNRGLSFQDLIQEGSLGLIRAAEKFDHEKGYKFSTYATWWIRQAITRAIADQSRTIRLPVHLYETISRIKKTTKLLSQEMGRKPTEEEIATRMEMTIEKLRFIVKSAQLPISLETPIGKEEDSRLGDFIESDGETPEDQVSKNLLREDLEKVLDSLSPRERDVLRLRYGLDDGRMKTLEEIGQIFNVT

SEQ ID NO: 22287 - protein, 576 aa, Listeria innocua
MKKVKASETLVQTLKNWDIDHVYGLPGDSIDTVVDALRKEQEAIEFIHVRHEEVASLAAAAYTKLTGKIGVALSIGGPGAIHLLNGMYDAKMDHVPMLVLAGQVTTDVLNTGFFQEVNLPAIFEDVAVYNKQIDNAETLADVVDEAIRTAYQEKGVAVLTIPNDIPSQEIKASLKAKPVKFEQEIPKLDEKAIQEAVTLIDKAEKPVILAGLGTKHAGPELIAFAEKAKIPIIHSLPAKTIVPDDHPNALGNLGKIGTKPAYEAMQETDLLLMFGNDYPYSDYLPKKAECIQIDINPAKISKRYQATVGLVGDAAEIISNLTTKIAPVEERKFLQACQENMQEWWKWLEEDISQTTDPIAPEVVMANIQKIADKDAIFSIDVGTATVWSTRYLHLTPENDFIVSAWLGTMGCGLPGAIAAKKAYPDRQAIAIVGDGGFSMVMQDFVTAVGLDMPMIVVVLNNQQLSFIKYEQQSAGELNYAIDLPDINYAKFAESCGGIGFRVEKMADLEAAFENAKLATKPVIIDVSVDSAAAPLPGKIVMDEALGYTKFEIQSVLEDHRFAKMPPLKTILRRFL

SEQ ID NO: 22288 - protein, 233 aa, Zea mays
MDAADVWGRSSSSSSSSAAAARRLQARYDLYMGIDDADAGLDEVTEPRGGAESYNCPFCGEDFDFVGLCCHIDDEHAVEAKSGACPICATRVGMDLIGHLTMQHGSYFKMQRRRRVRKVSSGSHSLLSLLRKDLRNGSLQSFLGGSSYVSNPPAAAPDPFVSSLICTLPVAEPSKDLHSDSSDNNFLLNKFPDEKPVERAEPSLSEKDQKERVQRSKFVRGLVLSTIFDDDNL

SEQ ID NO: 22289 - protein, 300 aa, Ehrlichia chaffeensis str. Arkansas
MEENIINGKVIAEDITSTLAVCINDLKVQHNVTPCLIVILVGDDPASHLYVRNKQRKAEMLGLRSETMLLPSTTSESSLIDTIRRLNNDDSVHGILVQLPVPKHIDKNLIINTIDPRKDVDGFHNENVGRLFTGQKKDCLIPCTPRGCLYLIKTVTRNLSGSDAVVIGRSNIVGKPMACLLLGENCTVTTVHSATRNLPDYCSKADVLVAAVGIPHFVKSSWIKPGAIVIDVGINAIEEGGVKKFVGDVDFSEARNIASAITPVPGGVGPMTIAFLMVNTVIAACNQAGIENFVEKYLDL

SEQ ID NO: 22290 - protein, 374 aa, Sulfitobacter sp. EE-36
MQFETPGPVEAELADAIAPIEEIIEEARQGRMFVLVDHEDRENEGDLVIPAQFADADAINFMATHGRGLICLPMTEERVNTLGLPMMAVNNSARHETAFTVSIEAREGVTTGISAADRALTVKVAIDEDKGAVDIATPGHVFPLRARDGGVLVRAGHTEAAVDISRLAGLHPSGVICEIMKEDGTMARLPDLVAFCQQHDMKIGTISDLIAYRHKHDNLLVERDSRTVTSAYGGDWKMQIFTDEISGTDHVVLSKGDITTDAPVLVRTHAINALEDILGLGPSPADELPRAMQIIADEGRGAVLLFRDPDPRLRFEDEEDDRPRTVKRTGLGSQIMASLGLHKLILLTDNPDTRYLGLDAYDLSIVGTRPITQE

SEQ ID NO: 22291 - protein, 542 aa, Fusobacterium nucleatum subsp. vincentii ATCC 49256
MAKKSYEVLNDPFLNKGTAFTKEERKELELTGLLPPQIQTIEEQAEQVYAQYKSKEPLINKRRFLMEIFDTNRTLFYYLFSQHVVEFMPIVYDPVIAENIENYSELFVNPQNAVYLSIDSPETIEESLRNATKDREIRLIVATDAEGILGIGDWGTNGVDISVGKLMVYTAAAGIDPKSVLPVVLDAGTNRETLLEDKLYLGNRHKRVYGDEYYDFVDRFVQTAEKLFPRLYLHFEDFGRSNAANVLHKYWKTYPVFNDDIQGTGIITLAGILGALKISGEKLTDQRYMCFGAGTAGAGIADRIYQEMLQQGLSENEARSRFYLVDKQGLLFDDMNDLTPEQKPFARKRTEFNNANELTNLEAAVKAVRPTILVGTSTQPNTFTETIVKEMASYTARPIIFPLSNPTKLAEATAENLIKWTEGKALVATGIPADPVEYNGVTYEIGQANNALIYPALGLGAIASTAKLMTNEMISKAAHSLGGIVDTTKPGAATLPPVSKLTEFSQRVAEAVGQCALDQKLNREDITDIKEAIEKIKWTPKY

SEQ ID NO: 22292 - protein, 248 aa, Methanosarcina acetivorans C2A
MSYLIIVRHGESGWNVDGRFGGWVDVPLTGKGIKEALLCAAELEGIDLDVTFTSKLIRAQETLFLILSKQKKIGVFVHEEAGTGEDRTEREDGSRKDRKEKRYAYPPNTEKNLIPIHSNEALNERYYGILQGKKKDKMKAKYGEEQILHWCRSFDEGPPEGESLKDIYRRAVPYFEKEIFPILQDGKNVIVCAHQNSLRALIKHIEGISNEDIRKIRLANARPVIYTFSGGRLVRENAETDPSVKRNL

SEQ ID NO: 22293 - protein, 125 aa, Brassica napus
  misc_feature (6)..(6): Xaa can be any naturally occurring amino acid
  misc_feature (9)..(12): Xaa can be any naturally occurring amino acid
  misc_feature (14)..(16): Xaa can be any naturally occurring amino acid
  misc_feature (18)..(19): Xaa can be any naturally occurring amino acid
  misc_feature (22)..(23): Xaa can be any naturally occurring amino acid
  misc_feature (25)..(25): Xaa can be any naturally occurring amino acid
  misc_feature (28)..(30): Xaa can be any naturally occurring amino acid
  misc_feature (33)..(34): Xaa can be any naturally occurring amino acid
  misc_feature (36)..(38): Xaa can be any naturally occurring amino acid
  misc_feature (40)..(40): Xaa can be any naturally occurring amino acid
  misc_feature (44)..(44): Xaa can be any naturally occurring amino acid
  misc_feature (48)..(48): Xaa can be any naturally occurring amino acid
  misc_feature (52)..(52): Xaa can be any naturally occurring amino acid
  misc_feature (56)..(56): Xaa can be any naturally occurring amino acid
  misc_feature (63)..(63): Xaa can be any naturally occurring amino acid
  misc_feature (84)..(84): Xaa can be any naturally occurring amino acid
  misc_feature (87)..(87): Xaa can be any naturally occurring amino acid
  misc_feature (100)..(100): Xaa can be any naturally occurring amino acid
  misc_feature (110)..(110): Xaa can be any naturally occurring amino acid
  misc_feature (112)..(114): Xaa can be any naturally occurring amino acid
  misc_feature (117)..(124): Xaa can be any naturally occurring amino acid
DQSSMXSSXXXXTXXXQXXMVXXFXVLXXXAAXXVXXXAXNDIXSIAXNGGXVSCXKVWPPVXKKKFETLSYLPDLTEVELGLXKSXTLLRNKCIPCVEXELEHGFCAPXSXXXPPXXXXXXXXM

SEQ ID NO: 22294 - protein, 159 aa, Streptococcus pyogenes M49 591
MPNLYDFTVKAQNGNDLSLAAYKKKVVLIVNTATKCGLTPQYQALQALYDTYHDKGFEVLDFPCNQFLNQAPGDAEEINHFCSLTYHTTFPRFAKIKVNGKDADPLFTWLKEEKSGPLGKRIEWNFTKFLIGQNGQVIKRYSSKTDPKLIEEDLKALLG

SEQ ID NO: 22295 - protein, 265 aa, Treponema pallidum subsp. pallidum str. Nichols
MGVIDWLRRRHAVTHIFQQPLNEEKQDMIRGIVDLSDTSVREVMIPRIDVDFLELSMSGETLVEKVTESGHSRFPVYEQTIDNVVGVLYVKDLIKLFGRPQEVRLERLLRKPFFVPESKRIDSLLREFKRRHVHIAIAVDEYGGVSGIACMEDIIEEIVGDIQDEFDHEREDIEPLGQGVWLCDARVDLEDLSECLHTVFPSQEFGTLGGFVFNLFGKIPVKYEKVSWGAFDFIIQDMEAHKINTIKIVSVLRGDSEPACVSERP

SEQ ID NO: 22296 - protein, 394 aa, Vibrio parahaemolyticus RIMD 2210633
MLSNQTIEIVKATAPLIAETGPKLTAHFYDRMFTHNPELKDIFNMSNQRNGDQREALFNAICAYAANIENLPALLGAVEKIAHKHTSFLITKDQYQIVGKHLIATIDELFNPGQEVLDAWAEAYGVLANVFIQREEQIYQANASQEGGWRGLREFELVGKQLESEHICSFVFKPTDGSKVTKYKPGQYLGIYINSDKFENQEIRQYSLSSSVQENTYRISVKREQGGKVSNYLHDELNIGDKVKLAAPAGDFFMDVDTNTPVVLISAGVGLTPTLSMLESLTEHHAPVTWVHATENSKHHAFKEHVNQLVTAKENMNALIWYNQPTAEDKIGEDFHFTGFVNLHEIEAALKQDNVQVYFCGPVGFMQHVAKQLQELGVPQEQFHYECFGPHKVV

SEQ ID NO: 22297 - protein, 320 aa, Agrobacterium tumefaciens str. C58
MTQSPRATIARNTPNIAVVGVGGGGGNAINNMIAEGISGVDFIAANTDAQALKKTNAPRLVQLSSELTGGLGAGADPEVGRQAAIDSLDEIMDHLSGYDMCFITAGMGGGTGTGAAPVIAEACRAKNILTVGVVTLPFSFEGARRMRAAEYGFANLLNTADTVIVIPNQNLLRIADAGTTFENALKTADKVLSLGVRCITDLILREGLVNLDFADVRYVMKNGGRALMGTAQAKGPKRASEAAAAAIANPLLGEPSLKEARGALVAISGGNDLTLYEIDEAMTLVREAVSEETDVVMGASFDPTLDGAFKISVVATGLRN

SEQ ID NO: 22298 - protein, 264 aa, Oryza sativa
  misc_feature (135)..(135): Xaa can be any naturally occurring amino acid
QPSSPFKWRDMLHHSPVPLFHSPASSPASRSPSASWLAGRERERLFSSFVRNALGSCVDYAPVAALPLGVSAAVGVGAGELAFELDEHLSEAEPSCEPYARDLLAGAQARHRIFHDELVVKAFFEAERAHRGQVXLSMSLNLVPFVLCLCDQTRASGDPYLQHCVETAVLLAKIGANATVVSAGLLHDTIDDSFMDYDQIFRMFGAGVADLVEGVSKLSHLSKLARDNNTASRTVEADRLHTMFLAMADARAVLIKLADRLHNM

SEQ ID NO: 22299 - protein, 121 aa, Hordeum vulgare
MAAPRGAALVLAMVLAAMVVAPPVTVRAAISCSAVYSTLMPCLQYVQQGGTPARGCCAGIQNLLAEANNSPDRRTICGCLKNVANAAPGGSEITRAAALPSKCNVNLPYKISPSVDCNSIH

SEQ ID NO: 22300 - protein, 112 aa, Saccharophagus degradans 2-40
MKLITAVIKPFKLDAVREALSEIGVQGITVTEVKGFGRQKGHTELYRGAEYVVDFLPKTKLEVAVADNQVDSVVETISKAAHSGKIGDGKIFVSALEQVIRIRTGESGEDAL

SEQ ID NO: 22301 - protein, 411 aa, Saccharophagus degradans 2-40
MENSIFELQYALDTFYFLVCGALVMWMAAGFAMLEAGLVRSKNTTEILTKNVALFAIACIMYFVCGYAIMYGGDYFLTTITGDGVTGAEEPASYAPSADFFFQVVFVATAMSIVSGAVAERMKLWAFLAFAVVMCGVIYPVEGGWTWGGNSVFGMYTLGDLGWSDFAGSGIVHMAGAAAALAGVLVLGARKGKYGPNGQINAIPGANLPLATLGTFILWMGWFGFNGGSVLATASVESANSVAIVFMNTNAAAAGGLVSALILARILFGKADLTMALNGALAGLVAITAEPSTPSALQATLFGGLGGLLVVFSILTLDKLKIDDPVGAISVHGVVGLLGLLLVPVTNDASSFSGQIIGALTIFTWVFGTSLAVWFLIKLVIGVRVSEEEEFEGVDLSECGMEAYPEFTNGK

SEQ ID NO: 22302 - protein, 533 aa, Desulfitobacterium hafniense DCB-2
MVIITSWKRFKEYLYYDQELELLLDISRMNFSAEFLTELAEPMRDAYHQLQLLEKGALANPDEGRMVGHYWLRNPDLAPTEEIAQDIKETLKEILDFAEQIHSGRLQGEKGNPFRNILLVGVGGSILGPRFVADALASSRDKMKAFFIDNGDPDGIDRVLSRIGEELPATLCLIISKSGGTIETRNGMLEVRRAYEEAGLSFPDHAVAITQRGSQLDKLSQKEGWLRAFPMWDWVGGRTSLLSAVGLLSLALQGIDVAGLLQGAKDCDGRTRRPDTLANPGALLALMWYYSTQGQGGKQMVVLPYKDRLELFTKYLQQLIMESLGKEKNLQGETVHQGITVYGNKGSSDQHSYLQQLLEGPDNFFVTFIEVLKDRQGSSAYMEENSTSGEYLQAFLLGTREALTQKGRESLTITVKEVNAYTIGVLIALFERAVSIYALLVGINAYHQPAVEMGKKAAGQAIQLKNNIVECLKKHPDKRFSVHEIALAIGEEAHQEMVFKLLLHLTTNPEHGVNMAAGHPLPESRFFVSGPIL

SEQ ID NO: 22303 - protein, 112 aa, Saccharophagus degradans 2-40
MKLITAVIKPFKLDDVRNALSEIGVQGMTVTEVKGFGRQKGHTELYRGAEYVIDFLPKVKLELVLGDELIDQAVEAISKAAQTGKIGDGKIFITPCEEVIRIRTGETGPEAV

SEQ ID NO: 22304 - protein, 455 aa, Debaryomyces hansenii
MVLPHEPEFQQAYNELVSALEDSTLFTEKPEYKKVIPVVSVPERIIQFRVAWENDNGDVEVNNGYRVQFNSALGPFKGGLRFHPSVNLSILKFLGFEQIFKNALTGLSMGGGKGGCDFNPKGRTDSEIRRFCVAFMRQLARYIGSDTDVPAGDIGVGSREVGYMFGAYKQMQNNWSGILTGKGLSWGGSLIRPEATGYGVVYFVEKMIEKATGGKESFKGKRVAISGSGNVAQYAALKVIELGSTVVSLSDSKGCIISQTGITPDQIKAIAAAKIHFKTLEEITKESASLFSGSNEVQYIAGVRPWTHCGQVDVALPSATQNEVSGEEAKALVEAGCKFVAEGSNMGSTKEAIDVFEANRSKAVWYAPGKAANCGGVAVSGLEMAQNSQRVTWAAEEVDEKLKNIMYTCFDNCYANAAKYSAEKDAENLPSLLKGANITGFIKVADAMFDQGEVF

SEQ ID NO: 22305 - protein, 401 aa, Vibrio angustum S14
MTIEILVPDLPESVADATVATWHKQPGDAVSRDEVLVDIETDKVVLEVPAPEDGVLEAIFEGEGTTVLTKQLIGKIKVGAVAGEPTKDVPTEAEASPNKRNTASLTEETSEALSPAVRRLLSEHGIDAGAVKGSGVGGRITREDVEAYLKIQSAPTVTKAPVVDAPLAHRSEKRVPMTRLRKRVAERLLEAKNSTAMLTTFNEVNMKPIMDLRKQYKDIFEERHGIRLGFMSFYVKAVVEALKRYPEVNASIDGDDIVYHNFFDVSIAVSTPRGLVTPVLRDCDKLSLAEIEKGIRELAIKGRDGKLTVEDLTGGNFTITNGGVFGSLMSTPIINPPQAAILGMHKIQDRPMAVNGQVEILPMMYLALSYDHRLVDGRESVGYLVTIKELLEDPTRLLLDV

SEQ ID NO: 22306 - protein, 330 aa, Streptococcus pneumoniae R6
METKTMSFRDTIILAMSEEMRRDENVFLMGEDVGVFGGDFGTSVGMLEEFGPERVRDCPISEAAISGAAAGAAMTGLRPIVDMTFMDFSVIAMDNIVNQAAKTRYMFGGKGQVPMTVRCAAGNGVGSAAQHSQSLESWFTHIPGLKVVAPGTPADMKGLLKSSIRDNNPVIILEYKSEFNQKGEVPVDPDYTIPLGVGEIKRQGTDVTVVTYGKMLRRVVQAAEELAEEGISVEIVDPRTLVPLDKDIIINSVKKTGKVILVNDAHKTSGYIGEISAIISESEAFDYLDAPIRRCAGEDVPMPYAQNLENAMIPTVESIKDAIRKTYNKD

SEQ ID NO: 22307 - protein, 127 aa, Zea mays
MAARSSSQQLVAAAAVLAAALLLLAAGAGTASAAVSCGEVTSSVAPCLGYAMGSAASPSAACCSGVRSLNSRASSTADRQATCNCLKSMTGRLGGGVSMANAANIPSKCGVSVGVPISPTVDCTKIN

SEQ ID NO: 22308 - protein, 416 aa, Listeria monocytogenes str. 1/2a F6854
MAVEKITMPKLGESVTEGTISSWLVKPGDTVEKYDAIAEVLTDKVTAEIPSSFSGTIKEILAEEDETLEVGEVICTIETEEASSSEPVAEAEQTEPKTPEKQETKQVKLAEAPASGRFSPAVLRIAGENNIDLSTVEGTGKGGRITRKDLLQVIENGPVAPKREEVKSTPQEKEATPNPVRSAAGDREIPINGVRKAIAKHMSVSKQEIPHAWMMVEVDATGLVRYRNTVKDSFKKEEGYSLTYFAFFIKAVAQALKEFPQLNSTWTGDKIIEHANINISIAIAAGDLLYVPVIKNADEKSIKGIAREISELAGKARNGKLSQADMEGGTFTVNSTGSFGSVQSMGIINHPQAAILQVESIVKRPVIIDDMIAVRDMVNLCLSIDHRILDGLLAGKFLQAIKANVEKISKENTALY

SEQ ID NO: 22309 - protein, 116 aa, Brassica napus
MEGLLKLSTLVIVCMLVSAPMASEAAISCGAVASNLGQCINYLTRGGFVPRGCCSGVQRLHSMARTTRDRQQACRCIQGAARALGSRLNPGRAARLPGACRVRISYPISARTNCNK

SEQ ID NO: 22310 - protein, 290 aa, Vibrio angustum S14
MSVLINKDTKVICQGFTGGQGTFHSEQAIEYGTQMVGGVSPGKGGTTHLGLPVFNTVREAVEVTGATATVIYVPAPFCKDAILEAIDAGIELIVTITEGIPTLDMLDVKVRLDEAGVRMIGPNCPGVITPDECKIGIMPGHIHKAGKVGIVSRSGTLTYEAVKQTTDEGFGQSTCVGIGGDPIPGSNFIDILEMFEKDPATEAIVMIGEIGGTAEEEAAAYIKENVTKPVVSYIAGVTAPPGKRMGHAGAIISGGKGTAEDKFAALEEAGVKTVKSLADIGKALREVTNW

SEQ ID NO: 22311 - protein, 633 aa, Pseudomonas fluorescens Pf-5
MTLRRRWDIQTRTQLISLGPALLLTLLLISFFTFVRIQDLRQELNHTGQLIANQLAPATEYGVISGNNEGLESLLQATLATPHVHFLEVQDSANNILVYVEQPSASHNHAQQIKVFQAPVRLQRIQVHNDFLQNDPASMAAQGDGYLGRVIVGMSNDAFSQRQQEILLKAAILALFALLFTFLLARRLAAGLAQPIRAMGDAVKAIQEGDFKTPLPIVDDGELGNLARHINNLAAGLELASREQHQAMSQLIQTREEAERANKAKSDFLAMMSHELRTPMNGVLGMLQLLETTQMTQEQSEYAALASESTEHLLKVINDILDFSRIERSALELEHIPFNLAELITSSAQAFQHSALQRGLDLQLRLPPGMESLQVKGDPTRIRQILVNLIGNALKFTEQGSITIEPQWQALDHELLWFTCAVRDSGIGISPASLELMFDAFQQADSSISRRYGGTGLGLPIARTLAERMGGTLRAQSEEGRGSVFTLEIPLALFQQSLPVLAPRVSSNQHSGEGRNVLLVEDNPVNQTVIQAMLRSLGFTVSIVTDGAQAVRSAESLIFEAILMDCRLPLVDGYEATRQIRQLPGCADLPIIALTANALQGDREACLAAGMNDYLAKPFKRADLQQILQRWVQ

SEQ ID NO: 22312 - protein, 595 aa, Dunaliella tertiolecta
MASVDCTLVSARGIKDVEIVGKQSPYAVLTVGPKTFKSGTANGGGSDPVWNQTFSFTNVTPDSSVKLEIFNSNVVLRDVAIGGCKAPMDKALSAGKDELTLPIITKKGKPHGEVKLILTLKPDATKQMVTSHKTRKAAGAWILPTYGNTDCWKDYEPGTLLGKGTFGTTYLATEKKTGQKCAVKVISKRKLTTPDEVDDVKKEVQIMHHLAGHPNVVGLKGVYEDKSNVCLAMEVATGGELFDSIVKRGHYSERDAAELIRTIVSVVAHCHNMGVIHRDLKPENFLLSDKSPRAQLKATDFGLSSFFQEGQVFTDIVGSAYYVAPEVLRRSYGKEADIWSCGIILYILLCGFPPFHGDSEKKIFEAIISKSVDFNTQPWPRISAPAKDCVKRMLQRDPKKRATANEIMQHDWMRENGVASDEPLEMEVVSRIKNFSGMNKLKKEALKVIAVNLPIDEISGMREMFMDIDKDKSGNITIDEFAAALHKKGQIVTEKEIEKIMKEADVDGDGTIDYEEFLAATINLGKLQREENLKTAFEHFDLDGNGEISHNELVQCLSKLGINDAHVKDIIKEVDADGNGQIDYNEFCIMMRNLD

SEQ ID NO: 22313 - protein, 391 aa, Oceanicola granulosus HTCC2516
MGKEKFERSKPHCNIGTIGHVDHGKTTLTAAITKYFGDFQAYDQIDGAPEEKARGITISTAHVEYETDNRHYAHVDCPGHADYVKNMITGAAQMDGAILVVNAADGPMPQTREHILLGRQVGIPAMVVFLNKVDQVDDPELLELVEMEVRELLSEYEFPGDDLPIVAGSALAAMEGRDEEIGENKIRELMAAVDEYIPQPERAVDQPFLMPIEDVFSISGRGTVVTGRVERGVVNVGDELEIVGIRDTRKTTCTGVEMFRKLLDRGEAGDNIGALLRGIDRDGVERGQVLCKPGSVKPHTKFEAEAYILTKDEGGRHTPFFANYRPQFYFRTTDVTGTVTLAEGTEMVMPGDNVSFKVELIAPIAMEEKLRFAIREGGRTVGSGVVSKIIE

SEQ ID NO: 22314 - protein, 328 aa, delta proteobacterium MLMS-1
MDYYKVLGLEKNAKPEDIKKAYRKLALKYHPDHNQGNKEAEAKFKEISEAYAVLSDPEKRQQYDTHGSAGFQQRYSQEDIFRNADINDILREFGINLGGGRATFRSGGGFFDDLFGVGGSGGMGGAGGRGGQGREFHFFRQGGAPGGGQQQMVKGNDLSLELPVSLEDVLKGAEKTIALGQQGGTAGQKVSIKIPAGIEDGKKLRLSGKGAPSPLGGPPGDLLLLIRIQPHPTFSREGNNLVVDKEIPISAALLGSELAVPTLEGRKLKVKVPPGSKPGSRLRLKGHGLPSGPRGSKGDLLVRINLAIPGKLSDQQKELARQLAAAGL

SEQ ID NO: 22315 - protein, 112 aa, Brassica napus
  misc_feature (105)..(105): Xaa can be any naturally occurring amino acid
MSVNVKEEPVLAPNCDVVENSELEVLNGDEESKLEDYGTCVDVITERVNQLEQNVVEVEQFYSTIDGACQTNTSKSISGGKTVAMSQTSKCTSAGKKKPFSKHVXSSPELMR

SEQ ID NO: 22316 - protein, 224 aa, Striga asiatica
PGRSLLDIGRFCTGYGIGIFSYVVPVFISEIAPKNLRGGLATLNQLMIVIRIIYSVYLRNSVNMENLALTGLLPCLLLLVGLFFIPESPRWLAKIGRQKEFELALRKLRGKNANVSKEAAEIQASFDTLRDLPKVNMFELFDAKYIRPLIVGVGLMFSQQFGGIKRVGFYTSQTFVAAGFSSGKMGTILYAIIQVPVTVVGAVLMDKSGRRPLLMVSPKDCPIL

SEQ ID NO: 22317 - protein, 248 aa, Candida glabrata CBS 138
MNVQDRRRLLGPSSAKPLVFSTTASKPDETKKHDDNNEEKIALHTGFIANCNGSALVEIKDTKITHHQTSLITSVYGPKSVRGSFTSQASLSIQLKNGLLEKYESRELKEVANFLTSIFNSVINLKRYPKSGIDIFIYITYEKSLENFKEQEPAAPVRKSNIYKILPHCISSITMALIDADIEIIDLAAAGQHNGSVASFIKGGQEVVGFWKDNEDNSDIVECIETCKSQYLEYRALMRTYLANRAAA

SEQ ID NO: 22318 - protein, 252 aa, Zea mays
  misc_feature (219)..(219): Xaa can be any naturally occurring amino acid
PSTSRLPALPQKKTARLLLLLRRAGITCGILAVLGCSDWSQAKRARILACSRRLKHRGPDWSGLYQHEGNFLAQQRLAVTKRHLVETEAAEKFGTELHSFVVGLEGSPDLKAAREVADYLGTIHHEFHFTVQDGIDAIEEVIYHDETYDVTTIRASTPMFLMARKIKSLGVKMVLSGEGSDELLGGYLYFHFAPNKEEFHRETCRKVKALHQYDCLRAXKATSAWGLEVRVPFLDKEFINVAMGMDPEWKMY

SEQ ID NO: 22319 - protein, 557 aa, Silicibacter sp. TM1040
MTLNLSMPGQEELSPKITVFGVGGAGGNAVNNMIAKQLEGVDFVVANTDAQALQQNAAKNRVQLGVKVTEGLGAGARPSVGSAAAEESIEQIVDHLAGAHMCFITAGMGGGTGTGAAPIIAQAARELGVLTVGVVTKPFQFEGAKRMRQAEEGVESLQKVVDTLIIIPNQNLFRLANEKTTFTEAFSMADDVLYQGVKGVTDLMVRPGLINLDFADVRAVMDEMGKAMMGTGEAEGEDRAIQAAEKAIANPLLDEISLKGAKGVLINITGAHDLTLFELDEAANRIREEVDPNANIIVGSTLDTEMEGKMRVSVVATGIDASEDANEVPVPRRPMSAPLTKTVSVEENRQAPLELTEQVDAPTPVAAQAGAGQEPSLFSEFDADEGAASDDVIEDTNEAADANDGLPPPAYQPQAQQPAPQPQPQPAQPAVTQAEVFVAPRAPAPGTPSQDAIVRLREAAQRHQASQQPQRPAQQPAAAAPQQERRSAEAQEQRRFGLNSLINRMTGHPQETSQNRPQAAQRVQPSMQSAQPQQAEQPHDEDQERIEIPAFLRRQAN

SEQ ID NO: 22320 - protein, 622 aa, Bacteroides fragilis YCH46
MKTTFMNVSRGVIGALAFSLGISSCQSSQSKMTFEQEGDSLTVIHITNPTQYLLLPVEEKTPEAQVCIASDSVPVDMDVRLSREKVDYFVPFALPKGEKEVAVRIRHLPKEALCWKELKLSDTFDTTNTDQYRPLYHHTPLYGWMNDANGLVYKDGEYHLFYQYNPYGSMWGNMHWGHSVSKDLVHWEHLEPALARDTLGHIFSGSSVVDDANTAGYGAGAIVAFYTSASDKNGQIQCMAYSTDNGRTFTKYEKNPVLTPFDGLKDFRDPKVFWYAPDQKWVMVVSADKEMRFYSSENLKEWTYMSGWGEGYGVQPSQFECPDMVELPVDGNPDHKKWALIVNVNPGCYFGGSATQYFIGDFDGEKFVCDNKPETVKWLDWGKDHYATVCFSNTGDRTIAVPWMSNWQYANIVPTRQFRSANALPRELSLYTQDGDIYMAAAPVEETKSLRKESQEIPAFEVGDAYHVDSLLSDNKGAYEIELELAAGSAEIMGLKLFNEKGENVDIYISLPEKKLVMDRTKSGIVDFGKDSAPHAIEAHDRRKQNSINYVDDFALGTWAPVQKAGNYKLDIFVDKCSVEIFLNGGKIAMTNLIFPTTPYNQMSFYSRGGAFKVDRCKIYRL

SEQ ID NO: 22321 - protein, 257 aa, Mesorhizobium loti MAFF303099
MSDQPLLVEKRRDITLISLNRPERRNAVDGKLSRALREAFDHFEADPSASVAIINGQGAAFCSGMDLKAFLDGEADDILFGEGRLGGLVSRNLTKPLVAAVHGVAVAGGFELMLACDLVVSADTCRFGLPEAKRGLVAGAGGAFRLGEILPPVIAAEILLTGELFGAQRAYELGLVNRIVPESEVLETALMMARAIALNAPMSRKASLDLARASLATGRSLRWAMNDDLLKTLIASEDAVEGAAAFNEKRPPVWRGV

SEQ ID NO: 22322 - protein, 241 aa, Methanosarcina mazei Go1
MIITGHLILVRHGEPGLKPGERLSGWIDIPLSRKGIEEALECAKALENIEIDIAFASDLVRTQETLFIILSGQKKTGVVVHEKTEDKVPPEKLDWYSYPEKLGEDLIPVYTTPALNERYYGKLQGRKKQKMEEKYGAEQVANWRWNFEPGPPEGESLKAVYERTVPYFRKKVMPALEGGKNVLICAHQSSLRALVKYIEDISDKDIREVRLSTGELAIYHFSEGKLVRENEELGPELKRNI

SEQ ID NO: 22323 - protein, 223 aa, Brassica napus
  misc_feature (175)..(175): Xaa can be any naturally occurring amino acid
  misc_feature (186)..(186): Xaa can be any naturally occurring amino acid
  misc_feature (217)..(217): Xaa can be any naturally occurring amino acid
MKMSSASDGSREVREPLVDKDMAESKPEQPWMVYLSTFVAVCGSFAFGSCAGYSSPTQAAIRNDLSLTIAEFSLFGSLLTFGAMIGAITSGPIADLIGRKGAMRVSSAFCVVGWLAIFYAKGVVALDLGRLATGYGMGAFSYVVPIFIAEIAPKTFRGALTTLNQILICTGVSVXSFIIGTMVTWXRVLALIGLIPCAVSILGLFCIPESPRWLGKXGRDTEF

SEQ ID NO: 22324 - protein, 394 aa, Zea mays
MAAVASSPPATIAGPQPTWLPYEPTRDCSQGLCSMYCPQWCYFVFPPPPPAFDIAGPGGGGGDDDSSGPTFSPLVIAIIGLLASAFLLVSYYTVISKYCGTFSSLRNMVFGSRRGRGRGRGGGGGGGGGGDSGAQVPWGAMPPDGLDETLINKITICKYKRGDGFVDSTDCSVCLGEFRDGESLRLLPKCSHAFHLPCIDTWLKSHSSCPLCRCNIAFVTVGVGAVSPEPEPERRAPREDRDWRRDNPELCVAHRRARAQNAVSGSGGDDGQDALARKDCPERSEEGSGNAEIKEDCALPAVRAASSLSDTHREGRMSIADVLQASLEDELTMARESGLLAGSSGRCPCHGEHSKDGGRSGRAMPDAASKRLPAVGRSCFSSRSGRGKDSILPM

SEQ ID NO: 22325 - protein, 640 aa, Lycopersicon esculentum
MFSLNGTSFTNNSLSGVSRCLNQSSRRVSAPMVVVAAVNSNGKPGDGSVSVLVENALTESPAPVEMEVKSTVTGGVQDVYGEDSATEDQSITPWTLSVASGFSLLRNPHYNKGLAFSERERDTHYLRGLLPPVVISHDLQVKKMMNSIRKYDVPLQRYMAMMDLQEMNERLFYKLLIDNVEELLPIVYTPTVGEACQKYGSIFRRPQGLFISLKEKGKIHEVLKNWPEKKIQVIVVTDGERILGLGDLGCQGMGIPVGKLSLYTALGGIRPSACLPVTIDVGTNNENLLNDEFYIGLRQRRATGQEYSELLDEFMYAVKQNYGEKVLIQFEDFANHNAFDLLAKYGTSHLVFNDDIQGTASVVLAGLMAALNLVGGSLSEHTFLFLGAGEAGTGIAELIALEMSKQTGIPLEETRKKIWMVDSKGLIVKSRMEMLQHFKRPWAHDHEPVQELVNAVKSIKPTVLIGSSGAGRTFTKEVVQAMATFNEKPIIFALSNPTSQSECTAEEAYSWSEGRAIFASGSPFAPVEYNGKVYASGQANNAYIFPGFGLGLIISGAIRVHDDMLLVASEALADEVSQENFEKGLIYPPFSNIRKISAHIRAKVAAKAYELGLATRLPQPKDLVAYAESCMYSPAYRSYR

SEQ ID NO: 22326 - protein, 194 aa, Magnetospirillum magnetotacticum MS-1
MSRLLPTNPLGSFVASVVAAIGLAGGVAWGATGDHLDWSSLPLPAIAGGQVPADAFKGKVVLVVNTASQCGFTPQYQGLEALWREYRGRGLVVLGVPSNDFGAQEPGSNPEVASFCEINYGVDFPLLEKQVVTGTGAHPFYRWAAERTGALGVPRWNFHKILVGRDGQLVDWFASTTAPDSARLRAAIDKALTP

SEQ ID NO: 22327 - protein, 361 aa, Coccidioides immitis RS
MAHSKVIIIGSGPAAHTAAIYLSRAELKPVMYEGMLANGTAAGGQLTTTTDVENFPGFPAGVGGTELMTKMREQSIRFGTEIITETISRVDLSSRPFKLWKEWSDGPDDAPAHTADALIIATGANARRLDLPGEDKYWQNGISACAVCDGAVPIFRNKPLFVIGGGDSAAEEAMFLTKYGSSVTVLVRRDKLRASKTMATRLLNHPKVEVKFNTVAVEVQGEPQPRGLMTHLKIKNVVTGNEEVVPANGLFYAVGHEPATGLIKGQVETDSDGYIATKPGTSYTSVEGVFAAGDVQDKRYRQAITSAGSGCIAALEAEKYIAELGDVEQPANTIQQSATQAEKELEENPPASLEYKSNPLL

SEQ ID NO: 22328 - protein, 188 aa, Scytonema sp. IAM M-262
MNRGLSFQDLIQEGSLGLIRAAEKFDHEKGYKFSTYATWWIRQAITRAIADQSRTIRLPVHLYETISRIKKTTKLLSQEMGRKPTEEEIATRMEMTIEKLRFIAKSAQLPISLETPIGKEEDSRLGDFIESDSETPEDQVSKNLLREDLEKVLDSLSPRERDVLRLRYGLDDGRMKTLEEIGQIFNVT

SEQ ID NO: 22329 - protein, 579 aa, Lycopersicon esculentum
MESALKDLSTPTGGVEDVYGEDCATEDQCITPWTIAVSSGYNLLRDPRYNKGLAFTERERDAHYLRGLLPPVISSQELQEKKLMQSIRQYDVPLHKYVAMMELEERNERLFYKLLIDNVEELLPIVYTPTVGEACQKYGSLFKRPQGLYISLNEKGRILEVLKTWPEKSIQVIVVTDGERILGLGDLGCQGMGIPVGKLALYTALGGVRPSACLPITIDVGTNNEKLLNDEFYIGLRQRRATGQEYYDFLHEFMSAVKQNYGEKILVQFEDFANHNAFELLAKYRTSHLVFNDDIQGTASVVLAGLIASLKLLGGALCDHTFLFLGAGEAGTGIAELIALEISNKTNIPVEETRKKIWLVDSKGLIVSGRKETLQAFKKPWAHEHEPVNNLLDAVKAVKPTVLIGTSGTGRTFTKEVVEAMACMNKRPLIMALSNPTSQAECTAEEAYTWSEGRAVFASGSPFPSFEYDGKLNIPGQANNCYIFPGFGFGLVMSGTIRVHDDMLLAASEALAAQVTEEHYAKGMIYPPFADIRKISAHIAASVAAKAYELGVATRLPRPADLVKYAESCMYTPNYRSYR

SEQ ID NO: 22330 - protein, 112 aa, Gloeobacter violaceus PCC 7421
MKKIEAIIRPFKLDEVKIALVNAGIIGMTVSEVRGFGRQKGQTERYRGSEYTVEFLQKLKIEVVVDDGLVDLVMDKIMVAARTGEIGDGKIFVSDVDRVVRIRTGERDDEAL

SEQ ID NO: 22331 - protein, 188 aa, Fischerella sp. IAM M-263
MNRGLSFQDLIQEGSLGLIRAAEKFDHEKGYKFSTYATWWIRQAITRAIADQSRTIRLPVHLYETISRIKKTTKLLSQEMGRKPTEEEIATRMEMTIEKLRFIAKSAQLPISLETPIGKEEDSRLGDFIESDGETPEDQVSKNLLREDLEKVLDSLSPRERDVLRLRYGLDDGRMKTLEEIGQIFNVT

SEQ ID NO: 22332 - protein, 389 aa, Oryza sativa
MEGNARGGGHSEALKNYNLGRTLGIGSFGKVKIAEHKLTGHRVAIKILNRRQMRNMEMEEKAKREIKILRLFIHPHIIRLYEVIYTPTDIYVVMEYCKFGELFDYIVEKGRLQEDEARRIFQQIISGVEYCHRNMVVHRDLKPENLLLDSKYNVKLADFGLSNVMHDGHFLKTSCGSPNYAAPEVISGKLYAGPEVDVWSCGVILYALLCGTLPFDDENIPNLFKKIKGGIYTLPSHLSALARDLIPRMLVVDPMKRITIREIREHQWFQIRLPRYLAVPPPDTAQQAKMIDEDTLQDVVNLGYEKDHVCESLRNRLQNEATVAYYLLLDNRFRATSGYLGADYQESLERNLNRFASSESASSNTRHYLPGRGPVTLCISSRYFSSLLL

SEQ ID NO: 22333 - protein, 435 aa, Methanocaldococcus jannaschii
MELKNKKLSLWEAVSMAVGVMIGASIFSIFGVGAKIAGRNLPETFILSGIYALLVAYSYTKLGAKIVSNAGPIAFIHKAIGDNIITGALSILLWMSYVISIALFAKGFAGYFLPLINAPINTFNIAITEIGIVAFFTALNFFGSKAVGRAEFFIVLVKLLILGLFIFAGLITIHPSYVIPDLAPSAVSGMIFASAIFFLSYMGFGVITNASEHIENPKKNVPRAIFISILIVMFVYVGVAISAIGNLPIDELIKASENALAVAAKPFLGNLGFLLISIGALFSISSAMNATIYGGANVAYSLAKDGELPEFFERKVWFKSTEGLYITSALGVLFALLFNMEGVASITSAVFMVIYLFVILSHYILIDEVGGRKEIVIFSFIVVLGVFLLLLYYQWITNRFVFYGIIATFIGVLIFEIIYRKVTKRTFSNNMYVKS

SEQ ID NO: 22334 - protein, 228 aa, Chlamydia muridarum Nigg
MKKQGVLIAPSIMGADLACLGDAARNIEESGANLIHIDVMDGHFVPNITFGPGIIAAINRSTDLFLEVHAMIYTPFEFVEAFVKAGADRIIVHFEAAENLKEILDYIRKCGVQAGIAFSPETSIEFISAFIPLCDVILLMSVQPGFCGQKFIPDTIEKIRFVRQAIQTLGKEGSCLIEVDGGIDEESARACREAGADILVAASYFFKKDSINMKEKVLLLQGEEHGAK

SEQ ID NO: 22335 - protein, 542 aa, Agrobacterium tumefaciens str. C58
MIKTIKTTPYQDQKPGTSGLRKKVPVFAQENYAENFIQSIFDALEGFEGQTLVIGGDGRYYNREVIQKAIKMAAAAGFGKVLVGQGGILSTPAASNVIRKYKAFGGIVLSASHNPGGPTEDFGIKYNIGNGGPAPEKITDAIYARSKVIDSYKISDAADIDLDKIGSFKVDELTVDVIDPVADYAALMEELFDFGAIRSLIAGGFKVVVDSMSAVTGPYAVEILEKRLGAPKGSVRNATPLPDFGGHHPDPNLVHAKELYDDVMSPEGPDFGAASDGDGDRNMVVGKGMFVTPSDSLAIIAANAKLAPGYAAGISGIARSMPTSAAADRVAEKLGLGMYETPTGWKFFGNLMDAGKVTICGEESFGTGSNHVREKDGLWAVLYWLNIVAARKESVKDIVTKHWAEYGRNYYSRHDYEEVDSDAANTLVAILREKLATLPGTSYGNLKVAAADDFAYHDPVDQSVSKNQGIRILFEGGSRIVLRLSGTGTAGATLRLYVERYEPDAARHGIETQSALADLISVADTIAGIKAHTGRSEPTVIT

SEQ ID NO: 22336 - protein, 660 aa, Oryza sativa
  misc_feature (212)..(212): Xaa can be any naturally occurring amino acid
  misc_feature (216)..(216): Xaa can be any naturally occurring amino acid
  misc_feature (226)..(226): Xaa can be any naturally occurring amino acid
MRVIYVLCVLGVLVPDAAGGRRHHRRHDCPPFTCGHLSDVSFPFRRRGDPPECGVQSYELTCADDKATIQIDKETYSVSDINYGDSTLWVVDASFLDSRSSCLLPRWNPLLRDPRLQAKSHHIIELAPPVGVTWASFVNCSQEIRNSSWMYMPVACLSTSRSFVYVFTGQQSAYIQNLEPSCGYLATTPLGGSKLNSTSALQNVSYQDVVKXNDDXDLPFDFLSQXSGWNFKECLALSIRQTGTGSKERIANIAIIDFYFWSCFLLGDRSHNNLIYTYMVVDTALLILKWTAVLCRFVLAPLAVFIFLAHKYWRNKITIDAVEKFLQMQLTLGPTRYAYTDLTAITGHFGEKLGQGGYGSVYKGVLPGYVNVAVKVLENANCNGEEFISEVSTIGRIHHVNVVRLVGFCSEELRRALVYEYMPRGSLDKYIFSSKRSFSWDKLNEIALGIARGINYLHQGCDMQILHFDIKPHNILLDDNFVPKVADFGLAKLYPRDNSFVPLNALRGTIGYIAPEMISRSFGVISSKSDVYSFGMLLLEMAGGRRNSDMHAGNSSQAYYPSWVYDRLIEQQVGVGEISAATVANMHELERKLCIIGLHCIQMKSHDRPTMSEVIEMLEGGVVGLQMPPRPFFCDDESMSPMMDSYQFSSGLTEILEEDE

SEQ ID NO: 22337 - protein, 491 aa, Novosphingobium aromaticivorans DSM 12444
MSINIGPPAIDELRPRITVIGVGGAGGNAIANMIKARIEGVDFIVVNTDAQALNNSIAEHRIQLGPDITQGLGAGARPEVGRAAAEETIEELERALDGVHMVFIAAGMGGGTGTGAAPVIAEAARRKGVLTVGVVTKPFLFEGTRRMRAAESGIEELQKHVDTLIVIPNQNLFLVAKAETTFKEAFQLADEVLQQGVRSITDLMVMPGLINLDFADVRSVMGEMGKAMMGTGEGEGANRALEAAERAIANPLLDGVSMQGAKGVIISIIGGDDMKLLEVDEAANHIRELVDPNANIIWGSAFNPDLDGKIRVSVVATGIEQSQEQAEIASRPVSIPGTSRGPAVPSAPPAAPVAAPAPAPEPVQQAWTPAAEQVQPAPAATPAAEPEPLDLTLDLSEVQEAPARPEAEELLLGGMEEPVQQPEFAPEPAPEPAMPRLGRAPEAAPAKPAGGSTLFERMANLSRGSRASEEDDGDEGGALNIPRFLGRQNNQ

SEQ ID NO: 22338 - protein, 410 aa, Methylobacillus flagellatus KT
MSKRRVVVTGLGVVSPVGIGVQTSWANLVAGQSGITNITKFDASPFSSQVAGEVKDFDVSQYLPAKEARRMDTFIQYGMAAAIEAVKDAGIEVTEENAERIGVSIGSGIGGLQLIEDTDEIYHESGPRKISPFFIPGTIINMISGNLSIMYGFKGPNVAIVTACTTGTHSIGDAARMIEYGDADIMVAGGAEAPITKLGVGGFAASRALSTRNDDPATASRPWDADRDGFVIGEGAGVLVLEEYESAKKRGAKIYAELVGYGMSADAYHMTAPSMDGPRRSVANALKNAGLNPDQIQFVNAHGTSTPLGDVNETNAIKAAFGDHAKNLVVNSTKSMTGHLLGGAGGLESVFTVLSIYHQISPPTINIFNQDPECDLDYCANEARDLKIDAAVKNNFGFGGTNGSLVFRKI

SEQ ID NO: 22339 - protein, 476 aa, Sulfitobacter sp. EE-36
MNPGTEPSFRDSVDIMFNRAVALMDLSPGLEEKIRVCNATYTVRFGVRLRGGIQTFTGYRSVHSEHMEPVKGGIRYSPGVNQNEVEALAALMTYKCALVEAPFGGSKGGLCIDPRDYDEHELELITRRFAYELIKRDMINPAQNVPAPDMGTGEREMAWIADQYKRMNTTDINGVACVTGKPINAGGIHGRTEATGRGVQYALHAFFRDTKGMEKAGLGGELDGKRVVVQGLGNVGYHAAKFLSEEDGCKITAIIERDGALFDDRGLDVEEVHRWISMHGTIKGYPDAPLEEDGAKLLEADCDILIPAALEGVINLTNAHNIKAPLIVEAANGPVTAGADDILRAKGVVIIPDMYANAGGVTVSYFEWVKNLSHIRFGRMQRRNEESRHQLLVDELERLSADSGVGWQLSPNFKDKYLRGAGELELVRSGLYDTMSDAYRSMAEVWHSRDDVEDLRTAAYLVSIGKVAASYRAKGL

SEQ ID NO: 22340 - protein, 335 aa, Frankia sp. CcI3
MATRVGVNGFGRIGRNFWRALAASNRNDLEIVAVNDLTDNKTLAHLLKYDTTLGTLSAAVGVVDEGIRVGDTVIKVLAERDPAALPWADLGVDVVIESTGRFTKAADAGKHLQAGAKKVIISAPAKDEDITVVIGVNDDAYDPARHHILSNASCTTNCVAPMAKVLDEAFGISQGLMTTIHAYTNDQVILDFPHSDLRRARAAAQNIIPTTTGAAKATALVLPHLKGKLDGLAMRVPVLDGSVTDLVATLDKKASKEEVNAAFKAAAEGPLKGYLVYTEDPIVSSDIVNTPASCTFDSLLTMSAGNQVKVVGWYDNEWGYSNRLVDLTALVAARL

SEQ ID NO: 22341 - protein, 591 aa, Arabidopsis thaliana
MAISNVISVLLLLLVLINLSNQNIKGIDAFHQIYEELQSESVESVNHLHRPSFHFQPPKHWINDPNGPVYYKGLYHLFYQYNTKGAVWGNIIWAHSVSKDLVNWEALEPALSPSKWFDIGGTWSGSITIVPGKGPIILYTGVNQNETQLQNYAIPEDPSDPYLRKWIKPDDNPIAIPDYTMNGSAFRDPTTAWFSKDGHWRTVVGSKRKRRGIAYIYRSRDFKHWVKAKHPVHSKQSTGMWECPDFFPVSLTDFRNGLDLDYVGPNTKHVLKVSLDITRYEYYTLGKYDLKKDRYIPDGNTPDGWEGLRFDYGNFYASKTFFDYKKNRRILWGWANESDTVEDDILKGWAGLQVIPRTVLLDSSKKQLVFWPVEEIESLRGNYVRMNNHDIKMGQRIEVKGITPAQADVEVTFYVGSLEKAEIFDPSFTWKPLELCNIKGSNVRGGVGPFGLITLATPDLEEYTPVFFRVFNDTKTHKPKVLMCSDARPSSLKQDTGLLAKDRMYKPSFAGFVDVDMADGRISLRSLIDHSVVESFGALGKTVITSRVYPVKAVKENAHLYVFNNGTQTVTIESLNAWNMDRPLQMNDGAL

SEQ ID NO: 22342 - protein, 336 aa, Burkholderia vietnamiensis G4
MTIRVAINGYGRIGRNTLRAFYENGKKHDLEIVAINDLGDAKTNAHLTQYDTAHGKFPGEVSVDGDYLVVNGDKIRVLANRNPAELPWGELGVDVVMECTGFFTSKEKASAHLKGGAKKVIISAPGGKDVDATIVYGVNHNVLKAEHTVISNASCTTNCLAPLVKPLNDQIGLETGLMTTIHAYTNDQVLTDVYHEDLRRARSATHSQIPTKTGAASAVGLVLPELNGKLDGYAIRVPTINVSIVDLSFIAKRDTTVEEVNAIMKEASEGALKGILGYNDAPLVSIDFNHNPASSTFDATLTKVSGRLVKVSSWYDNEWGFSNRMLDTAVAFANAK

SEQ ID NO: 22343 - protein, 513 aa, Physcomitrella patens
MAGLPVASSLVAPHIDCSSTASLSSKDVKCTGLAWAAMEPCAGSLLPVRSSAASPGIRTPVGLGRTAGLNDIIFRRSNYGRNEEKSGRVTEIVQQFTPSPSSLPEGNPKPCQNPLRSWGSRAAFTIVQATSSSDYLEDDSQLNSVKDYNSALLNCVKDGRMRDAMTIFKRFEGAGLKPDVVSYTALIQGFGKLKSYNKVTDVFSRMQRNRCPPDLKLCTVLISTYGNGGLPVLAESAMQYAQAQGLQPDAIAYTALVHAYAQEGLWEEAEKTLSDMLDVGIVDDRPYAALVAAYGKAGLTDNVNKILETMKASGVEASTTLYNTLINIHSKAEAPEKARAVLQLMQADGCQCDEITYTSVMEAYSRNKQPLMAESMMGEMKRAGIQPGPVSYGVLISAYCRAGRLGDAERILRAMQNAKCKPTVEIYNMMISGYASAKMRSQAERMFQTMQDCGLRPDAAEDCYIRMQQLGCKPNAVTYKILLKAYTDYNNSIDAERIRLDMRKAGISLETLS

SEQ ID NO: 22344 - protein, 171 aa, Zea mays
MGKYSQEPGNPTKSAKAMGRDLRVHFKNTRETAFALRKLSLTKAKRYLEDVIAHKQAIPFRRYCGGVGRTAQAKSRHSNGQGRWPVKSARFILDLLKNAESNADVKGLDVDNLYVSHIQVNQAQKQRRRTYRAHGRINPYMSSPCHIELILSEKEEPVKKEADNIVAARKQ

SEQ ID NO: 22345 - protein, 917 aa, Pseudomonas chlororaphis
MLKKLGIKGRVLLLTLLPTSLMALVLGGYFTWMQQSDLQTQLLQRGEMIAEQLAPLVAPALAHKNIALLERIATQSLEQQDVRAVTFLAPDRTPLAHAGPSMLNQAPTGNGSQMLQRTGSDATRYLLPVFGRHRNLAGDLIPDESDRLLGWVELELSHNSMLLRGYRSLFASLLLIIAGLICTGLLALRMGRTINNPLSQIKHAVTQLKDGNLETRLPLLGSQELDELASGINRMAGTLQNAQEELQHSIDQATEDVRQNLETIEIQNIELDLARKEALEASRIKSEFLANMSHEIRTPLNGILGFTHLLQKSELTPRQLDYLGTIEKSADSLLGIINEILDFSKIEAGKLVLDSIPFNLRDLLQDTLTILAPAAHAKQLELVSLVYRDTPLSLVGDPLRLKQILTNLVSNAIKFTREGTIVARAMLEEEHEDSVQLRISIQDTGIGLSNQDVRALFQAFSQADNSLSRQPGGTGLGLVISKRLIEQMGGEIGVDSTPGEGSEFWISLRLPKTRDDAEDLPAPPLLGRRIAVLENHELARQALQHQLEDCGLEVTPFNTLEALTNGVTGVHQTEQAIDLAVLGITSNDMPPERLNQHIWDLEHLGCKVLVLCPTTEQTLFHLSVPNPHSQLQAKPACTRKLRRALADLVNPKVVRNEPSEPIASRPPRVLCVDDNPANLLLVQTLLEDMGAKVLAVDSGYAAVKAVQNESFDLVMMDVQMPGMDGRQSTEAIRQWESERNCTPLPVIALTAHAMANEKRALLQSGMDDYLTKPISERQLAQVVLKWTGLALRNQGPERTGEPSGNGLELQVLDHDEGLRLAAGKADLAADMLAMLLASLEADREAIRAARAANDHNALIERVHRLHGATRYCGVPQLRAACQRSETLLKQEDVKAFAALDELERAINRLATEARINA

SEQ ID NO: 22346 - protein, 505 aa, Synechococcus elongatus PCC 6301
MLSKELFQMPRGVAPAFAGRKPKGWAWASTAVPDFQGGFKRLINRFQGSKLWLACVPLAATIAVFWGVAANAQGSADPVPSAQFLVNNLWLMVATVLVIFMNAGFAMVETGLCRQKNAVNVLAKNLIVFTLAATAYWFIGYSLMYGSPVVDGFLYFGKGGPLGFFFDPTVSAETIKNDGLISSLDFLFQAAFAGTAATIVSGSVAERIKFVDFIIFSLILTAVIYPIAGSWQWNVGSGWLNKAGFIDFAGSTVVHSVGGWAALIGAITLGPRMGKFQDGRPGALPGHNLAIATLGALILWIGWYGFNGGSVLAFNTAVPYVAVTTTLGGAAGGISATITSWSTSGKPDLSMVINGILAGLVGVTAGCDGFGMGGSFIVGLIAGVLVVFSVYTFENLKIDDPVGACSVHLVCGIWGTLAVGLFNLEKGLFYGGGFGQLGSQILGIISYGVWTVVASVIIWNILKALLGLRVSPEEELQGLDIGEHGMEAYSGFAKDASNALSSISE

SEQ ID NO: 22347 - protein, 435 aa, Bacillus anthracis str. 'Ames Ancestor'
MVAILIAFTGFFVAAEFAIVKVRSSRIDQLVAEGKRGALAAKKVTTNLDEYLSACQLGITVTAMGLGWLGEPTIEKLLHPLFEKWNLNPSISSVLTFGLAFMLMTYLHVVVGELAPKTMAIQKAEKVTLLFAAPLMMFYKVMYPFIWVLNGSARVITGLFGLKPASEHEVAHTEEELRLILSDSYESGEINQAEYKYVNNIFEFDNRIAKEIMVPRTEIVGFYLEDSVEEHMKVIQNERYTRYPIFGEDKDDIIGMVNVKDFFIRYMTEDQKDLSSIRSYMRPIIEVMETTPIHDLLLQMQKKRIPMAVLYDEYGGTAGIVTFEDILEEIVGEIRDEYDEDEAPPIQHVNEQHIIVDGKVLISEVKDLFGLHIEEDDVDTIGGWIMMQNHEIEEGQHVEAEGYEFKVLEKDAYQIKRVEIRKMEEEQEEEKAATV

SEQ ID NO: 22348 - protein, 604 aa, Arabidopsis thaliana
MEFDEYEYLEKTVEEGAGSNKKKEESGNERSERSYRKREGGERQGEEGGEEERVSSRSKKSRGDGEENGGGKRDRERERHRSSRDKDRERDKVREGSRDKESDRERSSKERDRSDRDKPRDRERREREKRSSSRSRREEKEPEVVERGSRRHRDKKDEPEADPERDQRTVFAYQMPLKATERDVYEFFSKAGKVRDVRLIMDRNSRRSKGVGYIEFYDVMSVPMAIALSGQLFLGQPVMVKPSEAEKNLAQSNSTTVGGTGPADRKLYVGNLHFNMSELQLRQIFEAFGPVELVQLPLDPETGQCKGFGFIQFVQLEHSKAAQIALNGKLEIAGRTIKVSSVSDHIGTQDSAPKSADFDDDDGGGLALNAQSRAMLMQKLDRSGIATSIVGSLGVPGLNGAAFNQPGMNPSFPTSVLPTTAIPSFVNEHVGLPSECLLLKNMFDPATETEPNFDLEIRDDVADECSKYGPVNHIYVDKNSAGFVYLRFQSVEAAAAAQRAMHMRWFAQKMISATFMVKQLVRSSSLAFTFICLLNEYFYCSLLMNMKPKPRPELKTSRIFVFSRFLVLTAMQILNLLSEICYIDKRIMNEDLSFFFFFFCPRLL

SEQ ID NO: 22349 - protein, 429 aa, Listeria monocytogenes str. 4b F2365
MTIKDDFIHAFSSNANEPDWFLDIRRNAFKAYGELDLPFVDKTKITRWNFTKFETFIPFKEGVTNETLPEKVANLVDLDNKEANFYVQMDERPARLQLQQELVDQGVIFTDIISAVKNHPELVKKYFMKDAVQVNEHKLTAFHAALVNGGIFLYVPKNVEVKAPIQAVFVQDKAESPLVNHVLLVADDNSSVTYVENYVTVDNAPKGIVSIVEEVIAEKNARITFGGVDNLASDVTTYVNRRGHIGTDSQIEWALGLMNDGDTINENVTNLMGDGSSADVKTVTVGRGKQTQNVTTRVTHYGKASNGTILSHGVMKERATTIFNGIGHIKHGASKSDAQQESRVLMLSPEARGDANPILLIDENDVVAGHAASVGRVDPLQLFYLMSRGISQKEAERLVIHGFLDPVVRQLPIESVKTMLREVIEGKVR

SEQ ID NO: 22350 - protein, 366 aa, Cosmarium botrytis
QDNGSGMVKAGFAGDDAPRAVFPSIVGRPRHQGVMVGMGQKDAYVGDEAQSKRGILTLKYPIEHGIVTNWDDMEKIWHHTFYNELRVAPEEHPVLLTEAPLNPKANREKMTQIMFETFNVPAMYVAIQAVLSLYASGRTTGIVLDSGDGVSHTVPIYEGYALPHAILRLDLAGRDLTEYLVTILTERGYSFTTSAEKEIVRDIKEKLAYVALDYEQEMSTAKSSSSLEKTYELPDGQEITLGSERFRCPEVLFNPSLVGKEAAGIHETCYNCIMKCDVDIRKDLYGNIVLSGGTTMFPGIADRMTKEITALAPNSMKIKVVAPPERKYSVWIGGSILASLSTFQQMWIAKGEYDESGPSIVHSKCF

SEQ ID NO: 22351 - protein, 174 aa, Rickettsia sibirica 246
MEDLSSWKEKFETCVYAQKLLDNIEYLNAKVKNPVDIEEVKKGIYYARKYHDLQIRQLGDPYYSHPIEVAIMLAEFVAEEAPKLYNAIMLQAVLLHDTIEDIALTEEVITIGPEVAKHIEGLTRIKPYGKISSEKGLNLLVRQKRYDTVLIKFFDRMYNLQTLGAKSPEKMRKV

SEQ ID NO: 22352 - protein, 1034 aa, Ustilago maydis 521
MAKRTAPATSATGPAFPPLGLVVGPGAPAANSFHHGSHSFSNSHNAASSPTPDPPPAANGLPPAPNKFDVSQAQQCRLQDAYWSDEEEDMDCPLCLEEIDLSDANFKPCPCGYQICRFCWHHIKQNLNGRCPACRRKYSDQTVEFKPMTAEEIKRLTQAKKQKEREKKELESMNRKHLANMRVVQKNLVYVVGLSSKLAKEELIPTLRSNEYFGQYGRISKILISKRNTASRLVMGTSETALGVYVTYHRKEDAAKAIVAIDGSKGSDGRVIRASYGTTKYCTTYLRNLPCTNPGCTYLHEPGEEADSFTKEDLSTLRHAAKDAEHKIKPASLGITQPPKRSEFLTTNDAESSALPKTASWASGKPMSVASSPAPIVAASPFRDSDMPPLSASSASALARKVSSQKPSTPKAQKQLPNAKSKLALATGRPDSPALLGTDSPSQSQPSSPVPSRTVATPSTANDSGPTTSVTGAVAAAGTPRKETTTTAAPKRSTIDAGIPPPHALVKPSSPPGLARSASTTDSRPATPHTESDHPRSNYQPSSSAQAVLDDMLQRREAQPEIVKPSPFPDFDDALSSFKDGEFSFNLPANQQLAINNTPSELTSAFTTFNPFGAPPGILAAHAGLVTAGTPPPGIVRAPNRSSTASPAPLSYSGSFDPFAPGAGETIKEGGSSFADSTYPVSFDFADQTRRMMGQDNLAASGMGGLVHDETLDLGQDASKRASRFDFAKRKESDSFISASPLRTELMQSVRDGESFGAGKDVTSLLGGVFDQENRLNGIGDVGASAAAIGLHGRETGGFPGMGMSRPPPGIGGPGFGGRFGTNTPPPGISAPASRQQQALLASLHQIGSGNLGNASDSQQQQQQQQQQSSQLSNGSGVSFLAELQQQAAQRAQQQAQFAAGRDLSETGRANGIGNANVSDPLLAHLLAGRRANYGGQSGGSDMPFNDPAIMSMSRAQIQAAQQQQQQQQQFGGNRYGTGMGGFGVSSFSPFDQMNNANAGFGSASQYGDHHRFVQQQQQQQQGQGQASPYSNMS

SEQ ID NO: 22353 - protein, 232 aa, Nicotiana tabacum
MGYWQAKVVPKIKQIFDKNGPKKAAAAEACKTFDEAKALYSKEFEDKKTELQPKVVEIYEAAAVEIKTLVKEPKVSGLKKHSTEVQKLLDELVKIEFPGSKAVSEASSNFGPSYVCGPVLFVFEKVSTFIVTENKKVEEAAVPVAASSSEEEAAASVAAASEAEAIAAAPVEVKKKEIVVEAEAKKEEEPAPAPAAEVAPAPAAEVAPAADVAPAKVEERAPAAAAPEPPKA

SEQ ID NO: 22354 - protein, 127 aa, Shigella flexneri 2a str. 301
MLHQQRNQHARLIPVELYMSDKIIHLTDDSFDTDVLKADGAILVDFWAEWCGPCKMIAPILDEIADEYQGKLTVAKLNIDQNPGTAPKYGIRGIPTLLLFKNGEVAATKVGALSKGQLKEFLDANLA

SEQ ID NO: 22355 - protein, 215 aa, Nicotiana tabacum
MGYWQAKVVPKFKQIFDKNGPKKAAAAEACKTFDEAKEQYSKEFEEKKTELQPKVVEIYEAAAVEIKTLVKGPKVSGLKKHSTQVQKFLDELVKIEFPGSKAVSEASSNFGPSYVSGPVLFVFEKVSTFIVTEDKKEEEAAASEAEATTAAPVEVKEKEIVVEAEAKKEEEPAPAPAATPAAEVAPAEVAPAADVAPAKVEEAPAAVAAPEPPKA

SEQ ID NO: 22356 - protein, 130 aa, Debaryomyces hansenii CBS767
MSGGKGKAGSSEKASTSRSAKAGLTFPVGRVHRLLRKGNYAQRVGSGAPVYLTSVLEYLAAEILELAGNAARDNKKSRIIPRHLQLAIRNDEELNKLLGHVTIAQGGVLPNIHQNLLPKKSAKGKASQEL

SEQ ID NO: 22357 - protein, 538 aa, Oryza sativa
MSPPPAAARAPPVLRNELSRRTAVLGLRLWVLVGIAVGAAFLLLLAVISFHLAQARRRKPAAKRASSAAAAAAAPGGAAVPLSPATIPPVSKEIQEVAVHVGSLRHYLEAGATFLKEGGGVGGAVVDGDSLGGSTVYGSQRVHIEAGKGRRMVAYADGEVGPVASDLAASAQAAVGVGVGPEVSHLGWGHWYTLRELEEATAAFAPEHVVGEGGYGIVYRGVLPDGCEVAVKNLLNNRGQAEREFKVEVEAIGRVRHKNLVRLLGYCAEGAHRILVYEYVDNGNLEQWLHGDVGPVSPLSWDIRMNIVLGTAKGITYLHEGLEPKVVHRDIKSSNILLDKRWNPKVSDFGLAKLLGSDSNYVTTRVMGTFGYVAPEYASTGMLNERSDVYSFGILIMEIISGRSPVDYARAPGEVNLVEWLKNMVSNRDYEAVLDPKLPEKPTSKALKKALLVALRCVDPDSQKRPKMGHVIHMLEVDDFPYREIILYVHGSSDSAGEPTGQNKNICEAGDGVGRRGQHHHSCQYAIQIARELEIGLT

SEQ ID NO: 22358 - protein, 214 aa, Staphylococcus aureus subsp. aureus MRSA252
MTKLYPSLLSVDFLDLQHELKRLEEAGVDGVHFDVMDGQFVPNISIGLPILDAVRKGTTLPIDVHLMIENPEKYIASFAEHGADMISIHVESTPHIHRAIQMIKHLDKKAGVVINPGTPISQIEPILDIVDYVLVMTVNPGFGGQSFIDQCVEKIAGLNAIKMERQLNFDIEVDGGVNTDTAKVCVENGATMLVTGSFFFKQEDYKKVTQALKG

SEQ ID NO: 22359 - protein, 465 aa, Methylococcus capsulatus str. Bath
MRIFRTKAVSTDDCSGGSLKRCLGALDLTLLGIGAIIGTGIFVLTGIAAATQAGPAVVLSFVFAGLACAFAALAYAELAACVGGCGSAYGYSYAAFGELIAWIIGWDLILEYAISVAAVANGWSGYFANALTAVGLELPDYLTKAPEKGGIINLPASAIIILLMALLIAGVKESARLNTVMVSVKVLAIAVFVAVASAHVDPAHWDPFLPFGWFGHDAEGRPTGVLAGASIVFFAYVGFDAVSTAAEEARNPMRDVPIGIIGSLVFCTLIYIVVAGLLTGVVPYTELNVSSPVAHALQLLGIRWASGLVATGVIAGLTTVMLVLYYALTRIIFAMSRDGLLSPWFSAVNTRTQTPVRVIVLCGLFISLVAGFVPLGELAELVNIGTLFAFVLVCLGVIVLRVTRPELHRPFKTPVVPWFPILGALSCGALMAFLPALTWLRFVVWLLLGIGIYFAYSYRHSRLAD

SEQ ID NO: 22360 - protein, 403 aa, Triticum aestivum
MAPSTSSASALLHLPGLPPRGPHRGGCRNHPRRPRHAAVRCSFAFAPVETARIKVVGVGGGGNNAVNRMIGSGLQGIEFYAINTDSQALVNSQAQHPLQIGEQLTRGLGTGGNPNLGEQAAEESKEVIANALRDSDLVFITAGMGGGTGSGAAPVVAQIAKEAGYLTVGVVTYPFSFEGRKRSLQALEALEKLERSVDTLIVIPNDRLLDIADENMPLQDAFLLADDVLRQGVQGISDIITIPGLVNVDFADVKAVMKNSGTAMLGVGVSSSKNRAQEAAEQATLAPLIGSSIEAATGVVYNITGGKDITLQEVNKVSQIVTSLADPSANIIFGAVVDDRYNGEIHVTIIATGFPQSFQKSLLADPKGARILEAKEKVASLATAAAAQQPAVAVPTWSRRLFS

SEQ ID NO: 22361 - protein, 661 aa, Aspergillus nidulans FGSC A4
MATSYDATTTASELADHLSADIKGKVVLTTGPSPASIGAMFVESIARGLPALIILAGRSTTKLQQTAGAIAQAQPVVKVRLLHLDLGSLASVREAARELASWEDVPRIDVLVNNAGIMGTKFALSPEGVESQFTTNHLGHFLLTNLIIGKILKSDTPRVVNVSSDGHRLSPIRWADYNFQEGEIYNKWLAYGQSKTANMLMAVSLAEKLGSRGLLAFSLHPGVIISTSISGGLDNMDEDLAALKALDRMLGNAEGWRDFKVKTRQQGAATTVYAAFYPGLKESNGAYLQDCHVADPWTDTVKPWGTDKVEAERLWKLSEKLSMEWTVEAGLLAGGYGKSLQMCIQKPKTGDHYFHFVIYGENQLVPGNNTIRIPSVRMTMADDITHFRSIPWVSDLLNDPTFVTHPIPSRKIKASTEDSLFSTTLNSRSTISSCLLQYRILSSNATPLYRNAIPTNEVRIFCTLGSDLNGYPGILHGGIVATLLDEFMGLILSMSRAGGEPGMEGPVTAYLNTRFVRPVMTPGTVVVSGRIVEAKEERKWKIVGNIKDTSNKTSPAWPQYMPRISHATALLLSTATESFLKVELQMPALLILALALLLVCLSNMIGSYSSFAAAATFHLDSGIYFSGIGFEQPCFGNAGNCLERALGKGKPRGLKKNLGLI

SEQ ID NO: 22362 - protein, 146 aa, Vibrio angustum S14
MEYLHTMVRVSNLDASLDFYCNKLGLVEIRRKESERGRFTLVFLAAPNQAETAKETQSPLLELTYNWDPESYTGGRNFGHLAFAVDNIYDLCAHLQNNDVVINRPPRDGHMAFVRSPDGISIELLQKGDALEAAEPWASMQNQGEW

SEQ ID NO: 22363 - protein, 399 aa, Chlorobium tepidum TLS
MQRYDAVISGAGPAGCSAALSLAQKGRRVLLIDKARFPREKICGDGVTAASTELLEEMGVLELLRQRPGSLTEFRGATFVSPGGTVVQGRILRNGHLSGSSYVIPRMVLDDSLVSRVKEHSSITFLDKTTVTGLVMDGDRARGVATSAGEFCGRIIIAADGAYSPIAKQLDLWNRDKRQQGFAMRAWFSGVEGLGDSIELCYDKAMLPGYGWIFPAGEQRANVGVFLLPRFADQRSTKRLFKSFVKENAFAAARLKNAVMEPGSLKSWPLPFGSFAGRRGRGNVLLAGDAGSFIDPLTGEGIYYALKTGRYAAEAVANALERNDESAALTRYEQLWRGEFSGRVYFPGYAFQHFMNNSWFVDTFMRYTAKKQHRADLLADVVAHNRKRRELFKLLNPFY

SEQ ID NO: 22364 - protein, 87 aa, Zea mays
MSSGGRRGRISDDEINELISKLQALLPESSRRRNASRSSASKLLKETCAYVKSLHREVDDLSERLSGLMETMDNDSPQAEIIRSLLR

SEQ ID NO: 22365 - protein, 253 aa, Triticum aestivum
  misc_feature (246)..(246): Xaa can be any naturally occurring amino acid
  misc_feature (248)..(248): Xaa can be any naturally occurring amino acid
TSLYKKAGWYRSGIPGISSTHASAFDDTKAGVKGLVDAGVTALPPIFRHSPESLESITSSNHVAGAIPTVDLAAPRREDAVALVRHAARTVGFFQVVNHGVPAELMAGMLEGVRRFNEGPAEAKQAIYSRDQARKVRFASNFDLFSSAAANWRDTLFFHLAPDPAPSEELPEAVRDVVTEYGHAVTKVGLSVLELLSESLGLSSDHLRDMDCAENLNAVCQYYPPCPEPYLTWGTKRHTDPGFLTXLXADGMG

SEQ ID NO: 22366 - protein, 503 aa, Nostoc punctiforme PCC 73102
MNIRKVSTTPLSDQKPGTSGLRKSVKVFQQPHYLENFIQSIFDSVGDLHSQTLVLGGDGRYYNRQAIQIILKMAAANGIGRIKVGQRGILSTPATSAIIRKYQAIGGIILSASHNPGGPNGDFGVKYNISNGGPAPEKVTEAIYDRSKVIDSYQILEAPDVDLETLGESHLGETVVEVIDSVQDYQELMESLFDFERIQQLLTRGNFRFSIDALHAVAGPYAHAIFEQRLGAPVGTVQNGTPLEDFGGGHPDPNLVYAHDLVDILYGENAPDFGAAFDGDGDRNMILGRKFFVTPSDSLAVLAANAKLVPGYSEGLAGVARSMPTSQAVDRVAAQIGIESYETPTGWKFFGNLLDAGKATLCGEESFGTGSNHIREKDGLWAVLFWLNILAVRQQSVEQIVREHWQTYGRNYYSRHDYEEIQTEQGNTLIERLRSLLPNLKGKQFGNYQVEYSDDFSYTDPVDGSISEQQGVRIGFTDGSRIVVRLSGTGTQGATLRHHVKIT

SEQ ID NO: 22367 - protein, 386 aa, Haloarcula marismortui ATCC 43049
MDSIIDDAIDEAEQDGEDAAGGTVDETTSTPSQDMSTSGTMSDEELASVVKDLETKITVVGCGGAGGNTVTRMMEEGIHGAKLVAANTDAQHLADEVAANTKILIGRKRTGGRGAGSVPKIGEEAAQEDIEDIQQSIDGSDMVFVTAGLGGGTGTGAAPVVAQAAQEAGALTISIVTIPFTAEGERRRANADAGLERLRSVSDTVIVVPNDRLLDYAPSMPLQDAFKICDRVLMRSVKGMTELITKPGLVNVDFADVRTIMENGGVAMIGLGESDSENKAQDSIRSALRSPLLDVEFDGANSALVNVVGGPDMSIEEAEGVVEEIYDRIDPDARIIWGASVNNEFEGKMETMIVVTGVESPQIYGQSEAEQEKAAQQLGEDIDYVD

SEQ ID NO: 22368 - protein, 732 aa, Zea mays
  misc_feature (144)..(144): Xaa can be any naturally occurring amino acid
  misc_feature (207)..(207): Xaa can be any naturally occurring amino acid
  misc_feature (211)..(211): Xaa can be any naturally occurring amino acid
  misc_feature (231)..(231): Xaa can be any naturally occurring amino acid
  misc_feature (234)..(234): Xaa can be any naturally occurring amino acid
  misc_feature (236)..(237): Xaa can be any naturally occurring amino acid
ESHVSSSAMAAAAPHFVLVPMLAQGHLLPMLDLARLIASHGARATVVLTPINAARNRAFLEQAARAGLTINFAELAFPGPALGLAAGCERVDMLDDISLIIPFYDAVWLLAEPLEAYLRSLPRLPDCLVSDSCMPWTASVTRRXGILRFVVHFPSAFYILAAHILEKRGVYDRADDDEFEPFEVPEFPVRAVVSRATAQGLFQWPEXMEKXRRDTLDAEATADGILFNTWXALXGXXFVERLASELGKKIWVVGPLCLLSSDSDAGAMAGRGNRAAVDADRIVSWLDARPAASVLYISFGSIARLFPAQVAELAAGLEASRRPFIWSAKETAPALDAEFEERVKDRGLVVRGWAPQMTILSHPAAGGFLTHCGWNSILESLCYGVPLMTWPQFVDQFLNEALIVDVLGTGVRSGAKVPATHVTVVKPGEVLEVQVWRDGVDRAVTDLMDEGPAGAARRARAKELGQQMRAAMAKGGSSDTDVRDLVRHVVEVARKKGEHEDTALAVLLESSTPTELSPLLNHSPVNESTDHHSQEQGIPTLITWSQGGDEVFLEGSWDNWTSRRALERSGKDHAVLLVLPSGVYHYRIIVDGELSKNGIIQTCDSFKQQRQANYHLSFSSVFFGQDYVPESLDSVAEFEAPPSPVHSYDLHCPGDEEFAKEPPTLPPQLLVSVLGGDVDSAGHGNQALKPQHVVLDHLFIEKGWGSQSLLALGVTHRFESKYVSFVLYKPLE

SEQ ID NO: 22369 - protein, 451 aa, Haloarcula marismortui ATCC 43049
MLGIVVSHADAASMHIGEHLRSLRDWETSVDETRPDDEGGGTVYQIDSVELREFEALHLDIENVAAAFDDPDLLVFASKHAGETDELLTAHHTGNFGVAEHGGEDGQFARACPGAHKAVVSALQRHAPPDYEVGMECTHHGPTAVGVPSMFVEVGSAEPQWEDPDAAEAAARAILDLADEPADRPRENGTRRHLLGVGGGHYAPRFERVVRETDWAVGHIAANWSLDALAEWADSDEERDTVLDRAFRASAADYALMEGDRPDLTAAIESLGYRVVSETFVQEATGVNLGLVEALEDAIRPVDEGLRFGALAPGYDGEWTVLDLPKELISDVRGVDSEALRDTIERQSIAYATEQNGTVVTGPIVCPATTELEAVVDPLVEILKQRFDSVERNADELVARETAFDPDLARTADIPEGPKFGKLASGESVEIDGEEIDPERFQRERIRRYTL

SEQ ID NO: 22370 - protein, 446 aa, Avicennia marina
MDVRGGEDVTGGSGAGRKVHSEDMAVEVPETAHQISNDSWLQAGFVLTTGVNSAYVLGYSGAVMVPLGWIGGVVGLILATLVSLHANALVAQLHEYGGKRHIRYRDLAGRIYGRRAYSVTWGMQYVNLFMINVGFVILAGNSLKAVYTLFRHDHVMKLPHFIAIAAIACGLFAISIPHLSAMRIWLAFSMFFSLVYIIVGFALSLKDGIEAPPRDYTLPEKGADKVFTIIGAAAELVFSFNTGMLPEIQATVRPPVIGNMMKALYFQFTVGVVPMYSIIFVGYWAYGSKTTSYLLNNVHGPIWLMTVANIAAFLQSVISLHIFASPMYEIWIPDLESKEVLWPIRNLSFRVVVRGGYVATTAFVSALLPFLGDFMSLTGAISTFPLTFILANHMYLVAKGNKLSPLHKTGLWLNIGFFGCLAVAAAVAALREIVVDSKTYHLFADI

SEQ ID NO: 22371 - protein, 143 aa, Triticum aestivum
  misc_feature (92)..(92): Xaa can be any naturally occurring amino acid
  misc_feature (98)..(98): Xaa can be any naturally occurring amino acid
  misc_feature (104)..(104): Xaa can be any naturally occurring amino acid
MARLNSKAVAAAVVLAAVVLMMAGREASAALSCGQVDSKLAPCVAYVTGEGRPRLSKECCSGVQGLNGLARSSPDAKIACKFLKDLATKHQXINMGKXSGVPGXCGVSVPFPINISTTATCQLFIYNLPTASWTPAWTYFTLM

SEQ ID NO: 22372 - protein, 447 aa, Avicennia marina
MESQGREDVVGCSGAGGRVHSDGHIDIEIPETAHQISNDSWFQAGFVLTTGINSAYVLGYPGAVMVPLGWIGGVIGLILATVVSLHANALVAKLHDFGGKRRIRYRDLAGSIYGGKAYSITWGMQYVNLVMINVGYIILAGNSLKAVYLLFRDDHVMKLPHFIAIAGLACGLFAISVPHLSALRNWLAFSTLFSMIYIVGGIALAIKDGFKAPPRDYSIPGTKTSRIFTTIGASANLVFSFNTGMLPEIQATVRPPVVENMMKGLYFQFTVGVVPMYAIIFAGYWAYGSTTSSYLLNNVHGPIWLKTTTNISAFLQSVIALHIFASPMYEFLDTKYGIKGSALAVRNLSFRILVRGGYVAMTSLVSALLPFLGDFMSLTGALSTFPLTFILANHMYLVANRNKMSLLQKNWHWLNVVLFSCMAVAAAVAALRLIAVDSRTYHVFADI

SEQ ID NO: 22373 - protein, 502 aa, Lotus japonicus
MAALPECSAANLAQLIGPNATDAAAVAGFICDQFTAVGQRFSDTAFAVDSTYLLFSAYLVFSMQLGFAMLCAGSVRAKNTMNIMLTNVLDAAAGGLFYYLFGFAFAFGAPSNGFIGRHFFGLKDVPTVAFDYSYFLYQWAFAIAAAGITSGSIAERTQFVAYLIYSSFLTGFVYPVVSHWFWSGDGWASATNTGNLLFGTGVIDFAGSGVVHMVGGVAGLWGALIEGPRIGRFDHAGRAVSLRGHSASLVVLGTFMLWFGWYGFNPGSFTKILSAYDSGNYYGQWSAIGRTAVTTTLAGCTAALTTLFGKRIISGHWNVTDVCNGLLGGFAAITAGCSVVEPWAAIVCGFVAAVVLIACNMLAEKVRYDDPLEAAQLHGGCGAWGIIFTALFAKEEYVNQVYPGKPGRPYGLFMGGGGKLLGAHVIQILVIIGWVSATMGPLFFILNKMKLLRISTEDELAGMDLTRHGGFAYAYEDDESHKPGIQLRKIEPNSSSTPSAES

SEQ ID NO: 22374 - protein, 313 aa, Shigella flexneri 2a str. 301
MLDNVLRIATRQSPLALWQAHYVKDKLMASHPGLVVELVPMVTRGDVILDTPLAKVGGKGLFVKELEVALLENRADIAVHSMKDVPVEFPQGLGLVTICEREDPRDAFVSNNYDSLDALPAGSIVGTSSLRRQCQLAERRPDLIIRSLRGNVGTRLSKLDNGEYDAIILAVAGLKRLGLESRIRAALPPEISLPAVGQGAVGIECRLDDTRTRELLAALNHHETALRVTAERAMNTRLEGGCQVPIGSYAELIDGEIWLCALVGAPDGSQIIRGERRGAPQDAEQMGISLAEELLNNGAREILAEVYNGEAPA

SEQ ID NO: 22375 - protein, 585 aa, Triticum aestivum
MCGILAVLGCADDTQGKRVRVLELSRRLKHRGPDWSGMHQVGDCYLSHQRLAIIDPASGDQPLYNEDKSIVVTVNGEIYNHEQLRAQLSSHTFRTGSDCEVIAHLYEEHGENFIDMLDGVFSFVLLDTRDNSFIAARDAIGVTPLYIGWGIDGSVWISSEMKGLNDDCEHFEIFPPGHLYSSKQGGFKRWYNPPWFSEVIPSVPYDPLALRKAFEKAVVKRLMTDVPFGVLLSGGLDSSLVAAVTVRHLAGTKAAKRWGTKLHSFCVGLEGSPDLKAAKEVANYLGTMHHEFTFTVQDGIDAIEDVIYHTETYDVTTIRASTPMFLMSRKIKSLGVKMVISGEGSDEIFGGYLYFHKAPNKEELHRETCQKIKALHQYDCLRANKATSAWGLEARVPFLDKEFINEAMSIDPEWKMIRPDLGRIEKWVLRKAFDDEEQPFLPKHILYRQKEQFSDGVGYSWIDGLKAHAESNVTDKMMSNAKFIYPHNTPTTKEAYCYRMIFERFFPQNSAILTVPGGPSVACSTAKAVEWDAQWSGNLDPSGRAALGVHLSAYEQEHLPATIMAGTSKKPRMIEVAAPGVAIES

SEQ ID NO: 22376 - protein, 254 aa, Lactobacillus acidophilus
MDGAILVVAATDGPMPQTREHILLARQVGVNYIVVFLNKCDLVDDPELIDLVEMEVRDLLTEYDYPGDDIPVVRGSALKALQGDKEAQDQIMKLMDIVDEYIPTPERQTDKPFLMPVEDVFTITGRGTVASGRIDRGTVKVGDEVEIVGLVDKVLKSVVTGLEMFHKTLDLGEAGDNVGVLLRGVDRDQVVRGQVLAAPGSIQTHKKFKAQVYVLKKDEGGRHTPFFSDYRPQFYFHTTDITGEIELPEGTEMV

SEQ ID NO: 22377 - protein, 305 aa, Methanosarcina mazei Go1
MYDLIIIGGGPAGLTAGIYAVRYGLDTLILERNEISGQISMADIVENYPGFPSISGLELMERFRTHAQEVGVKTTITEVLSVRSEGTKKIITTDSGDLEAKAVIIATGANPKHLGVPGEKELISKGVSYCAICDGPFFRNKIVAVVGGGNSAVTDALFLSKVAQKVYLVHRRDHLKAARVLQDRVDGTPNIELILNSHVLEIVGTREGIKKVEKIILEDVNSRETRELSTNGVFIYVGIHPNTEFVDVEKDEGGFIKTDRWMETSEKGIYAAGDCRDTPIWQLVTAVRDGAIAATAAYEYIEKIR

SEQ ID NO: 22378 - protein, 461 aa, Mycobacterium tuberculosis H37Rv
MATATTQRPLKGPAKRMSTWTMTREAITIGFDAGDGFLGRLRGSDITRFRCAGRRFVSISHPDYVDHVLHEARLKYVKSDEYGPIRATAGLNLLTDEGDSWARHRGALNSTFARRHLRGLVGLMIDPIADVTAARVPGAQFDMHQSMVETTLRVVANALFSQDFGPLVQSMHDLATRGLRRAEKLERLGLWGLMPRTVYDTLIWCIYSGVHLPPPLREMQEITLTLDRAINSVIDRRLAEPTNSADLLNVLLSADGGIWPRQRVRDEALTFMLAGHETTANAMSWFWYLMALNPQARDHMLTELDDVLGMRRPTADDLGKLAWTTACLQESQRYFSSVWIIAREAVDDDIIDGHRIRRGTTVVIPIHHIHHDPRWWPDPDRFDPGRFLRCPTDRPRCAYLPFGGGRRICIGQSFALMEMVLMAAIMSQHFTFDLAPGYHVELEATLTLRPKHGVHVIGRRR

SEQ ID NO: 22379 - protein, 370 aa, uncultured archaeon GZfos1D1
MDISQTIFEEYADDLGPEKIIHIYEPVAKLRAIVVIDNVAAGPVIGGVRMAPNLTTTEIMRLARAMTLKNAAAGLPHGGGKAGILADPKTEGKEHLIRVFARTIEHLHDYIPGPDMCTDESCMAYIFDEIKRAVGLPRVLGGIPLDEIGATGFGVAECAEVAKEYIDLDLNGARLVVEGFGNVGKNTARFLEEKGASLVAASDTSGTVYNMDGIDVSGLIRVKEEKGSVIYHEDAEKLKTGDLLKIPGDIFVPAARPDVIDERNVSTLDTKLVIQGANIAITLGAEKALHERGVLSVPDFIANAGGVIAAAVEYRHGDEKEAFSEIKSKIRANTKKILDKTYSEGLYPRDAAEMIAKERVLSAMSYRRCI

SEQ ID NO: 22380 - protein, 411 aa, Xylella fastidiosa Dixon
MAHFELIEKMAPNAVIKVVGVGGGGGNAVAHMVNSTVDGVEFIIANTDSQAIKNCGAKLQLQLGANVTKGLGAGANPEVGRQAALEDRERIIDALQGADMVFITAGMGGGTGTGAAPVVAQLAKEMGVLTVAVVTKPFPFEGRRRMQVALKGIEELNQHCDSLITIPNEKLITVLGRNATMIQAFRAANDVLQGAVQGIADLIVRPGLINVDFADVRTVMSEMGLAMMGTGSARGDDRAQAAAEAAVQNPLLDDVNLAGANGILVNITAGSDFTMAEFDEIGRTIDGFASEDATVVVGTVLDPEMQDEVRVTVVATGLSRTVSRAAQQRPEQQRTSVKLVRNATTGQAEFGDLDNTGGAVSRAVGGSLGLGFGLRRSGTDAVSGSAPSAPVTAELPSDYLDIPAFLRRQAD

SEQ ID NO: 22381 - protein, 957 aa, Klebsiella pneumoniae
MTKPVLVLVGHGMVGHHFLEQCVSRDLHQQYRIVVFCEERYAAYDRVELTEYFAGRSAESLSLVEGDFFTQHGIELRLSESVASIDREARVVRDAFGHETHWDKLVLATGSYPFVPPVPGHNLEGCFVYRTLDDLDQIAARAATARRGVVIGGGLLGLEAANALKQLGLETHVVEFAPNLMAVQLDNGGAAMLREKISELGVGVHTSKATTEIVRNEQGLQLNFRDGSSLATDMLVFSAGIRPQDALARSGGLSVGERGGICIDNQCRTSDPDVLAIGECALWENKIYGLVAPGYQMAARRAATLAGEAGSFSGADMSTKLKLLGVDVASFGDAQGRTPGCQSYQWTHGPQQVYKKIVVSADGKNLLGGVLVGDAGDYATLLQMMLNGMALPKHPESLILPALEGSRPKALGVAALPDGAQICSCHNVSKGDICQAVSGGAGDMAAIKSRTKAATGCGGCSALVKQVMEYQLAEQGVEVKKDICEHFPWSRQEIYHLVRVNHIRTFEQLIARYGQGHGCEVCKPLVASVLASCWNEYLLKPAHLPLQDTNDRYFANIQKDGTYSVVPRMAAGEVTPDGLIAIGQIAKRYQLYSKVTGGQRIDLFGARLEQLPAIWRELAEAGFETGHAYGKSLRTVKSCVGSTWCRYGVQDSTGLAVTLEHRYKGLRAPHKIKMAVSGCTRECAEAQGKDIGVIATEKGWNLYVCGNGGMKPRHADLFASDLDEATLIRSIDRLLMFYIRTADRLQRTSTWMDNLEGGVDYLREMILEDSLGIGEELEQEMARVVESYQCEWQTTLNDPQRLALFRSYVNSDEPDETVQRQTLRGQPQLAPFAAQGEPALPSRPWQAICDLDAIPQQAGIGARLGERQIALFRFGDQVYALDNLEPGSEANVLSRGLLGDAGGEPIVISPLYKQRIRLRDGRQCDGGEQAVRAWPVKVENGKVWVGNQQLLARAEAS

SEQ ID NO: 22382 - protein, 421 aa, Brassica napus
MQNPRLKQQQQQQQQAMMQQALMQQHHSLYHPSLMAPPPPPQMEPLPSGNLPPGFDPTTCRSVYAGNIHTQVTEVLLQEIFASTGPVESCKLIRKDKSSYGFVHYFDRRSAGLAIMSLNGRHLFGQPIKVNWAYATGQREDTSSHFNIFVGDLSPEVTDAALFESFSAFNTCSDARVMWDQKTGRSRGFGFVSFRNQQDAQNAINEMNGKWLSSRQIRCNWATKGATFGEDKHSSDGKSVAELTNGSEDGREISITNEEAPENNPQYTTVYVGNLAPEVTQLDLHRLFHTLGAGVIEEVRVQRDKGFGFVRYNTHDEAALAIQMGNSQPFLFNRQIKCSWGNKPTPIGTASNPLPPPAPVAVPGLSPMDLLAYERQLALAKMHPQAQHSLRHANAAGASAAMYDGGFQNVAAAHQQLMYYQ

SEQ ID NO: 22383 - protein, 218 aa, Mycoplasma mycoides subsp. mycoides SC str. PG1
MKIVPSIYCANLIDLKTEITNLTKAQINQIHFDVMDGVFVKNYALSNKLVDEIKQQFPNLIIEVHIMGIDLLDKISLFKNADYLTFHYNAINDLNQAKLWINEIKKYNLKPGIALDLNNEINDIKKILNEIEVVTFMSIKPGFTGQKFEESSWTKLNLIKELKLKYPHLKFQIDGGVRWENIKKLIDCQLDWIVVGSLLFNENDYLKVVSRIKQLETN

SEQ ID NO: 22384 - protein, 158 aa, Triticum aestivum
MAAPLRRVFPSLGRALLSPTPARMLSAEASDALVEIKPGEIGMVSGIPEEHLRRKVLIYSPARTASQQGSGKVGRWKINFVSTQKWENPLMGWTSTGDPYANVGEAGLTFDSAESAKAFAEKHGWEYVVRKRHTPLLKPKTYAENFKWKGPPKTEEAA

SEQ ID NO: 22385 - protein, 439 aa, Bacteroides fragilis NCTC 9343
MKNTAKNFMFYVAFVASLGGLLFGFDTAVISGAEKSIQVVYDLSDFSHGFTIAIALIGTIIGAFVCSKPVEKHGRLKALKIIAFLYFVSAVGSAAIIDWYSFLFFRFAGGLAVGASSVVGPMYIAEISPSRWRGRFVAFFQFNIVLGIVLAYFSNYWIHGIAHDWQWMLGVEAIPAIAFALLLYTVPESPRWLVKQDREAEARHVIKKVSNADIEQEIHEIKESLVTIGASGEKLFQHKYRKPILYAFLIATFNQLSGINAILYYAPRIFEMSGVFTDSAMMQSIVIGLTNLTFTMIGMILIDQVGRKKLLYIGSIGMTLSLALVAKGFYQDAFSGYYMLICLMGFIAFFAISLGAVIWVLISEVFPNNVRSKGQVLGSMTHWVWSALLSWMFPVFIRTGGTFIFSFFAIMMFLSFFFALRLPETKNKSLEQIQKELTN

SEQ ID NO: 22386 - protein, 289 aa, Arabidopsis thaliana
MATNIGMMDSAYFVGRNEILTWINDRLHLNLSRVEEAASGAVQCQMLDMTFPGVVPMHKVNFDAKNEYDMIQNYKVLQDVFNKLKITKISDLVCLTEKTPQPLEINRLVKGRPLDNLEFLQWLKRFCDSINGGIMNENYNPVERRSRNGKERSVKGSNKIPKSLQTNNNHPPPNSSSVGLSKASGPKSAKAAEVQALSKELVDLKISTDLLEKERDFYFSKLRDVEILCQTPELDDLPIVVAVKKILYATDANESALEDAQEYLNQSLGVEDDEAEGNGEQLEEEKTQA

SEQ ID NO: 22387 - protein, 460 aa, Agrobacterium tumefaciens str. C58
MSGEMILTLFSVGTPKACLFYREDRWKQMRRIVVTGMGAVSPLGANVDISWSRLLAGQSGIRRLTDDVVGDLPAKVGGVVPSLAEDPERGFDPDRIIAPKDQRKVDRFIIFALAAAEEALVQANWKPVSNEDRLRTATIIASGIGGFPAITEAVRTVDQRGVRRLSPFTIPSFLVNLAAGQVSIRHGFKGPLGAPVTACAAGVQAIGDAARLIRSNEADIAVCGGTEACMNIVSLGGFAAARSLSTGFNETPTKASRPFDTARDGFVMGEGAGVLVIEALSHALARGATPIAELVGYGTTADAHHITSGPEDGSGARRAMEIAIAQAGIAPHEIGHLNAHATSTPVGDLGEIRAIKSVFGQRKSVAVSGTKSATGHLLGAAGGLEAIFTILALKNRIAPPTLNLNAPDTESDGIDFVANLARSLDAEYAISNGFGFGGVNASVLFRRWPKASNSGISSVR

SEQ ID NO: 22388 - protein, 183 aa, Dunaliella salina
MQLHMNLSASRIAAGAINVRPAPFVRGAAAPKRTSRHIVRAENDPSTPPPPQGSQESPSSSPSPPPPPPQPTAAAPTVTEVMGFSGAPEIINGRLAMLGFVAALGAELSTGESVLTQLADEPTLIALTFVLFSAASLVPAFARRKSDPVGPFTPQAEMTNGRAAMIGFAAMLVYEGVQGIALF

SEQ ID NO: 22389 - protein, 588 aa, Sinorhizobium meliloti 1021
MLDTAKTRWHPVAASYDLPFRHIFHAQLLGREFAVWRADDGYVNIWENRCLHRGVRLSIGINDGRELKCQYHGWRYSNRTAGCTYIPAHPADAPARTITNRTFASVERYGLVWTAEEPQGDVPEVTGLAEGDLLTLRGIPVNAPADVVVAALTGYRFQPNGRLEGRAADMSLKASDGFSVALTAREEGAETLAVFFVQPVDSNRSVIRGVLDSSPRGAERLTVLHHHNERLSKLREIVEREAQAAPQPAPLEPVIERVSPELAELPEMTAHGRKATIRVTVARKWMAADGIAAFELRPIKGLLPTFQPGAHIDVHMPNGLIRQYSITNGPGESDSYVIGVKLERESKGGSRCMHETLRAGDVLAISEPRNNFPLRRDAEKTIFVAGGIGATPLIAMAQALKNQSLDFAFHYFAQNQAQLAFPEKTALLGEALKPQLGLDPEGTEAKLKDILSGYRPGMHVYLCGPGPMLEAARRIAAEVGWPETAVHFEYFKNTNTIDDSSSFEVALARSCVTFKVPAGRTILDVMREVGIDMPSSCEQGACGTCLATVIEGEPDHQDVYLNDAERKSGTKIMTCVSRAKSARLVLDL

SEQ ID NO: 22390 - protein, 291 aa, Bifidobacterium longum DJO10A
MSTKIDGKQIAAEIKTNLAERVNKLKAQGIQPGLGTLLVGEDPGSMKYVAGKHADCQEVGITSVKKELPADASFDDIAAAVRELNEDPACTGFIVQLPLPKGINENAIIDMIDPAKDADGMHPYNLGELVLHVRGDISTPLPCTPRGVLELLDAYDIDLNGKEVCVLGRGITIGRTIGLMLTRNAVNATVTLCHTGTRDVADHMRRADVIVAAMGSAGFVTPDKIKDGAVLVDVGVSRVYDEEAGRYRIKGDVDKACYDKASAYTPNPGGVGPMTRAMLLANVVEMAERHA

SEQ ID NO: 22391 - protein, 428 aa, Burkholderia vietnamiensis G4
MSSQLQSIPSYLHADDLGPWGNYLQQVDRVAPYLGSLSRWLETLKRPKRILIVDVPIELDNGTVAHFEGYRVQHNVSRGPGKGGVRYHQDVTLSEVMALSAWMSVKNAAVNVPYGGAKGGIRVDPRKLSRGELERVTRRYTSEIGIIIGPNTDIPAPDVNTNEQVMAWMMDTYSMNQGQTSTGVVTGKPISLGGSLGRKEATGRGVFVVGCEAAKKKGLEIEGARIAVQGFGNVGGIAAKLFQEAGAKVIAVQDHTGTIYQPAGLDANKLLDHVARTGGVAGFEGTEPMPNDEFWTVETDILIPAALENQITEKNASKIRTKIIVEGANGPTTTAADDILSANGVLVIPDVIANAGGVTVSYFEWVQDFSSFFWTEDEINHRLERVMREAFAGVWAVAEEHNVSVRTAAFIVACKRILMAREMRGLYP

SEQ ID NO: 22392 - protein, 254 aa, Lactobacillus helveticus
MDGAILVVAATDGPMPQTREHILLARQVGVNYIVVFLNKCDLVDDPELIDLVEMEVRDLLTEYDYPGDDIPVVRGSALKALEGDKEAQEQILKLMDTVDEYIPTPERQTDKPFLMPVEDVFTITGRGTVASGRIDRGTVKVGDEVEIVGLVDKVLKSVVTGLEMFHKTLDLGEAGDNVGVLLRGIDRDQVVRGQVLAAPGSIQTHNKFKAQVYVLKKEEGGRHTPFFSDYRPQFYFHTTDITGEIELPEGTEMV

SEQ ID NO: 22393 - protein, 470 aa, Frankia sp. CcI3
MTTSAETALEGLGSYRFGWADTDAYAADVERGLSEAVVRGISAKKSEPSWMTDLRLKGLRLFERKPMPTWGADLSGIDFDNIKYFVRSTEKQAEEWEDLPEDIRATYDRLGIPEAEKQRLIAGVAAQYESEVVYHKIREDLEEQGVLFLDTDSGLREHPELFQEYFGSVIPVGDNKFAALNTAVWSGGSFIYVPPGVQVEIPLQAYFRINTENMGQFERTLIIVDEGAYVHYVEGCTAPVYSSDSLHSAVVEIVVKKNARCRYTTIQNWSNNVYNLVTKRAACHEGGTMEWIDGNIGSKVTMKYPAVWLLGEHAKGEVLSIAFAGAGQHQDAGAKMVHAAPRTSSTIVSKSVARGGGRTSYRGLVQINEGSSASRSTVKCDALLVDTVSRSDTYPYVDVREDDASIGHEASVSKVGEDQLFYLMSRGLSEEEAMAMVVRGFVEPIARELPMEYALELNRLIELQMEGAVG

SEQ ID NO: 22394 - protein, 464 aa, Haloarcula marismortui ATCC 43049
MLVSLTKCMHVFWHQRDLRIPDNRGLTAAAADDEVLPVYVLDTDLLANIGKRQKAFLLAGVRALKQAYRDHGGELLVKKGTAVDVLSNVVDEYDADRVYYNEHYRPARRNRQRRVDEALPTKSLTDLVLVDPAGLDSQYENHSRFYDDWQAHHKLPPVGSPDSGSLVDVSDPTTAPTIETEMDLPTPGYEGARQRYDDFLTGGIETYNDTRDDMQAAVERPTSAVSRMSPYLAAGMIGIREMWRDASDRHTEATGDAQRNIQKYRYELSWREQSYHLLYYNPTLLSENYKTFPNRIEWENDEDNFEAWKHGETGYPFIDAGMRQLEQEGYIHNRPRQNVASFLTKHLLVDWREGARHFRKRLVDHDPANNAASWQWTASTGTDSVDVRIFDPVAQMSKYDSGADYVTEYVPELRGVPSTKIVDWPTLSDGEREELAPDYYHPIVDRNAAYERAQRVFETALGKR

SEQ ID NO: 22395 - protein, 415 aa, Burkholderia vietnamiensis G4
MIEIGVKIGDTVEKEQSLVTLESDKATMDVPSPAAGVVKDIKVKVGDAVSEGTLIVLLEAAGAAAPAVAPASAPAPAAAAPAPAAAPAPAPAASAPAAAAPAAAPSGEYRASHASPSVRKFARELGVDVARVSGSGPKGRITKDDITGFVKGVMSGQRAAPGAAAAPAGGGELNLLPWPKVDFAKFGPFEAKPLSRIKKISGANLHRNWVMIPHVTNNDEADITELEALRVQLNKEHEKAGVKFTMLAFVIKAVVAALKKFPTFNASLDGDNLVFKQYYHIGFAADTPNGLVVPVIRDADKKGLVDIAKEMAELSKAARDGKLKPDQMQGGCFSISSLGGIGGTHFTPIINAPEVAILGLSRGQMKPVWDGKQFVPRLTLPLSLSYDHRVIDGAEAARFNAYLGALLADFRRIIL

SEQ ID NO: 22396 - protein, 454 aa, Burkholderia thailandensis E264
MKNLQRHLSARHIRFLALGSAIGTGLFYGSASAIRLAGPAVILAYIVGGAAVYMVMRALGEMAVREPVPGSFGHYASENLGPFAGFVTGWTYTLEMVIVAIADITAFGIYMGFWFPDVPQWIWVLAIVAIICGLNLCHVKVFGELEFWLSIVKVGAIVAMIGGGAAILFSGMKLGSGGAPALANLWSHGGFLPNGVGGLVASLSVVIFAYGGIEVIGMSAGEAKEPERVIPRAINAVPMRILLFYVLTMVVLMSIFPWTGVGANGSPFVQIFSALGVRSAAEILNLVVISAAISAINSDIFGAGRMMYGMALQGQAPRALASMSARGVPWVTVLVMAGALLVGVVLNYLMPKDVFLMVAAIATFATVWVWLMILLSQVAMRRRLSAAETAALKFKVPFWPIGPAITIAFMAFVIAMLGYFDDTRIALFVGAAWLALLTLVFYTRVRPRLAAVAR

SEQ ID NO: 22397 - protein, 254 aa, Lactobacillus amylovorus
MDGAILVVAATDGPMPQTREHILLARQVGVNYIVVFLNKCDLVDDPELIDLVEMEVRDLLTEYDYPGDDIPVVRGSALKALQGDKEAQEQILKLMDIVDEYIPTPERQTDKPFLMPVEDVFTITGRGTVASGRIDRGTVKIGDEVEIVGLVDKVLKSVVTGLEMFHKTLDLGEAGDNVGVLLRGIDRDQVVRGQVLAAPGSIQTHKKFKGQVYVLKKDEGGRHTPFFSDYRPQFYFHTTDITGEIELPEGTEMV

SEQ ID NO: 22398 - protein, 254 aa, Lactobacillus crispatus
MDGAILVVAATDGPMPQTREHILLARQVGVNYIVVFLNKCDLVDDPELIDLVEMEVRDLLTEYDYPGDDIPVVRGSALKALQGDKEAQEQILKLMDVVDEYIPTPERQTDKPFLMPVEDVFTITGRGTVASGRIDRGTVKVGDEVEIVGLVDKVLKSVVTGLEMFHKTLDLGEAGDNVGVLLRGIDRDQVVRGQVLAAPGSIQTHKEFKGQVYILKKEEGGRHTPFFSDYRPQFYFHTTDITGEIELPEGTEMV

SEQ ID NO: 22399 - protein, 224 aa, Acidobacteria bacterium Ellin345
MMEKIRCAAVLFDLDGVLVDSTPAVTRVWARWAAVHGFDADEVVHNAHGRPSIETLREYLPNADHEKENRELERQEIEDVEGVILLPGAQQLLATLPPERWTIATSATRALAKVRIEVAGLPVPPRMITASEITRGKPNPEPYLKAAALLGFPASECVVFEDVPAGIRAGKAAGATVIALRTTVPDKELRAAGADFVLNSCADVTVESFSSEGIVLALNDGEKK

SEQ ID NO: 22400 - protein, 254 aa, Lactobacillus gallinarum
MDGAILVVAATDGPMPQTREHILLARQVGVNYIVVFLNKCDLVDDPELIDLVEMEVRDLLTEYDYPGDDIPVVRGSALKALQGDKEAQEQILKLMDVVDEYIPTPERQTDKPFLMPVEDVFTITGRGTVASGRIDRGTVKVGDEVEIVGLVDKVLKSVVTGLEMFHKTLDLGEAGDNVGVLLRGIDRDQVVRGQVLAAPGSIQTHKEFKAQVYVLKKEEGGRHTPFFSDYRPQFYFHTTDITGEIELPEGTEMV

SEQ ID NO: 22401 - protein, 511 aa, Triticum aestivum
  misc_feature (379)..(379): Xaa can be any naturally occurring amino acid
MQGVAQEESRRSSGEAADVGCGNSGLAADAAVLSEDPSEGHSSESSSSQCAGSDGDDKEVPEMCSKSGGNDENSECTDQSSPRAVLDISVSGSVDSDESSSVEQPAVPSRSVQPLQWRNLISGIILSRKKLMARAVTFPQRSKSTGLKRYLGRMRSGKNQMDCSAIAPEIFPEIEKWRPSWRSFDYDELCAATDRFSSDNLIGKGGHAEVYKGQLADGQFVAVKRLTKGGNKEDRISDFLSELGIIAHVNHPNAAQLLGFSVEGGLHLVLQFSPHGSLASLLHGAKGGLRWKARFNIALGIAEGLFYLHEGCHRHIIHRDIKASNILLTEDYQPQISDFGLAKWLPDKCTHQVVFPIEGTFGYMPPGYFMHGIINEKTXDVFAYGVLLLELATGRKAVDSSRQSLVIWAKPLLESNNMKGLVDPSLDVGYDPEEMALTLAVASMCIHHSANLRPSMKSVVRFMKGDRESLELMGKPKPTKPPMFDSCDSEDYTRTSYLNDLDKHKQLALEQ

SEQ ID NO: 22402 - protein, 176 aa, Brassica napus
MAAAEDSKVSTADSFGAVVLGGTFDRLHDGHRTFLKAAAELARDRMVVGVCDGPMLKNKQFAEMIQPIEERMLNVQTYVKSIKPDLVVQTDPITDPYGPSIVDEALEAIVVSKETLPGGLSVNRKRAERCLSQLKIEVVEIVSDGSSGNKISSSTLRKLEAEKQNQHAAEQEASST

SEQ ID NO: 22403 - protein, 494 aa, Gibberella zeae PH-1
MAENYHKEVISGLKNKSLFIQDAFINGQWVAKENKFDVFEPSTATVLGQVANCALEDFQTAIKSADVAQTKYFDSTTGASRGAMLRKWYDLVLANQEDLAKILSLENGKTYSEALGEVIYSASFISWFAEEATRSYGVTIPSSAPHTTLMTIREPVGVCGIITPWNFPAAMITRKIAPALAAGCSVVIKPPSETPYSALAFTKLAIEAGLPPATIQVLPTRDRQAATELATNPLVKKISFTGSTGVGKYLAKLAAGTLKKLSLELGGNAPFIVFEDADLDLAAEGAMFCKFRCSGQTCVCANRLYVQKSVAKEFTAKLVEKVNALKMGGGLDKTTTQGPLVNKSAIDKVKEHIADATSKGAKIATGGSTPDSPGFFHQPTVLTGVTQEMAVAKDETFGPLAPVFEFDTEEDAIRLANDTEFGLAGYFFSKDISRVMRVAHKMQVGMVGANTGKISAAEAPFGGVKESGYGKEGSLYGMAEYQNIKSITIGNLNN

SEQ ID NO: 22404 - protein, 111 aa, Brassica napus
MARVSFKDSLKALEADIQHANTVALDYPREKDGARVQMRLSYNPAAQFLLFLVQWTDCHLAGALGLLRVLIYMPCAVPRSSISVDVSQTSMTAFCAGFAPSRSETKRRSKE

SEQ ID NO: 22405 - protein, 458 aa, Geobacillus stearothermophilus
MSGPNDIDEAVQAAKEAQRQWALVPAPKRAEILYKVGMLLKERKEQLARLLTMEMGKVIEEARGEVQEGIDMAFYMAGEGRRLFGDTTPSELKDKFAMSVRTPVGVVGIITPWNFPIAIATWKSFPAIVAGNAVVWKPAPETPIMAQELARIFEEAGLPPGVFHVVHGDGPTVGNALVEHPDVKVISFTGSNEVGRMIAEKCGRLLKKVSLEMGGKNAVIVMDDADLTLAVDGIIWSAFGTSGQRCTACSRVIVHERVKQEFERRLLEAVKTLKIGNGLDETVKVGPVIHEEALQKIDRYVRIGVEEGAKLLVGGYILREGDYARGFYYAPTIFTDVTPNMRIAREEIFGPVVSIISVRSLDEAIAVNNSVDYGLSSAIFTRDVNNVFRAMRDLDTGIVYVNAGTTGAEIHLPFGGTKGTGNGHRDSGVAALDVFTEWRSIYVDFSGKLQRAQIDTDD

SEQ ID NO: 22406 - protein, 464 aa, Edwardsiella tarda
  misc_feature (186)..(186): Xaa can be any naturally occurring amino acid
MKKGTDTRGGYLDSRFGSEAIRTAAEAHHFPQGEMREDIAFQVINDELFLDGNARQNLATFCQTWDDDYVHRLMDISINKNWIDKEEYPQSAAIDLRCVNMVADLWHAPRPADGQAVGTNTIGSSEACMLGGMAMKWRWRAKRLAQGKSVDKPNMVCGPVQVCWHKFARYWDVELREIPMAPGKLXMDPERMIAACDENTIGVVPTFGVTYTGNYEMPDVLHKALDDLQARTGLDIDMHVDAASGGFLAPFCAPDIVWDFRLPRVKSISASGHKFGLAPLGCGWVVWRDAASLPDDLIFKVDYLGGQVGTFAINFSRPAGRVIAQYYEFLRLGREGYTKVHTASYQVAQFLAAEIAKLGPYEFICSGDPQQGIPAVCFRIPAGKALGYSLYDLSERLRLRGWQVPAFALNGEMSDVVVMRIMCRRGFEMDFAQLLMEDFRAALAYLKAHPAVANVAHQNSFKHS

SEQ ID NO: 22407 - protein, 405 aa, Thiomicrospira crunogena XCL-2
MEQLTASLDVMFILLGAILVLFMHAGFAFLEVGTVQHKNQVNALVKIMTDLGVSTVAYFFIGYGVAYGVFLGFNLDGQLTQAMTEKSGYELVKFFFLMTFAAAIPAIVSGGIAERARFYPVLLATFLTVAFIYPFFEGMAWNGNFGMQSWLEASYGAPFHDFAGSIVVHAVGGWIALAAIIVLGSRTGRYDSNGNMRHVYPPSSIPFLALGAWILSVGWFGFNVMSAQAIEGIQGLVAMNSLMAMVGGIIAATFIGDKDPGFIHNGPLAGLVAICAGSDVVSPLGALVIGLVAGALFVKAFTWTQKSLKIDDVLGVWPLHGLCGVWGAIAVGIFGSTALGGLGGVSMMSQILGTLAGVGVALIGGFLVYILVDKLMGLRMSDEDQYEGADLSIHKIHANPPREEF

SEQ ID NO: 22408 - protein, 433 aa, Listeria monocytogenes
MAQNMTIKDDFIHAFSSNANEPDWFLDIRRNAFKAYGELDLPFVDKTKITRWNFTKFETFIPFKEGVTNETLPEKVANLVDLDNKEANFYVQMDERPARLQLQQELVDQGVIFTDIISAVKNHPELVKKYFMKDAVQVNEHKLTAFHAALVNGGIFLYVPKNVEVKSPIQAVFVQDKAESPLVNHVLLVADDNSAVTYVENYVTVNNEPKGIVSIVEEVIAEKNARITFGGVDNLASEVTAYVNRRGHIGTDSQIEWALGLMNDGDTINENVTNLMGDGSSADVKTVTVGRGKQTQNVTTRVTHYGKASNGTILSHGVMKERATTIFNGIGHIKHGASKSDAQQESRVLMLSPEARGDANPILLIDENDVVAGHAASVGRVDPLQLFYLMSRGISQKEAERLVIHGFLDPVVRQLPIESVKTMLREVIEGKVR

SEQ ID NO: 22409 - protein, 384 aa, Methylococcus capsulatus str. Bath
MVAQRVTINDTTLRDGEQTAGVAFTAEEKLSIARALARAGVPEMEVGIPVMGAEEQEVIRAIAGLGLSARLMVWGRMCERDLAAAADCGADRVNLSIPVSDIHLRHKVNRTREWVLASIDRFVKRGLDAGLEVCVGCEDASRADPDFMLQVAEAAQRAGARRIRFADTLGLLEPMSTFERIRRLAVATDLEIEMHAHNDFGLATANTLMAVQAGASHVNTTVNGLGERAGNAAIEETVMALHQLYGIDTGIAVDHFPEISGLVAAASGRPVAANKSIVGEAVFTHEAGIHVDGLLKNLINYQGVDPKDLGREHRLVLGKHSGTHAVKRSFRQLGIELSETDAGRLLKRIRIHASQTKRPPSETELKLFYAETSVSSQPRPGLFG

SEQ ID NO: 22410 - protein, 375 aa, Arabidopsis thaliana
MDFDSISRESTFLSPLLNQNAMWQMNLGSDDTMGVDGSYPERHGEPDCAYYIRTGLCRFGSTCRFNHPHDRKLVIATARIKGEYPERIGQPECEFYLKTGTCKFGVTCKFHHPRNKAGIDGSVSVNVLSYPLRPNEDDCSYFLRIGQCKFGGTCKFNHPQTQSTNLMVSVRGSPVYSALQSLTGQPSYSWSRTSFVANPPRLQDPSGFASGSQGGLFSSGFHSGNSVPLGFYALPRENVFPERPGQPECQFYMKTGDCKFGTVCKFHHPRDRQTPPPDCVLSSVGLPLRPGEPLCVFYSRYGICKFGPSCKFDHPMRVFTYNNNTASPSPSSSLHQETAITTELRNLLVSSSVEAKPTSLPETTSAKDTIVDAQH

SEQ ID NO: 22411 - protein, 520 aa, Rubrobacter xylanophilus DSM 9941
MSIKLFDTTLRDGAQREGVSLTAEDKARIARELDSLGLHYIEAGFPASNPKDLEFFEGFDASELENARLVAFTRARRPGGRAGDDPAVSLLARLSAPVACIVAKSWRLHVEKVLGTTPEKNLESVRDTVAYLAAAGKEVIFDAEHYFDGFREDPEHALAVLRAAAEAGATTLVLCDTNGGTLPTELKAVVARTVREFPGVEIGIHTHNDAGCGVANALAAVEAGATHVQGTINGVGERCGNCDLVTTIANLQLKMGLKVVEEEQLRRLTEVSNYVSEIMNITPDAHRPYVGRSAFAHKGGLHVDGISRDPRTYEHVAPELVGNQRRTPVGELSGKNSVRAKAAELGLEVEDVSTVLSAIKRKEHEGYHYEAADASLALLIQRTTGEDEPLFELESLRVISEKRAGGEATVEATIKLYIKGQRVISTAEGNGPVNALDRALRQAIEPHYPELKEIHLSNYKVRILDEHRATAATTRVLIDSTDGKRVWGAVGVGENIIEASWQALVDGLEYGINGAKKQKG

SEQ ID NO: 22412 - protein, 355 aa, Rubrobacter xylanophilus DSM 9941
MSQRFRVLLLPGDGIGPEVVAAARRVADAAAARFGLTLEYEERRIGAAAIREEGAPVSKETLRRAGEADAVLLGAVGDPEFDGGEVRPEAGLLALRRELGTFANLRPVAAIPALSGSSPLRPGVAEGVDLLIVRELTGGAYFGEKEEGEERASDLSVYTRGEVERVARVAFEAARGRRGRVASVDKANVLATSRLWRRVVGEVARDYPDVALEHVLVDAAAMHLVTDPGRFDVILTENLFGDILSDEAAVLPGSMGMLPSASLGEPGSPGIFEPVHGSAPDIAGKGVANPYAAILSAAMMFRHGLGRPEAAEAIERGVEAAVAAGCLTPDLGGSSGTEEAAEAVARRVAAEEGAA

SEQ ID NO: 22413 - protein, 159 aa, Gossypium hirsutum
MGFTEKQEGLVKESWEVLKQDIPHSSLRFFSLILEIAPGAKNMFSFLRESEEIPQNNPKLKAHAVKVFKMTCESAIQLREKGEVVVADTTLKYLGTVHVKSGVKDPHFEVVKEALLRTIEEAIGEEKWNEEMKNAWGEAYDQLAEAIKAEMKNHHDETA

SEQ ID NO: 22414 - protein, 510 aa, Rubrobacter xylanophilus DSM 9941
MRRIQIFDTTLRDGEQSPGISLSVEEKVEIAHQLARLKVDVIEAGFPITSEGDFEAVSRIASEVEGPVIAGLARIHQEDIERAWEAVRWSRRPRIHTFVGTSDLHIEHQMRSTREEILSGAAEAVRLAKSLCENVEFSPMDATRTDIGYLAEVVAAAVEAGADVINIADTVGYTTPAEFAAFLRELKERVPGLAERVLSVHCHDDLGMAVANSLAGVEAGATQVEVAVNGIGERAGNASLEEVVMALVTRKDYYGVEVGVETRQLANTSRMVSNMTGYDVPPNKAVVGRNAFLHESGIHQDGVLKDRRTFEIMKPADIGLEGTNIFLGKHSGRHALKEALADLGYTLEGETLKRAFKRFKELADHKKTVTAADLEAIAADEVGSFEGKFVLESFRVVAATGRQSRAAVRIAHADRGTFEAEAEGEGPVDAVFRAIDSATGIKGRLTDFRIDAVTGGKDALGEVRVTVEFEGTECAGRGLSQDVVEAAARAYVRAVNVYTAGAVKVPQATP

SEQ ID NO: 22415 - protein, 162 aa, Oceanospirillum sp. MED92
MEDLLPELCDQFPELVQVVEPMFGNFGGKERFGGEIVTLKAFEDNSLVREQVALPGEGKVLVVDGGGSMRKAMLGDMLAEKATKNGWEGIIIYGCIRDVNAISDLDIGVQALGCHPMKTEKKGLGELNVDITFGGVTFKPGQYVYADNNGVLISPEKLEVSE

SEQ ID NO: 22416 - protein, 614 aa, Triticum aestivum
MASISGAAAPPSSSSACRLRLRRQLLMRPSHLRLRAPHSIADLSRSSGSPHAPAPPLASRAPGQGGGAAVEKDPIKLWDRYVEWLYQHKQLGLFVDVSRMGFTDDFLLQMEPLMQRAFVAMGELEKGAIANPDEGRMVGHYWLRDPGLAPNSFLRTKIEKTVDHILAFSQDVVSGKIKPPSSQAGRFTQILSIGIGGSSLGPQFVSEALAPDNPPLKIRFIDNTDPAGIDHQIAQLGEELKSTLVIVISKSGGTPETRNGLLEVQKAFRDAGLDFSKQGVAITQENSLLDNTARIEGWLDRFPMFDWVGGRTSELSAVGLLPAALQGIDVKEMLVGAALMDEETRNTVVKENPAALLALSWYWATDGIGSKDMVVLPYKDSLLLLSRYLQQLVMESLGKEYDLDGNRVNQGLTVYGNKGSTDQHAYIQQLREGVHNFFVTFIEVLRDRPPGHDWELEPGVTCGDYLFGMLQGTRSALYSNDRESISVTVEEVTPRAVGALVALYERAVGIYASLVNINAYHQPGVEAGKKAAGEVLALQKRVLTVLNEASCKDPAEPLTLEQIADRCHCPEDIEMIYKIIQHMAANDRALIAEGSCGSPRSVKVYLGECNVDDL

SEQ ID NO: 22417 - protein, 396 aa, Bdellovibrio bacteriovorus HD100
MSKEKFTRNKPHVNIGTIGHVDHGKTTLTAAITTTLAASGKAQAMAYDQIDKSPEEKARGITISTTHVEYETDNRHYAHVDCPGHADYVKNMITGAAQMDGAILVVSSADGPMPQTREHILLARQVGVPALVVFMNKVDMVDDKELLELVELEVRELLSKYEFPGDDIPVVKGSALKALEGDTSEIGRPAIMKLMEACDTYIPAPVRAVDKTFLMPVEDVFSISGRGTVVTGRVERGIVKVGDEIEIVGIRPTQKTTVTGIEMFRKLLDEGQAGDNCGVLLRGTKKEDVERGQVLVKPGTVKPHKKFKAEAYILTKEEGGRHTPFFNGYRPQFYFRTTDVTGVCTLKAGTEMVMPGDKIEVSVELIAPIAMEKELRFAIREGGRTVGAGVVTEILE

SEQ ID NO: 22418 - protein, 176 aa, Novosphingobium aromaticivorans DSM 12444
MGGAMQTLAAILIVLGTVLAMEFVAWSSHKYIMHGFGWGWHRDHHEPHEGFLEKNDLYAIVGAALSILMFALGSPMIMGADAWWPGTWIGLGVLFYGVIYTLVHDGLVHQRWFRWVPKRGYAKRLVQAHKLHHATIGKEGGVSFGFVFARDPAVLKQELRAQREAGIAVLREAVDG

SEQ ID NO: 22419 - protein, 293 aa, Nostoc punctiforme PCC 73102
MLSQLGATSHLSPHLTFGTISTRTVYQSTKALAEQLKTQPKAEFSLKAFRDRLRWHDSFTQRLYFHPEIAYTNRYREFDKLYTPETLSGAKQELYQAWQQGMTGFPLVDASMRQLQTMGWMNFRMRAMCATFLTINCGVSWHHGAKHYMNYLVDGDLAIDNWQWQMQAGVTNPLSDTFRIYNPSKNIAEKDPLGEFIYHWIPELRGYSLLEIEQEKYIETSNYPKVILDWSKTRKVNGKIVSDLRKQTKQRLLSQGGDEYDSAIAAKETVDKYWQHKDKEYKEYQQKLTELQE

SEQ ID NO: 22420 - protein, 91 aa, Methylobacillus flagellatus KT
MSQITIEHNPSEEKLKELGVANWSIWEKEVSKFPLDFGIKETAYILEGEILVTPKGGEPVRIVPGDLVVFPVGLQSNWEVVKPLRKHYKHG

SEQ ID NO: 22421 - protein, 306 aa, Brassica napus
MADRLTRIAIVSEDRCKPKKCRQECKKSCPVVKTGRLCIEVTPTSKTAFLSEELCIGCGICVKKCPFEAIQIINLPKDLEKDTTHRYRSNAFKLHRLPVPRPGQVLGLVGTNGIGKSTALKILAGKLKPNLGRFDNPPDWQEILAHFRGSELQSYFTRVVEENLKTAIKPQHVDQIKKIVQGDLGKMLEKLDERGMMEQIVADLELNPVLDRRAKDVSGGELQRFAIAAVFIKKAEIYMFDEPSSFLDVRQRLKAAQVIRSLLRPDSYVIVVEHDLSVLDYLSDFICCLYGKPTVYGVVTLPFSVR

SEQ ID NO: 22422 - protein, 254 aa, Lactobacillus johnsonii
MDGAILVVAATDGPMPQTREHILLARQVGVQYIVVFLNKVDLVDDPELIDLVEMEVRDLLSEYDYPGDDVPVIRGSALKALEGDPEQQDVIRKLMETVDEYIPTPERDTDKPFLMPVEDVFTITGRGTVASGRIDRGTVKVGDEVEIVGLTDKIEKSTVTGLEMFHKTLDLGEAGDNVGVLLRGIDRDQVERGQVLAAPGSIQTHKNFKGQVYILNKDEGGRHTPFFSDYRPQFYFHTTDVTGKIELPEGTEMV

SEQ ID NO: 22423 - protein, 247 aa, Methanosarcina mazei Go1
MSENMAYECLKYSNENINRALEALRAGKMIQIYDSDSREGETDLVIPAKAVTYTDVKWMRKDAGGLICVAVDPVASKQLKLPFMADLVREASKTSDSLGEVVEKDGDLKYDAHSSFSLWVNHRDTRTGIPDIERALTIRKIGEITEESLSGNGVRFGNEFRTPGHVALLRAAEGLLDERMGQTELSVALARMAGITPAMVVCEMLDDDSGKALSKEKSKEYGKEHGLVFLEGREIVEAYLLWAGTDC

SEQ ID NO: 22424 - protein, 416 aa, Burkholderia thailandensis E264
MPAAYPFSALIGQAALQQALLLVAVDPGLGGVLVAGPRGTAKSTAARALAELLPEGRFVTLPLSATDEQVTGSLDLASALADNAVRFSPGLVARAHLGVLYVDEINLLPDALVDALLDAAASGVNTVERDGVSHSHAARFALVGTMNPEEGELRPQLLDRFGLMVELANCYDAATRQRIVKARLAFDLDPHGFREHYRDAQAALVAKIRAARAALPALAFDDAAHARVAELCIDAAVDGLRGDLVMLRAARALAALDGAASVAAAHVERVAADVLRHRRTRFESQPEFQPEFQPEFQPGSQPEARLGPQPDSRSGGGHALGGLADAAEAEAARAPTPRDARPREAADARSAGASGSAHPPARASSDAERRAAGDRDASRDGGRGPAVDDGDWGYLPPEPAGIAPVKGVIPLPLKKR

SEQ ID NO: 22425 - protein, 254 aa, Lactobacillus jensenii
MDGAILVVAATDGPMPQTREHILLARQVGVEYIVVFLNKCDLVDDPELIDLVEMEVRDLLSEYDYPGDDVPVIRGSALKALQGDPEQEKVILELMKTVDEYIPTPERQTDKPFLMPVEDVFTITGRGTVASGRIDRGQVKVGDEVEIVGLTDDVKKSVVTGLEMFHKTLDLGEAGDNVGVLLRGVDRDEVVRGQVLAQPGSIQTHKKFKGQVYVLKKDEGGRHTPFFSDYRPQFYFHTTDVTGAIELPEGTEMV

SEQ ID NO: 22426 - protein, 455 aa, Campylobacter upsaliensis RM3195
MDPSQIATDTSYSIFMIFVAFVLVFLNGFFVLSEFSIVKVRRSKLEEMVKEKKPNAKKALDVTSKLDTYLSACQLGITLSSLALGWIGEPAIAKMLETPLLKLGLNAVLIHTIAFVIAFSIITLLHVVLGELVPKSIAIAIADKVVLWVARPLHWFWILFLPCIKIFDILAALTLKIFGIKPAKEHELTHSEEEIKIIASESQKGGVLDEFETEIIRNAVDFSDTVAKEVMTPRKDMICLNKQKSYSENMQIICEHKHTRFPYIDGSKDTILGMVHIRDIVQNELNTKSENLDNFVKPLILVPENLSISKVLVMMNKERSHTALVIDEYGGTAGLLTMEDIMEEIIGEIKSEHEEDNYKKLADNIYEFQGRCDIEKVEELLLITYDEDLEQVTIGGYVFNLLGRLPVVGDRIEDELCYYEVKKMDGNSIERVKVVKKTKTEESEDQTHSKFFILD

SEQ ID NO: 22427 - protein, 254 aa, Lactobacillus delbrueckii subsp. bulgaricus
MDGAILVVAATDGPMPQTREHILLARQVGVNSIVVFLNKCDLVDDPELIDLVEMEVRDLLSEYGYPGDDVPVVRGSALKALEGDEEAQKKIEELMDVVDEYIPTPERETDKPFLMPVEDVFTITGRGTVASGRIDRGTVKVGDSVEIVGLVEKVLTSVVTGLEMFHKTLDLGEAGDNVGVLLRGVDRDQIVRGQVLAAPGSIKTHKTFKGQVYILSKDEGGRHTPFFSDYRPQFYFHTTDITGEIELPEGTEMV

SEQ ID NO: 22428 - protein, 339 aa, Thiomicrospira denitrificans
CIAIGGDRFVGSVFIDNLLRMEANPEVKYMLLLGEVGGTEEYKVIEAVKSGKIKKPIIAWCIGTIAKYYDSGVQFGHAGASANGDMETAEAKNRAMKEVGIHVPASFNDLPEIISALYHELHAEGTIKDIIEPSMNVCPSVRKSKQFICTISDDRGDEAHYCGYPISSVATPDTGFTIGDVMSILWFKKRYPRWAVDFLETVLKTVPDHGPAVSGAHNAKVTARAGKDVISSLISGLLTIGPRFGGAIDDAAKYFKYASDNGMSPNDFLNHMKKEGIPIPGIGHRIKSLKNPDLRVEGLKKFAKANFPSTPLLDYALTVEQLTTSKKENLILNVDGSIG

SEQ ID NO: 22429 - protein, 241 aa, Petunia x hybrida
MSPPVSVTKMQVENYAFAPTVNPAGSTNTLFLAGAGHRGLEIEGKFVKFTAIGVYLEESAIPFLAEKWKGKTPQELTDSVEFFRDVVTGPFEKFTRVTMILPLTGKQYSEKVAENCVAHWKGIGTYTDDEGRAIEKFLDVFRSETFPPGASIMFTQSPLGLLTISFAKDDSVTGTANAVIENKQLSEAVLESIIGKHGVSPAAKCSVAERVAELLKKSYAEEASVFGKPETEKSTIPVIGV

SEQ ID NO: 22430 - protein, 254 aa, Lactobacillus delbrueckii subsp. delbrueckii
MDGAILVVAATDGPMPQTREHILLARQVGVNYIVVFLNKCDLVDDPELIDLVEMEVRDLLSEYGYPGDDVPVVRGSALKALEGDEEAQKKIEELMDVVDEYIPTPERETDKPFLMPVEDVFTITGRGTVASGRIDRGTVKVGDSVEIVGLVEKVLTSVVTGLEMFHKTLDLGEAGDNVGVLLRGIDRDQIVRGQVLAAPGSIKTHKTFKGQVYILSKDEGGRHTPFFSDYRPQFYFHTTDITGEIELPEGTEMV

SEQ ID NO: 22431 - protein, 495 aa, Oryza sativa
MEGNARGGGHSEALKNYNLGRTLGIGSFGKVKIAEHKLTGHRVAIKILNRRQMRNMEMEEKAKREIKILRLFIHPHIIRLYEVIYTPTDIYVVMEYCKFGELFDYIVEKGRLQEDEARRIFQQKPENLLLDSKYNVKLADFGLSNVMHDGHFLKTSCGSPNYAAPEVISGKLYAGPEVDVWSCGVILYALLCGTLPFDDENIPNLFKKIKGGIYTLPSHLSALARDLIPRMLVVDPMKRITIREIREHQWFQIRLPRYLAVPPPDTAQQAKMIDEDTLQDVVNLGYEKDHVCESLRNRLQNETIFQATVAYYLLLDNRFRATSGYLGADYQESLERNLNRFASSESASSNTRHYLPGSSDPHASGLRPHYPVERKWALGLQSRAQPREIMIEVLKALEDLNVCWKKNGQYNMKCRWSVGYPQATDMLDVNHSFVDDSIIMDNGDVNGRLPAVIKFEIQLYKSRDEKYLLDMQRVTGPQLLFLDFCAAFLTKLRVL

SEQ ID NO: 22432 - protein, 189 aa, Bradyrhizobium japonicum USDA 110
MMNRRTMLIAALAGAVAPVTRAVAGGGMSRISAYAFSFPALSGDDIRLAAFTGKPLLVVNTASLCGYTPQYAGLQELWSEFGERGLTVIGVPSNDFGGQEPGGTSEITETAHHQYGVTFPIAAKATVIGARAHPFYKWAADARPKDVPRWNFHKYLIGRDGYIAEVFASNIEPTDTRIKTAIAKTLADT

SEQ ID NO: 22433 - protein, 280 aa, Candidatus Arcobacter sulfidicus
PNYAWCIGTIAKYYDSGVQFGHAGASANAERETAEAKNKAMAEAGIHVPATFNDLPAKIKEVYESLDIAPIPEPEMNVVPTVRRSKQFICTISDDRGEEAQYCGYPISSVATPDTGFTVGDVMSILWFKKRYPRWAVDFLETVLKTVADHGPAVSGAHNAKVTARAGKDVISSLIAGLLTIGPRFGGAIDGAAKYFKYANDNEMTPAEFLKHMKGEGVPIPGIGHRIKSLKNPDLRVKGLMDFAAENFPSTPLLDYARTVEALTTSKKENLILNVDGSIG

SEQ ID NO: 22434 - protein, 416 aa, uncultured marine gamma proteobacterium EBAC31A08
MKKNAFYAQSGGVTAVINATAGALILEAKKHKDIGKIYAGKNGILGALNEELIDTSKESISALESLKYRPGGAFGSCRFKLKDLESSEREYKRLIDVFKAHNIGYFFYNGGNDSADTAFKVSQISKKLNYPINCIAIPKTVDNDLVLTDCCPGFGSAAKYIATSTLEASLDVRSMAATSTKVFILEVMGRHAGWMAAASSLARKEKGDAPHIILLPEITFNQKKFLAEVKSVVKKNGYCVVVVSEGLKNNKNRFLSESATIDAFGHAQLGGVAPYIANLITDKLKLKNHWAVSDYLQRSARHIASKTDLEQAMAVGAKAVQYAVEGMNGVMPIIVRGKAKKYRWKIEPAPLAKIANLEKKLPKSFIAKNGMDVTPKAIAYLMPLIQGESFPNFRNGIPEIKELKLKEVKKKLKLWL

SEQ ID NO: 22435 - protein, 175 aa, Triticum aestivum
MAPTVMASSATSVAPFQGLKSTAGLPVSRRSNGASLGSVSNGGRIRCMQVWPIEGIKKFETLSYLPPLSTEALLKQVDYLIRSKWVPCLEFSKVGFIFREHNASPGYYDGRYWTMWNLPMFGCTDATQVINEVEEVKKEYPDAYVRIIGFDNMRQVQCVSFIAFKPPGCEESGKA

SEQ ID NO: 22436 - protein, 384 aa, Gibberella zeae PH-1
MAEHNIVVLGGDHCGPEVVAEGIRVLKALEENKPSVGKFNFKDHLMGGCSIDANGSPLTDETLAAAKGADAVLLGAIGGPKWGTGAVRPEQGLLKLRKEMGTYGNLRPCFFASDSLVDASPLKAEVCRGTDIVIVRELTGGIYFGERKEDDGSGSAWDTEPYSREEIERIARLAGFLARGRGDKKVWSLDKANVLATSRLWRKVMNETFEKEFPDLKVEHQLIDSAAMILIKNPTGLNGVVVTSNLFGDIISDEASVIPGSIGLLPSASLSGIPDGQGKCNGIYEPIHGKLYMTPFVSNRKLIHLTGSAPDISGKGIVNPVGTILSVAMMLRYSLNLPEEAKIVEAAVRNALDGGLRTKDMGGNAGTKEVGDKVVEELKKLLKA

SEQ ID NO: 22437 - protein, 926 aa, Psychrobacter arcticus 273-4
MTINNHILRERISLLGSFLGDAISRQTGEQTLHTIEILRKGFIQQRREPNEAHKQQLIDFIASLDNQALKNVIRSFSIYFFLANLSEENYLREQRHTLRMQSEHSWEGSFRRTLLECRERNIEPAQMQELIEQLKFIPVFTAHPTEARRRTTMNLLQSLFTHSDALNNFAKNSFAYEQAKEQTAQTIDLLWSSDEVRTRKPLVYDEINNGLHYFNASLFNAIPKVYRNIKDAIVEIYPELIDYPLPAFMSFGSWIGGDRDGNPFVTHDTTEMAVLMHADAVLRHYQVLLKKLRRQLIHSDTIVTIEPDVYAKIESYIELDRRVFDYNLDDYGNEPYRRLLSLILSKVKATNYLIQSKGSDSEAKKDAYANPQELLEDLRIIRQSVNTHDTAHGEGLLLDVIRLVKTCGFHLAALDIRQESSYHSGVIADIFANAANLPDYQTLNETERQQWLTRLLEKPGTPLIYTDNLTDKTREQLALMNSVATLRKLVGQDTFGSYVISMTNNASQLLEVLLLMRFAGLCRVDDKGQLSADLPVAPLFETIEDLKNIDKILPAVLDNPLYRGLLQHSDNTQEIMLGYSDSSKDGGIITSAWQLYSAQQTINRIAEEYGIKTRLFHGRGGSVSRGGGSTHKAIAAQPAGTLHGQIKVTEQGEVLYAKYANTDTAVFELTMGITGTLKACSSRFVVQPPELPQYEALFARLADVGEQRYRKLTDHTEGFYEFYSQATPVAEISLLNIGSRPAHRNKGLPSKTTLRAIPWVFGWSLARFTLPAWYGVGSALDSVKEDEALMKEMNDCWPFFNVFISNIEMAFTKSDMSIAHAYSQLCDDEMLREQIMTAVTDEHELTYSGLNSLLNQQSLLSSQQNLSASLEWRNAYLDPTNYIQIELLKRARQKEASGDANHGDLDVEDPLIRSINALAAGLRNTG

SEQ ID NO: 22438 - protein, 320 aa, Xanthobacter autotrophicus Py2
MTAHTVKVVIIGSGPAGYTAAIYAARAMLEPVLFEGIQPGGQLTITTDVENYPGFADPIQGPWLMEQMRAQAEHVGTKIVTDHVASLDLSHRPFRMVTESGDTYVADVVILATGAQARWLGLESEAAYRGSGVSACATCDGFFYRGKDVVVVGGGNTAVEEALFLTNFASNVTVVHRRDSFRSEKILQERLFAHPKVKVVWNAELAEVVGQDDPFTKVTGAKLRDVRTGVLTELPADGIFIAIGHAPATELVKDQLKLKESGYVWTAPDSTATSVPGVFAAGDVADDVYRQAVTAAGRGCMAALEAERFLAHQGVAKAAE

SEQ ID NO: 22439 - protein, 489 aa, Burkholderia mallei ATCC 23344
MTTAHETLALKDPALLRERAFVAGEWQAADGGATLEVRNPATGALIGTVPAMGAAETRRAIDAANAAWPAWRKKTAKERAAILRKWHDLMIAHADDLALILTTEQGKPLAEAKGEIGYAASFLEWFAEEGKRVYGDTIPTPAADKRIVVTKEPVGVCAAITPWNFPAAMITRKVGPALAAGCPIVVKPAEATPFSALAMAVLAERAGVPAGMFSVVTGEPKAIGGELTSNPIVRKLSFTGSTPVGRLLMAQCAATVKKVSLELGGNAPFIVFDDADLDAAVEGAIASKYRNSGQTCVCTNRFYVHEKVYDAFAEKLTAAVAKLKVGPGTEAGVVQGPLINGAAVRKVEAHIADALDKGARVTTGGQRHPLGHGFFEPTVLTGVTPDMKVAKEETFGPLAPLFRFSTEEEAIRYANDTEFGLAAYFYSRDIGRVWRVAEALEYGMVGINAGIISNEVAPFGGVKQSGLGREGSHYGIDDYVVIKYMCVAV

SEQ ID NO: 22440 - protein, 385 aa, Zea mays
  misc_feature (258)..(258): Xaa can be any naturally occurring amino acid
  misc_feature (321)..(321): Xaa can be any naturally occurring amino acid
  misc_feature (326)..(326): Xaa can be any naturally occurring amino acid
  misc_feature (328)..(328): Xaa can be any naturally occurring amino acid
  misc_feature (339)..(339): Xaa can be any naturally occurring amino acid
  misc_feature (341)..(341): Xaa can be any naturally occurring amino acid
  misc_feature (348)..(348): Xaa can be any naturally occurring amino acid
  misc_feature (350)..(350): Xaa can be any naturally occurring amino acid
PGYSVVEQYFVNPDDTVCQKIVVHKDGPRGNHFRRAGPRQKGGYRGFYARNTITLTPKSVNDIHKRGGTILGSSRGGHDTVKIVDSIQDRDINQVYVIGGDGTQRGAVLIFQQVRRRGLKVSVAGIPKTIDNDIPVIDKSFGFDTAVEEAQRAINAAHVEAVSAENGIGLVKLMGRHSGFIAHYATLARRDVDCCLIPESPIYLEGEGGLFRYIEKRLKDNGHMDIVVAEGAGQKLIAETMQSIGKDASGNELLLDVXLWLSQKINEHFKKNKMTINLKYIDPTYMIRAIPSNASDNVYCTLLAHSVVHGAMAGYTGLPLXQVNGXTXTSIYRITEKQXQXSITDRCXKXLSSTTPTPTNLRKEGHKTPTRLHKYSKGHWSTHAR

SEQ ID NO: 22441 - protein, 478 aa, Agrobacterium tumefaciens str. C58
MHTYPDIKLLIDGEWRDAVSGKTIAVSDPATDEIIGAIAHAEKEDLDLALAAAERGFKLWRDTSPYERSKIMRKAADILRERKDKIAYIMTREQGKPLAQSATEIMGAADTIDWFAEEARRTYGQVIPARATGVSQLAIKVPVGPVAAFTPWNFPLNQIVRKLSAALATGCSIIVKAPEETPASPAELIRAFVDAGVPAGVIGLVYGVPSEISEYLIPHPVIRKISFTGSTPIGKHLAALAGKHMKRATMELGGHAPVMIFDDADIEKAIEVTSLAKFRNAGQVCVAPTRFLVQDGVADRFLEGFVEATKAIKVGNGLEEGVIMGPLANERRIPALEGLINDAVSHGAELKTGGRRIGNKGNFFEPTVLANVPVTAKIMNDEPFGPVAIINRFSSFDDAITEANRLPFGLASYAFTGSVKTAHALGQQVEAGMLTINHNGLALPEVPFGGIKDSGYGTEGGSEAVQAYLETKFVSQMS

SEQ ID NO: 22442 - protein, 87 aa, Arabidopsis thaliana
AGVLYAPGKASNAGGVATSGLEMSQNAMRLTWTRAEVDQKLHGIMKSIHAACVQHGKRADGTVSYIDGANIAGFVKVAEAMLAQGVL

SEQ ID NO: 22443 - protein, 131 aa, Eremothecium gossypii
MSGKGGKAGSAAKASQSRSAKAGLTFPVGRVHRLLRKGNYAQRIGSGAPVYMTAVLEYLAAEILELAGNAARDNKKTRIIPRHLQLAIRNDDELNKLLGNVTIAQGGVLPNIHANLLPKKSAKATKASQEL

SEQ ID NO: 22444 - protein, 277 aa, Triticum aestivum
  misc_feature (170)..(170): Xaa can be any naturally occurring amino acid
MSAVVCGKRSSSIFADDLLLQQASSSPPSPRHSPAPKRSRYAHHHHRRDGRDALLQHLRAAFPAMDPQLLERALEASGDDLDDAIKSLKELHLMESNQANLPATGSTFENGLTAVQPSVEGIVTSGGVDTATEHQPAADGQQPSNSGPEWVDLFVREMSNASDMDDARAXRASRALEALTKSILEGAGAEAAQSLHQEQMTAVLSQNAVLKRAVAIQHERQKEFDERSHEVQGLKQLVLQYQEQLRTLEINNYALQMHLKQAQQSSSMPGRYNPDVF

SEQ ID NO: 22445 - protein, 381 aa, Novosphingobium aromaticivorans DSM 12444
MTPAEISPIEDIIREAVEGRPFILVDADDRENEGDIIIPAQFATPAQISFMACHARGLICLAITQERSSQLQLRPMAPRNESGYGTAFTVSIEAKEGVTTGISAHDRARTIAVAVDPTKGVDDLVTPGHVFPLTARDGGVLVRAGHTEAAVDISRLGGLTPAGVICEVMNDDGTMARLPDLKIFAAKHGLKIGTIADLIAYRRSSEQLVEEMASAPFQSHFCPSPMTVHVYRNKIDGGEHVALVKGEIRADQDTLVRVHQVDLTTDVLGWNTASPEYLRRALRFISDHSGPGVVVLVRDPDPESISRRVAGGRREYHEKNANRDYGIGAQILIDLGVRQMTLLTSSKAKLAALQGFGLTINGRTELRENRPDSPIRVRSDF

SEQ ID NO: 22446 - protein, 528 aa, Clostridium acetobutylicum ATCC 824
MENKKFSDLKLNSSVLKAIDDMGFEEPSKIQAEAIPVVIDGYDMIGQAQTGTGKTVAFGAPIISKIKDIDEKEGVQAIILTPTRELAIQITDELTRLSKYARVRVLPIYGGQSIERQMRAIKRGVDVIVATPGRIMDHIKRKTVKLDKVKFLVLDEADEMLDMGFIDDIEGIIKNISGDRQTMLFSATMPAPIKKLASNYMKKEVKHIAIIKNSLTVERIQQFYFEVKNKDKFEALCRIIDVEEPETTIIFCRTKRGVDELVESMQFRGYNVEGMHGDMSQNQRINTLKKFKENNIDFLVATDVAARGIDVHNVSHVINYDIPQDMESYVHRIGRTGRANAEGIAYSLVTPREYVMIKQIEKFTKSKIRRKEIPTIDDIFETKYNTLTDKITKNIEKDDFKKYIPFVQKLDDEFNLVDVSAALVKMIFDKEMGFDYSDDDKLKSDESVRLFFSAGRKDKLTVKKLLEFIDNASGVEGNEIGDIDILDKFTFVDVPERLRDVIIRTCDGKKLNGRKVNIEVAKSKKKSK

SEQ ID NO: 22447 - protein, 498 aa, Bacillus licheniformis ATCC 14580
MTNMSSLTMQVSKKLESFLQGTKKLYINGEFVASASNKTFETPNPATGETLATLYEAGPEDVDKAVKAAREAFDRGEWRTMNPAERSRLMYKLADLMEEHKTELAQLETLDNGKPISETTAGDIPLSIEHMRYYAGWATKITGQTIPVNGPYFNYTRHEPVGVVGQIIPWNFPLLMAMWKMGAALAAGCTVVLKPAEQTPLSALYLAELIDEAGFPKGVINIIPGFGETAGEALTDHALVDKLAFTGSTEIGKKIMEKAAKSVKRVTLELGGKSPNIILPDADLKKAIPGALTGVMFNQGQVCCAGSRVFIHKDQYDKVVDEMAAYSKSLRQGAGLHEDTQMGPLVSKEQHERVLSYIEKGRQEGAKIAAGGTCPYEQGYFVSPTVFTNVEDEMTIAKEEIFGPVLAAIPYETVDEVIERANRSEYGLAAGVWTENLKNAHYIADRLQAGTVWVNCYNAFDAASPFGGYKQSGLGREMGSYALDNYTEVKSVWIHTGE

SEQ ID NO: 22448 - protein, 328 aa, Silicibacter pomeroyi DSS-3
MSAAPQKAKAGAEKIEVTVSAVVPLNPLVTRFEFTRRDGQPFPPFSAGAHTVVEMRDGERTRLNPYSLMSDPGDNSIYAISVRRDDQGRGGSLFLHNKVKVGDPMTITFPVNLFPLDLRGRKHVFLAGGIGITPFLAMIAHLERMGGAWELHYSCRSRELGTYVDELTYKHPNKVHVYFDDQDQAIGLEDLLDGQPLGTHVYVCGPKGMIDWVHATAAAHGWPDENVHSEEFLAPQPGKPFEVRLCKSDITIQVGEHESLLEAMERCGVDAPFLCRGGACGQCETDVVDSDGDFVHRDHWLDDDEHASGKKIMPCVSRFVGKTLVLDR

SEQ ID NO: 22449 - protein, 247 aa, Glycine max
MKFNIANPTTGCQKKLEIDDDLKLRAFWDKRISQEVIGDALGEEFKGYVFKITGGCDKQGFPMKQGVLTPGRVRLLLHRGTPCFRGYGRRNGERRRKSVRGCIVSPDLSVLNLIIVKKGENDLPGLTDVEKPRMRGPKRASKIRKLFNLSKEDDVRKYVNTYRRTFTTKAGKKVSKAPKIQRLVTPLTLQRKRARIADKKKRIAKAKSEAAEYQKLLASRLKEQRDRRSESLAKRRSKLSSAAKAAV

SEQ ID NO: 22450 - protein, 354 aa, Triticum aestivum
MDGSKGPVVVTGASGFVGSWLVMKLLQVGYTVRATVRDPANVEKNKPLLELPGAKERLSIWKADLSDQGSFDDAIAGCTGVFHVATPMDFDSQDPENEVIKPTVEGMLSIMRACKEAGTVKRIVFTSSAGSVNIEERQRPAYDQDNWSDIDFCRRVKMTGWVYFVSKALAEKAAMEYASENGLDFISIIPTLVVGTFLSAGMPPSLVTALALITGNEAHYSILKQVQLVHLDDLCDAMTFLFEHPEANGRYICSSHDATIHGLATMLRDGFPEYRIPHKFPGVDDDLQPIHFSSRKLLDHGFSFRYTAEDMFDAVIRTCREKGLIPLGDAPPPAAAGKLGALAAGEGQAIGAET

SEQ ID NO: 22451 - protein, 372 aa, Triticum aestivum
RYRRSRVARTTLDVRGARGGSGGSVVPSGADGADRRRGHGPQVSEVDSFRRQVDDLLSKTDVLEKRVNEVVGFYNSKKHSSGGRKAGGRYAANGARDSHGNGMPDLMRQFAGIIRQITSHEWAQPFLQPVDVVGLQLDDYHQIITKPMDFSTIRNKMEGKESTTYNSVREIYSDVRLVFTNAMKYNVEGHPVNIMAKFLLERFEEKWLHLLPKVENEEREREEPNDAPTISISPEAAIAKLAEDTGNELNEINKQLEELQKMVVQRCRKMTTDEKRKLGAGLCQLSPEDLNKALELVAQDNPSFQTTAEEVDLDMDAQSETTLWRLKFFVREALEQQANVGVVACGKIDENTKRSRDMYNALAKTVSKRIKR

SEQ ID NO: 22452 - protein, 354 aa, Triticum aestivum
MDGSKGPVVVTGASGFVGSWLVMKLLQVGYTVRATVRDPANVEKNKPLLELPGAKERLSIWKADLSDEGSFDDAIAGCTGVFHVATPMDFDSKDPENEVIKPTVEGMLSIMRACKEAGTVKRIVFTSSAGSVNIEERQRPAYDQDNWSDIDFCRRVKMTGWMYFVSKALAEKAAMEYASENGLDFISIIPTLVVGPFLSAGMPPSLVTALALITGNEAHYSILKQVQLVHLDDLCDAMTFLFEHPEANGRYICSSHDATIHGLARMLRDRFPEYSIPHKFAGVDDDLQPIHFSSKKLLDHGFSFRYTAEDMFDAAIRTCREKGLIPLGDAPAPAAAGKLGALAAGKGLAIGAET

SEQ ID NO: 22453 - protein, 254 aa, Lactobacillus ruminis
MDGAILVVAATDGPMPQTREHILLARQVGVEYIVVFLNKCDLVDDEELLDLVEMEVRDLLSEYDFPGDDIPVVRGSALKALEGDEDAKKKILELMDIVDEYIPTPERPTDKPFLMPVEDVFTITGRGTVASGRIDRGTVKVGDEVEIVGLKEDVIKTTVTGVEMFRKTLDLGEAGDNIGALLRGVDRSQVERGQVLAKPGSIQTHKKFKGEVYVLTKEEGGRHTAFFSNYRPQFYFHTTDVTGVIELPEGVEMV

SEQ ID NO: 22454 - protein, 354 aa, Triticum aestivum
MDGSKGPVVVTGASGFVGSWLVMKLLQLGYTVRATVRDPANVEKNKPLLELPGAKERLSIWKADLSEEGSFDDAIAGCTGVFHVATPMDFDSQDPENEVIKPTVEGMLSIMRACKEAGTVKRIVFTSSAGSVNIEERQRPAYDQDNWSDIDFCRRVKMTGWMYFVSKSLAEKAAMEYASENGLDLISIIPTLVVGPFLSAGMPPSLVTALALITGNEAHYSILKQVQLVHLDDLCDAMTFLFEHPEANGRYICSSHDATIHGLARMLRDRFPEYSIPQKFAGVDDDLQPIHFSSKKLLDHGFSFRYTAEDMFDAAIRTCREKGLIPLGDAPPPAAGGKLGALAAGEGQAIGAET

SEQ ID NO: 22455 - protein, 193 aa, Brassica napus
  misc_feature (74)..(74): Xaa can be any naturally occurring amino acid
  misc_feature (130)..(130): Xaa can be any naturally occurring amino acid
AGIPASTHASGYFHETIWKGVPRGLRRVDTALKNIGINERVPYNAPLIQFSSWMGGDRDGNPRVTPEVTRDVCXLARMMAANLYFSQIEDLMFEMSMWRCNEELRVRAEVQRCAKRDAKHYIEFWKQIPXNEPYRAILGDVRDKLYNTRERARQLLSSGVSDIPEDSVLTRVDQFLEAVELWYRALCDWGRRA

SEQ ID NO: 22456 - protein, 254 aa, Lactobacillus mali
MDGAILVVAATDGPMPQTREHILLARQVGVEYLVVFLNKCDLVDDEELLDLVEMEVRELLSEYDFPGDDIPVIRGSALKALEGDPEAVAKIEELMDTVDEYIPTPVRPTDKPFLMPVEDVFTITGRGTVASGRIDRGVVKVGDEVEIVGLRDAPLKTTITGLEMFRKTLDEGEAGDNVGALLRGINRDQIERGQVLAAPGSIETHKKFKGEVYVLSKEEGGRHTPFFSNYRPQFYFHTTDVTGVIELPEGVEMV

SEQ ID NO: 22457 - protein, 617 aa, Oryza sativa (japonica cultivar-group)
MHRFLVTALLFSLLNYGAVMATESDEADFFRNCPPSRCSSDGPDIKFPFRLESSSSSCGAPGMQLSCSGQDTLLLHHVLGLSKVTGIDYIYGVINIVPLAESWSQCALQKIISANYSTSVYKQYGFQYASLVSCSEEFIWDSTDSIFGPISCLSNASQSLYLVAPYAFVSILPLYCKVVSTEIMIPYTSNQGRKDYNASASTEFNESAKRITTFSEITFTWSALISLMFASDCERQQRLCGFSSQRRTAFCKPHGSKSPAKVIIVAVSVPTIVVLTLVVASALYLSLKTKNDDEIQLKVEMFLKTYGTSKPTRYTFSEVKRITRRFKHKLGTGGFGSVYKGELSKGVPVAVKMLENSKGAGEEFINEVATIGRIHHVNVVRLLGFCSEGTRHALIYEFMPNNSLEKYIFSRDYISSQEVLVPDKMLKIALGIAQGIEYLHQGCSQRILHFDIKPHNILLDHSFSPKISDFGLAKLCARDQSIVTLTAARGTMGYIAPELYSRNFGAVSYKSDVFSFGMLVLEMLSGKRNSDPSINSQNEVFVPEWIYETIVSAQESEFAKDMTQEEKEKLRKLAIVALWCVQWNPANRPSMRKVVNMLTGSLQNLKNPPRPFVSSLS

SEQ ID NO: 22458 - protein, 254 aa, Lactobacillus sharpeae
MDGAILVVAATDGPMPQTREHILLARQVGVDYIVVFLNKTDLVDDDELIDLVEMEVRDLLSEYDFPGDDIPVIKGSALKALEGDPEQVKVIEELMDTVDEYIPTPVRETDKPFLMPVEDVFTITGRGTVASGRIDRGQVKIGDEVSIVGLKPDILKSTVTGLEMFRKTLDLGEAGDNVGVLLRGIGRDQVERGQVLAKPGSIETHNKFKGEVYILTKDEGGRHTPFFSNYRPQFYFHTTDVTGVIALPDGVEMV

SEQ ID NO: 22459 - protein, 254 aa, Lactobacillus graminis
MDGAILVVAATDGPMPQTREHILLAHQVGVDYIIVFLNKTDLVDDDELTDLVEMEVRELLSEYDFPGDDIPVIRGSALGALNGNPDDVKAVEELMATVDEYIPTPERDTDKPFLMPVEDVFTITGRGTVASGRIDRGQVTVGDEVEIIGLKEEVAKTTVTGLEMFRKTLDQGQAGDNIGALLRGVDRENIERGQVLAKPGSIQTHKKFKGEVYILSKDEGGRHTPFFSNYRPQFFFHTTDVTGVIELPEGVEMV

SEQ ID NO: 22460 - protein, 486 aa, Bacillus clausii KSM-K16
MTTTKVKTVKNWIDGAWVEASTADTEVVPNPATGEAIAYVPLSGERDVEQAVASAKRAYETWKTVPVPERTRYMFAYLEQLKKNREQLAQLITLENGKTIKDARGEVQRGIECVELATSTPTMMMGDALPDIASGIDGSIWRYPLGVVAGITPFNFPMMVPLWMFPLAIAAGNTFVLKTSERTPLLAEQLVSLMHEVGLPRGVLNLVNGGKAVVNGLLNHPDVEAISFVGSEPVARYVYETGTANGKRVQALAGAKNHAVVLADCELDKTVQGVIGAAFASSGERCMACSVVAVVEEVADAFIEKLTAETKKLTVGNGKNDEHFVGPLIRQSHKDKVVKYIEQGVEQGAELLVDGRNATSEEAGYYLGATLFDHVTPEMTIWQEELFAPVLSIVRVRDLEEAIALTNRSRFANGAVIYTSSGKAAQHFRNAIDAGMVGINVNVPAPMAFFSFAGNKASFFGDLGTNGRDGIQFYTRKKVVTERWFN

SEQ ID NO: 22461 - protein, 500 aa, Oryza sativa (japonica cultivar-group)
MVLTHVEAVEEGSEAAAAVFASRYVQDPVPRYELGERSISKDAAYQIVHDELLLDSSPRLNLASFVTTWMEPECDRLILEAINKNYADMDEYPVTTELQNRCVNIIARLFNAPVGDGEKAVGVGTVGSSEAIMLAGLAFKRRWQNRRKAAGKPHDKPNIVTGANVQVCWEKFARYFEVELKEVKLTEGCYVMDPVKAVDMVDENTICVAAILGSTLTGEFEDVRRLNDLLAAKNKRTGWDTPIHVDAASGGFIAPFIYPELEWDFRLPLVKSINVSGHKYGLVYAGVGWVIWRNKEDLPEELIFHINYLGADQPTFTLNFSKGSSQIIAQYYQFLRLGFEGYKSVMKNCMESARTLREGLEKTGRFTIISKEEGVPLVAFTFKDGAGAQAFRLSSGLRRYGWIVPAYTMPAALEHMTVLRVVVREDFGRPLAERFLSHVRMALDEMDLAARAPVPRVQLTIELGPARTAGEEASIRVVKSEAVPVRKSVPLVAGKTKGVC

SEQ ID NO: 22462 - protein, 467 aa, Listeria monocytogenes
MLYSEDDKRKQESYRIPLFGSEEESTSIPKYVLKKEPMEPRIAYQLVKDQLMDEGNARQNLATFCQTYMEKEAEILMAETLEKNAIDKSEYPQTAELENRCVNILADLWNAPKDMSYLGTSTVGSSEACMLGGLAMKFRWRNNAEKRGLDIQAKRPNLIISSGYQVCWEKFCVYWDVDMRVVPMDKNHLSLDVDKVFDLVDEYTIGVVGILGITYTGKFDDIQLLDEKVEAYNETNEHQLVIHIDGASGAMFTPFVNPELPWDFRLKNVVSINTSGHKYGLVYPGVGWILWKDKEYLPKELIFEVSYLGGSMPTMAINFSRSASQIIGQYYNFLRYGFEGYREIHEKTKKTAIYLAKTVEKSGYFEIINDGANLPIVCYKMKEGLDVEWTLYDLADQLLMKGWQVPAYPLPADLSDTIIQRFVCRADLGYNVAEEFAADFADAIHNLEHARVLYHDKERNDSYGFTH

SEQ ID NO: 22463 - protein, 379 aa, Prosthecochloris aestuarii DSM 271
MRYDVAVIGGGPSGAVAAAILAKAGLSTVLIERNLANVKPCGGAIPLGLIEEFNIPDPLVEKKLSKMSVRSPRGRKISMEMPNGYVGMVRRERFDSYLRDRAVRLGADIVEALVREIKPASNGHSIHLSKGHAPIEADFIIGADGANSKTAEELDFPANELQVIAMQQRFHYSDTLKPYEDLVEIWFDGEVSPDFYGWIFPKTDHIAIGTGTEFRKHDLKSLQKRFIEKIGITDKPYLDEAAKIPMKPRKSFTQDRAILVGDAAGLVTPANGEGIFFAMRSGKLGAEAMIERIRNNKPLRSYEKKFRKLYSQIFFGLQVLQSVYYKNDRLRESFVAICQDDDVQQITFDSYLYKKMVPAPWSVQMKIFGKNIYHLTKGS

SEQ ID NO: 22464 - protein, 303 aa, uncultured marine gamma proteobacterium EBAC31A08
MKIRIATRQSELAMYQAKFVADELLAKINNIKVELVPMTSEGDQTDKPLHEIGGKGLFISTLESSLEADEADIAVHSLKDVPAKLDPKFKIISVFSRESPEDLLLSKDGKSFSEFARNSTIGTSGPRRKAQINNLRPDIKTIPVRGNIATRIKKLNDGLFDGLVVAKAAIKRLGLKQNSYEFSIEEMLPSASQGYIAIECLSDKKDIIELLENIGDPKELILASAERSFVAAMEGTCLSPIAILCEDKNGQIKISGKILSYEGNEKIYKEKISSFQDIAIDIMLFADEFILEGAKSLILKNDN

SEQ ID NO: 22465 - protein, 447 aa, Eremothecium gossypii
MASQEEFYRTQIFGTVFEITNRYADLNPVGMGAFGLVCSAVDTYTQQPVAIKKIMKPFSTAVLAKRTYRELKLLKHLRHENLICLEDIFLSPLEDIYFVTELQGTDLHRLLQTRPLEKQFLQYFLYQILRGLKYVHSAGVIHRDLKPSNILINENCDLKICDFGLARIQDPQMTGYVSTRYYRAPEIMLTWQKYNVEVDIWSAGCIFAEMIEGKPLFPGKDHVHQFSIITDLLGSPPKDVIDTICSENTLKFVTSLPHRDPVPFTERFKNLKPDAVDLLEKMLVFDPKKRITAGDALTHPYLAPYHDPTDEPVADAKFDWNFNDADLPVDTWRVMMYSEILDFHQVPDSQINPNDTFDDQVAAATAAAEAARQQQQQKQQQQKQQQQRHQGVEHGAQHVQLQHGAKQLSADPLVGDSNGGIPLNVSAANETLNNFANQAAQYATDFE

SEQ ID NO: 22466 - protein, 518 aa, Orychophragmus violaceus
MAQASRICHGIQSPYVISNLAKSNQPKSPLSISLKSQQPRAYPISSWGLKKSGMMLNDSVIRPVTVTASVSTAEKASEIVLQPIKEISGLIKLPGSKSLSNRILLLAALSEGTTVVDNLLNSDDINYMLDALKKLGLNVERDSENNRAVVEGCGGIFPASVDSKSDIELYLGNAGTAMRPLTAAVTAAGGNASYVLDGVPRMRERPIGDLVVGLKQLGADVECTLGTNCPPVRVNANGGLPGGKVKLSGSISSQYLTALLMAAPLALGDVEIEIIDKLISVPYVEMTLKLMERFGVSAEHSESWDRFFVKGGQKYKSPGNAYVEGDASSASYFLAGAAITGETVTVEGCGTTSLQGDVKFAEVLEKMGCKVSWTENSVTVTGPSRDAFGMRHLRAVDVNMNKMPDVAMTLAVVALFADGPTTIRDVASWRVKETERMIAICTELRKLGATVEEGSDYCVITPPAKVKPAEIDTYDDHRMAMAFSLAACADVPVTIKDPGCTRKTFPDYFQVLESITKH

SEQ ID NO: 22467 - protein, 291 aa, Staphylococcus aureus subsp. aureus COL
AVYASRANLKTVMIERGIPGGQMANTEEVENFPGFEMITGPDLSTKMFEHAKKFGAVYQYGDIKSVEDKGEYKVINFGNKELTAKAVIIATGAEYKKIGVPGEQELGGRGVSYCAVCDGAFFKNKRLFVIGGGDSAVEEGTFLTKFADKVTIVHRRDELRAQRILQDRAFKNDKIDFIWSHTLKSINEKDGKVGSVTLTSTKDGSEETHEADGVFIYIGMKPLTAPFKDLGITNDVGYIVTKDDMTTSVPGIFAAGDVRDKGLRQIVTATGDGSIAAQSAAEYIEHLNDQA

SEQ ID NO: 22468 - protein, 85 aa, Escherichia coli
DVREALSSIGIQGLTVTEVKGFGRQKGHAELYRGAEYSVNFLPKVKIDVAIADDQLDEVIDIVSKAAYTGKIGDGKIFVAELQRV

SEQ ID NO: 22469 - protein, 400 aa, Pseudomonas putida
MFELVDNVPQSPVIKVIGVGGGGGNAVNHMVKSSIEGVEFICANTDAQALKNIGARTILQLGTGVTKGLGAGANPEVGRQAALEDRERIAEVLQGTNMVFITTGMGGGTGTGAAPIIAEVAKEMGILTVAVVTRPFPFEGRKRMQIADEGIRMLAESVDSLITIPNEKLLTILGKDASLLSAFAKADDVLAGAVRGISDIIKRPGMINVDFADVRTVMGEMGMAMMGTGCASRPNRAREATEAAIRNPLLEDVNLQGARGILVNITAGPDLSLGEYSDVGSIIEAFASDHAMVKVGTVIDPDMRDELHVTVVATGLGARIEKPVKVVDNTLQTAQQAYEASNPQSCAGAQEQPAVNYRDLERPTVMRNQAHAGAAAAAKLNPQDDLDYLDIPAFLRRQAD

SEQ ID NO: 22470 - protein, 133 aa, Pennisetum glaucum
MEHQGQHGHATNQANEYGTPVTAGVGAAGEQQVQPMRDDHKTDGLLRRSGSSSSSSSEDDGMGGRRKKGIKEKIKEKLPGGNKDGNQQHTTTGDAIGQQEHAGAAGAGAPGVESTGEKKGLMDKIKEKLPGQH

SEQ ID NO: 22471 - protein, 151 aa, Brassica napus
AWNRSPDGIFSVKSAYRAQFIGSYSHLNANLVWKARAEPKCKIFAWILLQEKLLTANNLATRGWPHQSSCAFCNGTLETGIHLCLHCPFARAVWRQILAWEGVILPAQSDLASATNIQEWWEAATPPLPKNQKRAFNGIVIYTMWNIWKER

SEQ ID NO: 22472 - protein, 484 aa, Agrobacterium tumefaciens str. C58
MKNLHRRDLIEDRAFVNGAWVERDQMFAIVDPAGGDHLADVASCTLNDVDFAIDAASKAFAGWRDMLPVDRGDILRNWSARMRENAHDLATIISAEQGKPLAESRGEIAYAANFLDWFASEGERSYGETIPTHLKGSNLSVRMQPIGVTVAITPWNFPSAMIARKAGAALAAGCTMIVKPAPETPLSALALARLAEESGVPPGVLQVLPGEAAPLARRLLENTEVRAFSFTGSTEVGRILLTQSAATVKKASLELGGHAPFIVFADADLTEAVKGCLGAKFATSGQDCLAANRIYVQRSLYPRFVERFAEATSRLTVGHGLETGVDIGPMTRPSVAEKCRQQVAQALSAGARLVCGGQDSPLGGNFVTPTVLADVTDDMLIAREETFGPVAAILPFDDEAEVIRRANATEMGLAAYLYTNDLGRAMRLTDQLEYGMVAVNTPKFTGAPIPFGGWKQSGLGREGSRHGLMEYLEPKYVCFGNLAA

SEQ ID NO: 22473 - protein, 273 aa, Brassica napus
MVLSQTTTESNEPVSSTFGSRYALTALPKYEIGESSIPKDAAYQIIKDELMLDGNPRLNLASFVTTWMEPECDKLIMDSINKNYVDMDEYPVTTELQNRCVNMIARLFNAPLGDTETAMGVGTVGSSEAIMLAGLAFKRNWQNKRKAEGKTYDKPNIVTGANVQVCWEKFARYFEVELKEIKLSEGYYVMDPEKAVEMVDENTICVAAILGSTLTGEFEDVKRLNHLLVKKNDATGWNTPIHVDAASGGFIAPFIYPELEWDFRLSLVKSINV

SEQ ID NO: 22474 - protein, 353 aa, Bacillus cereus E33L
MEKIERLRSAFDEAGIDGVLLTNEHSRRYMANFTGTAGVVLISKKRAQFITDFRYVEQASKQAVGYEIVQHAGLIIDEVAKQVKELGIQKLGFEQDTLTYSSYSAHKEVIDAEFIPTSGLVEKLRLIKTDSEIKILKEAAQIADAAFEHILSFIRPGVSEIEVSNELEFFMRKQGATSSSFDIIVASGLRSALPHGVASEKVIETGDFVTLDFGAYYKGYCSDITRTIAVGEPSDKLKEIYNVVLEAQLRGVNGIKAGLTGREADALTRDYITEKGYGEYFGHSTGHGIGLEIHEAPGLAFRSDTVLEPGMAVTVEPGIYIPGIGGVRIEDDIIVTSEGNEVITKSPKELIIL

SEQ ID NO: 22475 - protein, 473 aa, Legionella pneumophila str. Lens
MAWIVAIIGSIAGFLFGYDEGIIAGSLGLVKNHFNLNATHIGVMASALPFGALFGSLLIGAFMASKCVKRFGRRSLLSFAGFLFFVGALGAGFAETISVLILSRLILGLAIGMASVLTPLYLAETAAVQSRGAVVAIYQLALTVGIVCSYSVNYLLIEQQAWRAMFASSAIPALLLSLGILFMPESPRWLCSVGRHDAAANSLRKLRGKQSVEQELKEIEATLANEPKQGNWLLLFQKPLLPVLMLGTILFCLQQLSGINVVIYFAPEIFKNLGLGSTTGQILATMGIGLVNLLVTIIAILYVDKLGRRKLLLLGFAGTSLSLFALSLFSLNHVAWLSYLSVICLMVYIFSFAISVGPIPHIAMAEIFPLHVRGAGMGMSSMSNWSFNTIVIFSFPVLHQMFGIEMTFVLYAVICFLGFIYAYIYMPETRNISLEQIETYIMSGKPLRFLGREDEEVNAVSTKSESSLLASTN

SEQ ID NO: 22476 - protein, 426 aa, Bacillus licheniformis ATCC 14580
MAEIKVPELAESISEGTIAQWLKQPGDYVEQGEFLLELETDKVNVELTAEQSGVLQEVLKDSGDTVQVGEIIGTISEGEGEGGKSTAPQADAQESAGASEEKAASSEKTAEPREGASDEADTAKTRTIASPAARKLAREKGIDLSEIPTGDPLGRVRKQDVESYQKNEQPPKAQPEPKRATQAPAAKQTEDAGKPVERQRMSRRRQTIAKRLVEVQHTAAMLTTFNEVDMTAVMNLRKRRKDQFLEQHDVKLGFMSFFTKAVVAALKKYPLLNAEIQGDELVIKKFYDIGIAVAAPDGLVVPVVRDADRKTFADIERDIGELAKKARNNKLSLNELQGGSFTITNGGTFGSLLSTPILNSPQVGILGMHKIQLRPVAIDEERFENRPMMYIALSYDHRIVDGKEAVGFLVTIKNLLEDPEQLLLEG

SEQ ID NO: 22477 - protein, 136 aa, Shewanella oneidensis MR-1
MSQLLHTMIRVGNLERSIAFYTQVLGMKLLRTSENPEYKYSLAFVGYGEESTGQAVIELTYNWGTEKYDLGTGFGHIAIGDDDIYARCEAIAAAGGKVTRAPGPVAGGTTEIAFVEDPDGYKIEFIQMKSATQGLG

SEQ ID NO: 22478 - protein, 397 aa, Bacillus clausii KSM-K16
MFESIDEAITQLKAGGMILVVDDEDRENEGDFLALAETASPETINFMATHGRGLICVPLTEEQAERLQLGQMVSHSTDPHGTAFTVSVDHSHTTTGISAFERAETVRALADANAQPSDFKRPGHVFPLVAKNGGVLRRAGHTEAAVDFAKLCGAKPAGVICEVMNEDGSMARVPELRIIADQHNLPLVTIKDLIAYRRKTEKVVTREVAISLPTEYGDFKAVGYTNTIDGKESVALVKGDVGNGEPVLVRVHSECLTGDVFGSKRCDCGPQLHAALKQIEAEGRGVLLYMKQEGRGIGLINKFRAYKLQEEGYDTVEANERLGFPADLREYGIGAQILRDLGIRDMRLLTNNPRKIAGLEGYDLNIVERVPLQMEAVAENERYLHTKREKLGHMLNL

SEQ ID NO: 22479 - protein, 876 aa, Pseudomonas fluorescens Pf-5
MTDIDARLREDVHLLGELLGNTIRDQYGEAFLDKIEQIRKGAKADRRGSPGAELSASLDQLSEDELLPVARAFNQFLNLANIAEQYQLIHRRDESQPAPFEARVLPELLARLRAEGHSADALARQLGRLEIELVLTAHPTEVARRTLIQKYDAIAGQLAAQDHRDLTSAERGQIQERLQRLIAEAWHTEEIRRTRPTPVDEAKWGFAVIEHSLWQAIPNYLRKADKALFEATGLHLPLESAPIRFASWMGGDRDGNPNVTAAVTREVLLLARWMAADLYLRDIDHLAAELSMQQASPALLARAGDSAEPYRALLKQLRERLRATRNWAHAALSAAVPAGAEVLHNNRDLLEPLQLCYQSLHECGMGVIADGPLLDCLRRAVTFGLFLVRLDVRQDSSRHTSAMTEITDYLGLGRYEDWSEEDRITFLMRELSSRRPLLPGYFKPSADTAEVLATCREIAGAPAASLGSYVISMAGAASDVLAVQLLLKESGVLRPMRVVPLFETLADLDNAGPVMEKLLHMPGYRSRLQGPQEVMIGYSDSAKDAGTTAAAWAQYRAQERLVDICREQQVELLLFHGRGGTVGRGGGPAHAAILSQPPGSVAGRFRTTEQGEMIRFKFGLPDIAEQNLNLYLAAVLEATLLPPPPPQPAWRHLMDELASDGVRAYREVVRDNPQFVEYFRQSTPEQELGRLPLGSRPAKRRAGGIESLRAIPWIFGWTQTRLMLPAWLGWEAALSKALARGEGDLLGQMREQWPFFRTRIDMLEMVLAKADADIARSYDERLVEAELLPLGEHLRDLLSQACAVVLGLTGQSQLLAHSPDTLEFIRLRNTYLDPLHLLQAELLARSRKQQAPQGSPVEQALLVSVAGIAAGLRNTG

SEQ ID NO: 22480 - protein, 419 aa, Zea mays
  misc_feature (164)..(164): Xaa can be any naturally occurring amino acid
MDDAGRPPPHAPVAVTASASASATAAPAPPQPSATAAVDRSSPDPDALYEEGMWQQMAMDSGATMQPGSYPERPGEPDCTYYLRTGLCRFGMSCRFNHPPDRNLAIASARMKGEYPERAGQPECQYYLKTGTCKFGPTCKFHHPREKAGIAGRVQLNTSGYPLXPGHCKYANTCKFHHPELFNVVPSSRGSPIYTSVHSSASAGPQSYTGTMPSWAFPRASFIPSPRWQSPSNYAPMIVPQGLVQMPSWNSYTGQLQSPGAQQTYGSSQQGEASTGNQGMLSPYRSSSFPVPQYALQRENVFPERPDEPECQYYMKTGDCKFGAVCKFHHPRVRSLPPPDCVLSPMGLPLRPGEELCKFYSRYGICKFGANCKFDHPTVVAPMVYAYGFSASASPASASTNVPMARRLLGSPPGSGYTS

SEQ ID NO: 22481 - protein, 254 aa, Lactobacillus coryniformis subsp. coryniformis
MDGAILVVAATDGPMPQTREHILLARQVGVEYIVVFLNKTDLVDDPELIDLVEMETRELLSEYDYPGDDIPFIRGSALKALEGDKEEEAHIMELMDAVDEYIPTPERNNDLPFLMPVEDVFTITGRGTVASGRIDRGMVKIGDEVEILGLHPEAVKSTVTGLEMFRKTLDFGEAGDNVGVLLRGINRDQVERGQVLAKPGSIKVHDKFKGQVYILSKDEGGRHTPFFSNYRPQFYFHTTDVTGVIQLPENVEMV

SEQ ID NO: 22482 - protein, 657 aa, Oceanicola granulosus HTCC2516
MAAKDTDERKEDEQDGAMSLDMSQTAVKKMIADARERGYITYDQLNSVLPPDQVSSDQIEDVMSMLSEMGIQVTEEEESEETEETKSTDLVTTGGSRDVAVSSGETEKLDRTDDPVRMYLREMGSVELLSREGEIAIAKRIEAGRNTMILGLCESPLTFQAITIWRDELLNEDILLRDVIDLEATFGNQLEEEGDTPVVEPGAADGAKKEEGPELDADGNPIAKDDDEDEDDAANMSLAAMEAALKPRVLETLDTIAADFGNLSEMQDARISAQLNEDSSFTEKDEETYQKLRGEIVELVNSLHLHNNRIEALIDQLYGINRRIMSIDSSMVKLADQARINRREFIDAYRGYELDPTWLDRMGQNPGRAWQAFIERSTGKVEELRAEMAQVGQYVGVDISEFRRIVQQVQKGEKEARQAKKEMVEANLRLVISIAKKYTNRGLQFLDLIQEGNIGLMKAVDKFEYRRGYKFSTYATWWIRQAITRSIADQARTIRIPVHMIETINKLVRTGRQMLHEIGREPTPEELAEKLQMPLEKVRKVMKIAKEPISLETPIGDEEDSQLGDFIEDKNAVLPLDSAIQENLKETTTRVLASLTPREERVLRMRFGIGMNTDHTLEEVGQQFSVTRERIRQIEAKALRKLKHPSRSRKLRSFLDQ

SEQ ID NO: 22483 - protein, 254 aa, Lactobacillus delbrueckii subsp. lactis
MDGAILVVAATDGPMPQTREHILLARQVGVNYIVVFLNKCDLVDDPELIDLVEMEVRDLLSEYGYPGDDVPVVRGSALKALEGDEEAQKKIEELMDVVDEYIPTPERETDKPFLMPVEDVFTITGRGTVASGRIDRGTVKVGDSVEIVGLVEKVLTSVVTGLEMFHKTLDLGEAGDNVGVLLRGVDRDQIVRGQVLAAPGSIKTHKTFKGQVYILSKDEGGRHTPFFSDYRPQFYFHTTDITGEIELPEGTEMV

SEQ ID NO: 22484 - protein, 394 aa, Arabidopsis thaliana
  misc_feature (317)..(317): Xaa can be any naturally occurring amino acid
MAIMSDLPRDLLAEILSRVPLASLRSVRFTCKKWNDLSKDRSFLKKQIVEAKKKQLKSKEFEVIMMRNFRVYLTSVDLHNDVNPSFTPKGTLTSFSDDANQHQVDNVSSVFHCDGLLLCITKDLNFRLVVWNPYFGQTRWIQPRNSYHIKDIYAIGYDENKNHKILRLKDQYYDYDSHPRARICEFELYSFESNSWKVVLDVSPDWYIHSYHRGLSVKGNTYWYATEKHGYVNFLICFDFTTEKFGPRLPLPFNATESFTYDDVVTLSSVGEEQLALLFQSDATLMMEIWVTSKVDPTEVLWNKLFLAVDHDMIEFXYELKFVADAGSFFIDQKKNVVVVFDKDMNEHTHRGMAYIVGKNGYFKRVDIGEEAYTSCFPLVCSYVPSSVQIRQLT

SEQ ID NO: 22485 - protein, 254 aa, Lactobacillus pentosus
MDGAILVVAATDGPMPQTREHILLARQVGVDYIVVFLNKTDLVDDDELVDLVEMEVRELLSEYDFPGDDIPVVRGSALKALEGDPEQEKVIMHLMDVVDEYIPTPVRDTEKPFLMPVEDVFSITGRGTVASGRIDRGTVKVGDEVEIVGLHEDVLKSTVTGLEMFRKTLDLGEAGDNVGALLRGVNREQVVRGQVLAKPGSIQTHKKFKGEVYILSKEEGGRHTPFFSNYRPQFYFHTTDITGVIELPDGVEMV

SEQ ID NO: 22486 - protein, 187 aa, Schizosaccharomyces pombe
MLVLVIGDFHIPDRAPKLSEKFRQLLIPGKISQIICLGNLTSTSVYEYLKHVCSDLKLVKGAFDISSKAPIAGKITLGSFKIGYTNGHLVVPQDSPEALSILAREMDADILLFGGTHKFAAYELDGCFFVNPGSATGAPNVSAVEDDEKIVPSFVLMDVQGAVLILYVYRIFDGEVRVEKMQYRKPE

SEQ ID NO: 22487 - protein, 681 aa, Arabidopsis thaliana
MSGSVSGCGSGGCSIVWFRRDLRVEDNPALAAAVRAGPVNALFVWAPEEEGHYHPGRVSRWWLKNSLAQLDSSLRSLGTCLITKRSTDSVASLLDVVKSTGASQIFFNHLYDPLSLVRDHRAKDVLTAQGIAVRSFNADLLYEPWEVTDELGRPFSMFAAFWERCLSMPYDPESPLLPPKKIISGDVSKCVADPLVFEDDSEKGSNALLARAWSPGWSNGDKALTTFINGPLLEYSKNRRKADSATTSFLSPHLHFGEVSVRKVFHLVRIKQVAWANEGNEAGEESVNLFLKSIGLREYSRYISFNHPYSHERPLLGHLKFFPWAVDENYFKAWRQGRTGYPLVDAGMRELWATGWLHDRIRVVVSSFFVKVLQLPWRWGMKYFWDTLLDADLESDALGWQYITGTLPDSREFDRIDNPQFEGYKFDPNGEYVRRWLPELSRLPTDWIHHPWNAPESVLQAAGIELGSNYPLPIVGLDEAKARLHEALSQMWQLEAASRAAIENGSEEGLGDSAEVEEAPIEFPRDITMEETEPTRLNPNRRYEDQMVPSITSSLIRPEEDEESSLNLRNSVGDSRAEVPRNMVNTNQAQQRRAEPASNQVTAMIPEFNIRIVAESTEDSTAESSSSGRRERSGGIVPEWSPGYSEQFPSEENGIGGGSTTSSYLQNHHEILNWRRLSQTG

SEQ ID NO: 22488 - protein, 254 aa, Lactobacillus plantarum
MDGAILVVAATDGPMPQTREHILLARQVGVDYIVVFLNKTDLVDDDELVDLVEMEVRELLSEYDFPGDDIPVIRGSALKALEGDPEQEKVIMHLMDVVDEYIPTPVRDTEKPFLMPVEDVFSITGRGTVASGRIDRGTVKVGDEVEIVGLHEDVLKSTVTGLEMFRKTLDLGEAGDNVGALLRGVNREQVVRGQVLAKPGSIQTHKKFKGEVYILSKEEGGRHTPFFSNYRPQFYFHTTDITGVIELPDGVEMV

SEQ ID NO: 22489 - protein, 534 aa, Desulfotalea psychrophila
MFASYKSIQETCAFEKLSELAQSPYDLTQPGALQADNRLQRYQVAGQAFKLFYATEQVDDRVLAGLQAVADECQLVSQYRAMRTGAVMNKIDGFVSENRRVLHTATRDLFSGEPAEASMNSRAKRELEKLSHFLDALDAGEIVNEAGEAFTTIVQVGIGGSDLGPRAVYEALKSYTIVGRRAAFISNVDPDDVSMALADLDLGKTIFNIVSKSGSTLETVTNEAFVRRALLENGYDSARHCISITGEGSPMDDPDSYLASFYLYDCIGGRYSTTSMVGCVLLGFTLGFEQVMAFLRGAANMDNSADEVDILKNIPLLMALIGIWNRNFLDLSSLAIIPYSQALYRFPAHLQQCDMESNGKSVDRQGRAVQGKTGPIIWGETGSNSQHAFFQHIYQGTSPVPIEFIGFSESQRGKDIEVQGCTSQQKLLANLFAQMVALACGKKDQNLNKFFAGNRPSCLLFAKKLTPYVMGSLLACYEAKIVFQGFAWNINSFDQEGVQLGKELAKRFLREIGGEEEGFHGIESAFLNEVQRGV

SEQ ID NO: 22490 - protein, 487 aa, Bacillus clausii KSM-K16
MAIKTEVVFGNYINGRWKQEAASPLASINPSDAEEVVGYVQNSTADVVDEAVEVAKGALLSWRKLTGAERGHYLYQAANQLESRLDEIAETLAREMGKTLPEAKGETARGVAILRYYAGEGLRADGEVIPSTDSEALMFTKRVPLGVVGVITPWNFPIAIPVWKIAPALIYGNTVVFKPATEAAVTAAKVVECFAQAGLPKGVLNLVTGSGKVIGNALVAHEHVHGLTFTGSEQTGKQIGKAAAARGAKYQLEMGGKNPVIVAEDADLHVAVDATISGAFRSTGQKCTATSRVIVAEAILQDFQELLLEKTKQITIGKALDDGVWMGPCASEAQLRTVLDYIEIGKKEGAKLLCGGKRVTDGNRAAGYFVEPTIFTNVNRHMRIAQEEIFGPVIALITAKNMEEAIEIANDSRYGLSASIFTTNIEKMLLFIDEMDAGLVRVNAESAGVELQAPFGGMKASSSHSREQGQAAKEFYTSIKTVFVKGR

SEQ ID NO: 22491 - protein, 216 aa, Carica papaya
LPESVDWRAKGAVTPVKHQGYCESCWAFSTVATVEGINKIKTGNLVELSEQELVDCDLQSYGCNRGYQSTSLQYVAQNGIHLRAKYPYIAKQQTCRANQVGGPKVKTNGVGRVQSNNEGSLLNAIAHQPVSVVVESAGRDFQNYKGGIFEGSCGTKVDHAVTAVGYGKSGGKGYILIKNSWGPGWGENGYIRIRRASGNSPGVCGVYRSSYYPIKN

SEQ ID NO: 22492 - protein, 335 aa, Bacillus clausii KSM-K16
MATKIGINGFGRIGRNVFRASLKNPNVEVVAINDLTDANMLAHLLKYDSVHGVLDAKVEAKDNSLVVDGREISVSAERNPAEIGWDKYGVEVVVESTGFFTKRADAAKHLEAGAKKVIISAPASDEDITIVMGVNEDKYDPANHHVISNASCTTNCLAPFAKVLNDKFGIRRGMMTTVHSYTNDQQILDLPHKDYRRARAAAENIIPTTTGAAKAVALVLPELKGKLNGGAMRVPTPNVSLVDLVAELDKDVTAEEVNGALKEAAEGDLKGILAYSEEPLVSGDYNGNPHSSTIDALSTMVMEGNMVKVISWYDNESGYSHRVVDLLDYIAGKGL

SEQ ID NO: 22493 - protein, 331 aa, Legionella pneumophila str. Lens
MRRGLLLLNLGTPDNADIRAVKLYLREFLTDKRVIDLPTIPRYILVYCLILPFRSPKSAQAYQSIWTEKGSPLLYHSQNLVTKLQSALKDEYKIALGMRYGTPSITTALAELKDCHSLTILPLFPQYSSAATGSAIEKTLSYLANQEIIPSIKIIRDFYQRPEYIQAQAKIMKPYIKDNFHVLFSYHGIPERHIHKSGCDTLCPQTCTPIYDKNQACYRAQCYQTSLLLAKELQLGTHQYTTAFQSRLGKTPWIKPYTDEIFAELISKGIKNIVVSCPSFVADCLETLEEIGIRAKEQWEKLGGEQFILTPCMNDHPEWIKAIQSIVNEQF

SEQ ID NO: 22494 - protein, 320 aa, Vibrio parahaemolyticus RIMD 2210633
MIKKIGVLTSGGDAPGMNAAIRGVVRTALSEGLEVFGVYDGYLGLYEGRIEKLDRSSVSDVINKGGTFLGSARFPEFKQVEVREKAIENLKKHGIDALVVIGGDGSYMGAKKLTEMGYPCIGLPGTIDNDIAGTDYTVGYLSALNTVIDAIDRLRDTSSSHQRISIVEIMGRHCGDLTLMSAIAGGCEYIITPETGLDKDKLISNIQDGIAKGKKHAIIALTELMMDANELARDIEAATGRETRATVLGHIQRGGRPTAFDRVLASRMGNYAVHLLLEGHGGRCVGIVKEQLVHHDIIDAIENMKRPVRNDLYKVAEELF

SEQ ID NO: 22495 - protein, 530 aa, Lactobacillus sakei subsp. sakei 23K
MKFSELGLSEPIMKAISRAGFEEATPIQGETIPLALAGKDVIGQAQTGTGKTAAFGLPILQNLDLDNPDIQALIISPTRELAIQTQEELYRLGRDRKAKVQVVYGGADIRRQIRSLKDHPQILVGTPGRLLDHINRRTVKLDHVKTLVLDEADEMLDMGFVDDIESIIKQVPEKRQTLLFSATLPAPIMKIGKSFMTNPEMIKVKSKELTADLIDQYYVRAKDFEKFDIMTRLFDVQSPELTLIFGRTKRRVDELTRGLKARGYNAEGIHGDLSQQKRMSVLKSFKAGRLDVLVATDVAARGLDISGVTHVYNYDIPQDPDSYVHRIGRTGRAGKSGVSVTFVTPNEMEYLRIIEELTKKRMLPLQPPSEKEAFKGQLAAAVADINSMIEKGQLAKYNEEAEELLKQFSDVELASVLLKTISKEAVPVKITPERPLPSRKKGGNRGGNRGGSRGGNSGNRRGGNGGGYRGGNRRSSGDGKRRGNDSSKDGRRSSSNGDSSKRRSNDNRGDSRKKTDGRSKRNFTIRTNDK

SEQ ID NO: 22496 - protein, 416 aa, Clostridium acetobutylicum ATCC 824
MNNNIFDSKELNLHNGIKVISIKKETALFSLHVGVKIGSIYESNEERGASHFVEHMLFKGTKSLTNEELNKRFENLGGEYNAYTDYNCTVYSVTALYEEMTKAVELISDMIQNPSFDEKEFKKEKKVILSELNSGKDDIEDYCYTKVHEIGFSKSPLKYDTIGTKANVEGFSRNFIFDFYKKYYIPNNCFIVIVSKLEHEQVFDLVEKYFGDWNKGEVKDKDIIVEENIPKIVTSHRKDISQSSIIYMFTAYNLNRFEEAALKILNYKLGESANSILFREIRENKGLAYDIYSDLNLSKNVKTMYIYTAVNNENVKETIDSINNCIEKIKYEEKWLDDNSILLMKKVLKTSLAFTIEDTTDIGNYVLHQCMDGEDIYEFVEDMRYADTIKNEDVRKVALKVLTNPSIYVVKAKGSV

SEQ ID NO: 22497 - protein, 117 aa, Triticum aestivum
  misc_feature (5)..(5): Xaa can be any naturally occurring amino acid
  misc_feature (13)..(13): Xaa can be any naturally occurring amino acid
  misc_feature (23)..(23): Xaa can be any naturally occurring amino acid
  misc_feature (79)..(79): Xaa can be any naturally occurring amino acid
AGLRXSPSGSPSXLIVASKKARXSRCQPYGLVGGVCQREGVDCVGKGAQGEGVYQFADKYGANVDGYSPIYTPEEWSPXSGDVYVGGKTGLFLWAVTLSGILLGGALLVYNTSALAS

SEQ ID NO: 22498 - protein, 618 aa, Oryza sativa
MHTKLLLLPILASLQLLPGAANGATVDPSCPPATCGNLTITYPFWLGSQNQSSCGPPSFQLTCNDRASGPFLRNSYIKVLGFDYGRRSLVAVHALLAADAACTVMFNVSSAFAITDRFSISQSNRELYVLSRCRERLPPPDAVPVTNCRANSSGMYAYLGGSYGTGQTPVNNGGCELSVFLVLGSSNAADMTAANYRQLIAGGFLLEWEPVGDCNACTASGGRCRYDASTSAFACLCSDGGMRPSICVSLSAAAGLVFAFLAWLMYRQRQKFRSAICGVYSGNTKNEEEMLKKCESLALKRYKYSELKKITKSFEDNLGEGGYGVVFKGRLQNGRMVAVKILTVSKGNGEDFLNEVMSISRTSHVNIVTLLGFCLEGPKRALVYEYMPNGSLKNYIHSESSNLATGWEMLLKIVIGIARGLEYLHQGCNTRIIHFDIKPRNILLDHEFCPKIADFGLAKLCHLNESILSMAEARGTIGFIAPEVFSRGFGVVSTKSDVYSYGMLLLEIVKVRKNIKGIADNFSETFFPHWVYDSLVSEMQCCETAYGTEEIARKMTIVGLWCIQMTPETRPSMSRVIEMLERSISELEMPPKPFLCSPIHSTNVSSYKSVNFTMSASS

SEQ ID NO: 22499 - protein, 262 aa, Triticum aestivum
HYRTSLYKKAGWYRSGIPGISSTHASDTMVDHHDEENLSLLRFGALWESVYCQDSLLVFSTGRSPTLYKELRKEKPMLTPDITILSVGSEITYGEAMVPDHGWEEYLNNKWDRNIVLEETAKFSELKLQVETEQRPHKVSFLVDKKNAQGVIKSLSETFEKRGVDAKIIYSGGQDLDILAQGAGKGQALAYLLKKLGSCGKTPNNTLACGDSGNDAELFSIPGVHGVMVSNAQEELLQWHAENAKDNPRIIHATERCAAGII

SEQ ID NO: 22500 - protein, 373 aa, Petunia x hybrida
MPLHLRCSATVCVTGAAGFIGSWLVMRLLERGYNVHATVRDPENKKKVKHLLELPKADTNLTLLKADLTVEGSFDEAIQGCQGVFHVATPMDFESKDPENEVIKPTVRGMLSIIESCAKANTVKRLVFTSSAGTLDVQEQQKLFYDQTSWSDLDFIYAKKMTGWMYFASKILAEKAAMEEAKKKNIDFISIIPPLVVGPFITPTFPPSLITALSLITGNEAHYCIIKQGQYVHLDDLCEAHIFLYEHPKADGRFICSSHHAIIYDVAKMVREKWPEYYVPTEFKGIDKDLPVVSFSSKKLTDMGFQFKYTLEDMYKGAIDTCRQKQLLPFSTRSAEDNGHNREAIAISAQNYASGKENAPVANHTEMLSNVEV

SEQ ID NO: 22501 - protein, 254 aa, Lactobacillus amylophilus
MDGAILVVAATDGPMPQTREHILLAKQVGVGYIVVFLNKTDLVDDPELIDLVEMEVRELLSEYDFPGDDIPVLRGSALKALEGDPEQEQVIYDLMDTVDEYIPTPERSNDKPFLMPVEDVFTITGRGTVASGRIDRGEVHVGDEVAIVGLKPEILKSTVTGLEMFRKTLDAGEAGDNIGALLRGIDRSQIERGQVLAKPGSIQTHTKFKSEVYILTKEEGGRHTPFFSNYRPQFYFHTTDVTGVIELPDGVEMV

SEQ ID NO: 22502 - protein, 626 aa, Shigella flexneri 2a str. 2457T
MAIEIKVPDIGADEVEITEILVKVGDKVEAEQSLITVEGDKASMEVPSPQAGIVKEIKVSVGDKTQTGALIMIFDSADGAADAAPAQAEEKKEAAPAAAPAAAAAKDVNVPDIGSDEVEVTEILVKVGDKVEAEQSLITVEGDKASMEVPAPFAGTVKEIKVNVGDKVSTGSLIMVFEVAGEAGAAAPAAKQEATPAATPAPAAGVKEVNVPDIGGDEVEVTEVMVKVGDKVAAEQSLITVEGDKASMEVPAPFAGVVKELKVNVGDKVKTGSLIMIFEVEGAAPAAAPAKQEAAAPAPAAKAEAPAAKAEGKSEFAENDAYVHATPLIRRLAREFGVNLAKVKGTGRKGRILREDVQAYVKEAIKRAEAAPAATGGGIPGMLPWPKVDFSKFGEIEEVELGRIQKISGANLSRNWVMIPHVTHFDKTDITELEAFRKQQNEEAAKRKLDVKITPVVFIMKAVAAALEQMPRFNSSLSEDGQRLTLKKYINIGVAVDTPNGLVVPVFKDVNKKGIIELSRELMTISKKARDGKLTAGEMQGGCFTISSIGGLGTTHFAPIVNAPEVAILGVSKSAMEPVWNGKEFVPRLMLPISLSFDHRVIDGADGARFITIINNTLSDIRRLVM

SEQ ID NO: 22503 - protein, 254 aa, Lactobacillus reuteri
MDGAILVVAATDGPMPQTREHILLARQVGVQYIVVFLNKTDLVDDDELVDLVEMEVRDLLSEYDFPGDDVPVVRGSALKALEGDPEQEKVILHLMDVIDDYIPTPKRPTDKPFMMPVEDVFTITGRGTVASGRIDRGTVKVGDEVEIVGLTEDVLKSTVTGLEMFHKTLDLGEAGDNVGVLLRGISHDQIQRGQVLAEPGSIQTHKNFKGEVYVMTKEEGGRHTPFFSNYRPQFYFHTTDVTGTIELPDGVEMV

SEQ ID NO: 22504 - protein, 208 aa, Boechera stricta
MATIEESSDLEAIQKHLFEDLMVSDGFMGDFDFDASFVSELWCIEPQVPKQEPDSPVFDPDSFVNEFLQVEAKSSPELNSSSSTYETDLSVKKAERFEEEEEEEEEEARHYRGVRRRPWGKFAAEIRDPAKKGSRIWLGTFESDVDAARAYDCAAFKLRGRKAVLNFPLEAGKYEAPANSGRKRKRSDVKEELQRTQSNSSSSSCDAF

SEQ ID NO: 22505 - protein, 316 aa, Methanosarcina mazei Go1
MIIGTRGSQLALAQTENVARLLKEKGVETSIKIIKTSGDRFTDRPLHAVSGGVGAFVRELDDVMLAGEIDIAVHSMKDMPTIRPKAIPTVAVLKRDTPFDILLTYDGTPLDELPEQSIIGTSSLRRTAQIRRYRPDIITQNLRGNIDTRLRKLREGQYDGIMLAKAGLERMGWEIEGEIFSPDFFCPSPNQGTVAVVTREGTEAEAAVSMLDHTESRIVTEIERILIAELGGGCTTPVGSYAEITPDRQEIHVRAEVLSLDGREAIRIDEFIPLRGGIEKARELGHRLVEMGGRRLAEEALLQISRGADSENSCDY

SEQ ID NO: 22506 - protein, 254 aa, Weissella confusa
MDGAILVVASTDGPMPQTREHILLARQVGVDYLVVFLNKVDLVDDEELVDLVEMEVRELLSEYDFPGDDIPVIRGSALKALEGDPEQVKVIEELMDTVDSYIPTPERDTDKPFLMPVEDVFTITGRGTVASGRIDRGTVNLNDEVEIVGLHEDVRKTVVTGIEMFRKSMQQGQAGDNIGALLRGVDRKEIERGQVLAKPGSIQTHTKFLAEVYVLTKEEGGRHTPFFTNYRPQFYFHTTDVTGVVQLPEGVEMV

SEQ ID NO: 22507 - protein, 336 aa, Petroselinum crispum
MKMKIGINGFGRIGRLVARVALMSDDIELVAVNDPFITTEYMTYMFKYDSVHGQWKKDELKVKDSKTLLFGDKPLTVFGVRNPEEDPWGEAGAEYVVESTGVFTDKDKAAAHLKGGAKKVVISAPSGNAPMFVVGVNEKEYKKDIDIVSNASCTTNCLAPLAKVLNDKFGIVEGLMTTVHSITATRKTVDGPSMKDWRGGRAASFNIIPSSTGAAKAVGKVLPALNGKLTGMAFRVPTVDVSVVDLTARLEKAATYDEIKAAIKHESETSLKGILGYTEDDVVSTDFVGDSRSSIFDAKAGIALNGNFVKVVSWYDNEWGYSNRVIDLIRHMASVA

SEQ ID NO: 22508 - protein, 254 aa, Lactobacillus hilgardii
MDGAILVVAATDGPMPQTREHILLAHQVGVDYIVVFLNKTDLVDDDELIDLVEMEVRELLSEYDYPGDDIPVVRGSALKALEGDKEQEQVILDLMDIVDEYIPTPERDDSKPFLMPVEDVFTITGRGTVASGRIDRGVVKIGDEVEIVGLNDAPLKSTVTGLEMFRKTLDEGQAGDNVGVLLRGIDRDQVVRGQVLAAPGSIQTHKKFEGQVYILTKEEGGRHTPFFSNYRPQFYFHTTDVTGVIELEKGVEMV

SEQ ID NO: 22509 - protein, 854 aa, Brassica rapa
MKRVQNIYHHSYTSFLLVFLVLILFHPALSIYVNTMSSSESLTISSNRTLVSPGGVFELGFFKTLERSRWYLGIWYKKVPWKTYAWVANRDNPLSNSIGTLKISGNNLVLLGQSNNTVWSTNFTRGNARSPVIAELLPNGNFVMRHSNNKDSNGFLWQSFDFPTDTLLPEMKLGYNLKTGRNRFLTSWKSSDDPSSGNFAYKLDLRRGLPEFILINTFLNQRVETQRSGPWNGMEFSGIPEVQGLNYMVYNYTENSEEISYSFHMTNQSIYSRLTVSELTLNRFTWIPPSSAWSLFWTLPTDVCDPLYLCGSYSYCDLITSPNCNCIRGFVPKNPQQWDLRDGTQGCVRTTQMSCSGDGFLRLNNMNLPDTKTATVDRTIDVKKCEERCLSDCNCTSFAAADVRNGGLGCVFWTGELVAIRKFAVGGQDLYVRLNAADLDLSSGEKRDRTGKIIGWSIGVSVMLILSVIVFCFWRRKHKQAKADATPIVGNQVLMNEVVLPRKKRNFSGEDEVENLELPLMEFEAVVTATEHFSDFNKVGKGGFGVVYKGRLVDGQEIAVKRLSEMSAQGTDEFMNEVRLIAKLQHNNLVRLLGCCVYEGEKILIYEYLENLSLDSHLFDGSRSCKLNWQMRFDIINGIARGLLYLHQDSRFRIIHRDLKASNVLLDKDMTPKISDFGMARIFGRDETEADTRKVVGTYGYMSPEYAMNGTFSMKSDVFSFGVLLLEIISGKRNKGFCDSDSSLNLLGCVWRNWKEGQGLEIVDRVIIDSSSPTFRPSEISRCLQIGLLCVQERVEDRPMMSSVVLMLGSEAALIPQPKQPGYCVSGSSLETYSRRDDENWTVNQITMSIIDAR

SEQ ID NO: 22510 - protein, 640 aa, Oceanobacter sp. RED65
MTPKTGLSLYARTLLLGLGPALIISIMLGGYFINARIQDVNIEMQNKGELIAVQLAATSDYFVLTGNPSIINPLTRVLLEDKDVELIEIEDISGGLLFSESDTEFELSQASRESLNWYQADIIQYDVLQEEDDWFATGRNRARVLGQVRVGLSQAFVEQRQQEILIHAMLIVVVAMTVCALIAWLSGARLVRPIKKLSDVVDQLSHRVYDTRTEETASGEVGQLQVGVNKLANELQKAEKVQHHYVKDLIRAREASESANKAKSEFLAVMTHELRTPMNGVLGMLQLLQGTQLSKEQNEYVDVAINSGDHLLGLINDILDFSKIEQGRIDLDEQYFDLVESLKSLCDSFTPIAQKKGLQFNVHFMTHTNLWVKTDQTRLKQVLLNLMGNAVKFTDTGSINLSLQDLSIEDDEVELSIVVQDTGKGINQAQLSRIFDAFQQEDASISRQYGGTGLGLAISKQLVEKMGGKLEVQSEKDRGSTFICRFCWPINVANEQSDVTQDANEQESFNGRVLLVEDNDVNQKVAMKMLTNLGVSVDLAEDGEVAVQRCKENTYDLVLMDLQMPNMDGYEATKVIRSEPGGNRHVPIIALTANAFYDVKTQCMQAGMSDFLAKPYKKATLMQVLSRWLHQGDASIGLLK

SEQ ID NO: 22511 - protein, 484 aa, Zea mays
  misc_feature (33)..(33): Xaa can be any naturally occurring amino acid
MATSVRGFSSAPCRDVPGSYGLPLVGAVRDRLXDFYYFQGQDKYFESRVERYGSTVVRMNVPPGPFMARDPRVVAVLDAKSFPVLFDMDKVEKKDLFTGTYMPSTSLTGGHRVCAYLDPSEPTHAKVKQLLFSLLLSRKDDVIPVFRSNFSSLLATVESDLAQGGKAEFNKLNDVTSFDFIGEAYFGVRPSATDLGKGGPTKAAKWLIWQLHPLLTLGLPMVLEEPLLHTFHLPPFLVKGDYGALYKYFSTVAKQALDTAEGLGLSREEACHNLLFATTFNSYGGLKVLFPGILANVASAGEKLHERLVAEIRGAVAEAGGKVTLAAVEKMELVKSVVWESLRLDPPVKFQYGHAKKDLQVQSHDAVFQVKKGEMLFGYQPCATKDPRVFGATAKEFVPGRFLGEEGSKLLQYVYWSNGRETENPTVDNKQCPGKNFVVLVGRLFLVELFLRYDTFTADIGKDLLGSSVVFTSVTKATSGPGSE

SEQ ID NO: 22512 - protein, 582 aa, Populus tomentosa
MVLFNVSRVETTPFGDQKPGTSGLRKKVKVFKQPNYLQNFVQSTFNALTPQNVRGATLVVSGDGRYFSKDAIQIITKMAAGNGLRRVWVGQNGLLSTPAVSAVIRERVGVDGSKATGAFILTASHNPGGPNEDFGIKYNMENGGPAPEGITDKIYENTKTIKEYLTADLPDVDITTIGVTSFSWSEGQFDVEVFDSASDYIKLMKSIFDFESIRKLLSSPKFTFCYDALHGVAGAYAKRIFVEELGAQESSLLNCVPKEDFGGGHPDPNLTYAKELVARMGLGKSNSEVEPPEFGAAADGDADRNMVLGKRFFVTPSDSVAIIAANAVEAIPYFSAGLKGVARSMPTSAALDVVAKSLNLKFFEVPTGWKFFGNLMDAGLCSVCGEESFGTGSDHIREKDGIWAVLAWLSILAYKNRENLGGGKLVTVEDIVHNHWATYGRHYYTRYDYENVDAGAAKELMACLVKLQSSLTEVNEIVSGIQSDVSKVVHADEFEYKDPVDSSISKHQGIRYLFEDGSRLVFRLSGTGSEGATIRLYIEQYEKDPSKTGRDSQDALAPLVAVALGLSKMQEFTGRSAPTVIT

SEQ ID NO: 22513 - protein, 377 aa, uncultured archaeon GZfos22D9
MEDIFRFADELGPAKVIHVYEPSVGLKAVLVVDNVARGPAIGGLRIAPDVSPEECFRLARAMTLKNAAADLPHGGGKSVIYGDPKMPTKEKEKLIRALASSLREIQEYIFAPDMGTDEECMAWVKDEIGRVVGLPSDFGGIPLDEIGATGWGLSHATEVALEYCDFDMEGAQVVVQGFGAVGKHTARFLTEKGAMLVGVADSRGTIYNPQGLDVLALIELKKAGKSVADYPDGKKLDRDAVINIECDIWIPAARPDVIDKNNVNLLKTKLVIEGANIPITEGAEKHLHEKGVLYVPDFIANAGGVICAAMEYQGADQSAAFHAIEEKLCRNTRLVLDEAASRGILPREAAVDLAVQRLKKSMSYRRWSLFSSAPGFV

SEQ ID NO: 22514 - protein, 303 aa, Rubrobacter xylanophilus DSM 9941
MDGLVSKVLLATDGSREAARAAGMARELSGALGAELHVLYVQPIPEAYINQWEMAGPEFIDGIFKRAEGEARKKAEEEAAKLGKDGVAGVHAAVGRTDAEIVRVAEELGAEIVVVGSRGLGALSRALLGSVSTSVVRHAHTSVLVVRGEGRDRYLPGRILAAVDGSREAEAAARMAAEISGATGSELHLLYVLDLTPRPPYPHPLAGESWDRHLEEAKEKARAFVEERAKQLREAGAEVAVAKVAFGEPDKKIVEEAEELGASLVVTGSRGLGSLRRSLMGSVSDSVVRHAHCPVLVVRRRAE

SEQ ID NO: 22515 - protein, 364 aa, Photobacterium leiognathi
MALSSAKEIIDDIRQGRMVILMDDESRENEGDLIIASEMVTPEAINFMATHGRGLICLTLSKARCKTLNLPLMLQGNNDNFSTPFTISIEAAKYVTTGISASDRAKTVLAAVAPNAKSTDIVMPGHIFPLMAQHGGVLIRAGHTEAGCDVARLAGLEPSSVIVEILNEDGSMARRPQLEIFAEKHGLKLGTIADLIEYRTQQESHIERISEYELNTEYGIFTLVTYRDTIDNQAHFALCKGEIQAKAATLVRVHVKDTLKDILQVGLSQWSLEAAMQRIQTEDGVLVIISQQESPKTLFEKLDMYAKEQPNSPHSGIVQSRNIGLGSQILADLGVKKIRLLSNSNQGYRALSGFGLEVVEYIYD

SEQ ID NO: 22516 - protein, 354 aa, Bacillus cereus ATCC 14579
MEKRIVCLAGDGVGPEVMESAKEVLHMVERLYGHHFHLQDEYFGGVAIDLTGQPLPQRTLAACLASDAVLLGAVGGPRWDSAKERPEKGLLALRKGLGVFANVRPVTVESATAHLSPLKNADEIDFVVVRELTGGIYFSYPKERTEEVATDTLTYHRHEIERIVSYAFQLANKRKKKVTSIDKANVLESSKLWRTVTEEVALRYPNVEVEHILVDAAAMELIRNPGRFDVIVTENLFGDILSDEASVLAGSLGMLPSASHAEKGPSLYEPIHGSAPDIAGKNKANPIAMMRSVAMMLGQSFGLTREGYAIEEAVSAVLKSGKCTADIGGTETTTSFTKAVIQEMEEQALVGRGR

SEQ ID NO: 22517 - protein, 481 aa, uncultured archaeon GZfos22D9
TLRDGEQTPGVSLRREQKLQIAKQLDILGVDFIEAGTAIISEGEQKAIKAIADEGLKAEISSFARLLKGDIDAAIKCGVDTVNLVAPVSDDHIKKKLRKDRETLRNMTIEMSEYVKGHGLKVEISAEDASRADMVFLKSFFYDLGQIVDRLSFCDTVGVLYPERTKEMFQALCSCDTPVSVHCHNDFGLATANSVAAVMAGAKVVHVTVNGLGERAGNASLDEVVTALELLYGVKTNIAKEKMYETSRVVMNLTKMPVAPNKPLMGDNAFTHESGMHVHGTLADKSLYEPIDPGLIGRKRRFAIGKHTGKASVKMKLDEMGISADDEQMQKILTEVKELGDKAKLITDADFQAIVDDVLHIEREEKIKLVDLSVVSGKNVYPTASLRLEIDGEEVVEAGVGIGPVDAAINALRKAMAEMEMNDLRLEEYHVDAITGGTDALVNVLVKMSRGDETITASGVSADIVIASVYALIDGVNRLYR

SEQ ID NO: 22518 - protein, 134 aa, Metarhizium anisopliae
MYNLNPLTKNNWRASLVPHRGNSSSNSSDSPYSGGVFFLAIHFPTDYPFKPPKVSFTTPIYHPNINSNGSICLDILRDQWSPALTISKVLLSICSMLTDPNPDDPLVPEIAHVYKTDRPRYEATAREWTRKYAV

SEQ ID NO: 22519 - protein, 326 aa, Bacteroides fragilis NCTC 9343
MGTVKCVGILTSGGDAPGMNAAIRAVTRAAIYNGLQVKGIYRGYRGLVTGEIKEFKSQNVSNIIQLGGTILKTARCKEFTTPEGRKMAYDNMVKEGIDALVVIGGDGSLTGARIFAQEYDIPCIGLPGTIDNDLYGTDTTIGYDTALNTILDAVDKIRDTATSHERLFFVEVMGRDAGFLALNGAIASGAEAAIIPEFSTEVDQLEEFIKSGFRKSKNSSIVLVAESELTGGAMHYAERVKNEYPQYDVRVTILGHLQRGGSPTAHDRILASRLGAAAIDAIMEDQRNVMIGIEHDEIVYVPFSKAIKNDKPVKRDLVNVLRELSI

SEQ ID NO: 22520 - protein, 543 aa, Acidithiobacillus ferrooxidans
MAVLQIATRPFADQRPGTSGLRKKVKVFQQPHYLENFVQSIFNAIPDRAGKTLVLGGDGRFYNREAIQIILRMAAGNGWGKVVVGRGGLFSTPAVSTVIRARGAHGGIILSASHNAGGPDQDFGIKYNTANGGPAPEKLTDAIWTASRSIQGYQILDGADVDIDHAATFWLGDMQIEVCDPVAEYAELMARIFDFDALKRLMQGPFRMRFDALHAITGPYAHEIFEKQLGAPAGTVVNGTPLTDFGGGHPDPNLVYAKPLADELFAENAPDFGAASDGDGDRNMILGRHFFVTPSDSLAVLAAHATAIPAYRHGLKGIARSMPTSQAADVVAEALGIAHYETPTGWKFFGNLLDAGKITFCGEESFGTGSDHIREKDGLWAVLAWLSVIAHTGQPVAEIVTRHWQRFGRHYYTRHDYENLPAEIGEQIMHSIAAQLPVLPGQTLAGREILIADDFAYADPIDGSVSAHQGLRLLFADGARLIFRLSGTGTEGATLRIYHEHLEKDPLRQHQDPQRTLRDLIQVGRNLSRLETLTGRKTPTVIT

SEQ ID NO: 22521 - protein, 286 aa, Bacillus cereus E33L
MVAVIIKGNEVAEKKRAQLKEEVVKLKEQGIVPGLAVILVGEDPASRSYVKGKEKGCEQVGIYSELIEFPETITEERLLTEIDRLNGDDRINGILVQLPLPKHIEEKAIIERISPEKDVDGFHPISVGRMMTGQDTFLPCTPHGIVELVKETNLDISGKHVVVIGRSNIVGKPVGQLFLNENATVTYCHSKTQNMKELTKLADILIVAVGRPKMVTADYIKEGAVVIDVGVNRLETGKLCGDVDFDNVLDVAGYITPVPKGVGPMTITMLLHNTVESAKRAGVVCK

SEQ ID NO: 22522 - protein, 419 aa, Zea mays
IRLEVIHVSEIEEWNMVKSLHIKTVDELGLPRSVIQDMLDELEQLLKGIAMMKELTPRTSDYLVSFGECMSTRIFSAYLNKIRVKARQYDAFDIGFITTDEFGNADILEATYPAVAKRLHGDWIQDPAIPVVTGFLGKGWKSGAVTTLGRGGSDLTATTIGKALGLREIQVWKDVDGVLTCDPNIYPHAKTVPYLTFEEATELAYFGAQVLHPQSMRPAREGDIPVRVKNSYNPKAPGTLITRQRDMDKVVLTSIVLKSNVTMLDIVSTRMLGQYGFLARVFAIFEDLCISVDCVATSEVSVSVSLDPSKIWSRELIQQELDHVVEELEKIAIVRLLQQRAIISLIGNVEQSSLILEKTGRVLRKSGVNVQMISQGASKVNMSLIVHDSDAKALVEALHQAFFEDDVLSQVEAENLLVG

SEQ ID NO: 22523 - protein, 523 aa, Yarrowia lipolytica
MSEWKESLNVPKKDTRHKTEDVTATKGTGFEDFFLKRELLMGIFEAGFENPSPIQEEAIPIALAGRDILARAKNGTGKTAAFVIPALQQVNPKVNKIQALIMVPTRELALQTSQVCKTLGKHLGIKVMVTTGGTNLRDDIMRLEDTVHVLVGTPGRVLDLAGRKVADLSESPMFIMDEADKLLSPDFTPIIEQVLHFFPWTTRQILVFSATSPLTVKAFMDRNLHKPYEINLMDELTLRGITQYYAFVDEKQKLHCLNTLFSKLDINQSIIFCNSTVRVELLARKITELGYSCYYSHAKMIQSHRNRVFHEFRNGTCRNLVCSDLLTRGIDIQAVNVVINFDFPKNAETYLHRIGRSGRFGHLGIAINLINWNDRYNLYKIEQELGTEIKPIPAQIDKNLYVAESSENIPRPFPIADMPRGKESKRNEQFQPQQNQNQQQQQDGQNQHSLGPYLPRVPPQGIPGPGYGYPPPQGFPQGMPPQGMPPQGAGGYMPPTPYGYQQQGFPPQPPQGFNNGQPQQPSQ

SEQ ID NO: 22524 - protein, 997 aa, Burkholderia vietnamiensis G4
MKSSGSARTARRNAALPSTDAQTGALATVANGRAKPATKPKDSIRQTKRTTKAAGASKPAARTREDKDGPLFEDIRFLGRLLGDVVREQEGDTVFDVVETIRQTAVKFRREDDSQAAQTLEKKLRKLTPEQTVSVVRAFSYFSHLANIAEDRHHNRRRRIHALAGSAPQPGTVAYALEQLKTSGNASKRVLQRFFDDALIVPVLTAHPTEVQRKSILDAQHDIARLLAERDQPLTARERAYNESMLRARVTALWQTRMLRDARLTVGDEIENALSYYRTTFLDELPALYGDIEAALAEHGLPARVPAFFQMGSWIGGDRDGNPNVTAATLDEAINRQAAVILEHYLEQVHKLGAELSVSNLLVGANDAVKALAAASPDQSPHRVDEPYRRALIGIYTRLAASARVRLGEGTVPVRSAGRGAPPVRAVPYADSEAFVADLKVLTASLEEHHGASLAAPRLTPLMRAAEVFGFHLSSIDLRQSSDIHEAVVAELFARAGVHADYASLSEDDKLIALLAALADPRPLRSPYIEYSALAQSELGVFEKAREVRAQFGPRAVRNYIISHTETVSDLVEVLLLQKETGLLEGAFGAAHDSARNGLMVIPLFETIPDLRDAARIMREYFALPGIEALIAHQGAEQEVMLGYSDSNKDGGFLTSNWELYRAELALVDLFRDRKITLRLFHGRGGTVGRGGGPTYQAILSQPPGTVNGQIRLTEQGEVIASKFANPEIGRRNLETVVAATLEASLLPQSNAPAQLPAFEAAMQALSDAAMASYRALVYETPGFTDYFFAATPITEIAELNIGSRPASRKLQDPKNRRIEDLRAIPWGFSWGQCRLLLTGWYGFGSAVSAYLDGAPDAAARTKRVALLKKMNKTWPFFANLLSNMDMVLAKTDLAVASRYAQLVADRKLRKHVFERIVAEWERTAQALAEITGHEGRLATNPLLARSIKNRFPYLDPLNHLQVELIKRHRAGDTNARLRRGIHLTINGIAAGLRNTG

SEQ ID NO: 22525 - protein, 502 aa, Arabidopsis thaliana
MVLSHAVSESDVSVHSTFASRYVRTSLPRFKMPENSIPKEAAYQIINDELMLDGNPRLNLASFVTTWMEPECDKLIMSSINKNYVDMDEYPVTTELQNRCVNMIAHLFNAPLEEAETAVGVGTVGSSEAIMLAGLAFKRKWQNKRKAEGKPVDKPNIVTGANVQVCWEKFARYFEVELKEVKLSEGYYVMDPQQAVDMVDENTICVADILGSTLNGEFEDVKLLNDLLVEKNKETGWDTPIHVDAASGGFIAPFLYPELEWDFRLPLVKSINVSGHKYGLVYAGIGWVIWRNKEDLPEELIFHINYLGADQPTFTLNFSKGSSQVIAQYYQLIRLGHEGYRNVMENCRENMIVLREGLEKTERFNIVSKDEGVPLVAFSLKDSSCHTEFEISDMLRRYGWIVPAYTMPPNAQHITVLRVVIREDFSRTLAERLVIDIEKVMRELDELPSRVIHKISLGQEKSESNSDNLMVTVKKSDIDKQRDIITGWKKFVADRKKTSGIC

SEQ ID NO: 22526 - protein, 363 aa, Glycine max
MGGFMICIIICSTKCMSSTQVKFWFTLKNDQGIESFLKNHGALAQKRYKFSEVKKMTNSFKVKLGEGGFGAVYKGELLSGCPVAVKILNESKGNGEDFINEVASISRTSHVNVVTLLGFSSEGRKKALIYEFLPNGSLDKFIYNKGLETTASLCWDNFWQIAIGTARGLEYLHRGCNTRILHFDIKPHNILLDENFCPKISDFGLAKLCPMKESIISMSDARGTIGYVAPEVWNRNFGGISQKSDVYSYGMMLLEMVGVKKNINGKASQTSEYFPDWIYNRLEQGIDLTTDGVIATQEKEIARRMTIVGLWCVQTIPQDRPTMSKVIDMLEGNMDSLEMPPKPVLSSPARSLPEFTTSSLQSG

SEQ ID NO: 22527 - protein, 363 aa, Streptococcus pneumoniae TIGR4
MARRLPSSVNQPKDYASIDAAPEERERGITINTAHVEYETEKRHYAHIDAPGHADYVKNMITGAAQMDGAILVVASTDGPMPQTREHILLSRQVGVKHLIVFMNKVDLVDDEELLELVEMEIRDLLSEYDFPGDDLPVIQGSALKALEGDSKYEDIVMELMNTVDEYIPEPERDTDKPLLLPVEDVFSITGRGTVASGRIDRGIVKVNDEIEIVGIKEETQKAVVTGVEMFRKQLDEGLAGDNVGVLLRGVQRDEIERGQVIAKPGSINPHTKFKGEVYILTKEEGGRHTPFFNNYRPQFYFRTTDVTGSIELPAGTEMVMPGDNVTIDVELIHPIAVEQGTTFSIREGGRTVGSGMVTEIEA

SEQ ID NO: 22528 - protein, 337 aa, Petunia x hybrida
MAKIKIGINGFGRIGRLVARVALQRDDVELVAVNDPFISVEYMTYMFKYDSVHGQWKHHELKAKDDKTLLFGEKPVTVFGIRNPEEIPWGEAGADYVVESTGVFTDKDKAAAHLKGGAKKVIISAPSKDAPMFVVGVNEKEYKSDLTVVSNASCTTNCLAPLAKVINDRFGIVEGLMTTVHSMTATQKTVDGPSAKDWRGGRAASFNIIPSSTGAAKAVGKVLPALNGKLTGMAFRVPTVDVSVVDLTVRLEKEATYDEIKAAIKEESEGKLKGIPGHTEDDVVSTDFIGDNRSSIFDAKAGIALSKNFVKLVSWYDNEMGYSTRVVDLIKHIASVE

SEQ ID NO: 22529 - protein, 804 aa, Parvularcula bermudensis HTCC2503
MAEVNGSSDAKTIPTDQDPRQDKAQGRELAPETDIPPRQASRSAVGLFPGLEPAPAAPTLTGKPPDFIRQYELVDRIRSYDPEVDEALLDRAYVFAMRAHGDQKRSSGDPYISHPLAVASILTELKLDQETIATALLHDVVEDTPVTIGEITDIFGPVIAELVDGVTKISKRELAPDADGKTENFAKFLLATAKDLRVLIVKLADRLHNMRTLHFVPSTEKRARIARETMDIYAPMAGRIGMQAVKEELEDLSFRYLYPEAFDRITDRLDLLSQRAGPHIVRLATRLRESLAEAGMVAEVYAREKRVYSIWRKMQRKGSTFEELADIYAFRVIVEDGDACYRALGIIHQAFKMIPGEFDDYVSTPKPNGYRSIHTAVLASSEDSEAGTRYEGQRVEIQIRTFEMHEVAERGIAAHWRYKASQNDGGRAGGPEAGKDDPYLWLRGMIETLATEGGKDLLLAQAKLDLYHDQIFPFTPKGRVIPLPTDGTVLDFAYGLHTELGDRCAGAKVNGALRPPRSRLRTGDVVEILTNENAPIPQAWESFVVSAAAKTGLRRRARALNKRDKIILGERVVAAAFAARHLPFSSRAVEGVVAKLGFDQVDALYEAAGEMTLPARQVVEAVYPDLDADTDQHTGEGRLVETGAPLPRRAVSIAGMTPGGAITLGLCCGPLPGQRIIGLRDGENDSITVHTIDCERLADRQEEEWIDLAWSDSLTDTFIVPIVLTVNNKTGALGDIGTLLGRYGADILDINVEKRDVDFTDLCLDISVRDVRHLQSVLTGLRVSDYVVSAEKTESREEGPYDRR

SEQ ID NO: 22530 - protein, 486 aa, Burkholderia pseudomallei K96243
MYLEHALKDPSLLRHQAYIGGEWQAADSDATFEVFDPATGESLGTVPKMGAAETARAIEAAQAAWAGWRMKTAKERAAILRRWFDLVIANSDDLALILTTEQGKPLAEAKGEIAYAASFIEWFAEEGKRVAGDTLPTPDANKRIVVVKEPIGVCAAITPWNFPAAMIARKVGPALAAGCPIVVKPAESTPFSALAMAFLAERAGVPKGVLSVVIGDPKAIGTEITSNPIVRKLSFTGSTAVGRLLMAQSAPTVKKLTLELGGNAPFIVFDDADLDAAVEGAIASKYRNNGQTCVCTNRFFVHERVYDAFADKLAAAVSKLKVGRGTESGATLGPLINEAAVKKVESHIADALAKGASLMTGGKRHALGHGFFEPTVLTGVKPDMDVAKEETFGPLAPLFRFASEEELVRLANDTEFGLAAYLYSRDIGRVWRVAEALEYGMVGINTGLISNEVAPFGGVKQSGLGREGSHYGIDDYVVIKYLCVAV

SEQ ID NO: 22531 - protein, 254 aa, Lactobacillus curvatus
MDGAILVVAATDGPMPQTREHILLAHQVGVDYIIVFLNKTDLVDDDELTDLVEMEVRELLSEYDFPGDDIPVIRGSALGALNGNADDVKAVEELMATVDEYIPTPERDTDKPFLMPVEDVFTITGRGTVASGRIDRGQVTVGDEVEIVGLKDEVAKTTVTGLEMFRKTLDQGQAGDNVGALLRGIDRDSIERGQVLAKPGSIQTHKNFKGEVYILSKDEGGRHTPFFSNYRPQFFFHTTDVTGVIELPEGVEMV

SEQ ID NO: 22532 - protein, 271 aa, Brassica oleracea var. botrytis
NWGFFELLNHGIPYDLMDNIERMTKEHYKEFMEQKFKEMLRSKNLDTLETEVENVDWESTFFLHHLPQTNLYDIPDMSDEYRAAMKDFGKRLENLAEELLDLLCENLGLEKGYLKKVFSGTKGPTFGTKVSNYPPCPKPEMIKGLRAHTDAGGLILLFQDDKVSGLQLLKDGVWVDVPPLKHSIVINLGDQLEVITNGKYKSITHRVMTQKEGNRMSIASFYNPGSDAESSPAPSLVEKDSDEYPSFVFDDYMKLYAGVKFQPKEPSFEAM

SEQ ID NO: 22533 - protein, 254 aa, Lactobacillus murinus
MDGAILVVAATDGPMPQTREHILLARQVGVEYIVVFLNKCDLVDDEELLDLVEMEVRDLLSEYDFPGDDIPVIRGSALKALEDDEDAKKKILELMDTVDEYIPTPERPTDKPFLMPVEDVFTITGRGTVASGRIDRGIVKVGDEVEIVGLKDDVLKTTVTGVEMFRKTLDEGEAGDNIGALLRGVDRTQIERGQVLAKPGSIQTHKKFKGEVYVLTKEEGGRHTPFFSNYRPQFYFHTTDVTGVIELPEGVEMV

SEQ ID NO: 22534 - protein, 906 aa, Staphylococcus aureus subsp. aureus MRSA252
MNNKKTATNRKGMIPNRLNKFSIRKYSVGTASILVGTTLIFGLSGHEAKAAEHTNGELNQSKNEATAPSENKTTEKVDSRQQNNVEQSTTSNQPKVNESDNTSVKETTEEPQNTTSTQPTKKNNDATANKDNLAAQNISTQANDVSATPKTTTIKPRTLNRMAVNTVAAPQQGTNVNDKVHFSNIDIAIDKGHVNSTTGKTEFWATSSDVLKLKANYTIDDSVKEGDTFTFKYGQYFRPGSVRLPSQTQNLYNAQGNIIAKGIYDSTTNTTTYTFTNYVDQYTNVSGSFEQVAFAKRENATTDKTAYKMEVTLGNDAYSEEIIVDYGNKKAQPLISSTNYINNEDLSRNMTVYVNQPKNTYTKETFVSTLTGYKFNPDAKNFKIYEVTDQNQFVDSFTPDTSKLIDVTDKFKITYSNDNKTATVDLMNGQTNSNKQYIIQQVAYPDNTSTDNGKIDYTLDTDKTKYSWSNSYSSVNGSSTANGDQKKYNLGDYVWEDTNKDGKQDANEKGIKGVYVILKDSNGKELDRTTTDENGKYQFTGLGNGTYSVEFSTLAGYTPTTVNAGTDDAVDSDGLTTTGVIKDADNMTLDSGFYKTPKYSLGDYVWYDSNKDGKQDSTEKGIKGVKVTLQNEKGEVIGTTETDENGKYRFDNLDSGKYKVIFEKPAGLKQTGTNTTEDDKDADGGEVDVTITDHDDFTLDNGYFEEETSDSDSDSDSDSDSDSDSDSDSDSDSESDSDSDSDSDSDSDSDSDSDSDSDSDSESDSDSDSDSDSDSDSDSDSDSDSDSDSDSDSDSDSDSDSDSDSDSDSDSDSDSDSDSDSDSDSDSDSDSDSDSDSDSDSDSDSDAGKHTPVKPMSATKDHHNKAKALPETGSENNGSNNATLFGGLFAALGSLLLFGRRKKQNK

SEQ ID NO: 22535 - protein, 254 aa, Lactobacillus agilis
MDGAILVVAATDGPMPQTREHILLARQVGVEYIVVFLNKCDLVDDEELLDLVEMEVRDLLSEYDFPGDDIPVVRGSALKALEGDAEAEKQIEELMNVVDEYIPTPERPTDKPFLMPVEDVFTITGRGTVASGRIDRGTVKVGDEVEIVGLKDDVVKTTVTGVEMFRKTLDEGEAGDNIGALLRGVDRTQVERGQVLAKPGSIQTHKKFKGEVYVLTKEEGGRHTPFFSNYRPQFYFHTTDVTGVIELPEGVEMV

SEQ ID NO: 22536 - protein, 1137 aa, Staphylococcus aureus subsp. aureus MRSA252
MINRDNKKAITKKGMISNRLNKFSIRKYTVGTASILVGTTLIFGLGNQEAKAAENTSTENAKQDEASASDNKEVVSETENNSTQKNDLTNPIKKETNTDSHQEAKEAPTTSSTQQQQNNATTSTETKPQNIEKENVKPSTDKTATEDTSVILEEKKAPNNTNNDVTTKPSTSEIQTTPTTPQESTNIENSQPQPTPSKVDNQVTDATNPKEPVNVSKEELKNNPEKLKELVRNDSNTDRSTKPVATAPTSVAPKRVNAKIRFAVAQPAAVASNNVNDLITVTKQMITEGIKDDGVIQAHDGEHIIYTSDFKIDNAVKAGDTMTVKYDKHTIPSDITDDFTPVDITDPSGEVIAKGTFDLNTKTITYKFTDYVDRYENVNAKLELNSYIDKKEVPNETNLNLTFATADKETSKNVKVEYQKPIVKDESNIQSIFSHLDTTKHEVEQTIYVNPLKLNAKNTNVTIKSGGVADNGDYYTGDGSTIIDSNTEIKVYKVASGQQLPQSNKIYDYSQYEDVTNSVTINKNYGTNMANINFGDIDSAYIVKVVSKYTPGAEDDLAVQQGVRMTTTNKYNYSSYAGYTNTILSTTDSGGGDGTVKPEEKLYKIGDYVWEDVDKDGVQGTDSKEKPMANVLVTLTYPDGTTKSVRTDANGHYEFGGLKDGETYTVKFETPAGYLPTKENGTTDGEKDSNGSSVTVKINGKDDMSLDTGFYKEPKYNLGDYVWEDTNKDGIQDANEPGIKDVKVTLKDSTGKVIGTTTTDASGKYKFTDLDNGNYTVEFETPAGYTPTVKNTTAEDKDSNGLTTTGVIKDADNWTLDSGFYKTPKYSLGDYVWYDSNKDGKQDSTEKGIKDVTVTLQNEKGEVIGTTKTDENGKYHFDNLDSGKYKVIFEKPAGLTQTGTNTTEDDKDADGGEVDVTITDHDDFTLDNGYFEEDTSDSDSDSDSDSDSDSDSDSDSDSDSDSDSDSDSDSDSDSDSDSDSDSDSDSDSDSDSDSDSDSDSDSDSDSDSDSDSDSDSDSDSDSDSDSDSDSDSDSDSDSDSDSDSDSDSDSDSDSDSDSDSDSDSDSDSDSDSDSDSDAGKHTPVKPMSATKDHHNKAKALPETGSENNGSNNATLFGGLFAALGSLLLFGRRKKQNK

SEQ ID NO: 22537 - protein, 584 aa, Saccharomyces cerevisiae
MGIHIPYLTSKTSQSNVGDAVGNADSVEFNSEHDSPSKRGKITLESHEIQRAPASDDEDRIQIKPVNDEDDTSVMITFNQSLSPFIITLTFVASISGFMFGYDTGYISSALISIGTDLDHKVLTYGEKEIVTAATSLGALITSIFAGTAADIFGRKRCLMGSNLMFVIGAILQVSAHTFWQMAVGRLIMGFGVGIGSLIAPLFISEIAPKMIRGRLTVINSLWLTGGQLVAYGCGAGLNYVNNGWRILVGLSLIPTAVQFTCLCFLPDTPRYYVMKGDLARATEVLKRSYTDTSEEIIERKVEELVTLNQSIPGKNVPEKVWNTIKELHTVPSNLRALIIGCGLQAIQQFTGWNSLMYFSGTIFETVGFKNSSAVSIIVSGTNFIFTLVAFFSIDKIGRRTILLIGLPGMTMALVVCSIAFHFLGIKFDGAVAVVVSSGFSSWGIVIIVFIIVFAAFYALGIGTVPWQQSELFPQNVRGIGTSYATATNWAGSLVIASTFLTMLQNITPAGTFAFFAGLSCLSTIFCYFCYPELSGLELEEVQTILKDGFNIKASKALAKKRKQQVARVHELKYEPTQEIIEDI

SEQ ID NO: 22538 - protein, 256 aa, Zea mays
MASTIGNNDRLTQLKAFDDTKAGVKGLVDEGVTIVPPIFHHLPDPHDATSNAHAAIPVIDLAAFSATNNDEAHAHQQLVAQVKAAAETVGFFQVVNHGVPAELLPRMLASVKSFNEEPADERRPYYTRDQARRVRYESNFDLFHSPAANWRDTVFFEDSAAPEEMPPAFRDVVPEYARQARGLAAQLLALLSEALGLHAGYLQRDAGCLGGPSLACHYYPPCPEPWLTLGTTRHSDPSFLTVLLQDAVGGLQVLLG

SEQ ID NO: 22539 - protein, 157 aa, Candida albicans
MAEEDTFETADAGAALTFPMQCSALRKNGHVVIKNRPCKIVDMSTSKTGKHGHAKVHLVAIDIFTGKKLEDLSPSTHNMEVPNVSRQEFQLLDIDDGYLSLMTADGDTKDDVKVPEGELGDKLQSEFDEGKDLIVTIISAMGEEAAISYKEAPKGSA

SEQ ID NO: 22540 - protein, 237 aa, Synechococcus sp. WH 8102
MAPDQLLEQKQAEKQEVKGYFETTGFDRWNRIYSESDDVNKVQRNIRIGHQKTVDEVLAWIKDSGELNEVSFCDAGCGVGSLSLPLAEMGAGSISASDISEAMAQEADRRARAAGLDMGKLNFFASDLESLSGSFHTVCCLDVFIHYPQQPAEEMVKHLCSLTEERLIVSFAPYTLLLALLKGIGQLFPGPSKTTRAYTLKEEGIVKSAEACGFKLVRRSLNKAPFYFSRLIEFRKA

SEQ ID NO: 22541 - protein, 254 aa, Lactobacillus brevis
MDGAILVVAATDGPMPQTREHILLARQVGVDYIVVFLNKTDLVDDDELVDLVEMEVRELLSEYDYPGDDIPVIRGSALKALEGDEEQEKVILHLMDVVDDYIPTPERENDKPFLMPVEDVFTITGRGTVASGRIDRGTVKVGDEVEVVGLHEDVLKTTVTGLEMFRKTLDLGEAGDNVGALLRGVNREQVVRGQVLAQPGSIQTHEDFKGEVYILSKEEGGRHTPFFSNYRPQFYFHTTDITGVIELPEGVEMV

SEQ ID NO: 22542 - protein, 315 aa, Synechococcus sp. WH 8102
MKPAAFNDGWTYRDRVPVGAAGTWLSCWLAERYQHSAGEVWRQRIHSGELDCNGQRLTADRRLAGGEAVLWRRPPWLEEAIPDQWETIHDDGDLLVINKPSGLPVMPGGGFLLHTLTALLEPTGARPVHRLGRFTSGLQVCARDPMTRAALSKQFRPEGSCRKVYQAWAQRVPGLEQGQTLTVTNDVVERQHPLLGWVWGPEPLKQEPIRKRLTARSELELLERTAEGDRLQVTITTGRPHQIRIHLAQLGSPLLGDPLYLLNREISATATPGDGGYRLHAWQLSGLPHLGETTLQVDPSVEGDQALRNSINREK

SEQ ID NO: 22543 - protein, 289 aa, Bacteroides fragilis NCTC 9343
MERKLAVITGADGGMGTEITRAVACAGYDVIMACYSSSKAETKCRELVKETGNEKIEVWQIDLASLASVRAFADRMLRQKTPVALLMNNAGTMETGLHITEDGLERTVSVNYVGPYLLTRLLLPLMGEGTRIVNMVSCTYAIGKLDFPDFFLWGRKGSFWRIPIYSNTKLALLLFTIELAERLRARGITVNAADPGIVSTNIIRMDQWFDPLTDIFFRPFIRTPLQGAATAIGLLLDAEVEGRTATFNLNNHCRLLPEKYTRPDRRAQLWEETERILSEKGFLPINDKR

SEQ ID NO: 22544 - protein, 152 aa, Triticum aestivum
  misc_feature (85)..(85): Xaa can be any naturally occurring amino acid
MAAGARAVAAMSSSSSVLLAAAVALALLVASASAQSGCTSVLIGLYPCMNYISGSGTAPTKSCCSQLASVVQSQPQCLCSALGGXSSSLGGITINKTRALELPNACNVQTPPASKCNGSGGGSAPGASVSTPAVPAVQTPGRFRYQKRTPPP

SEQ ID NO: 22545 - protein, 422 aa, Frankia sp. EAN1pec
MALLVAKFGGSSVADADRIKRVADRIVQTRRAGNDVVVVVSAMGDTTDDLLDLAEQVSPLPPARELDMLLTAGERISMALLAMAITKLGAEARSFTGSQAGVITDSVHGRARIIDVTPGRIRTALDEGAIAIVAGFQGVSQDTKDITTLGRGGSDTTAVALAAALGADACEIYTDVDGVFTADPRIVPDARRIERISYEEMMEMAACGAKVLMLRCVEYARRYSVPVHVRSSFSSKPGTWVTETPEAQLVEQAIIRGVAHDSSEAKVTVKGCPDKPGVAAAVFRAVADADVNLDMIVQVGSVAGSGRTDISFTLPMADGRTALGALEKVREQIGFERTLYDDHIGKLSLIGAGMKSHPGVSARFFGALADSGVNVEIISTSEIRISVVVRDTDLPVAVRAVHAAFELGNPDESAVVYAGTGR

SEQ ID NO: 22546 - protein, 482 aa, Xanthobacter autotrophicus Py2
MSSDVTYPDVQLHIDGVWRDADGGKRIPVINPATEEEIGSVAHCSIADLDEALAATERGFATWSRTSAFERSKLMRKAADILRERANSIARLMTLEQGKPLPEARMETLAAADVIDWFAEEARRAYGRVIPARAPGVYQLVIKEPVGPVAAFTPWNFPINQVVRKLCGALAAGCSIIVKAPEETPASPAELIRAFVDAGVPKGVIALVYGVPAEVSEYLIPHPVIRKITFTGSTPVGKKLAALAGAHMKRVTMELGGHSPVIVFDDADVQAAAKQIATAKFRNAGQVCVSPTRFLVQEKVYEQFVDTFVTVAKAVKVGNGLDEGTTMGPLANDRCIPAMEALIADARQKGAEVKTGGSRIGNKGYFFEPTVVTGVTREMRMMNEEPFGPLAMLLPFADFDEAITEANRLPYGLASYAYTSSAKTAQAVAHQVQAGMMTINHLGLALPEVPFGGVRDSGYGSEGGSEAIEAYLNPKFVSQAGV

SEQ ID NO: 22547 - protein, 316 aa, Bacillus clausii KSM-K16
MAEETIYDVIIAGAGPAGMTAAVYTSRANLNTLMLERGMPGGQMANTEDVENYPGFDHILGPDLSNKMFEHAKKFGAAYAYGDIKEIIDEGDTKRVIAGSKEYRAKAVIVSTGAEYKKLGIPGEQELSGRGVSYCAVCDGAFFKERELIVVGGGDSAVEEAVYLTRFAKKVTIVHRRDQLRAQKILQDRAFNNPKVDFIWNKVVTEINEKDGKVGGVTLKDTKTGEVSNMEADGVFVYIGMLPLNESVQNLGITNEEGYIVTNEEMETKVPGIFAAGDVREKSLRQIVTATGDGSIAAQNVQHYLENLSEAEKVEK

SEQ ID NO: 22548 - protein, 772 aa, Bradyrhizobium sp. BTAi1
MNWPGDTSSSKRTAGGNPLSAFFLWIGGFSAIEGLDDESLTERDRRRIRARQIDAVASLVPVTIGINFANAAIILGVFWNHISNAFLTAWGLSIAVAGGLALRGWWRARKSRPKEASERGLRRMTLQAFFLAAVWGSLPLILMPQIEPELQIIVGSLMTGMISGGAFAMSSVPRAGLTYTWTLMLASVGSLLLCGGTTYLVLVVFLLLYSSFMVRHLVSHGNVFLENLKAQIRHERQNETISLLLKEFQENAASWLWQTDAEGRLIDAPQRFADVAQLPLDQLKGERLVDTLEYLCPTDTATLATFADRMARRLSIPEILIHVVVAGGERRRWALTARPARDYEGKFAGYRGFGRDVTERWRAEQAEAESRAKSEFLAMMSHEIRTPMNGVLGLASTLLETKLDPEQRHAVMTIRESGDNLQRILNDILDLSKLNAGKLEFESVDFSPAALVEAVTAIIGVNAKTKSLLVNADIDPKLPPALKGDVARIRQVLINLASNAVKFTERGGLTIAVACRTRDDHKATIEWRVSDTGIGIPADRVGKLFTDFAQADASINRRFGGTGLGLAISRRIIEQMGGAIAVSSVQGEGSTFRFSLTLPWSDKQISDQRGDRVGAGDLKERIEALGRPLRVLIAEDDATNRMVVSKMLQEFAVEKCIVPDGLQAVNAAGEQEFDLVLMDVRMPEMDGITATRTIRAKGGRLAELPIIALTANAFPDDIKQCREAGMSDFLAKPLRKPAMVAAMLKALGPAAPTVAAPSLAPSEDGASVAAEA

SEQ ID NO: 22549 - protein, 237 aa, Thermobifida fusca YX
MGLRTTESEWATPRAALFDLDGTLINSEPRSVAVWARVLQDRGVEPDEALLCKFMGRRGEDVINELAHLFPGESVEDIFADRWRYGQDPDLPPVEQLPESVAFLKYLHAQGVPFALVTSAGRQWAESTLEWLGVRDMFRGIISADDVTVGKPHPEGYLSGAELVGYGPEHIVVFEDTPAGIMAGRNAGMRVVGVTTTHPPQALAHAHLVVEHLGQVGWPQLVLRDPEPPQTALAGQG

SEQ ID NO: 22550 - protein, 196 aa, Triticum aestivum
  misc_feature (144)..(144): Xaa can be any naturally occurring amino acid
MATMLALSPFTGAAVVGRSASWSPAVPRRRALLVRAQTEPDAEPTKETTTSASTSSPSPTPSPSTTLVAPKPKSKAANANPSVWDALAFSGPAPERINGRLAMVGFVAALSVEAARGGGLLDQAGSGAGLGWFLKTAAVLSVAXSLVPLLQGQSVESKSSGVWTADAELWNGRFAMLGLVALAVTEFITGTPFVNV

SEQ ID NO: 22551 - protein, 429 aa, Rhodopseudomonas palustris CGA009
MTVEVSKLPSGLTIVTDTMPHLETAALGVWTGVGGRDEKPDEHGISHLLEHMAFKGTTRRTSREIAEEIEAVGGDLNAGTSTETTAYYARVMKADVPLALDVLSDILANPSFEAEELEREKSVIVQEIGAAQDTPDDVVFEYLNELCYPEQPIGRSLLGTAKTLKSFSREKLQSYLSTHYRGPDMVVAAAGAVDHARIVEEVSHRFASFDGTPAPKPQPAMFGAGGSRVVHRDLEQAHLTLALEGLPQSAPTLFSLQVFTNILGGGMSSRLFQEVREKRGLCYSIYTFHAPYSDTGFFGLYTGTDPADAPEMMEVIVDVINDAVDTLTDAEISRAKAQMKAGLLMALESCSSRAEQLARHILAYGRPLPVDELVGRIDAVTIDTAREAGRTLLARSRPAVVALGSGRGLDRAVSFAEGLTQSKAKTSYH

SEQ ID NO: 22552 - protein, 485 aa, Oceanicola granulosus HTCC2516
MRDATPTASHYVDGAYLEDAEGAAIEVIYPATGARIATVHSASGQVVEAALAAATRAQPAWAALPGVERGRVLRRAADILRARNRELSELETLDTGKPLSETLVADATSAADALEYFGGLAAAITGEHIPLADGDFVYTRREALGVCVGIGAWNYPTQIAAWKAAPALACGNTMVFKPSETTPLCALKLAEILTEAGAPPGVFNVVNGLGDVGAALVADGRVAKVSLTGSVPTGRKVYAAAAQGMKHATMELGGKSPLVIFDDADLESAISAAINGNFYSTGQICSNGTRVFVQSGIKEAFLERLAERTANATLGDPLDEATTLGPMVSAAQLEIVLDYVARGRAEGARLVTGGARVEREGFWIEPTVFADVTDDMTIAREEIFGPVMTVLDFETEDEALARANATEYGLAAGVFTADLTRAHRMAAGFEAGTTWINTYNLTPVEAPFGGSKMSGVGRENSAAAIAHWSELKSVYVSLNPTEAPF

SEQ ID NO: 22553 - protein, 182 aa, Novosphingobium aromaticivorans DSM 12444
MPDTLAAIPLTRIDGTADSLANHAGKVLLVVNVASKCGLTPQYEGLEALYKARKDEGLEVLGFPANDFGAQEPGSHEEIAEFCKLNYGVSFPLFAKADVTGPGKQPLYAALTEAAPTKQGPAQEFRDRLKGYGMTPTEDPEVLWNFEKFVIGRDGEVAARFAPGVTPDDPALLAAIDAELAK

SEQ ID NO: 22554 - protein, 224 aa, Bacteroides thetaiotaomicron VPI-5482
MRKKLKAVLFDMDGVLFNSMPYHSEAWHQVMKTHGLDLSREEAYMHEGRTGASTINIVFQRELGKEATQEEIESIYHEKSILFNSYPEAERMPGAWELLQKVKSEGLTPMVVTGSGQLSLLERLEHNFPGMFHKELMVTAFDVKYGKPNPEPYLMALKKGGLKADEAVVIENAPLGVEAGHKAGIFTIAVNTGPLDGQVLLDAGADLLFPSMQTLCDSWDTIML

SEQ ID NO: 22555 - protein, 558 aa, Onion yellows phytoplasma OY-M
MCSIFGILNIKTDPQILRDQALKLSSLMRHRGPDWSRIFASQKAILAHERLSIIDVNAGAQPLYNKTKTLILAINGEIYNHLDLRKQYKDKYEFQKESDCEVILALYQEKGVNFLDELQGMFAFILYDLTKNTYLIGRDHMGIIPLYMGYYLNQNFYIASEMKALIPICQTLSIFPPGNYLYSESGKMVKYYKRNWMDYQNVYNNQTNTNQLRNFLEASVKKILMSDVPYGVLLSGGLDSSIISGITKKFAKHRIEESSKKEVCFPSLHSFAVGLKGAPDLKAAKEVDNHLGTAHHEINFTIQEGIDALKDVIYHIETYDITTIRASIPMYLMARKIKAMGIKMILSGEGADEIFGGYLYFHKAPNAQEFHKETVRKLASLHLYDCSRANKAMSAWGVEARVPFLDKNFLDVAMRLNPKDKMCGTNGKIEKHILRQTFESYLPKKIVWRQKEQFSDGVGYSWIDALKQLAQTKITDTQLKNAYVRFPYNTPTNKEGYMYREIFEILFPLPSAISLFPGGPSIACCTAKAIEWDKAFKQINDPSGRAALGVHNEAYKDK

SEQ ID NO: 22556 - protein, 327 aa, Rhodopseudomonas palustris CGA009
MVKFPVRIGTRKSVMALAQTEDIAKQLSAAASELDPQIIKFETVGDSDQISKLLPHGGKGGAFVAEIRAAMLRGELHCAMHSLKDMPANEETPGLIVAATLARDPACDSLVLRKGLTLEELKKSRGKGYTIGTNAVRRAAYAKRLFPEVEVIHFRGAADSRMRKLDNREKQRMPDGSEVGPADALIMARAGIERVGFVDRIAHDFTPEEMLPAAGQGIVAVECPVHEWKTRQYLALIDNHQSRLCCDAEREVLWVLNGHCNSPIAAHSVITGDEMTLRASVLDLEGGMFIEAARTGPANRPRELGRTVGLELLDKGAAAVIEKTRPE

SEQ ID NO: 22557 - protein, 254 aa, Lactobacillus suebicus
MDGAILVVAATDGPMPQTREHILLARQVGVDYIVVFLNKTDLVDDDELVDLVEMEVRELLSEYDFPGDDIPVIRGSALKALEGDPEQEKVILHLMDVVDEYIPTPQRDTDKPFLMPVEDVFTITGRGTVASGRIDRGQIKVGDEVEIVGLKDEVLKTTITGLEMFRKTLDLGEAGDNVGALLRGISRDQVERGQVLAAPGSIHTHKKFKGEVYILTKEEGGRHTPFFSNYRPQFYFHTTDVTGVIELPEGVEMV

SEQ ID NO: 22558 - protein, 814 aa, Burkholderia thailandensis E264
MRKMKLVMVGNGMAGVRTLEELLKLAPDLYDVTVFGAEPHPNYNRILLSPVLAGEQTLEQIVLNDYAWYESHGITLHVGKKIVKIDRVKRVVIADDGTEAAYDRLLLATGSNPFMLPIPGADLDGVLGYRDIADTQAMIDAAARHTHAVVIGGGLLGLEAANGLKLRGMDVTVAHLAPTLLERQLDAKAGGLLRASLEARGLTFLMPKETQALVGDENGRVRAVRFKDGDTCKADLVVMAVGIRPNTALAESAGLYCNRGIVVNDTMQTYDPRIYAVGECVSHRGIAYGLVAPLFEQAKVAANHLAQFGIGRYAGSVTSTKLKVTGIDLFSAGDFLGGGDTEDITLSDPIAGVYKKLVIKDDKIVGACLYGDTADGAWYFKLLREGRNIADIRETLMFGETSLGDTGHSGATRATAMADDAEVCGCNGVCKGTIVAAIKEKGLFTLDDVRKHTKASASCGSCTGLVEQILMSTVGGDYSASPKAKPICGCTDHTHAEVRMAIREHKLLSVPDAMRFLEWRTPNGCASCRPALNYYCISTWPHDAKDDPQSRFINERAHANIQKDGTYSVVPRMWGGVTSADELRRIADVVDKYAIPTVKVTGGQRIDLLGVKKEDLPGVWRDLGMPSGHAYAKALRTVKTCVGSEWCRFGTQDSTLMGQQLERALWRMYAPHKVKLAVSGCPRNCAESGIKDVGVIGVDSGWELYVGGNGGIKTEVAQFFCKVKTHEEVLEYAGAFLQLYREEGWYLERTVHYLERVGLDHVKARVLDDAENRRALWERLQFALKDEPDPWRDTQDAKVDLRQFIPIAVAPADA

SEQ ID NO: 22559 - protein, 437 aa, Pseudomonas syringae pv. syringae B728a
MATAETSSLRRAITAPMLTLFILGDVLGAGVYALAGTIAGRVGGAIWAPLLIALCFALLTAASYAELVTKYPRAGGAAVYAEKAFGKPLLSFLVGFSMVAAGVTSAAGLAVAFAGDYFQALLDWPAQWVCVAFLVTVGLLNARGIKESLSANLVMTVIELSGLLMVIAAAIWFVSQGQGVPQRVFELDSASPATAILGASLLAFYSFVGFETSANLAEEIKDVRKVYPRALFGALLAAGAVYILVGMGAAMVLPVEQLKDSQAPLMDVVSASGLGIPAPWFAVIALIAVANGALLTMIMASRLTFGMAREGLLPAVMGSVLPKRRTPGLAILATTLVAIALSFTSTLTILAETVVLLLLFVFLSVNIAVLVLKRDKVEAGHFQVHWVIPLLGILSCLLLLTQQGPETWLRAGIMLAVGAALYGLTRLGSSALASHPR

SEQ ID NO: 22560 - protein, 340 aa, Rhodopseudomonas palustris CGA009
MATVFPFSAIVGQEEMKLALLIAAVDQKVGGVLAFGDRGAGKSTAVRALAALLPKMKTVVGCRYNCDPDQPDRYCEECKEKVKHGKVKTAQVPVPVVDLPLGATEDRVVGALDLERALAKGEKAFEPGLLARAHRGFLYIDEANLLEDHLVDLLLDVAASGENVVEREGLSIRHPARFVLVGTGNPEEGELRPQLLDRFGMSVEVKTPDTLPERIEVVRRRDAFENDPAAFVADWSKEEAKLRRKISQAKERLPEVTVSDAALERAAKLCMTLGTDGLRGELTLMRAARALAALEHDKTVTDEHLKRIAPSALRHRLRRNPLDDAGSSVRVDRALAEIFG

SEQ ID NO: 22561 - protein, 181 aa, Arabidopsis thaliana
MASSMLSSTAVVTSPAQATMVAPFTGLKSSASFPVTRKANNDITSITSNGGRVSCMKVWPPIGKKKFETLSYLPDLSDVELAKEVDYLLRNKWIPCVEFELEHGFVYREHGNTPGYYDGRYWTMWKLPLFGCTDSAQVLKEVEECKKEYPGAFIRIIGFDNTRQVQCISFIAYKPPSFTEA

SEQ ID NO: 22562 - protein, 254 aa, Lactobacillus malefermentans
MDGAILVVAATDGPMPQTREHILLARQVGVEYLIVFLNKTDLVDDDELIDLVEMEVRELLSEYDYPGDDIPVIRGSALKALEGDPEQEKVILHLMDVVDEYIPTPKRDNDKPFLMPVEDVFTITGRGTVASGRIDRGTIKVGEEVEIVGLQEEVLKSTVTGLEMFRKTLEFGEAGDNVGVLLRGINREQVVRGQVLAKPGSIQTHKKFKSEVYILSKEEGGRHTPFFSNYRPQFYFHTTDITGVIELANGVEMV

SEQ ID NO: 22563 - protein, 590 aa, Rhodopseudomonas palustris CGA009
MSIALAWSDAVTAAQLFAVDPVGTGGVLLRSRAGPVRDRWLAMMRAALPPEQPYKHLPLHIADGRLLGGLDLSATLLAGRPVAERGLLSEADGGVMVVAMAERLQSSTNVYLTAAMDAHETAVERDGLSLRMPARFGVVALDEGLEDEFSPAGLRDRLGFHLDLDQFAWRETDDFPISLDDIRAARARLADIKVESEQIEAVCTAAAALGIISLRAPLLAIRAAKASAALFDRTKIEQDDITLAARLVLAPRATIFPQQEQPDQADEPPPPEPPPPEDDNQDNNDQEQQTPDIDKALDEVILAAVKAAMPPGVLEAMRASAGRARARSAGKAGELQKSKKRGRPAGSIRGELRDGSKLNVIETLRAAAPWQPLRRRQAEGRNGSAPRILVEKDDFRIARFKQRTETITIFVVDASGSAALHRLAEAKGAVELLLADCYVRRDQVAMISFRGTIAEILLPPTRSLARAKRSLAGLPGGGGTPLSAGLDCAFMLADSIKRKGQTPTVIVLTDGRANIARDGAPGRPQAEEDAKSSARQFRVAGISSVVIDMSPRPGPQAEAFAKEMDARYLPMPHADATVLAQAVTAATRQD

SEQ ID NO: 22564 - protein, 118 aa, Hordeum vulgare subsp. vulgare
MARAAATQLVLVAMVAAMLLVATDAAISCGQVSSALSPCISYARGNGAKPPVACCSGVKRLAGAAQSTADKQAACRCLKSLATSIKGINMGKVSGVPGKCGVSVPFPISMSTDCNKVH

SEQ ID NO: 22565 - protein, 160 aa, Deinococcus radiodurans
MTDFIPTTDLSDAQPQAQVAAPVLRDFGGRTRFQGAAVTLRISENNPLVRQTLQTPGAGRVLVVDGGGSLNCALLGGNLGVFGVENGWEGVIIHGCVRDTAELRELDLGIRALAAHPRRSGKLEEGERDVPVTFAGVTIRPGDHVVADEDGWLVLGAESP

SEQ ID NO: 22566 - protein, 1142 aa, Saccharomyces cerevisiae
MAINGNSIPAIKDNTIGPWKLGETLGLGSTGKVQLARNGSTGQEAAVKVISKAVFNTGNVSGTSIVGSTTPDALPYGIEREIIIMKLLNHPNVLRLYDVWETNTDLYLVLEYAEKGELFNLLVERGPLPEHEAIRFFRQIIIGVSYCHALGIVHRDLKPENLLLDHKYNIKIADFGMAALETEGKLLETSCGSPHYAAPEIVSGIPYQGFASDVWSCGVILFALLTGRLPFDEEDGNIRTLLLKVQKGEFEMPSDDEISREAQDLIRKILTVDPERRIKTRDILKHPLLQKYPSIRDSKSIRGLPREDTYLTPLSESNSSIDATILQNLVILWHGRDPEGIKEKLREPGANAEKTLYALLYRFKCDTQKELIKQQQVKKRQSISSVSVSPSKKVSTTPQRRRNRESLISVTSSRKKPISFNKFTASSASSSNLTTPGSSKRLSKNFSSKKKLSTIVNQSSPTPASRNKRASVINVEKNQKRASIFSTTKKNKRSSRSIKRMSLIPSMKRESVTTKLMSTYAKLAEDDDWEYIEKETKRTSSNFATLIDEIFEYEKYEQIRKEKEELERKVREAKAREELERRRRKQEEKERARKLLEKEDLKRKQEELKKQIEIDISDLEQELSKHKEEKLDGNIRSISAPMENEEKNINHLEVDIDNILRRRNFSLQTRPVSRLDPGIMFSSPTEEVSPVEPKRTENERLTTEKKILETIRRSKFLGSSFNIDKELKLSKMEYPSIIAPQRLSEERVVSDSNDGYESLILPKDGNGVSQLKDSTATTAPVSDGRLRKISEIRVPQFTRKSRHFSESNKRLSVLSMYSTKESFTNLVDILKNGNLDVNNQQSQRIPTPRSADDSEFLFETVNEEAEYTGNSSNDERLYDVGDSTIKDKSALKLNFADRFNGSNEAKQTDNLHLPILPPLNGDNELRKQNSQEGDQAHPKIKSMIPESGSSSHTEKEEENEEKEEKKPEQHKQEEDQEKREKVVDDMEPPLNKSVQKIREKNAGSQAKDHSKDHLKEHKQDKNTAIGNGSFFRKFSKSSDKTMELYAKISAKQLFNGLEKLLRGWTQYGLKNIKSHPNNLTLTGKLSSDNIFSLRSTLFEVNIYPRGKMSVVQFKKVSGSFKAVKKLVNEVENVLNKEGVLQK

SEQ ID NO: 22567 - protein, 532 aa, Daucus carota
MGGCFSKKEYQADGNGYRSAPTAYHTVTDQSYEKSSQRSQPQAQPQPQVQQTGPSLKPRQVHRPESNTILGKPFEDIRGKYTLGKELGRGQFGCVYQCTENSSGQLYACKSILKRKLVSKNDKEDIKREIQILQHLSGQPNIVEFKGVFEDRQSVHLVMELCAGGELFDRIIAQGHYSERAAATICRQIVNVVHVCHFMGVMHRDLKPENFLLSSKDKDAMLKATDFGLSVFIEEGKVYRNIVGSAYYVAPEVLRRSYGKEIDIWSAGVILYILLSGVPPFWAENEKGIFDAILEGVIDFESEPWPSVSNSAKDLVRKMLTQDPRRRITSAQVLDHPWMREGGEASDKPIDSAVLSRMKQFRAMNKLKQLALKVIAESLSEEEIKGLKSMFANMDTDKSGTITYEELKSGLARLGSKLSEVEVQQLMDAADVDGNGTIDYLEFITATMHRHKLESYEHQAFQYFDKDNSGFITKDELESAMKEYGMGDEATIKDIISEVDSDNDGRINYDEFCAMMRRARNRRKLFSVSLTS

SEQ ID NO: 22568 - protein, 298 aa, Escherichia coli O157:H7
MSQNTLKVHDLNEDAEFDENGVEVFDEKALVEEEPSDNDLAEEEVYFARRALRGDVASRRRMIESNLRLVVKIARRYGNRGLALLDLIEEGNLGLIRAVEKFDPERGFRFSTYATWWIRQTIERAIMNQTRTIRLPIHIVKELNVYLRTARELSHKLDHEPSAEEIAEQLDKPVDDVSRMLRLNERITSVDTPLGGDSEKALLDILADEKENGPEDTTQDDDMKQSIVKWLFELNAKQREVLARRFGLLGYEAATLEDVGREIGLTRERVRQIQVEGLRRLREILQTQGLNIEALFRE

SEQ ID NO: 22569 - protein, 254 aa, Lactobacillus vaccinostercus
MDGAILVVAATDGPMPQTREHILLARQVGVDYIVVFLNKTDLVDDDELVDLVEMEVRELLSEYDFPGDDIPVVRGSALKALEGDEEQEKVILHLMDVVDEYIPTPQRDTDKPFLMPVEDVFTITGRGTVASGRIDRGQVKVGDEVEIVGLKEEVLKTTVTGLEMFRKTLDLGEAGDNVGALLRGIGRDQIERGQVLAAPGSIQTHKKFKGEVYILTKEEGGRHTPFFSNYRPQFYFHTTDVTGVIELPEGVEMV

SEQ ID NO: 22570 - protein, 258 aa, Arabidopsis thaliana
  misc_feature (26)..(26): Xaa can be any naturally occurring amino acid
DISQVFHCDGLLLCISITQAKTRLVXYSYALGYDKSSKSHKILRCITCLRPHFHEFIIYDFNSNSWRVFHVTPDWQLGTINSGVSLKGNAFWVAEEKYYETSETNEEFFLLSFDFTRETFGPLLPLPFQFVESEDALSVSNVRDEQLAVLYQPWDTLMMEIWVTSKIEPNAVSWNSKVFLSVSIRKLIGPQFQFCLGSFFIDEEKKVAVVFDKGYRIQRYIAYIIGVDGSMKEVDLGESDRRCYPIVWSYVPSLVQLN

SEQ ID NO: 22571 - protein, 981 aa, Frankia sp. EAN1pec
MTTTPGIPGTASTASPESSNNPASTGNPADGRPDQQAQDPGGFSGGVSSDARHAAVRAGVRRLGALLGEALTRHEGPELLALVERVRMLARGEDGGTELAAVLDGVDARQAILLARAFTAYFQLANITEQLHRAREISDRPRSRLRDLADRIAEAVDEGVVDPGLPAEVMRRLQLRPVFTAHPTEASRRSVLETLRGIADLLDATDDPRRPGADDERLARRLAELVDVLWQTDELRVERPKPADEARSAAYYLTSIATEVLPDLLEELDTAFAGIGVELPVTARPLAFGSWAGGDRDGNPNVTPEVTLEVLNLQYEFGIRVLTALVDRLVRELTASTRVVGEVSGDLLAALAADRAALPEVYDRFIRLNAEEPYRLKCSYILARLAGTRARLAAGAPHVPGKDYLRPTDLVDELELMRVSLAASHGELVANGPLRRAIRTASAVGLSLATLDIREHADAHHAALGAIYDQLAELDVPYRDLDRPARLALLSAELAGRRPLLGAVPPRLPERVARTLELLTTVRHALDQYGDGVIESYIVSMTRDADDILAVAVLAREAGLVGLGRPPGTSSGPGIGTERDGPAVPAVAWARIGFVPLFETVAELRAAGTLLDRLLADPSYRALVAARGDVQEVMLGYSDSSKDAGITASQWEIHKAQRELRDTARAHGVVLRLFHGRGGSVGRGGGPSGEAILAQPFGTLDGPIKVTEQGEVISDKYTLPQLARQNLEITLSAVVEASVLHRTSRLTGQALAGWNGTMTAVADAAKDAYRSLVADPALVPFFLAATPVEELGNLNIGSRPSRRPGGSGGLADLRAIPWVFGWTQARIILPGWFGVGSGLAAAREAGAGGELAEMYRSWHFFRTFLGNVQMTLAKSDLAIAQRYVSALVDPATAALFDVIRDEHERTVREVLAVTGQAGLLETAPVLRHTLLVRDAYLAPLHALQVSLLARTRAAGDIADPQLRRGLLLTINGIAAGLRNTG

SEQ ID NO: 22572 - protein, 106 aa, Arabidopsis thaliana
  misc_feature (64)..(64): Xaa can be any naturally occurring amino acid
MALALRFFICFVLTVCIVSSVDAEISCGTVVSNLAPCANYLSKGGVVPDLCCEGVEKLNGVAQXCRCLQSIAKGISGLNPSLASGLPEECGVSIPYPISLSTNCDK

SEQ ID NO: 22573 - protein, 364 aa, Magnaporthe grisea 70-15
MSQESQAPTQAKDAVLVQSAEMPAGSQKVEELDFNKFRGRPITAEDLLDGMRHMGFQASSMCEAVRIINDMRAWSDPETGERTTIFLGYTSNLISSGLRGVLRYLVQHKHVSAIVTTAGGVEEDLIKCLGDTYMSSFSAPGADLRKKGLNRIGNLVVPNSNYCAFEDWVVPILDKMLEEQEAGRGKGDDGQDAVNWTPSKVIHRLGQEINDERSVYYWAWKNDIPVFCPALTDGSLGDMLYFHSFKASPRHLRVDIVEDIRKINTIAVRAKRAGIIILGGGVVKHHIANACLMRNGAESAVYINTAQEFDGSDAGARPDEAVSWGKIKAGADAVKVYLEATSCFPFIVANSFAKDDQHIKPDSS

SEQ ID NO: 22574 - protein, 423 aa, Wolbachia endosymbiont of Drosophila ananassae
MSRRVVVTGVGLITPLAADVDNTWSRLIKSESGIKAINTDRFDSSDLACKIAGQVPLQSDNIEHHFNPLDYISEKDSKRTDRFIHYGIAAAIQAVDDSLILESQNINRERVGVTIGSGIGGLPSIQENVITMQEKGPRRVSPFFVPASLINLISGHVSIKYEFTGPNDSAVTACATGAHAIINSARTIKLGEADVMIAGGAESALCRVGIAGFASMKALSTKFNDKPEEASRPWDAERDGFVMGEGAGILVLEEYEHAKKRGAKIHAELVGYGLTGDAHHITAPHPEGRGAFKAMQLALKSAQINPNQVGYINAHGTSTPLGDKIEVIAMKQLFGDYVYKIPVSSTKSSIGHLLGAAGSVEAIFSILALNNGIIPPTLNLHKPSEGCDLNFVPLKAQEHKIQYALSNSFGFGGTNASLIFGQV

SEQ ID NO: 22575 - protein, 365 aa, Ipomoea batatas
MVGGGDFLAVQTHGGQYVQYDIFGNLFEVTSKYAPPITPIGRGAYGIVCSALNAETNEMVAIKKIADAFDNYMDAKRTLREIKLLRHLEHENVIAIKDVIPPPLRREFNDVYIATELMDTDLHQIIRSNQGLSEEHCQYFLYQILRGLKYIHSANVIHRDLKPSNLLLNSNCDLKICDFGLARTNLDNEFMTEYVVTRWYRAPELLLNSSDYTAAIDVWSVGCIFMELMNRKPLFQGKDHVHQMRLITELLGTPTDSDLGSIQNENARRYIRQLPLRPRQQLANGFPHVHPLAIDLMDKMLTFNPSKRITVEEALAHPYLAQLHDKSDEPICPVPFTDFEKQAYGEEQIKDMIYQEALAMNPGYA

SEQ ID NO: 22576 - protein, 313 aa, Oceanospirillum sp. MED92
MSRTIRIATRKSPLALWQAEYVKAELERHHPGINVELLGMTSKGDKILDAPLAKVGGKGLFVKELEEAMLAGEADIAVHSMKDVPMEFPEGLGLAVICPREQPTDAFVSNTYNSIEELPEGAVVGTSSLRREAQIREKRPDLQIKWLRGNVNTRLRKLDDGEYDAIILASAGLIRLEMPERIRSEISVEFSLPAGGQGAVGIECRTDDHELLELLKPLHDQETAWRVSAERAMNRRLEGGCQVPIACYATLNDDNSELYLRGLVAKPDGTLILRDEERGTPEQAEQLGITLADRLLAAGAKSILDEVYNKADG

SEQ ID NO: 22577 - protein, 387 aa, Arabidopsis thaliana
MILKKVWGSVWNRSNSGKDLVNHQRAIDVPPLLLSSSSSLGAFDQLPMDILVQILMMMEPKDAVKLGLTCKAWKCVASGNRLWIFYLQCSQEPWDSIFFAETSLRSGYPLRMISSQSGELSFMHIYSQRAQVPGSIIIDGGSGYCKFGWSKYASPSGRSATFLEFGNIESPIYARLQQFFATIFTRMQVKPSMQPIVVSLPLCHFDDTESAKASRRQLKTAIFNVLFDMNVPAVCAVNQAVLALYAARRTSGIVVNIGFKVITILPILHGKVMRQVGVEVIGFGALKLTGFLKEKMQENNISFQSLYTVRTLKEKLCYVALDYKAELSKDTQASVEVSGEGWFTLSKERFQTGEILFQPRLAGIIVHKLVYEFHGFPYAYQGWAIFL

SEQ ID NO: 22578 - protein, 402 aa, Xanthomonas oryzae pv. oryzae KACC10331
MLKDRANQVPSCSSSTWRSWHCCSGDREQVLRCSVPASGIIAGETSLRRSAGFDGWRSPLQVRKPNVMTQTITVIRGDGIGPEIMDATLFVLDALQAGLTYEYADAGLVALEKHGDLLPESTLASISKNKVALKSPLTTPVGEGFSSINVAMRRKFDLYANVRPAKSFPNTKSRFADGVDLITVRENTEGAYLSEGQTVSEDGETAFSGILITRKGSERIVRYAFDLARATGRKKVTAVHKANIIKSTSGLFLKVARDVAAQYPEIEFQEMIVDNTCMQLVMRPEQFDIIVTTNLFGDILSDLCAGLVGGLGLAPGANIGLDAAIFEAVHGSAPDIAGQGKANPCALLLGAAQMLDHIGQPQNAERLREAIVATLEAKDSLTPDLGGSGNTMGFAKAIASRL

SEQ ID NO: 22579 - protein, 324 aa, Onion yellows phytoplasma OY-M
MASMTLLDAINQTLDSKLAKDPRVVLFGQDVGKLGGVFRVTKGLQDKHGETRVFNAPIAESSIIGSAIGLAINGMRPVAEIQFDGFIFVGLEDLFAHAARLRNRSRGNYTVPMVVRVPVGGGVKSLEHHSESLEVILGSVPGLKVVIPSNPYDAKGLLMAAINDPDPVVYMEPKRIYRGFRQEVPETDYEVQIGKAKVVQEGTDITVVAWGAMVPETLLALKQLDPNVSVELIDLRTINPIDRETVITSVKKTGRFLVVHEACKTYGPAGELMALVNEQAFLYLDAAPARVTGNDITMPLAKAEHYQFLSPEKIADAIKKVVCE

SEQ ID NO: 22580 - protein, 635 aa, Oryza sativa
MDGSCDCIEPLWQADDLLVKYQYISDFFIALAYFSIPLELIYFVKKSAFFPYRWVLIQFGAFIVLCGATHLINLWTFAIYTKTIAVVLTVAKAATAVVSCITALMLVHIIPDLLNVKLRERFLKDKADELDREMGIIRTQEETGRHVHMLTHEIRSTLDRHTILRTTLVELGRTLVLAECALWMPTRSGSALQLSHTIYNSAAIGSVVPINLPIVSKVFNSNRVVKIPHTSPLASITADKSRYVPPEVVAIRVPLLHLTNFQINDWPELSAKSFAVMVLMLPPDSAREWRPHERELVEVVADQVAVALSHAAILEESMRARDLLMEQNIALDAARREAEMAICARNDFLAVMNHEMRTPMRAIVSLSSLLLETNLSAEQRLMVETILKSSDLLATLTNDVLDVSKLENGSLELEIAPFNLHSTFTDVVNLIKPVAACKRLSVMVTLAPELPLHAIGDQKRLMQIILNVAGNSIKFTKEGHVSITASMARPDALRGPHEPDYHPVVSDGFFYLAVQVKDTGCGISPQDMPHTFRKFAHPENAGKWNSGSGLGLALSRRFVSLMEGNIWLESEGVGKGCTAMFFVKLGMPEKPNANLRRMAPHPLQPNQGAGGPDALSISIMDSNPRVPRVRYQSSV

SEQ ID NO: 22581 - protein, 394 aa, Onion yellows phytoplasma OY-M
MGDQVKEGDVLVKVETDKLDVELTSPVAGKILKRDLNEGEVICVGDTIVLIQEPGDTDADVKKFSSQNPNETAATEKNDTQQAQTSAQTSLPPQKVLATPLVKSLAKELGLDLSTIKGTGVNGKILKVDVQNATNPLQTQPQPTTPFVQEEQIPTPTFATSSQETEVVKISRLRKAIAQKMVLSKGKIPETTLMDEVNITALVTLRKQAKDQAQSQGIKLTFMAFIMKAVAIALQEFPLFNASYDDVKEEVTYKKFINLGVAVDTKDGLIVPNIKDANKLTLLEMAQQLQQVAKATTERKVELNQLQNGTFTITNFGSIDITYGTPVINYPELAILGVGKITKKPVVENSQIVIADMLPLSLAIDHRIIDGADGGRFLKRVKELLNTPTLLLLS

SEQ ID NO: 22582 - protein, 142 aa, Arabidopsis thaliana
  misc_feature (66)..(66): Xaa can be any naturally occurring amino acid
MATKSTGGTEKTKSIEVKKKLINVLIVDDDPLNRRLHEMIIKTIGGISQTAKNGEEAVILHRDGEXSFDLILMDKEMPERDGVSTTKKLREMKVTSMIVGVTSLADQEEERKAFMEAGLNHCLEKPLTKAKIFPLISHLFDA

SEQ ID NO: 22583 - protein, 254 aa, Lactobacillus fermentum
  misc_feature (249)..(249): Xaa can be any naturally occurring amino acid
  misc_feature (252)..(252): Xaa can be any naturally occurring amino acid
MDGAILVVAATDGPMPQTREHILLARQVGVEYIVVFLNKTDLVDDDELVDLVEMEVRDLLSEYDFPGDDVPVVRGSALKALEGDPEQEQVVLHLLDVVDEYIPTPKRPTDKPFMMPVEDVFTITGRGTVASGRIDRGTVKVGDEVEIVGLKEDVIKSTVTGVEMFHKTLDLGEAGDNVGILLRGVSHDQIERGQVLAEPGSIQTHKQFKGEVYVMTKEEGGRHTPFFSNYRPQFYFHTTDVTGTIELPXGVXMV

SEQ ID NO: 22584 - protein, 367 aa, Arabidopsis thaliana
MSRRSLTLLKNLARNANGSGIQTRSVTYMPRPGDGAPRAVTLIPGDGIGPLVTNAVEQVMEAMHAPIFFEKYDVHGEMSRVPPEVMESIRKNKVCLKGGLKTPVGGGVSSLNVQLRKELDLFASLVNCFNLPGLPTRHENVDIVVIRENTEGEYAGLEHEVVPGVVESLKVITNFCSERIAKYAFEYAYLNNRKKVTAVHKANIMKLADGLFLESCREVAKKYPSITYNEIIVDNCCMQLVAKPEQFDVMVTPNLYGNLVANTAAGIAGGTGVMPGGNVGADHAVFEQGASAGNVGKDKIVLENKANPVALLLSSAMMLRHLQFPSFADRLETAVKKVIAEGKFRTKDLGGTSTTQEVVDAVIAKLD

SEQ ID NO: 22585 - protein, 112 aa, Vibrio vulnificus YJ016
MEWKMSDKILQLSDEGFENDVINAAGPVLVDFWAEWCGPCKMIAPILDEIAEEYEGKLTIGKLNIDHNAGTPPKFGIRGIPTLLLFKNGSVAATKVGALSKTQLKEFLDANL

SEQ ID NO: 22586 - protein, 254 aa, Lactobacillus letivazi
MDGAILVVAATDGPMPQTREHILLAHQVGVDYIVVFLNKTDLVDDPELTDLVEMEVRELLSEYDYPGDDIPVIRGSALKALEGDPENVAAVQELLDTIDEYIPTPDRENDKPFLMPVEDVFTITGRGTVASGRIDRGVVEVGDEVDIVGLKPEIAKSTVTGLEMFRKTLDKGEAGDNVGVLLRGVNRDEIERGQVLAKPGSIQTHNKFKGEVYILSKEEGGRHTPFFSNYRPQFYFHTTDVTGVIELPSGVEMV

SEQ ID NO: 22587 - protein, 357 aa, Picrophilus torridus DSM 9790
MDYKKIFDYTRRADAIIIFNGGEESIDKTFFYLTGARSGIFENSALIVTRDSIKIVTSKLEESAARETGIETLIFNKRSEMEDIIRNETKNFDSIGINYSSMTLSLYRDLMRMIPDKDFIDVSESILEARKIKEPEELEKIKNAAKIASDALQDAIKKIKEGITESELASEVAYSMMKLAATGPSFNTIVAFGKNSAIPHYSPGDKRLRPGDFVLIDYGALYNRYCSDVTRTMVFGRASQEQRDIYETVKEAQQKSMDAIKAGKNGRDIDAIARSIIDEKYPGKFIHSLGHGVGMDVHDHPALSPSYDFILKRNMVVTVEPGIYIPETGGVRIEDDVIVTDSGHTRITTAPRDLIEL

SEQ ID NO: 22588 - protein, 139 aa, Oryza sativa
MATSVMASCALKPSPSPFLEQTRIRAIQPSSRPSLFRVMAKKAKKIQTSQPFGPGGGLNLKDGVDASGRPIKGKGVYQFASKYGANVDGYSPIYNPEEWSPSGDLYTGGKTGLLLWAVTLSGILLAGALLVYNTSALAS

SEQ ID NO: 22589 - protein, 254 aa, Lactobacillus sakei
MDGAILVVAATDGPMPQTREHILLAHQVGVDYIIVFLNKTDLVDDDELTDLVEMEVRELLSEYDFPGDDIPVIRGSALGALNGNPDDVKAVEELMATVDEYVPTPERDTDKPFLMPVEDVFTITGRGTVASGRIDRGQVTVGDEVEIVGLKEEIAKTTVTGLEMFRKTLDQGQAGDNIGALLRGIDRESIERGQVLAKPGSIQTHKNFKGEVYILSKDEGGRHTPFFSNYRPQFFFHTTDVTGVIELPEGVEMV

SEQ ID NO: 22590 - protein, 450 aa, Glycine max
MASVAFRNLNSKRFLFSLHFTNANYHSLSRGTCTVISQNCNNAFPLELVSLRRSLATFARTKPHLNVGTIGHVDHGKTTLTAAITKVLAEEGKAKAIAFEDIDKAPEEKKRGITIATAHVEYETAKRHYAHVDCPGHADYVKNMITGAAQMDGGILVVSAPDGPMPQTKEHILLARQVGVPSLVCFLNKVDAVDDPELLELVEMELRELLNFYKFPGDDIPIVRGSALAALQGTNEELGKKAILKLMDAVDEYISDPVRQLDKPFLMPVEDVFSIQGRGTVVTGRVEQGTIKVGEEVEVLGLTQSGPLKTTVTGVEMFKKILDRGEAGDNVGLLLRGLKRDDVQRGMVVTKPGAFKTYKKFEAEIYVLSKDEGGRHTAFFSNYKPQFYLRTADVTGKVELPESVKMVMPGDNVTATFELISPVPLEIGQRFALREGGRTVGAGVVSKVMA

SEQ ID NO: 22591 - protein, 221 aa, Zea mays
PRVRPRVRPRVRPRVRPRVRQTKVFYFDIGENKRGRFLKVSEASVNRNRSTIIVPAGSSGEEGWEAFRSVLLEINNEATRLYVLPNHPNQQHMEPPERLPGLSDDVGAGFIAGHGSQSASGPEVDVERLVDLPPQEEISGMGMSKVIRADQKRFFFDLGSNNRGHYLRISEVAGADRSSIILPLSGLKQFHEMVGHFVDIMKDRLEGMTGANVRTVEPSQR

SEQ ID NO: 22592 - protein, 373 aa, Pseudomonas syringae pv. syringae B728a
MDRFRESAAMNNNKLRIAAIAGDGIGLEVLPEGVRVVQAAAARHGLELEFEYFEWASCDYYLKHGKMMPDDWFEQLKGFDSIFFGAVGWPEKVPDHISLWGSLLKFRREFDQYANIRPVRLFPGVPCPLANRKPGDIDFVVVRENTEGEYSSLGGIMFENTENEFVLQESVFTRRGVDRILKFAFEMASKRERKHVTSATKSNGMAISMPYWDKRTEAMASQYPGISWDKQHIDILCARFVLQPERFDVVVASNLFGDILSDLGPACAGTIGIAPSANLNPERHFPSLFEPVHGSAPDIFGQNIANPIAMIWSGALMLEFLGQGDQRFTAAHDEIITAIEQVIANGDVTPDLGGTLSTQHVGAAIAERVSAGH

SEQ ID NO: 22593 - protein, 685 aa, Rhizobium etli
MATKVKENEDAEVERDGATDGPLLDLSDDAVKKMIKAAKKRGYVTMDELNAVLPSEEVTSEQIEDTMSMLSDMGINVIEDEEAEEAGASGGGDDDDAGGDEDSEGGELAPSAGTALATAKKKEPTDRTDDPVRMYLREMGSVELLSREGEIAIAKRIEAGRETMIAGLCESPLTFQALIIWRDELNEGTTLLREIIDLETTYSGPEAKAAPQFQSPEKIEADRKAAEEKEKTRRARSGDDDITDVGGEGLPPEEEEEDEDESNLSLAAMEAELRPQVMETLDIIAETYKKLRKLQDQQVEQRLAATGTLSSAQERRYKELKDELIKAVKSLSLNQNRIDALVEQLYDINKRLVQNEGRLLRLAESYAVKRDSFLEQDQGAELDPNWMKSIGNLAARGWKEFAKAENTTIRDIRQEIQNLATETGISISEFRRIVHMVQKGEREARIAKKEMVEANLRLVISIAKKYTNRGLQFLDLIQEGNIGLMKAVDKFEYRRGYKFSTYATWWIRQAITRSIADQARTIRIPVHMIETINKIVRTSRQMLHEIGREPTPEELAEKLAMPLEKVRKVLKIAKEPISLETPVGDEEDSHLGDFIEDKNALLPIDAAIQANLRETTTRVLASLTPREERVLRMRFGIGMNTDHTLEEVGQQFSVTRERIRQIEAKALRKLKHPSRSRKLRSFLDS

SEQ ID NO: 22594 - protein, 110 aa, Zea mays
ERRWCCCRQRLGTASEAASCGEVTLSEAAYLEYAMRSAASPSTRCCSGLSSLNRRASATEDRKATCNCLKSMTGRLGGGRSMTNAANIPGKCAASAGVPIRPTDDCTKIN

SEQ ID NO: 22595 - protein, 693 aa, Aspergillus nidulans FGSC A4
MCGISAVLSLSEGSICPQALASQMNESLQLIKHRGPDARGQWLSSDYRVGLGHARLSVIDLNPAGNQPFHDPEGTVHAVVNGEIYDHKKYRAKLAHQYEFRSNSDCEIVTALYRHYGISFLNKLRGEFALVLWDAKRKLFLAARDRYGIKSLYYTVVNNRLLVATEIKSFLPFGWQPEWSIENLLRKGWLWDTEMYFKGVHRLEPGQYMVSQNYKFPVVKTYWDMDYPDKRTPFPQTEEQIVLELRKRMLESVRLRLRADVGVGFYLSGGLDSSAIAGMAKYLIQQGEPLGNDSSGDISKMSCYTIRFGEGSGVDESGIKDTFVPEVSDRRLTKSELYPVTLTEEDIASRFEDTVWYTETPIPDVNGMGRVAVGELAHSHGKKVILTGEGSDEHFGGYPDMLSKMFVEPDLSWHPPPFKMPNSSKVFEAGREAVPAAVESLASTKRMLNNSSIFARVDSFYMFPLASATVESEEPDPETAFAESLGAQTLSNISENWHPLNSASYQWTKSILANYILRYIGDGADMVYQIETRPPFLDHHVTEYANRIPPSLKIRYDPVKNDLREKYILREAMRPFITDEVMNRTKRAYLGPSNYREDGPLHRVVKSLLTEDNVNKLGFVDWDRLQEHIVKGFRDGDPRYFRSSLFVAQLVVLSQRFGVKVATTTDALPVTSEILDRTQNNDNMTTVQDRSRL

SEQ ID NO: 22596 - protein, 421 aa, Prosthecochloris aestuarii DSM 271
MSEKKIDSIESAIEDLKNGKLIIVIDDEDREDEGDFIAAADKVTPEMVNFITKEARGLLCVAVTMDRAKELQLDPMVQRNTSQHETNFTVSVDALAEGVTTGISAFDRYMTIKMLADPVSHADNFSRPGHIFPLRAMDGGVLRRVGHTEAAVDLAELAGSTPVGLLCEILHDDGSMARLPELLKIKEKFDLKLITIKDLVAYQMKRKKLVARAVETSLPTRHGDFRLIAYEACCDSQQQNHLAFVKGDFSTDEPVLVRVHSQCATGDIFASLRCDCGNQLASAMQQIEKAGKGVLIYLMQEGRGIGLINKLKAYNLQDQGFDTVEANEQLGFKADLRDYGIGAQILQDLGVKKMRLLTNNPKKIVGLEGYGLEIVERVPIEIAPNSVNLSYLETKRDKMGHMINCSCNCSGVSQQDNHTQQ

SEQ ID NO: 22597 - protein, 271 aa, Wolbachia endosymbiont of Drosophila ananassae
MKNYKFSTKVLIIGSGAAGYAAAIYAARANLEPIVVTGMQPGGQLTITTDVENYPGFVSIQGPELMEQMRLHAEKVGAKIIDDEIKSVVQLEDSNEYRFRSSGNTNDYYSDAIIIASGAQAKWLGLKSEKEFQGYGVSACATCDGAFFRNKVVAVIGGGNTAVEEAIFLTRFAKEVILIHRRDKLRAEKVMQDRLFKNDKIKVMWNHTVEQILGEENPKRVAGIAIKSAETQELKVDGVFIAIGHAPNTGIFKGFVEMDEQVTSLQNLEQL

SEQ ID NO: 22598 - protein, 449 aa, uncultured archaeon GZfos13E1
MSKISKLVIIGCAGVGGPAAMTAKRMEPSLDVTLIREEENFLTRCAVPYISVEKATVEASVKDDGMFHAVGTKLVNVKATSIDRKEKTVTTAGGAVYPYDKLILATGGRAIVPPVPGVDLEGVFTICTSWDAVSIRDWINEKGARNAVVYGAGAVGLEMASVFAEKGLKVTMVIRSYIGEKVGLDLDMSSELEKYFEDKGTVIRSKEVITKIEGEQEVEAVELSSGDKIETNMVILSAGVHPNVELAEDAGLEIGEYGLEVNEYLQTSDPDIYAGGNLIEYEHMVTRKPILAQMRPNAVIGGRIIAKNALGYKIKFPRLLNSFASKLFDKSIASVGVTEAIAKEEGFDILVTKQAAKSKHVMMEGGKPYTVKLIFDRDTKKVIGAQIIADDERSVRYIDVIALAIRNGWTALDLTTLRCAGQPELSPEPSAEPIAVAAEGAFKELYPLA

SEQ ID NO: 22599 - protein, 108 aa, Oceanospirillum sp. MED92
MSENIVNVTDASFEEDVLKAEGAVLVDYWAEWCGPCKMIAPVLEEIAKEYGDQLKICKLNIDENSETPPKFGIRGIPTLMLFKGGNVEATKVGALSKSQLAAFIEANL

SEQ ID NO: 22600 - protein, 133 aa, Brassica napus
MASPLRRSFPSLGRALLTPAPARMLSAEASDALVEIKPREIGMVSGIPEEHLRRKVVIYSPARTASQQGSGKVGRWKINFLSTQKWENPLMGWTSTGDPYANVGEAGLTFNSAESAKAFAEKHGWNYVVRKRH

SEQ ID NO: 22601 - protein, 130 aa, Triticum aestivum
CDVLVPCALGGVLNKDNAPDVKAKFIIEAANHPTDPEADEILAKKGVVVLPDIYANSGGVVVSYFEWVQNIQGFMWAEEKVNDELEKYMSSAFQHMKAMCKSLDCDLRMGAFTLGVNRVARATLLRGWEA

SEQ ID NO: 22602 - protein, 336 aa, Legionella pneumophila str. Lens
MSYEELSNTMEQMLHEGKGILAADESNSTIGKRFASINTENTEENRRDYRLLLATTPDLEQYINGVILFEETFTQTDEHGTPIPELFANKGIIPGIKVDKGLVDLANTEHEKVTQGLDGLTERLLHFKKLGAKFAKWRNVYSISEYTPSLTAIKTGAENLGRYAAACQSVGIVPIVEPEVLMDGNHSIEHCAEVCEMVLHELFHTLFIHQVELEHIILKPSMVTCGKEVTPFSDPEEVADYTISVFRNNVPASVPTINFLSGGQTPQQATANLNAINQIGHQPWLLSFSFGRALQEDCLKEWCGNKANIAKAQEALIKRARLNSMACLGEYQNDME

SEQ ID NO: 22603 - protein, 383 aa, Corynebacterium efficiens YS-314
MTTPTISKQKAKFNALTVSEVRRLTDDAVEISFEVPEELQADYDYIPGQYVALRTQLDGAEVRRSYSICDIPRPGTIRVAVKKNLGGLFSTWANEELKAGDTLEVMNPQGGFTSKTHVTSLNDAETIAQEAGNNHLVAVAAGSGITPIMAIAQTVLAENPKATFEIVYANKGGADVMFAEEIGDLKDKYPQRFAVHHVLSREQRVNPLFSGRIDDEKLNLLLDQVLRTDEVKEWFLCGPFELVQLCRDELEGRGVDSANVRFELFTTGKPGDGPGQGNTGRPVIADPEGDNITISFTLDGLSGTIESPSSARESVLNAALRARPDVPFACAGGVCGTCRAKVIEGEYEMEENYALEPDEVEAGYVLTCQTRPKGDTLVVDYDA

SEQ ID NO: 22604 - protein, 190 aa, Zea mays
HEPKLTSLVKCNDPTRDKIRELLAEAFAKVPRETSNDDRDEVRNILDEVDACDPFRVAVTVESALFERFGRSTGAHKAKYRSIMFNLRAENNTDFRRRVLIGQVTPERLPDISPDEMASDARKQENLQIKEKALFDCERGAAPKATTDQFKCGRCGQRKTTYYQLQTRSADEPMTTFVTCVNCNNHWKFC

SEQ ID NO: 22605 - protein, 253 aa, Oryza sativa
  misc_feature (210)..(210): Xaa can be any naturally occurring amino acid
MCEKDQNFHWGYDLFRDPFAPIGYYGPPHGYGDGNYCDLHYARDASHLDETHLHSSALTYDLYNPSVGIYHPGNAGEHDHDTVYIEPTSSNSCPDTDDSFPMDEEVGKRFYPMVPVPHVPKINGEIPSVDEATMDHERLTERLRLYELVEHKVKGDGNCQFRALSDQLYQSPDHHEFVRQQIMSQLKSNRDAYDGYVPMAYDDYLEKVSXVLLSFWAEVHYNSIYPQNDAPRSQTTRKRRWWPFSHNHHHHHH

SEQ ID NO: 22606 - protein, 196 aa, Glycine max
NSDAEAVFKDMKRVGITPTMKSHMVLLSAYSKMGSVNKCEEILNQMCKSGLKLDTYVLNSMLNLYGRLGQFGKMEEVLRVMEKGSYVADISTYNILINRYGQAGFIERMEDLFQLLPSKGLKPDVVTWTSRIGAYSKKKLYLKCLEIFEEMIDDGCYPDGGTAKVLLAACSNEDQTEQVTTVIRTMHKDMKTVLPV

SEQ ID NO: 22607 - protein, 334 aa, Desulfitobacterium hafniense DCB-2
MTIRIGINGFGRIGRNVFRAAFGRENIEIVAVNNRSTGEILPHLLKYDSVHGIFPAQIQHTEDGFTVDGQLVKVVSHTDPGDIPWGELGVDIVIESSGKFNNGPACQKHLNNGARKVIISAPAKEEDITLVMGVNEEIYDPQKHHIISNASCTTNCLAPVAKVIHKNFGLKRGLMTTVHSYTNDQQILDQSHKDLRRARAAGLSIIPTTTGAARAVALVLPELKGKLNGFSMRVPTPNVSVIDLVAEIEKNTTIEELNGVLRHASENKLKGILDYTDLPLVSSDFNGSSASSIVDGLSTMVMEDNLIKVISWYDNEWGYSCRVVDLVEYVSRQI

SEQ ID NO: 22608 - protein, 741 aa, Ralstonia eutropha JMP134
MVTSTDLAGQVAGVPDADMVERALAYVREQAGDAVLPTGEPVLSHAEGMLRILDGLRVDDAARAACCLFPLAEFAPAVEPEIEARFGEDVCRMVKGVRQLLRIGAIAGGHDAQEASRNVAQARHEQVEALRKMLLAFAQDIRVVLVRLASRLQSLRWLAQNKREPLPGIARETLDIYAPLANRLGIWQMKWELEDLAFRFEQPDTYKRIAKLLDEKRIEREGYIASAIARLQSELADAGIRAEVSGRPKHIYSIWKKMRGKELDFADLYDVRAFRVIVDDIKDCYTVLGIVHHIWQPIPREFDDYISRPKSNGYKSLHTVVIGDDGRAFEVQIRTHEMHHFAEYGVAAHWRYKEAGSKGYSGQFAASDSYDEKIAWLRQLLAWKDDADHSVAHDESPSPWEQLKHAAIDDHIYVLTPQARVIALPQGATPLDFAYYLHSDLGHRCRGARVDGTMVPLNTPLKNGQTVEIIAVKQGGPSRDWLNIELGYLASSRARAKVRAWFNALDSQETIAQGRVLIDKTLQREGKTAVKLEDLATRLGFKSPDDLFAAVAKEEFSLRHVEQALRHPEGEVQAPFNEEDAVTKKSRATSVARGAKSGVLVVGVDSLMTQMSRCCKPAPPDEIVGFVTRGRGVSIHRRNCHTFQQLSARAPERVIQTEWGKKSDAVYPVDIHVEAIDRQGLLRDISEVLSREKINVTGVKTLSSKGVARMQFTAEVSEATQLQRALSIIEDVQGVLQARRK

SEQ ID NO: 22609 - protein, 460 aa, Oryza sativa
AAIVPVRLSISLARSALEGSTIGAVTEVADGGDGGGLSGGAAAGNGAAALGGSAEQEDEDRRDRDTRLSRASRPLKQNLPAITDAIFQLSVAAVQGSHVKVIAATSSVTAFVVLLSMVAIALYLSLKTRYNEEIHMKVEMFLKTYGTSKPTRYTFSEVKKIARRFKVKVGQGGFGSVYRGELPNGVPVAVKMLENPKGEGDEFINEVATIGRIHHANIVRLLGFCSEGTRRALIYEYIPNDSLEKYIFSHDSNTSQELLVPSKMLDIALGIARGMEYLHQGCNQRILHFDIKPNNILLDYNFSPKISDFGLAKLCARDQSIVTLTAARGTMGYIAPELYSRNFGEISYKSDVYSFGMLVLEMVSGRRNSDPSVESQNEVYFPECIYEQVTTGRDLELGREMTQEEKETMRQLAIVALWCIQWNPKNRPSMTKVVNMLTGRLQNLHVPPKPFFSADSHPIM

SEQ ID NO: 22610 - protein, 219 aa, Lilium longiflorum
VEQFSPVPYLATLLNCMLWVVYGLPLVHPHSTLVLTINGLGLIIELTYVLLFLLYSNGRARIRVLAMLLTEIVFVGLITVIVLSTAHTLVTRSLIIGVLCVFFGTMMYAAPLSVMKLVIQTKSVEYMPLFLSVASFLNGICWTTYALIRFDLFITIPNALGTMFAVAQLILHAMYYKSTKIQMEAQKRKLEMGFEEVMAPVENTEKIRGASQTGKYPPV

SEQ ID NO: 22611 - protein, 470 aa, Parvularcula bermudensis HTCC2503
MPLNLTAPDLTELSPRISVIGVGGAGGNAVNNMIEAELDGVEFIVANTDAQAVGLAKAQHRLQLGTSTTRGLGAGSRPDVGREAAMESLDEVMDLIDGANMLFITAGMGGGTGTGAAPVIAEAARDRGILTVGVVTKPFQFEGARRMRIAEAGIEELQDKVDTLLIIPNQNLFRLADENTTFADAFGMADQVLHQGVRGITDLMIVPGLINLDFADVRSVMSEMGKAMMGTGESSGEGRATEAAQAAISNPLLDETSMKGARGVLINITGGLDMKLFEVDEAANRIRAEVDPDANIIVGSTFNQELQGTMRVSVVATGIERATAPAEIVTTTARASTSGDQRAAQAGTSATVTAGRAPAPVSDGRSGRPVPPEPPIGEVHDRIRRMLTEDAPVPLKPEQALPEQKPNPFRKSAATTIDQAIGLLKETFVKGVGPSEAEGIRPTPVTRDAFADHEEEDLDIPAFLRKQAQK

SEQ ID NO: 22612 - protein, 421 aa, Bacillus clausii KSM-K16
MEKMDENQEDKLDVLAATQSIIHKALKKLGYPDEMYELLKEPVRMLTVRIPVRMDDGSTKIFTGYRAQHNDAVGPTKGGVRFHPDVSEKEVKALSIWMSLKAGIVNLPYGGGKGGIVCDPRQMSFREVERLSRGYVRAISQIVGPTKDIPAPDVFTNSQIMAWMLDEYSRIREFDSPNFITGKPLVLGGSHGREAATAKGVTICIMEAAKKKGIDLEGARVIIQGFGNAGSFLAKFMADAGALVVGIADAYGALYAEEGLDIDYLLDRRDSFGTVTNLFKDTITNEELLEKDCDILVPAAIENQITSHNAGKLKAAIVVEAANGPTTLEATQILAERGILLVPDVLASAGGVTVSYFEWVQNNQGYYWTDEEVEGRLRTVLTEAFNNIYNLALRRKVDMRLAAYMVGVRRMAEASRFRGWV

SEQ ID NO: 22613 - protein, 328 aa, Bordetella parapertussis
MGVILKIPAMSTPKHAKVLILGSGPAGYTAAVYAARANLSPALITGLAQGGQLMTTTEVDNWPADVQGVQGPDLMQRFLQHAERFNTEILFDHVAKVDLSRRPFTLTGDTGNLYTCDALIIATGASAKYLGLASEQAFMGRGVSGCATCDGFLYRNKDVVVIGGGNTAVEEALYLSNICRKVTLIHRRDKFRAEPILVDKLMDKVANGNMELKLFHTLDEVLGDDSGVTGVRIRSTETDATEDLDVAGCFVAIGHQPNTGIFEGQLEMKDGYIITKSGLSGMATMTSVPGVFAAGDVQDHVYRQAITSAGTGCMAALDAQRWLENAGQ

SEQ ID NO: 22614 - protein, 436 aa, Arabidopsis thaliana
MPSPPTTTSLSVTQTINGSHSFTIKGYSLAKGIGIGKHIASDTFTVGGYQWAIYFYPDGKNPEDNSAYVSVFIALASDGTDVRALFELSLLDQSGKGKHKVHSHFDRALESGPYTLKYRGSMWGYKRFFRRLMLETSDFLKDDCLKINCTVGVVVSEIDCPRLHSIHVPASDIGSHFGMLLENEDGSDITFNVSGEKFRAHRLVLAARSPVFESEFLDVTGEEDRDIEVTDMEPKVFKALLHYIYKDALIEDAESSSSSGSSVGPSASDTLAAKLLGAADKYKLPRLSLMCESVLCKDISVDSVANILALADRYNASALKSVCLKFAAENLIAVMRSDGFDYLREHCPSLQSELLKTVAGCEEELSGGGGKTRSVWGQFSDGGAETNGRQAQTWGDINGGAERSQSVWVEVVNANGSGRNNNDNNNSDDPMAELED

SEQ ID NO: 22615 - protein, 163 aa, Brassica napus
  misc_feature (31)..(31): Xaa can be any naturally occurring amino acid
  misc_feature (73)..(73): Xaa can be any naturally occurring amino acid
NTFLYPSAATNERSALCQLFTMVALDPHPSXPHHAHAWMDMAHIVCGGCRTMLMYTRGASSVRCSCCQTVNLXVPGPPPSNQVAHINCGNCRTTLMYPYGASSVKCAVCQFVTNVNMSNGRVPLASNRPNGTASPGTMPSTSTQSTPPSQTQTVVVENPMSVN

SEQ ID NO: 22616 - protein, 369 aa, Pseudomonas syringae pv. syringae B728a
MAFDRIEDIIEDYRQGKMVLLVDDEDRENEGDLLLAADCCSPQAISFMAREARGLICLTLTDEHCQRLGLEQMVPSNGSVFATAFTVSIEATTGVTTGISAADRARTVQAAVNPHAVPEDLVQPGHIFPLRARDGGVLTRVGHTEAGCDLARLAGFTPASVIVEVMNDDGSMARRPDLEVFAKKHGIRIGTIADLIHYRLSTEHTIVRIGERELPTVHGTFRLFSYEDRIEGGVHMAMVMGDIRRDAATLVRVHVVDPLRDLVGAEYNGPANWTLWAALQRVAQEGHGVVVVLANHESSQALLERIPQLTQPPRQYTRSQSRIYSEVGTGAQILQDLGVGKLRHLGPPLKYAGLTGYDLEVIESIPFPG

SEQ ID NO: 22617 - protein, 348 aa, Frankia sp. EAN1pec
MTAQGKDQAGQAAGAERSGERVLDVVIIGSGPAGYTAAIYTARANLKPVVFEGAVSAGGALMTTTEVENFPGFPEGIQGPELMENLRAQAERFGAELIADDVTEVDLAADPKVVKVGDETYLARSVIVATGSAYKKLGVEHEDRLLGRGVSACATCDGFFFRDQDIAVVGGGDSALEEATFLTRFAKSVTIVHRRDRLRASAIMQERAFANPKVRFRWNAVVEEVLGEDKVTGVRLRDTVTDKTDELAITGLFVAIGHLPRTDLIHDQLELDGEGYIKVTHPTTQTNIAGVFACGDVVDHTYRQAITAAGTGCSAALDAERYIAGLEGAADSAAEAPRVPAPELAATT

SEQ ID NO: 22618 - protein, 108 aa, Frankia sp. EAN1pec
MAGSTPAVTDGTFAAEVLKSDKPVLVDFWAEWCGPCKMVAPVLEEIAKEHGEKLRIVKLNIDENPEVARQYQIMSIPTMAVFVNGEIDKSIVGAKPKAALLRDLSSYI

SEQ ID NO: 22619 - protein, 513 aa, Thermotoga maritima
MRRIKIFDTTLRDGEQSPGASMSIEEKVEMALMLEDLGVDLIEAGFPVSSPVQFEAVKRVASAVQKPIVVGLARCVEKDIDAAYEALKDRPKDKRMIHVFIATSPIHRKYKLRMEKEEILERIRRYVGYAKQFFDLVEFSAEDASRTEVPFLIEAYKTAIEAGATTINVPDTVGYALPDEFGELIKTLREGVPGIENVDLSVHCHNDLGLAVANSLAAVQNGATQVEVTLNGIGERAGNCALEEFVMILKVRKDKLPYETGIKTELIYPASRLLTHITGLIPSRNKPIVGENVFLHESGIHQDGVLKHRETYEIMKPSDIGRSSETLVLGRHSGKHALRKKLETYGIKLDEETFQKVFEKFTELADRKKEVYDDDLFSIVSEVLREPINGYKLVHFHVHTGNTLLPTAAVVLQVGNEKREAAEAGNGPVDAIFKAIDKALGIQPKLEEYIIQAVGTGKNAQGEVKLTLRIDNELYSGRGVSTDIVEASAIAYINAINKYLIAKGLLRKNGGAE

SEQ ID NO: 22620 - protein, 296 aa, Saccharomyces cerevisiae
MNRQSGVNAGVQNNPPSRVVYLGSIPYDQTEEQILDLCSNVGPVINLKMMFDPQTGRSKGYAFIEFRDLESSASAVRNLNGYQLGSRFLKCGYSSNSDISGVSQQQQQQYNNINGNNNNNGNNNNNSNGPDFQNSGNANFLSQKFPELPSGIDVNINMTTPAMMISSELAKKPKEVQLKFLQKFQEWTRAHPEDAVSLLELCPQLSFVTAELLLTNGICKVDDLIPLASRPQEEASATNNNSVNEVVDPAVLNKQKELLKQVLQLNDSQISILPDDERMAIWDLKQKALRGEFGAF

SEQ ID NO: 22621 - protein, 516 aa, Aspergillus niger
MLNPKVAYMVWMTCLGLTLPSQAQSNDYRPSYHFTPDQYWMNEPNGLIKIGSTWHLFFQHNPTANVWGNICWGHATSTDLMHWAHKPTAIADENGVEAFTGTAYYDPNNASGLGDSANPPYLAWFTGYTVSSQTQDQRLAFSVDNGATWTKFQGNPIISTSQEAPHDITGGLESRDPKVFFHRQSGNWIMVLAHGGQDKLSFWTSADTINWTWQSDLKSTSINGLSSDITGWEVPDMFELPVEGTEETTWVVMMTPAEGSPAGGNGVLAITGSFDGKSFTADPVDASTMWLNNGRDFDGALSWVNVPASDGRRIIAAVMNSYGSNPPTTTWKGMLSFPRTLSLKKVGTQQHFVQQPITELDTISTSLQTLENQTITPGQTLLSSIRGTALDVRVAFYPDAGSVLSLAVRKGASEQTVIKYTQSDATLSVDRTESGDTSYDPAAGGVHTAKLEEDDTGLVSIRVLVDTCSVEVFGGQGEAVISDLIIPSDSSDGLALEVTGGNAVLQSVDVRSVSLE

SEQ ID NO: 22622 - protein, 309 aa, Saccharomyces cerevisiae
MDSKEVLVHVKNLEKNKSNDAAVLEILHVLDKEFVPTEKLLRETKVGVEVNKFKKSTNVEISKLVKKMISSWKDAINKNKRSRQAQQHHQDHAPGNAEDKTTVGESVNGVQQPASSQSDAMKQDKYVSTKPRNSKNDGVDTAIYHHKLRDQVLKALYDVLAKESEHPPQSILHTAKAIESEMNKVNNCDTNEAAYKARYRIIYSNVISKNNPDLKHKIANGDITPEFLATCDAKDLAPAPLKQKIEEIAKQNLYNAQGATIERSVTDRFTCGKCKEKKVSYYQLQTRSADEPLTTFCTCEACGNRWKFS

SEQ ID NO: 22623 - protein, 162 aa, Triticum aestivum
STVIAFAQDPDGYMFELIQRAETPEPLCQVMLRVGDLERSIKFYEKALGLKLLRKKDVPDYKYTIAMLGYADEDKTTVLELTYNYGVTEYSKGNAYAQVAIGTNDVYKSAEAVELATKELGGKILRQPGPLPGINTKIASFVDPDGWKVVLVDNTDFLRELH

SEQ ID NO: 22624 - protein, 348 aa, Saccharomyces cerevisiae
MTTEKTVVFVSGATGFIALHVVDDLLKTGYKVIGSGRSQEKNDGLLKKFKSNPNLSMEIVEDIAAPNAFDKVFQKHGKEIKVVLHIASPVHFNTTDFEKDLLIPAVNGTKSILEAIKNYAADTVEKVVITSSVAALASPGDMKDTSFVVNEESWNKDTWESCQANAVSAYCGSKKFAEKTAWDFLEENQSSIKFTLSTINPGFVFGPQLFADSLRNGINSSSAIIANLVSYKLGDNFYNYSGPFIDVRDVSKAHLLAFEKPECAGQRLFLCEDMFCSQEALDILNEEFPQLKGKIATGEPGSGSTFLTKNCCKCDNRKTKNLLGFQFNKFRDCIVDTASQLLEVQSKS

SEQ ID NO: 22625 - protein, 371 aa, Glycine max
MTLFIVLLIYKWRKRHLSIYENIENYLEQNNLMPIGYSYKEIKKMARGFKEKLGGGGYGFVFKGKLRSGPSVAIKMLHKAKGNGQDFISEIATIGRIHHQNVVQLIGYCVEGSKRALVYEFMPNGSLDKFIFPKDGNIHLTYDEIYNIAIGVARGIAYLHHGCEMKILHFDIKPHNILLDETFTPKVSDFGLAKLYPIDNSIVTRTEARGTIGYMAPELFYGNIGGISHKADVYSFGMLLIDMTNKRKNPNPHADDHSSQLYFPTWIYNQLGKETDIEMEGVTEEEKKMIIVSLWCIQLKPSDRPSMNKVVEMLEGDIESLEIPPKPSLYPHDTMENDQSIYSSQTMSTDFISSSSYSKEIVTNPLVEDVI

SEQ ID NO: 22626 - protein, 336 aa, Legionella pneumophila subsp. pneumophila str. Philadelphia 1
MSYEELSNTMEQMLHEGKGILAADESNSTIGKRFASINTENTEENRRDYRLLLATTPDLEQYINGVILFEETFTQTDEHGTPIPELFANKGIIPGIKVDKGLVDLANTEHEKVTQGLDGLTERLLHFKKLGAKFAKWRNVYSISEYTPSLTAIKTGAENLGRYAAACQSVGIVPIVEPEVLMDGNHSIEHCAEVCEMVLHELFHTLFIHQVELEHIILKPSMVTCGKEVAPFSDPEEVADYTISVFRNNVPASVPTINFLSGGQTPQQATANLNAINQIGHQPWLLSFSFGRALQEDCLKEWCGNKANIAKAQEALIKRARLNSMACLGEYQNDME

SEQ ID NO: 22627 - protein, 481 aa, Halobacterium salinarum
MQLFWHRRDLRTTDNRGLAAAAPGVTAVDGGHDQGPVAAVFCFDDEVLAHAAPPRVAFMLDALAALRERYRDLGSDLIVRHGDPAAVLPAVANDLDATRVVWNHDYSGLATDRDAGVRDALDAAGVAHAQFHDAVHHRPGEIRTNAGDPYSVYTYFWRKWQDREKNPPAPEPEPADLAADTALADTSPLPSVQELGFAEPEAAVPDAGTAAARSLLDAFRESGDIYRYEDRRDYPHEEPTSRLSPHLKFGTIGIRTVYEAARAAKSDADTDDERENVAAFIGQLAWREFYAQVLYFNQNVVSENFKAYEHPIEWRDDPAALQAWKDGETGYPIVDAGMRQLRAEAYMHNRVRMIVAAFLTKDLLVDWRAGYDWFREKLADHDTANDNGGWQWAASTGTDAQPYFRVFNPMTQGERYDPDADYITEFVPELRDVPADAIHSWHELSLSERRRHAPEYPDPIVDHSQRREDAIAMFERARGDE

SEQ ID NO: 22628 - protein, 123 aa, Zea mays
MAAPKLATLALAVLLAATAVAPPAAVRAAMSCSTVYSTLMPCLPFVQMGGAMPPQPCCGGIRSLLQQANNTPDRRTICGCLKNVANGANGSGTYISRAAALPSKCGVALPYKISTNVNCNTIN

SEQ ID NO: 22629 - protein, 465 aa, Bradyrhizobium sp. BTAi1
MPIQVLMPALSPTMEKGNLAKWLKKEGEAIKSGDVIAEIETDKATMEVEATDEGTLGKILIPEGTADVAVNTPIATILADGETAADLGKVAAPAAEMKAAQSAPPAEPAASVQASPAPTGVAAPHSVAEPDPEVPAGTEMVTQTIREALRDAMAEEMRRDGDVFIMGEEVAEYQGAYKVTQGLLQEFGARRVMDTPITEHGFAGIGVGAAMAGLKPIVEFMTFNFAMQAIDQIINSAAKTLYMSGGQMGCSIVFRGPNGAAARVAAQHSQDYSSWYSHIPGLKVVAPYSAADAKGLLKAAIRDPNPVIFLENEVLYGHSGEVPKLDDYVIPIGKARIARSGKDVTIISWSNGMTYALKAADELAKEGIEAEVIDLRTLRPMDTDTIIASVKKTGRAVTVEEGWAQSGVGAEIAARIMEHAFDYLDAPVTRVSGKDVPMPYAANLEKLALPSAAEVVQAAKSVCYR

SEQ ID NO: 22630 - protein, 366 aa, Pyrenomonas helgolandii
DNGSGMVKAGFAGDDAPRPVFPSIVGRPRHQGVMVGMGQKDSYIGDEAQSKRGILALKYPIEHGIVTNWDDMEKIWHHTFYNELRVAPEEHPVLLTEAPLNPKANREKMTQIMFETFNTPAMYVAIQAVLSLYASGRTTGIVLDSGDGVSHTVPIYEGYALPHAILRLDLAGRDLTDYMMKILTERGYSFTTTAEREIVRDIKEKLCYVALDFEQEMQTAAQSSSIEKSYELPDGQVITIGNERFRCPEVLFQPSFIGLESAGIHETTYNSIMKCDVDIRKDLYGNIVLSGGTTMFSGIADRMQKEITALAPSTMKIKIIAPPERKYSVWIGGSILASLSTFQQMWISKQEYDESGPSIVHSKCFS

SEQ ID NO: 22631 - protein, 366 aa, Guillardia theta
  misc_feature (324)..(324): Xaa can be any naturally occurring amino acid
DNGSGMVKAGFAGDDAPRAVFPSIVGRPRHQGVMVGVGQKDSYIGDEAQSKRGILTLKYPIEHGIVTNWDDMEKIWHHTFYSELRVAPEEHPVLLTEAPLNPKANREKMTQIMFETFNTPAMYVAIQAVLSLYASGRTTGIVLDSGDGVSHTVPIYEGYALPHAILRLDLAGRDLTDYMMKILTERGYSFTTTAEREIVRDIKEKLCYVALDFEQEMQTAAQSSSIEKSYELPDGQVITIGNERFRCPEVLFQPSFIGLESAGIHETTYNSIMKCDVDIRKDLYGNIVLSGGTTMFSGIADRMQKEITALAPSTMKIKIIAPPXRKYSVWIGGSILASLSTFQQMWISKQEYDESGPSIVHSKCFS

SEQ ID NO: 22632 - protein, 433 aa, Candidatus Pelagibacter ubique HTCC1002
MIKIIKKISVPLISLFFLINMSSAGIAETTISAEVGFVFNTLLFLICGFLVMFMAAGFAMLESGMVTSKSVSVICAKNIGLYAISGIMFWLVGYNLAYGIPEGGYIGTFTPWSDSSSLEAGYSAGSDWFFQMVFCATTVSICSGAMAERIKLWPFFLFAAILSGVIYPIVMGWQWGGGWLATIGFSDFAGSTLVHSTGGAAALAGIIILGPRFGRFDSKGNPKAIQPFAASSIPLVTIGVFVLWLGWFGFNGGSQLALGSFADAVAISTIFINTNLAACGGVLAAAVVTRLLFGKTDVIQMLNGAIGGLVAITAEPLAPSPLAAILIGAVGGVIVVFGTKLLFSFKLDDVVGAIPAHMFAGIFGTLVVPITNADATFGAQLIGVLSINIFVFVVAYIVWSIMNSLFGIRLSKEAQAKGTDVTETGVIAYAIRD

SEQ ID NO: 22633 - protein, 498 aa, Solibacter usitatus Ellin6076
MDRRRFLQTAGAVGASKRILQAAEADPALVKATEAVLAAVPTAEADPERPIYHFRPPANWTNDPNGTIYYKGWHHLFYQLNPFVARIGSQHWGHARSRDLVNWEHLPIAIWPSEERGERAIFSGSAAIAADGRPRILYTSIGQAQPEQWLAIPKDDDLLSWEKFPGNPVLTQAAHIAGPISQWRDPFLFTEGGATYMVCGGGTAAGRAQVQLYKAAKPDFTEWRHLGAVFQTLDRESRNFECPNLFPLAGKWVMIVSPNRVCEYWIGDLDIAKVQFTPQAHGILDAGDAYASNISVDDKGRTILWLWGRTNTPQGKGWGSVMTMPRILSIGPDGYLLQRPAPEFESLRGAARSFPARGLETPFVPEDVAVDAAEIEAEFTGTGVFGLELRRSSAGKPGVTVTIQGGYVNVGNARAFVGNSGRYKLRVFLDRRCLEVNVNDGVAAVYNWFDAGLNDLGIAAFGRAGNGRGGIAPVPPRLESLRVWPMKPAKFSLDRFHV

SEQ ID NO: 22634 - protein, 556 aa, Symbiobacterium thermophilum IAM 14863
MGGKSGWYRGGVQAPVPTQGRGPLVSPRGGRMRLLAVTLYDTTLRDGSQRAGIAYTSQDKLRIAHRLAGLGIPYIEGGWPGSNPKDGEFFRLLRERPLQGAKAVAFGSTCRAGNAPESDATLGALVEAGTAVVAIFGKSWDYHVTRGLGTTLEENLRMIRESVAYLKRQGREVVYDAEHLFDGFRRNPDYALATLRAAAEGGADWIVLCDTNGGTLPETAADIVRRVAAELPGARLGIHAHDDSGLGVAVTLAAVAAGATMVQGTINGYGERCGNANLCAIIPNLELKVGIRCLPEGRLTELTAVSRFVSEVANLPPWDAQPFVGHNAFAHKAGVHVSALLKDPVMYEHVPPETVGNARRVLVSDLGGRSNLLATFGDQLTPAEAAELIQRVKERESRGFQYEGAEASVALLTYKGQPPFEVLGVKLMVTGGADGPAESEAAVKLRVGDQVVHTAAEGSGPVHALDRALRKALTEVYPSVARMELRDYKVRVLEGSQGTGAVVRVLIESGDGEARWSTVGASTNILEASWQALTDSFAYFLLFREGIRTPEAAMQG

SEQ ID NO: 22635 - protein, 285 aa, Sporobolus stapfianus
MASGSDAVLEWHKQDKKRMLHAVYRVGDLDRTIKCYTECFGMKLLRKRDVPEEKYTNAFLGYGPEDKNFALELTYNYGVDKYDIGEGFGHFAIATEDINKIAEAVKSSGCCKITREPGPVKGGSTVIAFAQDPDGYMFELIQRGPTPEPLCQVMLRVGDLERSIKFYEKALGMRLLRKKDVPDYKYTIAMLGYDDEDKTTVIELTYNYGVTEYSKGNAYAQVAIGTNDVYKSAEAVELATKELGGKILKQPGPLPGINTKIASFVDPDGWKVVLVDHADFLKELK

SEQ ID NO: 22636 - protein, 338 aa, Paracoccidioides brasiliensis
MVVKVGINGFGRIGRIVFRNAVEHDDVEIVAVNDPFIETKYAAYMLKYDSTHGQFKGDIQHSSSNNLTVNNKTIHFYQERDPANIPWGKHGVDYVVESTGVFTTTEKAKAHLSGGAKKVIISAPSADAPMFVMGVNEKSYRPDISVLSNASCTTNCLAPLAKVIHDNFGIAEGLMTTIHSYTATQKTVDGPSHKDWRGGRTAAQNIIPSSTGAAKAVGKVIPALNGKLTGMAMRVPTANVSVVDLTCRTEKPVTYDQIKAAVKAASEGELKGILGYSEDALVSTDLNGDPRSSIFDASAGIALNDRFVKLISWYDNEWGYSRRVLDLIAYIAKVDAGK

SEQ ID NO: 22637 - protein, 138 aa, Pyrobaculum aerophilum
MVLKWVMSTKYVEAGELKEGSYVVIDGEPCRVVEIEKSKTGKHGSAKARIVAVGVFDGGKRTLSLPVDAQVEVPIIEKFTAQILSVSGDVIQLMDMRDYKTIEVPMKYVEEEAKGRLAPGAEVEVWQILDRYKIIRVK

SEQ ID NO: 22638 - protein, 444 aa, uncultured Acidobacteria bacterium
MKSRPAGAGPVAVEAPPVTVQTSQRMVVREVLDNGLRLITETMPHVRSVTIGVWLMRGSRHESDERSGIAHFVEHMLFKGTDTRSAEDIAQAIDSIGGQLDAFTAKEYASYYIKVLDEHLPLAVDLLSDIVLRPAFSAEEIEREKKVILEEIKMVEDTPDDLVHELFTQHFWEGHPLGRPILGSKETVESFTATSLLDYFHGAYVARNMIISAAGNLEHAHVRELVERAFGAVPSEGEPFSAEAPRVVPQVITRTKELEQSHICLGTNSYPQNHDDRYVSYIMNTVLGGSMSSRLFQNVREKRGLAYAVFSGLSAYRDAGNITIYAGCSNQAVGEVIDLCVEELRGMKRAPVPDSELRRAKDHLKGSLMLSLENTASRMSHLARQEIYFDRHFGLDETLAGVERVTDADVQRVAQDLFSDGSLAATVLGPSVPALDRARIDLGA

SEQ ID NO: 22639 - protein, 567 aa, Lactococcus lactis subsp. lactis Il1403
MTKINASDAMLKVIEDWGVKNIYGLPGGSIDSTMNALYNRRDTLNYIQVRHEEVGALAAVGEAKVTGEIGVTFGSAGPGAVHLLNGLYDAQYDHVPVLALVGQVPTSAMNTNYFQELNENPMFADVSVYNRTVMTAEQMPAVVDEAIRQAYAKRGVAVITIPKDLGWQEIEDNYVSSANLYQKPLPLEPAAEKIQEAWKILKEAKRPLIYIGQGTRGARKEILELSKMLHAPILSSALGKGIIPDNAPAYMGSAGRVASKPGVEIASNTDAVLFLGSDMPFQSFFIPKDAKYVQVDIDGTKFGRRHQVDLAILADAKLTIKKLMEVGEQLPETNWYRAALADKENWVEWLEKRSVIDSSPLEVEPVFKAINDMATDDAIFQVDVGNVTIDGMRLLDTSKDQKFTTSGWYATMGYALPAAIGAKAQYPDRQVWSISGDGAWAMVMPDILTQVKYNLPIINVVLTNKSLGFIEAEQDDAKQPNSGIDLIGANFGASAAALGALGFDVNNLSELNEAFAKAKEANRPMVINVNIFDHRPLPVEQLQLDSAEFEKEYQTQGLIPFSKLIQE

SEQ ID NO: 22640 - protein, 493 aa, Pseudomonas syringae pv. syringae B728a
MSLTRFQMCIDGQWVDALSGKTFDSLDPALAEPWAQLPDADEADVERAVQAAQKAFEGQAWRGLTATARGKLLRKLGDLIAENKEQLAQLESRDNGKLIRETRGQVGYLPEFFHYTAGLADKLEGGTLPLDKPDLFAYTVHEPMGVVAGIIPWNSPLYLTAIKLAPALAAGNTIVLKPSEHASATVLELARLALEAGIPPGVVNVITGYGPTTGAALTRHPLVRKIAFTGGAATARHVVRSSAENFAKLSLELGGKSPNIIFADADLDSAINGAVAGIYAASGQSCVSGSRLLVQDEIYDEFVERLAERASRIRIGNPQDEGTEMGPMATAQQLAVVEGLVADALAEGARLRLGGKRPELDSKGWFYEPTLFECDHNSMKIMQEEVFGPVASVIRFKDEAEALAIANDSQFGLAAGIWTRDLGRAHRLARDIRSGIIWVNTYRAVSAMAPIGGFKNSGYGRESGIDSVLAYTELKTVWINLSQAPMPDPFVMR

SEQ ID NO: 22641 - protein, 73 aa, Brassica napus
  misc_feature (42)..(42): Xaa can be any naturally occurring amino acid
  misc_feature (60)..(60): Xaa can be any naturally occurring amino acid
MDVSNTMLLVAIAAAYWLWFKRISRWLKGPRVWPILGSLPIXIEQCDTMHDWITENLPAXGERIHTLYCAMPS

SEQ ID NO: 22642 - protein, 347 aa, Thermus thermophilus HB8
MSWDLSTAKPPVVVDTTLRDGSHAHRHQYTVEEARAIAQALDEAGVYAIEVSHGDGLGGSSLQYGFSRTDEMELIRAVRETVRRAKVAALLLPGIGTRKELKEAVEAGIQMVRIATQCTEADISEQHFGMAKEMGLEAVGFLMMSHMRPPEFLAEQARLMEGYGADVVYIVDSAGAMLPEDAYARVKALKEALSRAKVGFHAHNNLGLAIGNTLAALAAGADWVDATLRGYGAGAGNAPLEVLAAVLDKAGLNPGLDVFKLLDAAEYVMGPILHFQPYPDRDSVAIGYAGVYSTFLLHAKRIGKELGVDPLAILLELGRRQAVAGQEDWILRVALELKEKEAGALAD

SEQ ID NO: 22643 - protein, 475 aa, Bordetella bronchiseptica RB50
MYEQLALYIDGEFLTGDGRRTQDVVNPATLEVLGQLPHASEADLDRALAAAQRAFETWKRTSPMERAAILRKVGQLSRDRAQEIGRNMTLDQGKPLAEAVGEVASCSEHADWHAEECRRIYGRVIPPRNPDVRQFVVREPIGVCAAFTPWNFPYNQAIRKIAAALGAGCTVVLKGPEDSPSAVMAIARMFHEAGLPKGCLNIVWGEPAKISDYLIRSPIVRKVSFTGSVPVGKQLAALAGAHMKRVTMELGGHSPVLVFDDADVDRAAEMLARFKVRNAGQVCVSPTRFYVQNGAYEQFLARFTEVLKNIKVGDGLEKGTDMGPLAHERRVPAMSTFVDDALKHGGKVVLGGDAPDRKGYFFSPTVVTELPDNAMLMTEEPFGPLAPVVRFTDTDEVLRRANSLPFGLSSYVFTNSLKTATKVSNALEAGMVNINHFGSALAETPFGGIKDSGIGSEGGLETFDGYLVTKYITHI

SEQ ID NO: 22644 - protein, 374 aa, Cryptococcus neoformans var. neoformans JEC21
MSPVRVPSHGDGWASTPQTKQVYSIASIPADGIGPEVVEAAITVLKAIAKKRGTFQLDFTNFDWSSETYKKTGRYVPDNHLDILRKFDAILFGAVGAPDVPDHISLWGLRLAICQPLQQYANVRRTRVLPGTESPLRNCKPGQLDWVIVRENSEGEYAGHGGRSHNGYNHEVATEISIFTRVGVERIARFAFQLAQSRPRKKLTYVTKSNAQRNGMVMWDEVVNEVAKEFPDVELDHMLVDAMTVRMVLHPESLDTIVATNLHADILSDLAAALAGSIGIAPTANLDPSRQNPSMFEPIHGSAFDITGKGIANPVATFWTAVEMLEWLGEKEAGQQLMEAVEAVCVDGIKTKDLGGSATTKEVTDAVVKRILQG

SEQ ID NO: 22645 - protein, 476 aa, Pseudomonas syringae pv. syringae B728a
MYPDVQLYIDGQWRASRDNRTLSVINPATGEALGAVAHAGIADLDEALAAAERGFATWRATSAYDRYKLMQKAANLVRERADSIARIMTQEQGKPLAEARMETLSAADIIDWLAEEGRRSYGRLVPSRNVSIEQKVIKEPVGPVAAFTPWNFPINQVVRKLSSALAAGCSIIVKAPEETPASPAELIRAFADAGVPAGVIGLVYGDPAEISGYLIPHPVIRKVTFTGSTPVGKQLAALAGKHMKRATMELGGHAPALVFDDADIDLAARVLATAKFRNAGQVCVSPTRILVQRKVLDAFTEKFVGLTREIKVGNGLEAGTTMGPVANDRRIPALVDLIDDAVRGGATLSAGGKAGEGPGYFFEPTVLSGLKPHMRIMNEEPFGPVALLVPFDTLEEAIAESNRVPFGLASYAFTTSMKTAQALSTYIEAGMLSINHQGIGLPEVPFGGIKDSGYGSEGGTEAIEAYLNTKLVTQYN

SEQ ID NO: 22646 - protein, 385 aa, Ashbya gossypii ATCC 10895
MFGRVRQGLVDAGRLSTLRRMGSSVAGSRSGGTGVMFMNMGGPSTVAETHDFLYRLFSDNDLIPISAKYQPLIAKFVARMRTPKIAKQYEEIGGGSPIRKWSEYQATRVCELLDERCPESAPHRPYVAFRYARPLTDETYQQMLKDGVQRAVAFSQYPQFSYATTGSSLNELWRQVKELDPERKIEWSVIDRWPTQPGLVQAFADNINKTLQEFPEEIRKDVVILFSAHSLPMDIVNTGDAYPAEVGATAYEIMRKLKFSNPYRLVWQSQVGPKPWLGAQTAQITEFLSDKVPGLVLVPVAFTSDHIETLHEVDLGIIGESEHKDKIKRCESLNGNETFIRGLADLVESHLKSGESYSKQLPLDFKLGKSSDPLGHPSQLFKSKL

SEQ ID NO: 22647 - protein, 302 aa, Gloeobacter violaceus PCC 7421
RIGRNFLRCWLGRKQSDFEVVAINDTSDPNTNAHLLKYDSMLGQFSGEVSADENSLTANGHTIKCFSDRNPLNLPWKDWGVDLVIESTGVFTSRDGASKHLAAGAKKVLITAPGKNDDGTFVMGVNDHNYDPEKHTIISNASCTTNCLAPVAKVLHENFKIVKGTMTTIHSYTGDQRLLDASHRDWRRARAAALSIVPTSTGAAKAIGLVLPELKGKLDGLAFRVPTPNVSVVDLVVEVEKPTLVEQVNHVLKEASENELKGILAFSEIPLVSIDYRITDVSSIVDAQLTMVLKDNLVKVIS

SEQ ID NO: 22648 - protein, 99 aa, Legionella pneumophila subsp. pneumophila str. Philadelphia 1
MQINITGHGMDVTPALRAFTEEKFDKLERHFDHIRAINVVFDVEKVRQIAEATVLVTKGELHASSESEDMYAAIDTLVDKLNRQLIKHKEKLLAHRDRD

SEQ ID NO: 22649 - protein, 112 aa, Nocardia farcinica IFM 10152
MKLITAIVKPFTLEDVKTGLEQAGVFGMTVSEVQGYGRQKGHTEVYRGAEYSVDFVPKVRVEVVVDDASVDKVVDVIVEASRTGKIGDGKVWVTPVESIIRVRTGERGTDAL

SEQ ID NO: 22650 - protein, 589 aa, Lycopersicon pennellii
MFFFLQLLVPIISVFQSKKHYYSTFIRCSISNRRPEYVPSKISDPKYVRIFDTTLRDGEQSPGATMTTKEKLDVARQLAKLGVDIIEAGFPASSEADFESVKLIAEEIGNNTDENGFVPVICGLSRCNKSDIDKAWEAVKYAKKPRVHTFIATSEIHMKYKLKMSREQVVEKARSMVAYARSLGCEDVEFSPEDAGRSDREFLYDILGEVIKAGATTLNIPDTVGYTVPSEFGQLITDIKANTPGIENVIISTHCQNDLGLSTANTLAGACAGARQLEVTINGIGERAGNASLEEVVMALKCRGEQVLGGLYTGINTQHIVPSSKMVEEYSGLQVQPHKAIVGANAFAHESGIHQDGMLKHKDTYEIISPDDVGLSRSNEAGIVLGKLSGRHALKSKMLELGYDIDGKELEDLFWRFKSVAEKKKKITDDDLIALMSDEVLQPNVYWKLGDVQIMCGSLGLSTATVKLINTDGQEHIACSVGTGPVDAAYKAVDLIVKVPITLLEYSMNAVTEGIDAIASTRVSICSIDRHTIMNGSTGQTIHRTFSGTGADMDVVISSVRAYIGALNKMLSYEKLVSRYSKPEDSVVV

SEQ ID NO: 22651 - protein, 425 aa, Bacillus clausii KSM-K16
MAYKYKLPEVGEGIHEGEIVKWFVKEGDEVKEDDILLEVQNDKSVVELPSPVDGKVLEVKVEEGTTSYVGDVILVIDDGSGDDDAEEESKEEAPKEEKQAASEPEKGQSSSEESDEEEGSRVIAMPSVRKYAREKGIAISKVKGSGKNGRVLKEDVDAFASGGQTEEAAAPKEEEKTASSKPAATAQAGGNEQLEERVPLKGIRKAIAKAMVNSKHTAPHVTHLDEVDVSALVAHRKQYKQIAADQGTKLTYLPYVVKALTSALRKYPALNASIDDEAGEIVYKKYFNVGIAADTEQGLVVPVVKDADRKSIFALADEINELAGKAREGKLSSAEMSGGSATISNLGSARGQWFTPIINHPEVMILGIGRIEEKPVVKDGEIVVGTMLALSISYDHRLIDGVTAQSALNQIKRLLNDPQLLLMEG

SEQ ID NO: 22652 - protein, 920 aa, Rubrivivax gelatinosus PM1
MGERSRPDLADPDESAAGAERADALARSELLRAALIGVIERYEPEVARVLRGEAPLERMSTRLLARTIQAQAIWFQLLAIAEQNRDMRRRREVERQRGHAQVRGTFAHVFHTAVEAGLDAKQIREALCSLRIRPVITAHPTEAKRVTVLERHRRIYLRLFDLESPRWTDREREDLTRAISDEVELLWLTGELKLDKPTVDQEVAWGLYFFDENLFDVVPQLYGRIEAAFAKQFPGETLELPVVFGFGSWIGGDRDGNPFVTSTVTRHTLWQMRLASLRRYRSRLADLARNLSISERAAALPEDFRAAVAAALAALPDGAGVAARNPGELFRQFIAGMLARLDATIARNGEQPEPADAARDAAPYEHADQLIGDIELMHRALVETGAQPLAKTFLAPLLREVRTFRFATVRLDIRENTIRINATLGELYRAVRGSEPPASDSAEWKDWLLTELAAPRRAGEAPLATAGLTPEAQETLATFRTVAEMRDRVDREAFGTLILSMTHSATDVLGVYLLAKHAGLFNDAQAVERCTLPVVPLLETIPDLRRAPAILKELLAVPLVQRSLRLHGNVQEVMIGYSDSNKDGGYFTANWELSKAQATMTRLGEDLGVKIAFFHGRGGSVSRGGAPTGRAIAALPAGSIRGGFRSTEQGEVVSYKYANRGTAHYQVELLASSVLQHVLLSERESALVPKHEFDEAMEAISGVSWTAYRQLMESEHLLAYLQGSSPLEELALLNIGSRPARRTQARTLADLRAIPWVFAWTQNRHMLTGWYGLGSGLAAFVEVRKARGLDLLQRMFHEGRLFRTVIDEVEKTLLTVDLDIAREFAGLVADPAVREPIFQAIEREYRLTCEMVLKVSGGRQVAERFPQLRRRLARRLQTMNQVSREQVQLLRALRDGGDDDVRTAFLLSINCAAAGLGATG

SEQ ID NO: 22653 - protein, 612 aa, Lycopersicon pennellii
MASITANHPISGKPLISFRPKNPLLQTQTLFNFKPSISKHSNSSFSIPVVRCSIRRIPEYTPSHIPDPNYVRIFDTTLRDGEQSPGATMTTKEKLDVARQSAKLGVDIIEAGFPASSEADLEAVKLIAKEVGNGVYEEEYVPVICGLARCNKKDIDKAWEAVKYAKKPRIHTFIATSEVHMNYKLKMSRDQVVEKARSMVAYARSIGCEDVEFSPEDAGRSDPEFLYHILGEVIKAGATTLNIPDTVGYTVPEEFGQLIAKIKANTPGVEDVIISTHCQNDLGLSTANTLAGACAGARQLEVTINGIGERAGNASLEEVVMALKCRGEQVLGGLYTGINTQHILMSSKMVEGISGLHVQPHKAIVGANAFVHESGIHQDGMLKHKDTYEIISPEDIGLNRANESGIVFGKLSGVMLCKPKMLELGYEIEGKELDDLFWRFKSVAEKKKKITDDDLVALMSDEVFQPQFVWQLQNVQVTCGSLGLSTATVKLIDADGREHISCSVGTGPVDAAYKAVDLIVKVPVTLLEYSMNAVTQGIDAIASTRVLIRGENGHTSTHALTGETVHRTFSGTGADMDIVISSVRAYVGALNKMMSFRKLMAKNNKPESSAVI

SEQ ID NO: 22654 - protein, 115 aa, Triticum aestivum
MARGAATQLVLVSMVAAMLLVACDAAISCGQVTSALSPCISYARGNGANPPAACCSGVRSLAGAARSTADKQAACKCIKSAAGGLNAGKAAGIPSKCGVSVPYAISSSVDCSKIR

SEQ ID NO: 22655 - protein, 112 aa, Idiomarina baltica OS145
MKMITALIKPFKLDDVRQALADIGCTGMTIAEVRGFGRQKGHTELYRGAEYRVDFLPKIRLELAVSDDQLERAVEVISEAAHTGNIGDGKIFVTHLEHCVRIRTGEVDQEAL

SEQ ID NO: 22656 - protein, 851 aa, Burkholderia mallei ATCC 23344
MKIVVIGHGMVGHKLLECIAAGAPGALAAPRVAVVCEEPRPAYDRVHLSEFFAGKSADDLSLVEPGFFERHPNFRLLLNTKAVAIDRAARTVALSTGETLAYDKLVLATGSTPFVPNVPGRERAGCFVYRTIEDLEAMRACGARANSGVVVGGGLLGLECAKALRDMGLAAHVVEFAPRLMAVQVDEGGGRMLREKIEALGVQVHTGKNTLEIVDGETGAHRMAFADGTHLDADMIVFSVGIRPRDEIARACGLEIGPRGGVAIDERCRTSDEDIYAIGECAAWNGQTFGLVAPGYDMARVVARQLAGGEGAFAGADLSTKLKLMGVDVASIGDAHGRTPGSRAYQFADERRGVYKKLVVSECGKALLGAVMVGDAADYGTLLQMMLNRIELPRSPEFLILPQADGAAKPALGVDALPDAAQICSCNNVTKAQLREAVAGGATSLGALKGCTGAGTSCGGCVPLVTQVLKAEMKKQGLAVNNHLCEHFPYSRQELYHMVRVERFKTFGALLKKHGRGLGCDVCKPAVAGILASCWNEFVLKKEHAALQDSNDYYLANIQRDGTYSVVPRMPGGEVTPEGLIAVGEVARKYGLYTKITGGQRVDLFGARVEQLPLIWEELIAAGFESGHAYGKSVRTVKSCVGSTWCRYGVGDSVGLAIELENRYKGLRAPHKLKFGVSGCTRECAEAQGKDIGVIATEKGWNLYVCGNGGMKPRHAELLAADLDRATLVRYVDRFLMFYIRTADRLQRTSVWRDNLEGGLDYLIDVVVHDKLGLAAELEAEMQHVVDTYECEWKRAVTDPATRRRFRHFINSDAPDSTIAFVEARGQIRPVTPDERDAEGQADRQPETETA

SEQ ID NO: 22657 - protein, 392 aa, Idiomarina baltica OS145
MNAASLASTEYALNTLYILLSGALVMWMAAGFAMLEAGLVRSKNTTEILTKNIVLFALACIAYLIIGYTLMYGAGGTDNFADNADFFFQSVFVATAMSIVSGAVAERMKLLAFFIFAVVLSAFIYPFQGSWSWGGGFLAEAGFVDFAGSGIVHMAGASAALAGVLLLGARRGKYKDGKPTAIPGANMPLAALGTLILWFGWFGFNGGSQLAIHDIENANAVAKVFVNTNTAAAAGAIGALLITVFIWRKADLTMIVNGVLAGLVAITAQPLTPEPYTAAIIGASAGVLVVISIISLDRLRIDDPVGALSVHGVVGFYGLMLVPLTDASATWSVQLLGAAAIFGWTFVASLVIWYLLKVTVGIRVSEEQEYLGGDISECGVEAYPEFTGSTKR

SEQ ID NO: 22658 - protein, 345 aa, Rhodopseudomonas palustris CGA009
MSVIVPIHGPAIAPAPAPERVGVLLVNLGTPDSCDTKGVRIYLREFLSDPRVIENQGLFWKLALNGIILNTRPARKAKDYQKIWNHEKNESPLKTITRAQAEKLSASLGDRGHLIVDWAMRYGNPSLRDRIEALVAKGCTRLLVVPLYPQYSAATSATVCDQAFRVLRELRAQPTLRVTPPYYRDSAYIDALATSIKSHLASLTFEPELIVASFHGMPQAYIDKGDPYQAQCVATVEALRERMGVADDKLLLTFQSRFGFDQWLQPYTDKTIEALARKGVRKLAVVMPGFSADCLETLEEIAQENAEIFMEHGGEEFTAIPCLNDSDAGVQVIRQLVLRELQGWL

SEQ ID NO: 22659 - protein, 180 aa, Quercus robur
MAEIRDQYGNPIQLTDEHGNPEQLTDEHGHPMHLTGVATTKIHDEPDRDTTEGTLASTAVGVGGAKEHDQQLDQQKQQHELEVSRTSSSSSGSSEDDGQGEIEGQGGEVRRRKKKGLKEKIKEKLTCGKSKEEQSQTESFTSTATTTISTGATSPGAQPEHEKKSVIEKIKEKLPGHHSH

SEQ ID NO: 22660 - protein, 346 aa, Corynebacterium efficiens YS-314
MGAMRIATLTSGGDCPGLNAVIRGIVRTASNEFGSTVVGYQDGWEGLLADRRVQLYDDEDIDRILLRGGTILGTGRLHPDKFRAGIDQVKANLADAGIDALIPIGGEGTLKGAKWLADNGIPVVGVPKTIDNDVNGTDFTFGFDSAVSVATDAIDRLHTTAESHNRVMIVEVMGRHVGWIALHAGMAGGAHYTVIPEVPFDISEICKRMERRFQMGEKYGIIVVAEGALPKEGTMELREGEVDQFGHKTFTGIGQQIADEVHRRLGHDVRTTVLGHIQRGGTPTAFDRVLATRYGVRAARACHEGQFNTVVALKGERIRMISFDEAVGTLKKVPMERWVTAQAMFG

SEQ ID NO: 22661 - protein, 344 aa, Saccharomyces cerevisiae
MSNTVLVSGASGFIALHILSQLLKQDYKVIGTVRSHEKEAKLLRQFQHNPNLTLEIVPDISHPNAFDKVLQKRGREIRYVLHTASPFHYDTTEYEKDLLIPALEGTKNILNSIKKYAADTVERVVVTSSCTAIITLAKMDDPSVVFTEESWNEATWESCQIDGINAYFASKKFAEKAAWEFTKENEDHIKFKLTTVNPSLLFGPQLFDEDVHGHLNTSCEMINGLIHTPVNASVPDFHSIFIDVRDVALAHLYAFQKENTAGKRLVVTNGKFGNQDILDILNEDFPQLRGLIPLGKPGTGDQVIDRGSTTDNSATRKILGFEFRSLHESVHDTAAQILKKENRL

SEQ ID NO: 22662 - protein, 355 aa, Aspergillus oryzae
MKTYNIASIPADGIGPEVISAGVTVLNALAEKLNTFKLDFTHYDWSSETYKTTGKYIPDGGLEDLKRHDAILFGAVGAPDVPDHISLWGLRLSICQPLQQYANVRPTRVLRGTQSPLRNCPPGKLDWVIVRENSEGEYAGQGGRSHRGFPWEVATETAIFSRHGVERIMRFAFETAAKRPRKLLTVVTKSNAQRNGMVLWDEVATEVGKEFPEVQVDKMLVDAMTTRMVLKPETLDTIVASNLHADILSDLAAALAGSIGIAPTSNLDPTRQHPSMFEPIHGSAFDITGKGIANPVATFWTAAEMLAWLGEETAAQKLMECVENVCERGILTADLGGKATTKEVTEAMVGEIQRL

SEQ ID NO: 22663 - protein, 104 aa, Triticum aestivum
MMLRGRVMRLASRHLGSHGFSTEIFVSRLSFYTTEEEFKKVFSPFGAIEEVRLVRDNQTGRLKGFGFVRYSSQEEAQKAIKAMDGRILRGRLIFAEMAKEHGTG

SEQ ID NO: 22664 - protein, 196 aa, Triticum aestivum
GPHLERNHEKNLLSTVVGLSQFYSVAIAQSSTTIAVPTGTPIAGNYNGTYRPQVHFSPPEHFMNDPNGMFRDADGLWHLYYQYNPTAVVAGNQHWGHATSKDLYHWVNQPIALFPPEEDTYVFSGSVVVDENNTSGFFPDQDNGVVAIYTLSSPEVQDQAIAYSRDGGYTFEPYKGNPVINSTSTQFRDPKVHSLQ

SEQ ID NO: 22665 - protein, 110 aa, Candida albicans SC5314
MGPPDSPYAGGVFFLSIHFPTDYPFKPPKIAFTTKIYHPNINSNGNICLDILKDQWSPALTISKVLLSICSLLTDANPDDPLVPEIAHIYKQDRKKYEATAKEWTKKYAV

SEQ ID NO: 22666 - protein, 491 aa, Aspergillus oryzae
MATEYKLPFELNDPSLLHFDSFVGNSWVQAKNPGTDIPWASCPTNSAEDVPSAVETAHAAFEQYKKSNPRQRAQWLLKWDTLIREAKPDLAKILTHETGKPLAESYGEIDYATGFTWWFAGEAERIHGSISVPSAPNRRVFTVKQPIGVAAALVPWNFPIAMVLRKAGAAFAAGCTMIVKPSPETPLTALVLAHLAQKAGFPAGVFNVLTTDLENTPSLSEALCKHPLVKKVTFTGSTRVGKLIASHCAHGLKKLTLELGGNCPFLVFDDANLDQALDQLMALKWRHAGQACITANRVYVQAGIYDRFAQLLKERTQKLVVGHGAKEGTTMGPVTTPRSIDKALSQVEDARRLGADVILGGNKVTDTKGYFFEPTILTGMTKDMLVSREETFAPIAALYKFETEEEAVQLANDTSMGLASYAFTKNIDRMWRLLENLDAGMIGMNTGNSSAAESPFGGIKESGYGKESGKEVAVNEYLVTKTGTLTIEGQY

SEQ ID NO: 22667 - protein, 693 aa, Zea mays
  misc_feature (126)..(127): Xaa can be any naturally occurring amino acid
MGDSSVAGALVPSVPKPEPAPSGDTSAAAAATTAALAMPEEAGMRAASASPQGPAEEGEGPADRDLLCPICMAVIKDAFLTACGHSFCYMCIVTHLSNKSDCPCCGHYLTKAQLYPNFLLDKVLKXXSAQQIAKTASPIDQFRCALQQGNEMGVKELDSLMTLIAEKKRQMEQQESETNMQILLVFLHCLRKQKLEELNEIQTDLQYIKEDISSVERHRAELYRTKERYSMKLRMLLDEPTAQKMWPSSIDKASCRFLPNSRTPLSGSCPGTLQNKKLDLKAQVSHQGFQRRDALTSSDPPNSPIQSGNVIARKRRVQAQFNELQEYYLQRRRTGAQARRQEERDIVAMNREGYHAGLQDFQSVLTTFTRYSRLRVIAELRHGDLFHSANIVSSIEFDRDDELFATAGVSKRIKVFEFSTVVNEPSDVHCPVVEMATRSKLSCLSWNKYSKNIIASSDYEGIVTVWDVQTRQSVMEYEEHEKRAWSVDFSRTDSSMLVSGSDDCKVKVWCTNQEASVINIDMKANICSVKYNPGSSFYVAVGSADHHIHYFDLRNPSSPVHIFGGHKKAVSYVKFLSNNELASASTDSTLRLWDVKDNCPVRTFRGHKNEKNFVGLSVNNEYIACGSETNEVFVYHKAISKPAASHRFVSSDPDDADDDPGSYFISAVCWKSDSPTMLTANSQGTIKVLVLAP

SEQ ID NO: 22668 - protein, 599 aa, uncultured archaeon GZfos13E1
MEHDKCQPRKCEYECIKYCPMVRTGVETIVVGEHGKPVISEDLCEGCGICIKKCPFNAISIIGLPEELKGKETHRYGENGFVLYGMPIPKAGKITGTIGENGIGKSTAIKILSGLQVPNLGKVNFEAEEENEKPSWDKIKKRYAGSELQNYFDKLAKGNIKVAYKPQYIDTIPEYFDGKVQELLNITDERGVGKRLVKDFELEEARGRDIKELSGGELQRVAIIATMIKDADFYFFDEITPYLDIYQRARVARGMKEVLKDKAVVVVEHDLAILDMLADYVHLIYGEPGKYGVVTMPKSTNRGINEYLSGFLHAENVRIRDKPIEFTVHPPREQQEVRRVFVEYGGFEKRYGDDEGFVLNAKPGSIGKGEVLGIVGRNAIGKSTFVSVLAGETEPTAGKEAAQSFDINVSYKPQYIKSLQSDERDMHVKDFIHSVKGELSEADIIDVINPLGISDLEEKNLKELSGGELQNVAIAACLCQDASLYMLDEPSAHLDVEQKARLIKTLRRYMERRGASGLIVDHDIYLIDLLSDRLMVFDGEPGVRGEIKGCFGMQEGMNLFLRDLGLTFRRDESTRRPRINKIGSAKDREQKKKGRYYYL

SEQ ID NO: 22669 - protein, 372 aa, Candida albicans SC5314
MKKSTGPTQTRQVVFNISQNFKVLKILGEGAYGIVALAVHLPTETKVAIKKIEPFERPLFCLRTLREIKLLTKFKNHDNIVRLYDVQKPMNYDSFNEVYLIQEYMPSDLHNIIHTHLLSDQHVQYFIYQILKGLKMIHSARVIHRDLKPSNILVNEKCDLKICDFGLARLDTKHYNFDEAPRISMLTEYVATRWYRAPEIMLSASNYSTAIDLWSVGCILAELLTYRALFPGSDYINQLKLIFEVLGTPTDEDLQIIKSERAQKFIRSLPTKVKIDLSEFINNHPYRNIKHRGRDQVNPLAIDLLEKLLVFDPAKRITVQEALEHPYLNSYHEQLDEPVTSPIPIEEFDFDIDKKNLDTNDLKKQIFEIVMS

SEQ ID NO: 22670 - protein, 164 aa, Triticum aestivum
MVASCVITYESTLEVSTERMWKVVFYGEDTGDVTKAWADFIDALDVDGDGGPDSVSTMTLTPTVTELAGSVLMRTLLMARDNAGHVINTEVLKGIKVSSQVKSQVDEVKLEANLEGACVANLMVEFKRLDDRVALSAEDQAELHAGFLDLLKMVDAYLDAHPAE

SEQ ID NO: 22671 - protein, 221 aa, Glycine max
MKVVYFLVAILALASSLVSAHDPSPLQDFCVATKERDGVYVNGKFCKEPKDVKAEDFYKEVEPGNPSNQLGSAVTPVFVDQLPGLNTLGLSLARIDYESMGLNPPHIHPRATEIIIVLEGILFVGFATSNQDGNRLFSKVLNKGDVFVFPIGLIHFQLNVGYGNAVAIAGLSSQNPGTITIANALFKANPPISPEVLTKAFQVDKSTIDYLQKQSWYDNNN

SEQ ID NO: 22672 - protein, 293 aa, Burkholderia thailandensis E264
MSILINKDTKVITQGITGKTGQFHTRACREYANGREAFVAGVNPKRAGEDFEGIPIYASVKEAKAETGATVSVIYVPPAGAAAAIWEAVEADLDLAICITEGIPVRDMIEVKDRMRREGRKTLLLGPNCPGTITPDELKIGIMPGHIHRKGRIGVVSRSGTLTYEAVAQLTALGLGQSSAVGIGGDPINGLKHIDVMKMFNDDPDTDAVVMIGEIGGPDEANAAQWIKDNMKKPVVGFIAGVTAPPGKRMGHAGALISGGADTAEAKLEIMEACGIKVTRNPSEMGRLLKAAL

SEQ ID NO: 22673 - protein, 428 aa, Synechocystis sp. PCC 6803
MAGSLFADASKRLEKALKYVAISDDAGERLKYPKTSLSVSIPVRMDDGSLKIFPGYRVRYDDTRGPGKGGVRYHPNVTMDEVQSLAFWMTFKCALLNLPFGGAKGGITLNPKELSRAELERLSRGYIEAIADFIGPDIDILAPDVYTNEMMMGWMMDQYSIIRRKISPAVVTGKPVTMGGSQGRNTATGTGAFYIMQGMLPKFDQYPENTTVAVQGFGNAGMVVAECLYQDGYKVVAISDSQGGIYNEQGIDIPAVIDYKQRHRTLAGMYCDQAICDLGENQQISNAELLALDVDVLIPAALENQITRDNADQVRARYIFEVANGPTTTAADDILASKGIYVFPDILVNAGGVTVSYFEWVQNRSGLYWSAKEVNDRLKEKMVEEAEHVWNITQELDVNVRTAAYIHALNRLSEAMDAKGTRDYYQDS

SEQ ID NO: 22674 - protein, 296 aa, Chlorobium tepidum TLS
MKVLEPNPVAASFRDAVRRQISEEQLTINIVGILASDDPASITYADYTRAGCEDVGIHFDLRKCEPESVRATLEAANRDSAVHGIFVYYPIWGDKRDAELRDLISPHKDVEGLSPHWIKKLYANERFDDTERRFKSILPCTPLAIIKLLEVTEAYAPFGLPFGGQQITIFNRSEVVGRPLAYMLSNDGARVYSFDINGGFVVDVNSSDHESRPVTREEALSQSDIVITGVPSPHFEKVRAEELKPGAICLNFSYIQNFEPEAKEAASLYIPRVGPMTVAMCMRNALQLYHNYHHEV

SEQ ID NO: 22675 - protein, 476 aa, Zea mays
MERGILGSRGAVQILGSKTGAAMSCGKTTSTSFTCSTKHELNLHVNVKPLQLATDGSSRLAYKTPVLKNQWNLSASSSSANVVTTFDDDKGVPSSFAEEKIGVLLLNLGGPETLDDVQPFLFNLFADPDIIRLPRLFRFLQRPLAKLISTFRAPKSKEGYASIGGGSPLRKITDEQANALKIALEKKKLNANIYVGMRYWYPFTEEAIDQIKKDNISKLVVLPLYPQYSISTSGSSIRVLQNVVKEDSYFSGLPISIIESWYQRDGYVKSMADLIEKELSAFSNPEEVMIFFSAHGVPLTYVQDAGDPYRDQMEDCISLIMGELRSRGILNGHTLAYQSRVGPVQWLKPYTDEVLVELGQNGVKSLLAVPVSFVSEHIETLEEIDMEYKELALESGIENWGRVPALGCTSTFISDLADAVVEALPSASALGTRKPEDTGSSMDLMHYLTKMFFGSILAFILLLSPRLVSAFRNTML

SEQ ID NO: 22676 - protein, 296 aa, Arabidopsis thaliana
MEANSGGGGGAEGGRAVTGGGGGGGGSDVELVSKTLQVEHKLFYFDLKENPRGRYLKISEKTSATRSTIIVPSSGISWFLDLFNYYVNSEEHELFSKELQLDSKVFYFDIGENRRGRFLKVSEASVSRNRSTIIVPAGSSPDEGWAAFRNILAEIHEASGLFVMPNQVKPSDGQEHLVDDVGAGFIPGHGSQQPSSSEHNVDRTIDSPGQEETGMTGVSKVIRADQKRFFFDLGNNNRGHFLRISEVAGSDRSSIILPLSGLKQFHEVIGHFVEITKDKIEGMTGANVRTVDPPQR

SEQ ID NO: 22677 - protein, 122 aa, Arabidopsis thaliana
  misc_feature (55)..(55): Xaa can be any naturally occurring amino acid
  misc_feature (106)..(106): Xaa can be any naturally occurring amino acid
  misc_feature (108)..(108): Xaa can be any naturally occurring amino acid
RTHIISSSFLSSATILPSPRHSTMGAPFNKLNSSPAFPTTHKANNDITSITSNYXRVNCMHVWPPILKKKSETLSYLPDLTDSELANEVDYLILNKWIPCVEFYLXTXFVYREHCNSPLFYY

SEQ ID NO: 22678 - protein, 75 aa, Thermosynechococcus elongatus BP-1
MSNLEKQIEQAREEAHKICDTEGATSGQCAAAWDALEELQAEAAHQRAEQQDHKTSFQQYCDDNPDAAECRIYDD

SEQ ID NO: 22679 - protein, 186 aa, Agrobacterium tumefaciens str. C58
MSTATSKFLSYVLRHAPESIGLVLDSQGWADVADLLAKANASGTPLDEAGLRAVVAESDKKRFTLSEDGRRIRAAQGHSVKVDLGQPPVEPPPQLFHGTATRFLEPILREGLRPGERQQVHLSADRTTALAVGQRHGKPVVLIVDAGQMFADGCRFYLADNGVWLTDAVPFSYLTVSADSSAENDR

SEQ ID NO: 22680 - protein, 356 aa, Glycine max
  misc_feature (86)..(86): Xaa can be any naturally occurring amino acid
FPGRTQTSLSLSLSLSLSKTHKHNKHITISHCSQVSTLSSSTMAVGLSAAITMKSLLRFHQPHLNLPKSIPTTLPFSPMRIFHHTXLFRTQKVSTFTVCVLMQDPKQGTHMEIEPQEQPPPPPPPPAQQVLSPKLAEKLARKESERFTYLVAAVMSSFGITSMAVFAVYCRFSWQMEGGEVPWSEMFGTFALSVGAAVGMEFWARWAHRALWHASLWHMHESHHRPREGPFELNDVFAIINAVPAIALLSYGFFNKGLVPGLCFGAGLGITVFGMAYMFVHDGLVHKRFPVGPIANVPYLRRVASAHQLHHSEKFNGVPYGLFLGPKEIEEVGGLEELEKEISRRARSYKIANENN

SEQ ID NO: 22681 - protein, 523 aa, Kineococcus radiotolerans SRS30216
MRGPPGQPRDVGALGQHGTLVAADVLQGQPPGGGDVLGGLPGPDPGLDVARAQLRLHLDLQLTQAGAVAAHGSAQRLVDPQPVPAAVGRHEHDVLTVVVDPDEPQVLHEGRPPGCVWSTIIADALCHLRPRGACGRAWQENERVTDASPIDLPYDALLLLSFGGPEGPDDVMPFLENVTRGRGIPRERLEAVAEHYLHFGGRSPINDQNKELLAQLRVELDARGLAGLPLLWGNRNWEPYVTDVLREAHEAGARRVLTVFTSAYSSYSSCRQYREDLGKALQALAEEGRSLEVDKIRHYFNHPAFTDVNAQAVAAALEELPEPARAGARVVFVTHSVPDAMNDVSGPPAAGGGAYVRQHLDVAAEVARRAGERAGRELAWDLVYCSRSGPPTQPWLEPDVNDHLRELHAAGVPGVVVAPIGFVSDHMEVKFDLDTEAAETAEEIGLPFARAATVGAHAQFVAGLVDLVEERAAEARGGSPARPATGALGASHTVCPVDCCRNLRAQVPAATGEDYRAPAVARG

SEQ ID NO: 22682 - protein, 493 aa, Candidatus Pelagibacter ubique HTCC1002
MTIDYKKISKNLKFEGRAFINGKYVDAIDGEKFENINPATGETLCSVAKCNHKDVDLAVKVSRKAFNSGVWSRTSPEFRKDVLLKFAELLRQTGEENSVLECVDTGKLIGDCINEVANDAPMHFQWYGELIDKVFGKVGPTEPSLTSLIVKEPIGVVAGVVPWNFPLMMAVWKMAPALAAGCSVIIKPAEDTPLTAIRVAQIAKEAGIPDGVLNIVPGFGDVGEALGRHNDVDAVSFTGSTEVGGLFMKYSGESNLKTIGLEMGGKSPFIVLEDAKITDDLIDNAINSAFWNGGQNCSANMRQIIHSKVKDEFLDKVSKKVKALKAGDPLDPESNMGSMISKKHLATVDGYIQKGIDEGAKLLFGGVSSSDQKGFFAKPTLFDDLKENMTIAQEEIFGPVLGVLTINSDEEALKIASNSKYGLHASVFTQDIDRAFHMAKSLPCGTVSVNTFSEGDIKTPFGGYRQSGSLSRDQGTEALDQYLQTKTIWISHS

SEQ ID NO: 22683 - protein, 192 aa, Zea mays
MAATVMASMSPLASATPGARRAFPVRLLQASTLAPRRRALAVRAQSDDAEPKEEVASSSPSPSATPAPKSKAAATASPGLWDALAFSGPAPERINGRLAMVGFVSALAVEASRGGGLLSQAGSGSGLAWFAATAAVLSVASLVPLLRGDSAEARSGAVMSANAELWNGRFAMLGLVALAFTEYLTGAPFINA

SEQ ID NO: 22684 - protein, 362 aa, Bordetella parapertussis
MFLRLFKYLWPERYLPEIPAQDPFDENPPPCGPGRVGVLLVNLGTPDEPTRGAIRRYLGEFLSDPRVIEIPRYLWMPILHGLVLAMRPKKLAPRYAGIWMEEGSPLLVYSQRQAAGVRQGLAARGVHAEVELAMRYGKPSIPAAITALRERGCDHILAVPLYPQYAASTTATVVDAVTRHAGRLRDQPALRFVKRFHNDPAYVEAQAGRIAEFWQAHGRPQKLVMSFHGLPRYSIELGDPYYRDCLDTARLLRERLGLREDEVEVTFQSRFGSARWLEPYTEPTLAELARQGVTEVDVVCPGFVADCLETLEEISQECRDAFVAAGGRQFRYIPALNDCPPWIEGLTDLVERQLRGWPTGNP

SEQ ID NO: 22685 - protein, 675 aa, Zea mays
  misc_feature (113)..(113): Xaa can be any naturally occurring amino acid
  misc_feature (139)..(139): Xaa can be any naturally occurring amino acid
MPMSDSSLRALTVLFVLAALVSDVEGRHDRPVNCPHFSCGGFSNISYPFRRQGDPSGCGVQSYELLCTDTDATIRIGSGTYKVLSINSTYSHFWVVDANLDIQSSCPLPRWDXMLVGSISTHIVGGLSSAMIISILLLXYIYSGWAIFVNCSQPIENNDTDIFQIYEPVSCLSNSSFIYLVTDYWYDGHVPAGTLEPSCGYLAMTPLGGPGMPVPRNTSYPDVVKFMRSGFALRFPFSIGSYPTIRECLAENMRTFHKEPRNSTGIRQQILDILTFETLWFCFIEQLGSTNNRVKSVLINIIVRRIPFVLWGLKSAHVICRFVLMPLAVFVFLAYKYWKTRITIDAVEKFLRMHHMLVPMRYAYTNIIAITAHFRDKLGQGGYGTVYKGVLQPGEVNVAVKMLGNSARGGDEFISEVATIGKIHHVNIVRLIGFCSEENSRALIYEFMPRGSLDKYIFSSEKSFSWDKLNEIALGIARGLNYLHHGCDMQIVHFDIKPHNILLDSNFVPKVADFGLAKLFPRGDSFVPLSAMRGTIGYIAPEMVSRSFGVISSKSDVYSFGMLLLEMTGGRRNADPHAGSSSQAYYPSFVYRQLSQGDANMISEGVDMHELEKKLCIIGLWCIQMKPQDRPTMSEVVEMLEAGVDGIQLPPRPYFCDEEGDSSYSTISELDTIEE

SEQ ID NO: 22686 - protein, 509 aa, Gibberella zeae PH-1
MSNPLADGGIPTLNGVYPSESNEKVTTIPNPENDQPAASDQPQLQDMINGNNGQERPQMPDRDFDSSISTSNADFDDLMLSTNGMSNDKPNGVHNGHANNSAKSYAEVAAEGEENDGKSQDTDDLDKSYADVVANRDAKDSRGDDGWTYPKLPITAQPKDLKSASWRAGGIRFAPLRVPMRRRSQTAAVLFHCMSIATLVSAFWLICANPLAWPIIIPYLIHLALSTAGTNGNLTYRSEWVRSLKLWKLFAGYFPMKLHKTHDLPTDRKYIFGYHPHGIISHGAFAAFGTNALGFRELFPGITNTLLTLDSNFRLPFYRDYIMLLGLQSVSKESIWNLLSKGGPNNDGQGRAVTIVVGGARESLEAQPGSLRLILKSRKGFVKMALRTGADLVPVIGFGENDLYDQLSPKTHPIVHRIQMILLKVFKFTVPALHGRGVLNYDVGLMPYRRPVNIVMGRPIRVDKAHGPQPAQKDIDELHERYVQEVEKLWETYKDQFSVERKTEMEIIA

SEQ ID NO: 22687 - protein, 516 aa, Vicia faba
MPAAGIPIGAGNKEYPGNLTPFVTITCVVAAMGGLIFGYDIGISGGVTSMNPFLEKFFPAVYRKKNAQHSKNQYCQYDSETLTLFTSSLYLAALLSSVVASTITRRFGRKLSMLFGGLLFLVGALINGLAQNVAMLIVGRILLGFGIGFANQSVPLYLSEMAPYKYRGALNIGFQLSITIGILVANILNYFFAKIKGGWGWRLSLGGAMVPALIITIGSLILPDTPNSMIERGDRDGAKAQLKRIRGVEDVDEEFNDLVAASETSMQVENPWRNLLQRKYRPQLTMAVLIPFFQQFTGINVIMFYAPVLFNSIGFKDDASLMSAVITGVVNVVATCVSIYGVDKWGRRALFLEGGVQMLICQVAVAVSIAAKFGTSGEPGDLPKWYAIVVVLFICIYVAGFAWSWGPLGWLVPSEIFPLEIRSAAQSVNVSVNMLFTFLVAQIFLTMLCHMKFGLFLFFAFFVVVMTIYIYTMLPETKGIPIEEMDRVWKSHPYWSRFVEHDDNGVEMAKGGVKNV

SEQ ID NO: 22688 - protein, 502 aa, Atriplex hortensis
MAFPIPARQLFIDGEWREPLLKNRIPIINPSTEEIIGDIPAATAEDVEVAVVAARKAFKRNKGRDWAALWSHRAKYLRAIAAKITEKKDHFVKLETLDSGKPRDEAVLDIDDVATCFEYFEYFAGQAEALDAKQKAPVTLPMERFKSHVLRQPIGVVGLISPWNYPLLMDTWKIAPALAAGCTTVLKPSELASVTCLEFGEVCNEVGLPPGVLNILTGLGPDAGAPIVSHPDIDKVAFTGSSATGSKIMASAAQLVKPVTLELGGKSPVIMFEDIDIETAVEWTLFGVFWTNGQICSATSRLLVHESIAAEFVDRMVKWTKNIKISDPFEEGCRLGPVISKGQYDKIMKFISTAKSEGATILCGGSRPEHLKKGYYIEPTIITDITTSMQIWKEEVFGPVICVKTFKTEDEAIELANDTEYGLAGAVFSKDLERCERVTKALEVGAVWVNCSQPCFVHAPWGGVKRSGFGRELGEWGIENYLNIKQVTSDISDEPWGWYKSP

SEQ ID NO: 22689 - protein, 498 aa, Anabaena variabilis ATCC 29413
MKTPLNCQNYINGQWLNAATETTLNSHNPANKSEIVATFPRSQADDTDRAVTAARQAYGSWRKVPAPARAEYIFRVGELLLQHKEELAQLISREMGKPITEARGDVQEGVDCAFYSAGEGRRLFGQTTPSEMPNKFAMTVRMPIGVCALITPWNFPVAIPCWKAMPALVCGNTVILKPAEDTPACATKLIEIFAAAGLPPGVINLVHGVGEEAGKALVEHPNIDLVSFTGSSATGAYVGETCGRTHKRVCLEMGGKNAQVVMEDADLELALDGALWGAFGTTGQRCTATSRLILHRDIKEKFTTMLRERTSQLRLGAGTEPETDIGPIINNRQLQRVHEYMNIAREEGAKILIGGEIVTEGQLKQGYFFQPTILDNVTPQMRVAREEIFGPVVALIEVSTFEEAIAILNDTKYGLSSSVYTRDINRAFVAMRDIEVGITYINGPTIGAEVHLPFGGVKQTGNGHREAGTTALDVFTEWKSVYVDFSGSLQRAQIDNRS

SEQ ID NO: 22690 - protein, 666 aa, Magnetospirillum magnetotacticum MS-1
  misc_feature (628)..(628): Xaa can be any naturally occurring amino acid
  misc_feature (631)..(631): Xaa can be any naturally occurring amino acid
MSVVPIRVLLLEDDPADARLVGQMLRRVKTTPFEVTVAGRLAQALERLSDETQHFDVVLADLGVPDSSGIGTLNALTQAAPRLPVVVLTGNDDDTIALEALKRGAQDYLVKGLGDAFILSRVVRYAIERKMGEEVLREARDSAEQAARAKSVFLAMMGHEIRTPLNGVLGMARLLLETDLDPRQKSFTETLVSSGELLLGLVNDILDFSRLDAEGMTLAVEPFDVLDTVEEVRLVLTSRVAEKDLTLTTRFGTGVRRVVAGDRLRLRQILFNLVGNAIKFTDHGGIEISVEPLAVERGQVLRFLIKDTGIGIGPEIGARLFTEFWQGDSGAARRFDGAGLGLAICKRLTDLMGGEIGYDSLPGQGTTFRVDLPLPPSEAPSAEPGKGVERPCRVLLVDDNEVNREVAAGLLERRGHQVVCARDGLEGVAAAARGGFDLILLDMRMPGMDGIETARAIRALPGAAAKVPIYLLTANPVKEDEARWREAGILGCLAKPFRFEHIGRLLAGLGEENRPPASPDPDLVEVAGLLSDLGDLGRDRMVGLVELFRSSSSADLAALRTHAKAGRLAEAGQLAHRMASAASSLHLGPLAAKCRAVEDATRADDPRTDAQAEELADLWTRSLAAVGXGFXGIFRPLTICPRYVTLRGHVTWASALGGPLCSIRPS

SEQ ID NO: 22691 - protein, 112 aa, Frankia sp. EAN1pec
MKLVTAIVRPHRVDDVRAALTTYGVHGITVSQVTGFGLEMWRTQTYRGNAFHDESTSNIRLELVVADSDAPDVVNVIRRTAASTSSGAGKIWVLPVEGLARIRTGERGADAL

SEQ ID NO: 22692 - protein, 267 aa, Humulus lupulus
MADANMGAGGGQFPDFPSVLTHGGQYVQFDIFGNFFEITTKYRPPIMPIGRGAYGIVCSVLNTELNEMVAVKKIANAFDIYMDAKRTLREIKLLRHLDHENVIGLRDVIPPPLRREFSDVYIATELMDTDLHQIIRSNQGLSEDHCQYFMYQLLRGLKYIHSANVLHRDLKPSNLLLNANCDLKICDFGLARPNIENENMTEYVVTRWYRAPELLLNSSDYTAAIDVWSVGCIFMELMNRKPLFAGKDHVHQIRLLTELLGTPTESN

SEQ ID NO: 22693 - protein, 644 aa, Oryza sativa
MAAAARDALLDELRALMAAHSPPLHALVVPSEDAHQSEYVSERDKRRQFVSGFTGSAGLALITMKEALLWTDGRYFLQAEQQLSDRWKLMRMGEDPPVEVWIADNLSDEAVVGINPWCISVDTAQRYEHAFSKKHQTLFQLSSDLIDEIWKDRPSAEALPVFVQPVEYAGRTVTEKLKELREKLLHEKARGIIIAALDEVAWLYNIRGDDVHYSPVVHSYSIVTLHSAFFYVDKRKVSVEVQNYMTENGIDIKDYNMVQSDASLLASGQLKGSAVNGSSYGENDMNENSKVWIDSNSCCLALYSKLDQDQVLMLQSPIALPKAVKNPVELDGLRKAHIRDGAAVVQYLAWLDNQMQENYGASGYFSEAKGSQKKEHMEVKLTEVSVSDKLEGFRAAKEHFKGPSFPMISSVGPNAAVIHYSPEASSCAELDADKIYLFDSGAQYLDGTTDITRTVHFGKPSEHEKSCYTAVLKGHIALDTAVFPNGTTGHALDILARTPLWKSGLDYRHGTGHGVGSYLTVHEGPHQISFRPSARNVPLQASMTVTDEPGYYEDGSFGIRLENVLIVQDANTKFNFGDKGYLAFEHITWAPYQTKLIDATLLAPAEIEWVNTYHSDCRRILQPYLNEQEKEWLRKATEPITVSC

SEQ ID NO: 22694 - protein, 479 aa, Streptococcus agalactiae A909
MNLPTEIRYRPYDEWTEEDKENIVKNVSKSPWRATYHLEAKTGLLNDPNGFSYFNGKFHLFYQNWPFGAAHGLKQWVHTESDDLVHFKETGIKLKPDHVNDSHGAYSGSALAIDDKLFLFYTGNVRDMKWNRDPRQIGAWMTNDGKITKFDKVLISQPNDVTEHFRDPQIFNYDNQFYAVIGAQNSKKCGFIKLYKALNNDIHHWEFVGDLDFGGTGSEYMIECPNIIFVKGKPVLLYSPQGLDKNELDYQNIYPNTYKIGQYFDANSSKIVEPSPIYNLDYGFEAYATQGFNTSDGRAFIVSWIGLPDIDYPSDQFDYQGAMSLVKELSIKNGNLYQYPVPAMKNLRQHQAEFKTQLQTNNTYELELLVPRNDLSSFVLFANPKGQGLSITIDTVKGKVIIDRSQAGQQYATEFGTSRQCDIPKDATSINIFIDKSIFEIFINKGEKVFTGRVFPDAEQSGIQLKEGHVHGKYFELKY

SEQ ID NO: 22695 - protein, 251 aa, Propionibacterium freudenreichii subsp. shermanii
MHMTSKLILLRHGESEWNAKNLFTGWVDVDLNEKGVREASHGGELLAQEGLLPDIVHTSLLRRAIHTSYLALDKADRLWIPVKRSWRLNERHYGALQGLNKSEIRDQYGEEQFMAWRRSYDVPPPAIEPDSKFSQFNDPRYADIPADERPLHECLKDVVERMLPYWESSIVPDLKAGKTVLVAAHGNSLRALVKHLDNIDDQTISGLNIPTGIPLFYELDDDMKPLVPGGRYLDPEAAAAGQKAVASQGKK

SEQ ID NO: 22696 - protein, 440 aa, Candidatus Kuenenia stuttgartiensis
MDMREKSVMKEHRGLARELNFFDVVCMGFNCVVGAGIFLLAGQLDSLVGIGALLVFPLCGLLCFAVALCFAEIGSMYDKTGGAYLYTKDVFGPFAGFLVGWIMWLASIIGWASVASGFGLYCNYFLPKDQQWLSKVIITALVIGLSITNYCGVKPGARSINFFSIGKFTALFIFIVAGMFFVKRENFGQLHSSGSFSMATTLALYAYTGFEFLVVPAGEMKNPQKHIPRVIMVVFMMVTALYALIQYVAMGTYPDLAGSDKPLADAAFYFLGPAGGIIIGIGALLSIGGVNAGIALTSPRSLYVLSADGFFPPVFAKIHPKYHTPYLAIAVNTVLTLLLGLTGSFRYLIAASVLVSILQYVPTCLAVIALRRKRPDRKRGYKIPGGYGIPVLALIICGWLLCHVELKIIGATALAIAVSLPFYFRGRFFRKNPCPYKKQP

SEQ ID NO: 22697 - protein, 637 aa, Debaryomyces hansenii CBS767
MLKANNFNTRIAKTTKLGKIQIRSNSNGVNNSNSSIHTHTIKTPVGIKAAIASLKPKTTRLSIEGPIECDLQGFALLNAPGFNKGSAFSKEERQAFGLEGLLPSRINSLDEQVERAYRQFSYLKTPLAKNDFCTSMRIQNKVLYYELVRRHIREMIPIIYTPTEGDAIAAYSHRFRKPEGCFLDITEPDMIDKRLSAFGEDKDIDYIVVSDGEGILGIGDQGVGGVRIAIAKLGLMTLCGGVHPGRVLPIVLDVGTNNQELLHDELYMGNKFPRVRGKEYWDFIDKFINAVKQRFPNAVLHYEDFGVSTGRKMLQKYRESLPSFNDDIQGTGAVVMASMTAALQFSDRNLLDSKVLIYGAGSAGLGIADQIVNHMVSHGATEEQAVASIHCMDRRGLLLKSFDEMSDAQTKYADVDSEWEGVDTRNLVEVIRHVKPTVLVGCSTQAGAFTEQVIKEMYNHNKQPIVFPLSNPTRLHEAFPIDIMKWTDNKALIATGSPFEPVNGFAISENNNCFTFPGIGLGAVLSRCTTISDTMVSAAVDQLALLSPKMENPKNGLLPRLEQIDEVSAKVATAVILQSLKEGTARVESEEKPDGGFVEVPKDFNKCLKWVQSQMWKPIYRPLVKVKHVPEVHTYQH

SEQ ID NO: 22698 - protein, 132 aa, Synechococcus sp. WH 8102
MRMLHTMLRVGDLDRSIAFYTDVLGMKLLRRKEYPSGRFTLAFLGYGPESEQTVLELTHNWDTSSYELGDAYGHIALGVEDIRSTCAAISGKGGRVVREPGPMKHGSTVIAFVEDPDGYKVELIEMSSRAAA

SEQ ID NO: 22699 - protein, 496 aa, Arabidopsis thaliana
MAGTGLFAEILDGEVYKYYADGEWKTSSSGKSVAIMNPATRKTQYKVQACTQEEVNAVMELAKSAQKSWAKTPLWKRAELLHKAAAILKDNKAPMAESLVKEIAKPAKDSVTEVVRSGDLISYCAEEGVRILGEGKFLLSDSFPGNDRTKYCLTSKIPLGVVLAIPPFNYPVNLAVSKIAPALIAGNSLVLKPPTQGAVSCLHMVHCFHLAGFPKGLISCITGKGSEIGDFLTMHPAVNCISFTGGDTGISISKKAGMIPLQMELGGKDACIVLDDADLDLVASNIIKGGFSYSGQRCTAVKVVLVMESVADELVEKVKAKVAKLTVGPPEENSDITAVVSESSANFIEGLVMDAKEKGATFCQEYKREGNLIWPLLLDNVRPDMRIAWEEPFGPVVPVLRINSVEEGINHCNASNFGLQGCVFTKDINKAILISDAMETGTVQINSAPARGPDHFPFQGLKDSGIGSQGVTNSINLMTKVKTTVINLPTPSYSMG

SEQ ID NO: 22700 - protein, 499 aa, Caulobacter crescentus CB15
MRDIPHFIGGQKVDGASGRFGEVFDPNTGKVQARVALASAGELNTAIANAKVAQAAWAATNPQRRARVMFEFKRLLEVHMDELAALLSSEHGKVIADSKGDIQRGLEVIEFACGVPHLLKGEYTQGAGPGIDVYSMRQPLGVVAGITPFNFPAMIPMWMFGPAIATGNAFILKPSERDPSVPVRLAELMIEAGLPPGVLNVVHGDKDCVEAILDHPDIKAVSFVGSSDIAQSVFQRAGAAGKRVQAMGGAKNHGLVMPDADLDQAVADIIGAAYGSAGERCMALPVVVPVGEKTATALREKLVAAIGGLRVGVSTDPDAHYGPVVSAAHKARIESYIQMGVDEGAELVVDGRGFSLQGHEEGFFVGPTLFDHVKPTSRSYHDEIFGPVLQMVRAESLEEGIALASRHQYGNGVAIFTRNGDAAREFADQVEVGMVGINVPIPVPVAYHSFGGWKRSGFGDLNQYGMDGVRFYTRTKTVTQRWPKGGAVLDQSFVIPTMR

SEQ ID NO: 22701 - protein, 475 aa, Ustilago maydis 521
MGKKDKSTKAAAPAVNAKKASKKDKKAAPAANVVEPKANGVDKKAKYNNKKGKKEATKKEPTPEPEPESESESESESSDDSSDSDNDKSKSSSDSSSDSDSSDSSDDEQVETKAAPAAKTNGKPAAAPVAEASSSSDSSDDSSDSDSSSESDSDSDSSDSSDDDEDEKPAAAADSKKRKAEDEAPSAKKVKTEDGTAAAAAAAPAELAEGETNQIWVGQLSWNVDNDWLKSEMEVFGEVTSARVQLDRTSGKSRGFGYVDFATAAAAKKAFDEGQGKEVDGRAIRIDLSTPKGDVTENRAKKFNDQRSAPSSTLFIGNLSFDVSEDDVWNAFSEHGEVSGVRLPKDPDSGRPKGFGYVEFAAQESAQAAIDAMTGQELAGRPLRLDFSTPRDRDGGAGGRGGGRGGGFGGGRGGGRGGGFGGGRGGGRGGGRGGRGGSDGSFRGMPRGGGWGARGGSARTGGAADFSGKKMTFDD

SEQ ID NO: 22702 - protein, 538 aa, Thermotoga maritima
MSIKVYDTTLRDGAQAFGVSFSLEDKIRIAEALDDLGVHYLEGGWPGSNPKDIAFFEAVKGMNFKNLKVAAFSSTRRPDVKIEEDANIQTLIKAETPVYTIFGKSWDLHVEKALRTTLEENLKMIYDTVSYLKRFADEVIYDAEHFFDGYKANREYALKTLKVAEEAGADCLVLADTNGGTLPHEIEEIIEDVKKHVKAPLGIHAHNDSDVAVANTLAAVRKGAVHVQGTINGLGERCGNANLCSVIPNLVLKMGLEVIPKENLKKLFDVAHLVAELSGRPHIENMPYVGDYAFAHKGGVHVSAIKRDPRTYEHIDPELVGNRRIISISELSGKSNVLEKIKEMGFEIDESSPKVREILKKIKELEAQGYHFEGAEASFELLVRDMLGKRKKYFEFLGFTVMTIKNRDEESFSEATVKVRVPDEVAKRLGHDEPFEHTAAEGEGPVEALDRAVRKALEKFYPSLKDTKLTDYKVRILNEQAGTKATTRVLIESSDGKRRWGTVGVSPNIIEASWTALLESLEYKLHKDEEEMRNDEEN

SEQ ID NO: 22703 - protein, 220 aa, Bacteroides fragilis NCTC 9343
MLFDMDGVLFDSMPYHAEAWHKTMKAHGLNLSREEAYMHEGRTGAGTINIVCQRQLGRDATQEEIESIYLEKSIEFNKHPQAERMPGAWELLQKIKAEGIIPTVVTGSGQASLLDRLEHNFPGMFRQELMVTAFDVKYGKPNPEPYLMALEKGGLKPNEAIVIENAPLGVEAGHKAGIFTIAVNTGPLNGEILLNAGADLLFPSMQALCESWEKLVRLLH

SEQ ID NO: 22704 - protein, 141 aa, Arabidopsis thaliana
  misc_feature (126)..(126): Xaa can be any naturally occurring amino acid
GAHARERRRETQEGAGLPLFLSSAAAVTSPAQATMGAPFTGLKASAALPVTRKTNKDITSIERNGGRVSCMKVWPPIGKKKGETLCYLPDLNDVQLAKEADYLVRNKWSACVECELKHRVVYRERXYTPRYYDGRDWTMWK

SEQ ID NO: 22705 - protein, 547 aa, Prosthecochloris aestuarii DSM 271
MSVSPHAGKLPDDCMLVNVAHLVTAYFAMKPDPSVSNQRVSFGTSGHRGSSFSCSFNEAHVLAIAQAICDYRSMKGIDGPLFLGMDTHALSEPAMTSALEVLAANGVDVMISADEPWTPTPVVSHAILGWNRSRSRGLSDGILITPSHNPPEDGGFKYNPPHGGPAGADETSWIEKRANLILETKLADVRRVSYASALGAATTHRYDYMEPYIGSLGEIIDLEAVSRSGLRLGVDPLGGAGVHYWKAIQERYSIDLTVLNETVDPTFRFMSVDRDGKIRMDPSSSWAMQPLVNRKDEFDIAFACDTDYDRHGIVTRGRGLMQPNHFLSAAVSYLFEHRELWGGGVGIGKTVVTSSMINRVAEKLGRDVYEVPVGFKWFVDGLLAGTLGFAGEESAGASFLRRDGSVWSTDKDGFIAALLSAEMTAITGRDPSELYRDLTNDLGEPHYARIDAPASAEEKVRLKQLSASDIGQKELAGETILHMMTDAPGNGQPIGGLKIETRNGWFAARPSGTEDVYKIYAESFLGPQHLARLQEEARDIVAAALCR

SEQ ID NO: 22706 - protein, 376 aa, Thermus thermophilus HB27
MREWKIIDSTLREGEQFEKANFSTQDKVEIAKALDEFGIEYIEVTTPVASPQSRKDAEVLASLGLKAKVVTHIQCRLDAAKVAVETGVQGIDLLFGTSKYLRAAHGRDIPRIIEEAKEVIAYIREAAPHVEVRFSAEDTFRSEEQDLLAVYEAVAPYVDRVGLADTVGVATPRQVYALVREVRRVVGPRVDIEFHGHNDTGCAIANAYEAIEAGATHVDTTILGIGERNGITPLGGFLARMYTLQPEYVRRKYKLEMLPELDRMVARMVGVEIPFNNYITGETAFSHKAGMHLKAIYINPEAYEPYPPEVFGVKRKLIIASRLTGRHAIKARAEELGLHYGEEELHRVTQHIKALADRGQLTLEELDRILREWITA

SEQ ID NO: 22707 - protein, 493 aa, Shewanella sp. ANA-3
MSDNQTPAAKHALMWFRQDLRLTDNQALTAACDWVRQAPGAKLRAIYIATPNQWLSHDMAPIQIDFIQRHVNLLAQGLASLGIEFELIQLDSFKEVPAFLASYCEKLGVERVFAGREPEINEQKRDQACLDTGIPLVLSDEHCLLPPGTVLNLSGDMYKVFTPFSRKWREIAAKRAIFPLAVPAPLGPMLPEPKPISFKERFQSTSKLTSSEQWAAGEGQAKRILTAFIKQKVQDYKQDRDFPALDGTSVISPYLALGVLSPRQCIAALLGRFPDVIVDDTSPGRTWLNELIWREFYRHLLVAFPDLSKGHNFNRQADHVQWRNNQAEFLAWCEGKTGYPIVDAAMRQLNQTGWMHNRLRMVVASFLTKHLLIDWRWGERYFRQHLIDGDLAANNGGWQWSAGCGCDAQPYFRIFNPISQSEKFDPDGSFIRKYLPELASWGIKRLHQPNMQKTPSLFEAPMLESDSAYPCAIVEHNAARARALAVLGVLKKA

SEQ ID NO: 22708 - protein, 227 aa, Triticum aestivum
PPACIGLTIKFIGTVACSSCLFFECRKQKDLYLWMVKSPAGPSVKFLVNAVHTMEELKLTGNHLKGSRPLLTFSSNFEQQPHWKLLKEMITQIFATPKDHRKAKPFHDHVFVFSIVDDHIWFRNYQISVPHNEIDKVDKGGLDKMTLVEVGPRFCLNPIKIFGGSFGGPTLYENPFYVSPNQIRALEKRKKAGKYAKKVKAKVRRKMHEMENTLEPDEFADLWKGED

SEQ ID NO: 22709 - protein, 322 aa, Zea mays
MAKKRKRTDAPAEATGAEKPDDSAPARPERTLFGFKDPVPDAEPASAGAEAAVAPFRNREKVLITCSRRITYRYRHLMQDVLSLLPHAKKDSKVESKQSKGNALNELLELRSCSSCLFFECRKQKDLYLWMVKSPGGPSVKFLVNAVHTMEELKLTGNHLKGSRPLLTFSTNFDEQPHWKLVKEMITQIFASPKDHRKAKPFHDHVFVFSIVDGHVWFRNYQISVPHNEIDKVDKGGLDKMTLIEVGPRFCLNPIKIFGGSFGGPTWYENPYYISPNQIRALEKRQKAGKYAKKVKAKVRRKMHEMENTLEPDEFAELWKGE

SEQ ID NO: 22710 - protein, 325 aa, Thermus thermophilus HB27
MEFNLSALGSTPAAEETYDVVIIGGGPAGLTAGIYAGRAQLKTVIVEKGLPGGQIAQTDEVENYPGFPEGISGPELASRMVRQAEKFGARIVMDEVLGLEKAEGGYLVRGYERNYRARAVIVATGANPRRLGVPGEDKFYGRGVSTCATCDGFFYRDKEVVVVGGGDAAVEEGIFLTKFARKVTLVHRRDELRANKVAQKRAFQNPKMHFLFSHVVTEILGEDQVTGVRLKNLKTGEEYVYPTDGVFVFIGHEPNTAFLKGVVELRPDGYIAVRDEVFTSEPGIFAAGDVADPIYRQLTTSVGAGTRAAMMAERYLAEEAEKVKG

SEQ ID NO: 22711 - protein, 253 aa, Triticum aestivum
  misc_feature (154)..(154): Xaa can be any naturally occurring amino acid
MSPPPQPQQKDKAEHEVPRATVASAVASLTKWMRERAPEAPPNLLADERDDLVVLQLSLRRVPPKPTTKPHLLPLPHPVVAHSAASVCVISDDRAGSGSPAAAAILDAARSLKLPVSEVVPFSALRTDYRPYESRRRFAASYDLFLADRALLPXLPRLLGKSFYSTKKAPIAVDFTRAGWPEQVRKVLSSTFLYLRTGTCSGIKVGRLDMEEEEIVDNVMAAVEAAVEKVPKKWENVRALHLKAVDSVALPIY

SEQ ID NO: 22712 - protein, 379 aa, Mycobacterium tuberculosis H37Rv
MTPPHNYLAVIKVVGIGGGGVNAVNRMIEQGLKGVEFIAINTDAQALLMSDADVKLDVGRDSTRGLGAGADPEVGRKAAEDAKDEIEELLRGADMVFVTAGEGGGTGTGGAPVVASIARKLGALTVGVVTRPFSFEGKRRSNQAENGIAALRESCDTLIVIPNDRLLQMGDAAVSLMDAFRSADEVLLNGVQGITDLITTPGLINVDFADVKGIMSGAGTALMGIGSARGEGRSLKAAEIAINSPLLEASMEGAQGVLMSIAGGSDLGLFEINEAASLVQDAAHPDANIIFGTVIDDSLGDEVRVTVIAAGFDVSGPGRKPVMGETGGAHRIESAKAGKLTSTLFEPVDAVSVPLHTNGATLSIGGDDDDVDVPPFMRR

SEQ ID NO: 22713 - protein, 599 aa, Thermosynechococcus elongatus BP-1
MGLIVQKYGGTSVGSVERIQAVARRVKATVAAGHQVVVVVSAMGKTTDSLVQLAYAISDRPSQREMDMLLSTGEQVSIALLTMALHALGEPAISLTGAQVGIVTEPAHTRARILHIETQRLERHLKAGQVVVVAGFQGITAATDFEVTTLGRGGSDTSAVALAAALRADCCEIYTDVPGILTADPRLVPNAQLMSEITCDEMLELASLGAKVLHPRAVEIARNYGVDLVVRSSWTDDPGTRVIAPARPPRPVENLELGKPVDGVALDTDQAKVALLRVADRPGVAAQLFGELARQNLDVDLIIQSIHEGQTNDIAFTVQKSVLKQAEAIAVAFYPRLSPRVEETDVLVDADIAKVSITGAGMIGRPGVAAQMFSALAAAGINLQMISTSEVNVSCTVAAADAGRAIAVLSQTFDVEAATTVPQNPPAAPPVRGVALDPKQARIAIRDVPDRPGMAAAIFQTLADAAISVDMIIQSQRSRSLGGVMTRDIAFTVASTDAEDATELLRKVQAQLGYGDVLVDTAIAKVSIVGVGMIHRPGIAAQMFAALARENINIQMIATSEIRVSCVVAESEGVRALRAVHRAFGLDGEAPVAIPDVGK

SEQ ID NO: 22714 - protein, 430 aa, Mesorhizobium loti MAFF303099
MGVEVSRLSNGLTVATETLPSIESVALGAWVKSGARNERDEEHGMAHLLEHMAFKGTKRRTAFEIASEIEDVGGEINAATSVETTSYYARVLSDDVPLAVDILADILQESEFDPQELEREQHVILQEIGAAHDTPDDIVFDRFTETAFRHQTIGRSILGTPDTVKSFTSKQLHDFIERQYGAERMVIVAAGDIKHDNFVREVEKQLGGFRSKADSTIPQYAQYVGGDFREDRDLMDAQIVLGFEGRAYHVRDFYASQVLSMILGGGMSSRLFQEVREKRGLCYSVYAFHWGFSDTGIFGVHAATGQSDIAELVPVIIDELQKAGENILQEELDRARAQYRAGLIMSAESPASRASQIARQLLLFGRPIAKEELMERLSALTVERLTDLSSRMFSTKPTLTAVGPVGTLAPYEAILDSLPGTQTTARRLAV

SEQ ID NO: 22715 - protein, 526 aa, Malus x domestica
MADRRAEENAVTGGPQNTSIEDFDPPMKPKTSKFAIACALLACTTSVLLGYDIGVMSGASLYIQKNLKISDVQVEVLAGTLNIYSLLGSAFAGRTSDWIGRKYTIVLAGVIFLVGALLMGFATNYAFLMVGRFVAGVGVGYGMMIAPVYTAEISPASFRGFLTSFPEVFVNVGILLGYIANYAFSKLPLHLGWRFMLGVGGVPAIFLTVGVLFMPESPRWLVMQGRLGDAKKVLQRTSESKEECQLRLDDIKEAAGIPPHLNDDIVQVTKSSHGEGVWKELILHPTPAVRHILIAAVGIHFFEQASGIDTVVLYSPRIFAKAGITSSNHKLLATVAVGFTKTVFILVATFFLDKFGRRPLLLTSVGGMVFSLMFLGVGLTIVDHHKGSVPWAIGLCMAMVYFNVAFFSIGLGPITWVYSSEIFPLKLRAQGVSIGVACNRVTSGVVSMTFISLYKAITIGGAFFLYAGISAAAWIFFYTMLPETQGRTLEDTEVLFGKYHRWRKANAMLKERKQVDGDDNNNAQVF

SEQ ID NO: 22716 - protein, 758 aa, Desulfitobacterium hafniense DCB-2
MEFSRRNFLKTCAISAAMMTVGCTSQTKTIQVDPPEPAPSAPKQIDVDQWVKSVCRYCGTGCGVLIGVKDGKVAAVKGDPDNEGNKGLLCAKGYYLPQVITHSERVTKPLIRKNGKLEPCTWDEAMELVTAKFKESIANNGPDSVAFYGSGQQLAEEGYVANKLFKGAIGTNNIDGNPRLCMASAVGGFTTTFGADEPMGCLEDFEHANVFFIIGSNIAEAHPVLFGRLTDKKKKDPDTKIIIADPRRHRSHEIADISLQFVPGTDMALLHAMAYVIIEEGMADEEFIAKHTSFSNGKEAITFAAYKEFLKEFTPEKAEKVTGLPAAQIQEVARLFGEKGKNTMSMWTMGINQRVAGVWANNLIHNLHLLTGKICKPGSTPFSLTGQPSACGSVRETGALSHLLPGHRVIANEKHRKEVAELWGVPADRISPQAGLHTMELFKACGDGRVKCLYVMCTNPAHSLPNVNAYQEGFEKVFLVVAEAFHPTATTKYADVVLPAAFWCEKEGVYGNTDRRTQHLAKAINPPGEAKPDLDILLDLAQRLGYGELFPFKTPEDVWNEYLKCTTGTHMELATYPALREAHGIQWPVKDHQGNKGAVRRYVAPEDPYVKEGIDFYSAKDHKAVIFARPYLGPAEVVDEEYPYYLTTGRILEHWHTLTMTGKCPTLMRAVPKQYVELNPQDAAELGIKEGDTVRLVSRRGKVEIPVRVGKPGEPRPGLLFALWFEPDPLVNAVTIDAVDAASKEPEFKICAVKIEKV

SEQ ID NO: 22717 - protein, 252 aa, Bordetella bronchiseptica RB50
MMDFDNLDVSVEDGICQVTLNRPEKFNAMSLALRKQMTACLQRIAGDTAIRVVVLTGAGRAFCAGGDISEFECSSEELNDLITRVSHQWFRAFANLPQPVIAAVNGPAAGAGCSLALGSDLIYASESAYFTQSFSAIGLAPDQGSAYHLPRRVGLARAKEMCFFADRVSAPQALEWGMINGVFPADALMDAVRGKARALSLKSPQALQMIKRMLNRSFESTLEATLDMEAAAQSFLFSTEGTRQAIGAFLKK

SEQ ID NO: 22718 - protein, 435 aa, Staphylococcus aureus subsp. aureus Mu50
MTTDILNISEEQLVDYSKAHNEPSWMTELRKKALKLTETLEMPKPDKTKLRKWDFDSFKQHDVKGDVYQSLSQLPESVREIIDVDHSKNLVIQHNNTIAYTQVDDNASKDGVIVEGLADALMNHSDLVQKHFMKDAVTVDEHRITALHTALVNGGVFVYVPKNVVVEHPVQYVVLHDDKNASFYNHVIIVTEESAEVTYVENYLSNASGEGNQLNIISEVIAGANSNITYGSVDYMDKGFTGHIIRRGITEADASINWALGLMNEGSQIIDNTTNLFGDRSTSSLKSVVVGTGEQKINLTSKIVQYGKETDGYILKHGVMKEHASSVFNGIGYIKHGGTKSIANQESRVLMLSEHARGDANPILLIDEDDVQAGHAASVGRVDPDQLYYLMSRGISQREAERLVIHGFLDPVVRELPIEDVKRQLREVIERKVSK

SEQ ID NO: 22719 - protein, 517 aa, Arabidopsis thaliana
MGVVSISSSAARSPLGLGNDLLTHRSSLKKPSIVAFKADDSSNSALIIPPREQVLIPAEKHNEKKREVTRRKPCKTPKKPLSLEHNSAPSCSLGVDYNEAAARLESIYKLSPATTTLVEDDVEDGGSKAKVSRRRKRKESGEEKKVVVRNNVKKEKRMSLDKRIALKRNVQEKPVVASVDKKVTKRQQEEEKIERLVRDYSASNDIVSLDWKKMKIPPVLSSTEHAWLFKLMQPMKALLEVKDVLQKSLGREPREAEIAGEINMTAGEVKKKIEIGRAARNKLIKHNLRLVLFVMNKYFHEFTNGPKFQDLCQAGMRGLITAIDRFEPKRKFRLSTYGLFWIRHAIIRSMTTSNFTRVPFGLESVRVEIYKAKTELWFEMGRPPTEDEVVERLKITPERYREVLRAAKPVLSLNSKHSVTQEEFINGITDVDGVGANNSRQPALLRLALDDVLDSLKPKESLVIRQRYGLDGKGDRTLGEIAGNLNISREMVRKHEVKALMKLKHQARVDYLRQYIV

SEQ ID NO: 22720 - protein, 491 aa, Malus x domestica
MTSILLGYDIGVMSGAAIYIEKDLKVTDTQIEILLGILNLYSLIGSAMAGRTSDWVGRRYTIVISGAIFFTGAILMGLSTNYTFLMCGRFVAGLGVGYALTIAPVYAAEVSPASSRGFLTSFPEVFVNVGILLGYISNYAFSFCALDVGWRLMLGVGAIPSVILAIGVLAMPESPRWLVMQGRLGDARQVLDKTSDSKEESMLRLADIKEAAGIPEDCNDDIVQVTGHSHGEGVWKELFVHPTPTVLHIVIAALGFHFFQQASGIDALVLYSPRVFEKAGITNSNQLLLCTVGVGLSKTVFTFVATFFLDRVGRRPLVLTSMAGMVASLVCLGTSLTIVDQHEGARMTWAVVLCLCCVLAFVGFFSTGIGPIAWVYSSEIFPLRLRAQGCGMGVAVNRVMSGVLSMTFISLYKAITMGGAFFLYAAIGAVGWIFFFTMLPETQGRTLEDMEVLFGKFHKWRKANKLLEKERQVARGDGGTSDPDNRVNLLA

SEQ ID NO: 22721 - protein, 606 aa, Glycine max
MADRLTRIAIVSNDRCKPKKCRQECKKSCPVVRTGRLCIEVTSSSKIAFISEELCIGCGICVKKCPFEAIQIINLPKDLDRDTTHRYGPNTFKLHRLPVPRPGQVLGLVGTNGIGKSTALKVLAGKLKPNLGRFTNPPDWQEILTYFRGSELQNYFTRILEDDLKAIIKPQYVDHIPKAVQGNVGQVLDQKDEREKKEELCADLELNQVIDRNVGDLSGGELQRFAIAVVAIQNAEIYMFDEPSSYLDVKQRLKAAQVIRSLLRPNSYVIVVEHDLSVLDYLSDFICCLYGKPGAYGVVTLPFSVREGINIFLAGFVPTENLRFRDDSLTFKVAETPQETAEEAQTYARYKYPTMSKTQGNFRLRVAEGEFTDSQIIVMLGENGTGKTTFIRMLAGLLKPDTIEGGSEVEMPEFNVSYKPQKISPKFQSTVRHLLHQKIRDAYTHPQFVSDVMKPLLIEQLMDQEVVNLSGGELQRVALCLCLGKPADIYLIDEPSAYLDSEQRIIAAKVIKRFILHAKKTAFVVEHDFIMATYLADRVIVYEGQPSIDCIANTPQSLLSGMNLFLSHLDITFRRDPTNFRPRINKLDSTKDREQKSAGSYYYLDD

SEQ ID NO: 22722 - protein, 115 aa, Malus x domestica
MASSAVTKLALVVALCMAVSVAHAITCGQVTSSLAPCIGYVRNGGAVPPACCNGIRTINSLARTTADRQTACNCLKNLAGSISGVNPNNAAGLPGKCGVNVPYKISTSTNCATVK

SEQ ID NO: 22723 - protein, 535 aa, Malus x domestica
MADRTTDDNTVSSQPQKTIADFDPPQKPKRNKYAFACAILASMTSILLGYDIGVMSGAAIYIKDDLKISDVEVEVLLGILNLYSLIGSAAAGRTSDWVGRRYTIVLAGAIFFVGALLMGFATNYSFLMFGRFVAGIGVGYALMIAPVYTAEVSPASSRGFLTSFPEVFINSGILLGYVSNYAFSKLPTHLGWRLMLGVGAIPSIFLAVGVLAMPESPRWLVMQGRLGDATRVLDKTSDSKEESMLRLADIKEAAGIPEHCTDDVVQVPKRSQGQDVWKELLLHPTPAVRHILICAIGIHFFQQASGIDAVVLYSPRIFEKAGITNSDKKLLCTVAVGFVKTVFILVATFFVDKVGRRPLLLASVAGMILSLTGLGLGLTIIDQNHERILWAAVLCLTMVLLYVAFFSIGMGPITWVYSSEIFPLKLRAQGCSLGVAMNRVVSGVLSMTFISLYEAITIGGAFFLYAAIASVAWVFFFTMLPETHGRTLEDMEVLFGKFHKWRKANALLKQKKNASHGDGITNNGQVQLGTRGQVN

SEQ ID NO: 22724 - protein, 473 aa, Mycobacterium leprae
MTRQEDDFSAWYNEVVAKAGLIDRGPAKGTMVIRPYGYRIWELLQDELDSKIKELGHENAYFPMLIPENYFNREAEHVEGFHPELAVVTHAGGKELSEPLVIRPTSETVIGDMMAKWITSHRDLPLRLNQWSNVVRWELRPRMLLRTIEFLWQEGHSAHIEKSDALRETLFALDIYTTLARDMAAIPIVSGEKTAGERFAGALNTYTIEAMMRDGKALQSATTHYLGDNFARAFNIRYTTAEEQQAFVHTTSFGLSTRMIGAIVMVHGDDKGLVLPPQVAPYQVVIVPITTGNKASEVGHAAADLARRLQAAGVRTHVDARPQLTPGWKYNEWELRGVPIRLELGPRDLEAGTTVMVRRIGEKAKQPIAIAAAPTELPGILEEFQRTLLERATQFRDDHTTLVDNWDAFATTVATGWALAIHCGNPECEEDIKAETAATPRCVPRQGAPATGRCIRCDAPSAYDKRVIFARAY

SEQ ID NO: 22725 - protein, 485 aa, Bordetella bronchiseptica RB50
MTSSPDIGACAYIGGRWAQTPAARTFRTALPHDTRQSGREFGCATPADAEAAVARATAAAAPWAAVPALQRAEPLRKAAALLLERLDELTRLLALEAGKPLQEARGEVSAAAGFLHAYAGWPAWGGQGAVKRNGALRIVQEKFPRGVAAIITPWNYPLSNPCQKIGAALIGGNPVIWRPSVSTPAVSLALIEIMHQAGFPDGVFNALIEDGDAVSRALVASEAVAAVSFTGSTRVGLQVAAAAAGRGAAVQCEMGGKNAAVVMPDADLDLAAERIAFGAFGFAGQKCTAVSRVLVHRHIADAFLERLLDIVRDLRPGLPHQEESCLAPLISARQRDLLVDAIAQARERGARLIEGGAPIEQAPYAHGNYLSPALIQVHDLDDPLWTDEYFGPVLALRVCDDLDQAIAEVNATRYGLGAALFSHDARAIGRFTDQVQAGVVKINDVPPGLYPHVSTGGWKASGLGPNELSEDGVDFFLHKKSVYLA

SEQ ID NO: 22726 - protein, 229 aa, Lactococcus lactis subsp. lactis Il1403
MKEKNNLIQRNNIVRASIMGANDGIISIAGIVIGVSGATSHIGTILLAGFAGTLAGTVSMAMGEYVSVSSQRDAQEKIIQEQKVALATNYQNEFDFVYQKYRADGISNELAHKATDEMMKKDALATTVRERHGFTIGQELSAKGAAIASMLSFPTGALLPMLAISLIPKSWSALATFISVLIALGFTGYAAAYLNGADKKHATFRNIIAGILTMLVTYVVGLLFKQGGL

SEQ ID NO: 22727 - protein, 1550 aa, Anabaena variabilis ATCC 29413
MKAQLPDNEVQRIAALLEYKILDTQSEAAFDDITRLASYICGTPIALISLIDQNRQWFKSKVGLERRETPRDEAFCTYTILESDVFIVPDATTDERFATNPLVISDPKIRFYAGVPLTNPEGYSLGTLCVIDYIPRNLSPEQIEALQILGRQVIKQLELRRNLANLVLVNNQHKQAQKIRHPFFKKIAGGFGLASVILVLLGLASYQSEIELIHSSNQVQITQESINNLEKLLSQIKDAETGQRGYILTGKDLYLQPYQTALTNIDQKFAELKNTTVDQVQQQRLVILKPLITAKITELKQTIKLRQNQGFQTALQVIQSDKGQTLMDDIRKVMREMETEEKVRLQQQLQAVKASGQKVIVILAIAIVSGLIILAVVYYLIYCEVIARQSMENILNEERNFISAVLDTVSALVIVLDSQGRIVRFNQACEVITGYSFDEVRGRHFWNLFLLPEDVESSKASFAKFPTDSRVSGIQESENYWVTKDGSRRLIAWSRTILQNHEGSVEYIIGTGIDITERKRADKHLTIQYAITRVLAESTTITEATPQILQAICETLKWDVCEIWMVNQQGNFLSFFDLWDQTSLEMQEFKTQSQPITFASGIGLPGQIWASGQPIWLTDIADDASFLRNQLAAQVGLRGAFGFPIRSGQKILGVITCFSHQVQPHDPDLAKIMDSIGEQVGQFIHRKQAEEELQRQNLRSQLFTEITLKIRQSLQIEEILQITVKEVQKILQTDRVLIYQLLPDGSGSLIIEAVVAGWAAIKGQNITDFYLQTEYQQQYCLQQYRLRHLEAIANLDLAEIQQSHLELLRKFGVKANLVIPILVKDELCGLLIVHQCANSRQWTSFETHLLRQIADQVGIAVAQAQLLEVETRQRQELEVARSQAELASHAKSAFLANMSHEIRTPMNAVLGMTGLMLETLLNQEQRDFMETIRISGDALLTLINEILDLSKLEAGEMALENLNFNLSTCVEEVLDLLAPQAHSKGLEIAALIYRHVPIQLQGDASRLRQILMNLIGNAIKFTSFGEVVMRVELRSETPTTAIIHFAVTDSGLGITLEDQHKLFTPFTQVDASTTRKYGGTGLGLAICKQLVTLMGGEIGVESQLGKGSKFWFEIPFAKQLQPVSFVEDCGLLNNRRLLVVDDHATNRKIIYHQVSRWGMQVDQADRAVAALGMIVEACQQNKPYDVILIDMQMPEMDGMALGKQIKANSAIPPTPLIMLTSTNQRDEVQQAIKIGFAAYLVKPVKSSRLLDTIMSVLKTPSQLEAEKLEVKSQELEKNNLDHSRNRNFTATQAQNSVSTKTRILLAEDNLVNQKVALKQLQSLGYTADVAANGKEVLQLLKQIPYDLILMDCQMPILDGLETTKEIHRWAESSFASGRRPVIIAMTANAMKEDKQMCLDVGMDDYLSKPVMKEQLATALEYWCQLILNARQAVEFDIHSLPIDWEHLHQLSENDTEFELHLLQIFVEDVRARLELAKEAIANTDFQKMAQQVHQLKGASTNLGATAMYLAAERLEQLANNQERRGSMELITEIEESVNQIQAFLTRSQVV

SEQ ID NO: 22728 - protein, 107 aa, Schizosaccharomyces pombe
IKKRTKPFKRHQSDRFKRVGESWRKPRGIDSCVRRRFRGTISMPKIGYGNNKKTRYCMPNGLKAFLVRNVSDVELLLMHNKTYAAEIAGNVSARKRVEIVEKARALV

SEQ ID NO: 22729 - protein, 565 aa, Prosthecochloris aestuarii DSM 271
MAMMQSSKYAAYPVVDISDRTWPDKRITRAPVWCSIDLRDGNQALPVPMSVQEKIEMFKLLIGIGFKEIEVGFPSASAVEFQFVRTLIEENLIPDDVTIQVLTQAREHLIRRTFESLEGANRAIVHLYNSTSTVQRDVVFRKNRQEIKEIAIRGTALVRELREAFGNKGIRFQYSPESFTGTELEYALEVCQAVMETWGASADEKVIVNLPSTVEMSTPNIFADRIEWFCRNLSDRDAAIISVHTHNDRGTAVASAELAMMAGADRVEGALFGNGERCGNLDIITMALNMYTQGVDSRLDFSNLTHLTEVYRECTRMPVHPRHPYAGELVHTAFSGSHQDAINKGMKARTESENEVWCVPYLPIDPKDVGFSYKAIVRINSQSGKGGVAYVMEKEFGYSLPKWLQPDFGLVVQAIVDREGRELSPEEIRDLFSREYVRLERPYLLKKCHISWEDEDPDRNDEVATTITSALQEGEREFGFTARGNGPVDAFVTGFIHDSGIDFIVSEYSEHAIGHGADTQAIAYVKITLPDGTVSYGAGIDSNISLASIKAVMSAVNRLDTQAKK

SEQ ID NO: 22730 - protein, 384 aa, Synechocystis sp. PCC 6803
MGTKRIGILTSGGDCPGLNAVIRAVVKASALKGWEVYGIPYGTDGFVEVAHGKYQAEDLLLTKHGYALPGMLKGLDVLQFLSGSVLGSLSKGHPEQPAIAEAILKGYAILDLEALIVIGGDGSLDIIYDLAQKGNWHIIAIPKTIDNDVPFTDLAVGFSTAVDIVTQALYDLTFTAASHERIIIVQVMGRDAGHLTLHAGIAGGADIILIPEITPCLTSEIIRNCCYQLMNLRKSGRHFALIVISEGVHDQNNKKNKHIADYLAEEISETSQHLCDIKDPAFCDLISLDIRATTLGHLQRSGTPLSFDRLLATVFGIRAVELIEQEIYDQVVIWRSGKVEHADLKPIISIIKECHQENRCPFPVDRDGFMVKTAKSLGIYLGED

SEQ ID NO: 22731 - protein, 222 aa, Propionibacterium freudenreichii subsp. shermanii
MSMRITPSVLNADLADLAGEVARIPSADAVHIDVMDNHFVPNLTLGLPVVSSLQRHTKLPFDIHLMIEDADSWAPQYAEAGCESVTFHAEATSAPVRLAREIRRLGSAASLALRPATPIEPFADLIAEFDQVLIMTVEPGFGGQKFLDIMLPKIRRTRAIAAASGVELAIQVDGGVSVDTIGRCAEAGADVFVAGTAVFRATDPDEMVTTLRQTAMQAAHSH

SEQ ID NO: 22732 - protein, 169 aa, Bacillus anthracis str. A2012
MIVKRGAKTMTVYDFSAKTITGEEKSLKDYEGKVLLIVNVASKCGFTPQYKGLQEVYDKYKEQGLEILGFPCNQFGGQEPGTEADITSFCELNYGVNFPMFAKIDVKGDKAHPLYTYMTEQAPGLLGMKAVKWNFTKFLIGKDGKVVGRFAPQTKPVDLEVEIEKVLGE

SEQ ID NO: 22733 - protein, 547 aa, Bacteroides fragilis NCTC 9343
MTKSALQIARAAYQPKLPKALKGSVKAVEGAATQSVADQEAIQKLFPNTYGMPLIKFEEGEAIQLPAMNVGVILSGGQAPGGHNVISGLFDGIKTLNKDNKLYGFILGPGGLVDHNYMELTADIIDEYRNTGGFDIIGSGRTKLETPEQFEKGLEIINKLGIKALVIIGGDDSNTNACVLAEYYAAKNAGVQVIGCPKTIDGDLKNEMIETSFGFDTACKVYSEVIGNIQRDCNSARKYWHFIKLMGRSASHIALECALQVQPNVCIISEEVEAKDMSLDDVVTYIAKIVADRAAQGNNFGTVLIPEGLVEFIPAMKRLIAELNDFLAANAVEFANIKRSRQREYIISKLSKENAEIYASLPEGVARQLSLDRDPHGNVQVSLIETEKLLSEMVGTKLAQWKEEGKYVGKFAAQHHFFGYEGRCAAPSNYDADYCYSLGYTASMLIANGKTGYMSSVRNTTAPAAEWIAGGVPITMMMNMERRHGEMKPVIQKALVKLDGKPFLTFAAKRDQWALNTDYVYPGPIQYFGPTEVCDQPTKTLQLEQAK

SEQ ID NO: 22734 - protein, 264 aa, Shewanella sp. ANA-3
MSSELNSGIYYGSVTHSRYTPVKHHFSYQMALLAIDLDEVDSISAMGRSFASQRRALLRFNPKDYLCTFTTRDNQSRQLEINEPSSYALKQRVLEQVAELGGHQPCDRVLFVGQIRHFGVYFSPVNFYFCYQAQQPLYMLAEVSNTPWDQRHCYLVDLSVPKTTDKVFHVSPFMNLDMRYQWHVEPPAERLNIGIENLPNQSGKRLFNASLSMTRQAINAQSLRALLFRFPFMTLKIFGGIYWQALKLFFKRVPFVPHPAQVEK

SEQ ID NO: 22735 - protein, 381 aa, Ashbya gossypii ATCC 10895
MEPYVQNGLRKLAPYWNTRSSFVKGRWYGRTLAQVLMEEFHFSSEQVQAKILAGHCQLLRDGVVLNANTELIKNKDVFQSKQHNHEPPVLQWPLLHNVAHNTAGLKVVFEDNDLLVIDKPCGIPIHPTAYFYKNTLTEVLEDARGYPLFPCYRLDKITSGLLIFAKTQQTASRLQSQIRDQNMNKWYLARVDGNFDFNKKTASSPIYTFEPKKSLKGAFAPVRDALTEFYHVAYNEELNQSLVLCKPLTGRTHQIRIHLARLGHPIVNDPFYNVKNSKYPKRSAFMLEVEDWNTIEQDKLSHLFDEFIVEIDENWRGLNPAGDLCEECGEELPRDPEKHELILYLHAWKYNGSDISFTTEYPEWASAFEFGEIDIGRPDIY

SEQ ID NO: 22736 - protein, 135 aa, Yersinia pestis CO92
MRLLHTMLRVGDLQRSIDFYTKVLGMRLLRTSENTEYKYSLAFVGYSDESKGSVIELTYNWGVDQYDMGTAFGHLALGVDDVAATCDQIRQAGGKVTREAGPVKGGNTIIAFVEDPDGYKIELIENKSAGDCLGN

SEQ ID NO: 22737 - protein, 322 aa, marine gamma proteobacterium HTCC2207
MDFQDYYKILLVAPGADSETIKTAYRKLARKYHPDVSGHHEAEEKFKQIAEAYEVLKDPNKRAQYDQLRESAAQGYGQRQAQGGTAQQNSQSPFGQGRFSAFFSSLFGGADQPAQGVGTHGSSQQDFSTSNSVRKGQDIETELQISLEDRLTTTTKRISYSFSHRDGWGRASQVSKILNVKIPAGVVDGERIRLKGQGAQGLGDAPPGDLYLRIHLVPHSLFEVEAQDLIVIVPLAPWEVALGTSLELPTLSGKVKLRIPSNSQTGQRLRIKGKGLVHKDGQGDLYAVLKVVMPDSGSEEIKQYWQQQAGATASGSRMEWRG

SEQ ID NO: 22738 - protein, 164 aa, Caulobacter crescentus CB15
MPHAGLCLYRREAPSRRSAMRYLHTMIRVRDLDASLRFYCKGLGLQEMYRTENEKGRFTLVFLAAPEDVELAKARKAPLVELTYNWDDEEYGGGRNFGHLAYRVDDIYETCQRLMDMGVTINRPPRDGHMAFVRSPDNISIELLQDGDLPPAEPWVSMPNVGAW

SEQ ID NO: 22739 - protein, 418 aa, Bacillus clausii KSM-K16
MATKMTMPQLGESVTEGTISRWLVGPGDTVQKYEPIAEVLTDKVSAEIPSSYTGTIEQLLVDENETVAVGVDICTIVEEASSEAEESNKEIKTEQKPNPPAKEQTKAEPSQKSRYSPAVVRLAQEHGLDLTTISGSGRGGRITRKDVEAYIAGNHTPEPQQPPAQAKQQEPVRSTPSQAIAAHDQEIPVTGVRKAIAENMVKSKMEVPHAWTMVEVDVTNLVKLRDKKKAAFKEQEGISLTYFPFFMKACVEALKEFPEINAQWNGTTIVRKKDINLSLAVATEDALYVPVIHQADELTIKGLAKKADELAKKARTGKLTGADMQGGTFTLNNTGSFGSILSQPIINSPQAAILSVESIVKRPVVRETEEGDVIAIRHMVNLCLSLDHRVLDGLVCGRFLASMKRRLEQMNEDSTSIY

SEQ ID NO: 22740 - protein, 819 aa, Serratia marcescens
MRVLKFGGTSVANAERFLRVADIMESNARQGQVATVLSAPAKITNHLVAMIDKTVAGQDILPNMSDAERIFADLLSGLAQALPGFEYDRLKGVVDQEFAQLKQVLHGVSLLGQCPDSVNAAIICRGEKLSIAIMEGVFRAKGYPVTVINPVEKLLAQGHYLESTVDIAESTLRIAAAAIPADHIVLMAGFTAGNDKGELVVLGRNGSDYSAAVLAACLRADCCEIWTDVDGVYTCDPRTVPDARLLKSMSYQEAMELSYFGAKVLHPRTITPIAQFQIPCLIKNTSNPQAPGTLIGKDSTDADMPVKGITNLNNMAMINVSGPGMKGMVDMAARVFAVMSRAGISVVLITQSSSEYSISFCVPQGELQRARRALEEEFYLELKDGVLDPLDVMERLAIISVVGDGMRTLRGISARFFSALARANINIVAIAQGSSERSISVVVSNDSATTGVRVSHQMLFNTDQVIEVFVIGVGGVGGALIEQIYRQQPWLKQKHIDLRVCGIANSRVMLTNVHGIALDSWRDALAGAQEPFNLGRLIRLVKEYHLLNPVIVDCTSSQAVADQYVDFLADGFHVVTPNKKANTSSMNYYQQLRAAAAGSHRKFLYDTNVGAGLPVIENLQNLLNAGDELVRFSGILSGSLSFIFGKLDEGLSLSAATLQARANGYTEPDPRDDLSGMDVARKLLILAREAGYKLELSDIEVEPVLPPSFDASGDVDTFLARLPELDKEFARNVANAAEQGKVLRYVGLIDEGRCKVRIEAVDGNDPLYKVKNGENALAFYSRYYQPLPLVLRGYGAGNDVTAAGVFADLLRTLSWKLGV

SEQ ID NO: 22741 - protein, 192 aa, Arabidopsis thaliana
  misc_feature (60)..(60): Xaa can be any naturally occurring amino acid
MVLVLALGDLHVPHRAADLPPKFKSMLVPGKIQHIICTGNLCIKEIHDYFEGLSALILHXSSEGEFVGDARVPPEETLTIGQFKLGLCHGHQVIPWGDLDSLAMLQRQLGVDILVTGHTHQFTAYKHEGGVVINPGSATGAYSSINQDVNPSFVLMDIDGFRAVVYVYELIDGRVKVDKIEFKKPPTTSSGP

SEQ ID NO: 22742 - protein, 412 aa, Rickettsia conorii str. Malish 7
MKENFNVSKLKNGLTILTYNMPYVNSVAINLIAKVGARYENAEEDGISHFLEHMAFKGTKTRTAKQIAEAFDAIGGHFNAYTGHENTVYYARVLSENCDKALNILADIIQNSIFSDEEIAKEYQVIMQEIAHHQDNPDDLVYEKFYNKVYREQPLGKSILGTAKTLATFTKEHFFNFIDKYYNAANLYLSIAGNIDHDKIVIIAEQLFSSLKQGVKSSFIPAKYIGGNGFINKELEQTSLVLGFEGTSYINLEKLYQTHLLSIIFGGGMSSRLFQSIREKLGLAYAVGSYNSAYFDSGVFTIYASTAHDKLELLYKEIKNEIIKMTEQVSTEEILRAKTQLRSNLQMAQEKNTYKSEEIGKNYSVFGQYISPEEIMEIIMSIKADDIINTANKIFSGTTTSAIIGPNDLQGF

SEQ ID NO: 22743 - protein, 439 aa, Kineococcus radiotolerans SRS30216
MTTTHDAPPTGLARAISGKLLFLFILGDVLGAGIYALVGTLAGEVGGAVWVPLLVALVLASLTAASYAELVTKYPKAGGSAVFAQRAFGKPVVSFLVGFSMLAAGVTSVAGLALAFSGSYLSELIDVPATPAALVFLVLVALLNARGIKESLRANLVMTVVEVGGLLLIIALAAAVLGRGDGNPGHVLEFDGASTPVAGILAASVIAFYSYVGFETSANVAEEAIDPARTYPRALFGGLAVAGVVYVGVALAVSVAVDTATLSGSSGPLLEVVRVADVGLPGWLFSLIALIAVANGALLTAIMSSRLTYGMATDGLLPSALGRVLPGRRTPWVAIVVTTLVSMLLVLSGDLETLAATVVLLLLIVFISTNLAVLVLRKDEPGHRHFRTPTVLPVLGIVSCVVLLTQQEAGVWLRAGLLLAVGVVLHLLTRRFSHRAVEV

SEQ ID NO: 22744 - protein, 94 aa, Diospyros kaki
  misc_feature (36)..(36): Xaa can be any naturally occurring amino acid
NSRPGLSHSSPRGLLPQRAVVPGLCLRSRSWHNRCXGMAYMFVHDGLVHKRFPVGPIADVPYFRRVAAAHQLHHSDKFNGVSYGLFLGPKELEK

SEQ ID NO: 22745 - protein, 183 aa, Arabidopsis thaliana
  misc_feature (105)..(105): Xaa can be any naturally occurring amino acid
  misc_feature (127)..(128): Xaa can be any naturally occurring amino acid
  misc_feature (130)..(130): Xaa can be any naturally occurring amino acid
  misc_feature (135)..(135): Xaa can be any naturally occurring amino acid
  misc_feature (137)..(137): Xaa can be any naturally occurring amino acid
  misc_feature (143)..(143): Xaa can be any naturally occurring amino acid
  misc_feature (147)..(147): Xaa can be any naturally occurring amino acid
  misc_feature (150)..(150): Xaa can be any naturally occurring amino acid
  misc_feature (153)..(153): Xaa can be any naturally occurring amino acid
  misc_feature (159)..(161): Xaa can be any naturally occurring amino acid
  misc_feature (164)..(164): Xaa can be any naturally occurring amino acid
  misc_feature (167)..(167): Xaa can be any naturally occurring amino acid
  misc_feature (170)..(170): Xaa can be any naturally occurring amino acid
  misc_feature (176)..(176): Xaa can be any naturally occurring amino acid
  misc_feature (178)..(178): Xaa can be any naturally occurring amino acid
MASSMLSSAAVVTSPAQATMVAPFTGLKSSASFPVTRKANNDITSITSNGGRVSCMKVWPPIGKKKFETLSYLPDLTDVELAKEVDYLLRNKWIPCVEFELEHGXFVYREHGKQFPGTTDGRYLGKXXKXSIFRXTXFCLRIXREFXDSXRGXPGGLFXXXGFXKTXKAXEKFFFXKXPSFGN

SEQ ID NO: 22746 - protein, 349 aa, Flaveria brownii
EFYIGLRQRRATGQEYAELMNEFMSAVKQNYGEKVLIQFEDFANHNAFDLLEKYRTTHLVFNDDIQGTASVVLAGLISALKLVGGSLADHKFLFLGAGEAGTGIAELIALEISKQTNIPLEESRKKVWLVDSKGLIVRSRLDSLQHFKKPWAHDHEPVDKFLDAIKTIRPTVLIGSSGTGQTFTKEVVETMSSLNEKPIILALSNPTSQSECTAEQAYTWSEGRAIFASGSPFGPVEYNGKLYMSGQANNAYIFPGFGLGLIISGAIRVHDDMLLAASEALAEQVTEEHFDNGLIYPPFTNIRKISAHIAAKVAAKAYELGLASRLPQPENLVAYAESCMYSPKYRSYR

SEQ ID NO: 22747 - protein, 291 aa, Bordetella parapertussis
MHGRRFKKMKDKVIDGSRASARIREQLKERVACLRARNIRPGLAVLLVGEDPASQVYVRNKVAACEQVGIHSVTERYPSAWTENQLLDRIASLNGDPAINGILVQLPLPPHMSAHRVIEAISPLKDVDGFHISNAGLLMTGKPQFQPCTPYGVMKLLESEGVSLRGAEAVIVGASNIVGKPMAMLLLAAGATVTICNSKTRDLAGQARRADVLIVAAGRAGIVDGSMIKPGAVVIDVGINRGPDGRLCGDVDYGSAAKVAGAITPVPGGVGPMTIAMLLANTVEAAERSAI

SEQ ID NO: 22748 - protein, 122 aa, Triticum aestivum
  misc_feature (37)..(37): Xaa can be any naturally occurring amino acid
  misc_feature (80)..(80): Xaa can be any naturally occurring amino acid
  misc_feature (96)..(96): Xaa can be any naturally occurring amino acid
  misc_feature (100)..(100): Xaa can be any naturally occurring amino acid
MARLNSKAVVSAVVLAAVALMMAGREATALSCGQVDXKLAPCVSYVTGKAPSISKECCSGVQGLNGLARSSPDRKIACRXLKSLATSIKSINMDKXSGVXPGKCGVSVPFPISMSTNCNNVN

SEQ ID NO: 22749 - protein, 210 aa, Glycine max
MPSRRRTLLKVIILGDSGVGKTSLMNQYVNKKFSNQYKATIGADFLTKEVQFEDRLFTLQIWDTAGQERFQSLGVAFYLAFYRGADCCVLVYDVNSMKSFDNLNNWREEFLIQASPSDPENFPFVVIGNKIDIDGGNSRVVSEKKARAWCASKGNIPYFETSAKEGLNVEEAFQCIAKNALKSGEEEELYLPDTIDVGNSSQPRATGCEC

SEQ ID NO: 22750 - protein, 146 aa, Photobacterium profundum SS9
MNTMTTRCPHCKAMNRIPTERIEDTATCGSCKEKLLDGKPIEGTTSNFLSLIQSDTPVVVDFWAPWCNPCVGFAPIFEDVAAERSGDARFVKIDTEAQQELAAQYRIRSIPTIMVFKNGQLLNNLNGALPKSQFNQWLNETLEQAK

SEQ ID NO: 22751 - protein, 424 aa, Staphylococcus aureus subsp. aureus Mu50
MEITMPKLGESVHEGTIEQWLVSVGDHIDEYEPLCEVITDKVTAEVPSTISGTITEILVEAGQTVAIDTIICKIETADEKTNETTEEIQAKVDEHTQKSTKKASATVEQTFTAKQNQPRNNGRFSPVVFKLASEHDIDLSQVVGSGFEGRVTKKDIMSVIENGGTTAQSDKQVQTKSTSVDTSSNQSSEDNSENSTIPVNGVRKAIAQNMVNSVTEIPHAWMMIEVDATNLVNTRNHYKNSFKNKEGYNLTFFAFFVKAVADALKAYPLLNSSWQGNEIVLHKDINISIAVADENKLYVPVIKHADEKSIKGIAREINTLATKARNKQLTTEDMQGGTFTVNNTGTFGSVSSMGIINHPQAAILQVESIVKKPVVINDMIAIRSMVNLCISIDHRILDGLQTGKFMNHIKQRIEQYTLENTNIY

SEQ ID NO: 22752 - protein, 497 aa, Pseudomonas aeruginosa PAO1
MSVPVRHLIAGAFVEGLGAQRIPVSNPLDNSTLAEIACASAEQVEQAVASARETFASWKETPVSERARVMLRYQALLKEHHDELAKIVSSELGKTFEDAKGDVWRGIEVVEHACNVPSLLMGETVENVARNIDTYSITQPLGVCVGITPFNFPAMIPLWMFPLAIACGNAFILKPSEQVPLTSVRLAELFLEAGAPKGVLQVVHGGKEQVDQLLKHPQVKAVSFVGSVAVGQYVYHTGTAHNKRVQSFAGAKNHMVIMPDADKAQVISNLVGASVGAAGQRCMAISVAVLVGAAREWIPEIRDALAKVRPGPWDDSGASYGPVINPQAKARIERLIGQGVEEGAQLLLDGRGYKVEGYPDGNWVGPTLFAGVRPDMAIYREEVFGPVLCLAEVDSLEQAIRLINESPYGNGTSIFTSSGAAARTFQHHIEVGQVGINIPIPVPLPFFSFTGWKGSFYGDLHAYGKQGVRFYTETKTVTARWFDSDSVAGTNFSIQMR

SEQ ID NO: 22753 - protein, 185 aa, Brassica napus
MESSAAATKPARGGRRGGDRKKSVSKSVKAGLQFPVGRIARYLKKGRYAVRYGSGAPVYLAAVLEYLAAEVLELAGNAARDNKKNRINPRHLCLAIRNDEELGKLLHGVTIASGGVLPNINPVLLPKRTAGSSQGEKVKAEKVKASSPAKFNVWFVKPIEDLCFYTFVMKELISLVMFLSFCLIE

SEQ ID NO: 22754 - protein, 388 aa, Anabaena variabilis ATCC 29413
MGRVGVLLLNLGGPDKLEDVGPFLFNLFSDPEIIRLPFRWLQKPLAWFIASRRTKTSQENYKQIGGGSPLRRITEAQGEALKEQLHDLGQEANIYVGMRYWHPYTEEAIALLTQDNLDNLVILPLYPQFSISTSGSSFRLLERLWQEDPKLQRLDYTVIPSWYKEPCYLQAMAELISQEVDQFPDPDQVHVFFSAHGVPKSYVEEAGDPYQQEIEECTALIMQTLNRPNPHTLAYQSRVGPVEWLQPYTEDALKELGAQGVKDLVVVPISFVSEHIETLQEIDIEYREIAEEAGIHNFRRVAAPNTHPVFIRALANLVIDALNKPSFKLSQAAQIKKMVKMYPPESWEWGMTSSAEVWNGRIAMLGFIALIIELVTGQGLLHMIGLLQ

SEQ ID NO: 22755 - protein, 175 aa, Oryza sativa
MAPTVMASSATSVAPFQGLKSTAGLPVSRRSTNSGFGNVSNGGRIKCMQVWPIEGIKKFETLSYLPPLTVEDLLKQIEYLLRSKWVPCLEFSKVGFVYRENHRSPGYYDGRYWTMWKLPMFGCTDATQVLKELEEAKKAYPDAFVRIIGFDNVRQVQLISFIAYKPPGCEESGGN

SEQ ID NO: 22756 - protein, 487 aa, Prosthecochloris aestuarii DSM 271
MKETLIFDLSRKGRQGHRIASLDIEPQPAINLIPEKFLRTEPADLPEVPESEVVRHFIRLSNLNHHVDKDMYPLGSCTMKYNPKINDQTADIAGFTSIHPLQPAETAQGTLQLMYELGEMLREIAGMAAITLQPAAGAHGELTGILMIRKYHDSRASKRTKLLVVDSAHGTNPASAALVGYDILSVKSNAEGRTDIEDLKAKLDENVAALMLTNPNTIGLFEKDIKEIEQLVHDNGSLLYMDGANMNALMGITRPGDMGFDIVHYNLHKTFSAPHGGGGPGSGPVGVCDKLKPYLPVPVIEKHDDGNTSRYTLTTDRPLSIGRMMNFYGNFSVMVRAYTYIRMLGAEGIRRVSENAIINANYLLSKLIDRYDLPYPKPVMHEFCLSGDRQKKQHNVRTLDIAKRLLDLGFHAPTIYFPLIVSEALMIEPTETETRETLDRFAEAMLQIADETENSPETVQNAPQFTPVKRLDEAQASRKLNICCPGC

SEQ ID NO: 22757 - protein, 112 aa, Arabidopsis lyrata subsp. petraea
LVEKFGIDPNNAFAFWDWVGGRYSVCSAVGVLPLSLQYGFSVVEKFLKGASSVDQHFQSTPIEKNIPVLLGLLSVWNVSFLGYPARAILPYSQALEKFAPHIQQVSMESNGK

SEQ ID NO: 22758 - protein, 223 aa, Arabidopsis thaliana
MAMKSLSFLAALSLLALTLPLAIASDPSQLQDFCVSANTSANGVFVNGKFCKDPKLVTADDFFFSGLQTARPITSPVGSTVTAVNVNNLLGLNTLGISLVRIDYAVDGQNPPHTHPRATEILVVELGTLLVGFVTSNPDNRLFTKVLNEGDVFVFPEGLIHFQANIGKAPAVAFAALSSQNPGVITIANTVFGANPAINPTILAKAFQLNPRVVMDLQTKFKK

SEQ ID NO: 22759 - protein, 286 aa, Bacillus cereus ATCC 14579
MVAVIIKGNEVAEKKRAQLTEEVVKLKEQGIVPGLAVILVGEDPASRSYVKGKEKGCEQVGIYSELIELPETITEERLLAEIDRLNGDDRINGILVQLPLPKHIEEKAIIERISPEKDVDGFHPISVGRMMTGQDTFLPCTPHGIVELVKETNLDISGKHVVVIGRSNIVGKPVGQLFLNENATVTYCHSKTQNMKELSKLADILIVAVGRPKMITADYIKEGAVVIDVGVNRLETGKLCGDVDFDNVLDVAGYITPVPKGVGPMTITMLLHNTVESAKRAGVVCK

SEQ ID NO: 22760 - protein, 259 aa, Triticum aestivum
MVAAAPCAARRSFRDSLKVLEADIQHANNLASECSRDYDGACLQMRMSYSPAARLFLFLLQWTDCSLAGALGLLRILIYKVYVDGTTTMSTHERKASIREFYAVIFPSLMQLEHGISDSDDRRQRAACSERYRRRDEPEDSKRPVSEIDAEIEEECGICMELNSRVVLPNCSHDMCINCYRQWRSRSQSCPFCRDSLKRVNSGDLWMLTDQRDVVDMATVTRENIRRLFTYIEKLPLVTLDNIFDAYDSHRMFLVLGCG

SEQ ID NO: 22761 - protein, 354 aa, Kluyveromyces lactis NRRL Y-1140
MVKDTKLYDLLGISPSAGEAEIKKGYRKAALKYHPDKPTGDTEKFKEISEAFEILSDAQKREVYDTYGLEAARGNAPQFGGAGGPGGPGGPGGFSSGGFAGGHAFSQDDAFNIFSQFFGGGGAAGGASPFGFSASGGSGDDFGFGGSSFHSSSGGMPGGMPGGMPGGMPGGFSRQQARPEEEVVQVNLPVSLEDLFSGKKKSFKITRKGAGGVSEKNQIDIQLKPGWKAGTKITFKGEGDYNPRTGGRQTLQFVLQEKPHEFFTRQDNDLIYTLPLSFKESLLGFSKQVQTIDGKTIPITRTQPIQPTQTSTYPGQGMTLSKNPSQRGDLIIKFKIDYPTSLTPQQRQAIMDNF

SEQ ID NO: 22762 - protein, 720 aa, Synechocystis sp. PCC 6803
MSYSSKYILLISVHGLIRGENLELGRDADTGGQTKYVLELARALVKNPQVARVDLLTRLIKDPKVDADYAQPRELIGDRAQIVRIECGPEEYIAKEMLWDYLDNFADHALDYLKEQPELPDVIHSHYADAGYVGTRLSHQLGIPLVHTGHSLGRSKRTRLLLSGIKADEIESRYNMARRINAEEETLGSAARVITSTHQEIAEQYAQYDYYQPDQMLVIPPGTDLEKFYPPKGNEWETPIVQELQRFLRHPRKPIILALSRPDPRKNIHKLIAAYGQSPQLQAQANLVIVAGNRDDITDLDQGPREVLTDLLLTIDRYDLYGKVAYPKQNQAEDVYALFRLTALSQGVFINPALTEPFGLTLIEAAACGVPIVATEDGGPVDIIKNCQNGYLINPLDEVDIADKLLKVLNDKQQWQFLSESGLEGVKRHYSWPSHVESYLEAINALTQQTSVLKRSDLKRRRTLYYNGALVTSLDQNLLGALQGGLPGDRQTLDELLEVLYQHRKNVGFCIATGRRLDSVLKILREYRIPQPDMLITSMGTEIYSSPDLIPDQSWRNHIDYLWNRNAIVRILGELPGLALQPKEELSAYKISYFYDAAIAPNLEEIRQLLHKGEQTVNTIISFGQFLDILPIRASKGYAVRWLSQQWNIPLEHVFTAGGSGADEDMMRGNTLSVVVANRHHEELSNLGEIEPIYFSEKRYAAGILDGLAHYRFFELLDPV

SEQ ID NO: 22763 - protein, 819 aa, Serratia marcescens
MRVLKFGGTSVANAERFLRVADIMESNARQGQVATVLSAPAKITNHLVAMIDKTVAGQDILPNMSDAERIFADLLSGLAQALPGFEYDRLKGVVDQEFAQLKQVLHGVSLLGQCPDSVNAAIICRGEKLSIAIMEGVFRAKGYPVTVINPVEKLLAQGHYLESTVDIAESTLRIAAAAIPADHIVLMAGFTAGNDKGELVVLGRNGSDYSAAVLAACLRADCCEIWTDVDGVYTCDPRTVPDARLLKSMSYQEAMELSYFGAKVLHPRTITPIAQFQIPCLIKNTSNPQAPGTLIGKDSTDADMPVKGITNLNNMAMINVSGPGMKGMVGMAARVFAVMSRAGISVVLITQSSSEYSISFCVPQGELQRARRALEEEFYLELKDGVLDPLDVMERLAIISVVGDGMRTLRGISARFFSALARANINIVAIAQGSSERSISVVVSNDSATTGVRVSHQMLFNTDQVIEVFVIGVGGVGGTLIEQIYRQQPWLKQKHIDLRVCGIANSRVMLTNVHGIALDSWRDALAGAQEPFNLGRLIRLVKEYHLLNPVIVDCTSSQAVADQYVDFLADGFHVVTPNKKANTSSMNYYQQLRAAAAGSHRKFLYDTNVGAGLPVIENLQNLLNAGDELVRFSGILSGSLSFIFGKLDEGLSLSAATLQARANGYTEPDPRDDLSGMDVARKLLILAREAGYKLELSDIEVEPVLPPSFDASGDVDTFLARLPELDKEFARNVANAAEQGKVLRYVGLIDEGRCKVRIEAVDGNDPLYKVKNGENALAFYSRYYQPLPLVLRGYGAGNDVTAAGVFADLLRTLSWKLGV

SEQ ID NO: 22764 - protein, 412 aa, Escherichia coli
SKRRVVVTGLGMLSPVGNTVESTWKALLAGQSGISLIDHFDTSAYATKFAGLVKDFNCEDIISRKEQRKMDAFIQYGIVAGVQAMQDSGLEITEENATRIGAAIGSGIGGLGLIEENHTSLMNGGPRKISPFFVPSTIVNMVAGHLTIMYGLRGPSISIATACTSGVHNIGHAARIIAYGDADVMVAGGAEKASTPLGVGGFGAARALSTRNDNPQAASRPWDKERDGFVLGDGAGMLVLEEYEHAKKRGAKIYAELVGFGMSSDAYHMTSPPENGAGAALAMANALRDAGIEASQIGYVNAHGTSTPAGDKAEAQAVKTIFGEAASRVLVSSTKSMTGHLLGAAGAVESIYSILALRDQAVPPTINLDNPDEGCDLDFVPHEARQVSGMEYTLCNSFGFGGTNGSLIFKKI

SEQ ID NO: 22765 - protein, 108 aa, Prosthecochloris aestuarii DSM 271
MGKYLTATDQNFKAEVLDSGKVALVDFWAAWCGPCQMLGPVIEDLAGDYEGKAVIAKVNVDENPNIAAEYGIRSIPTMLIFKNGEIVDQMVGAMPKNMIAEKIDAQLA

SEQ ID NO: 22766 - protein, 180 aa, Oryza sativa (japonica cultivar-group)
MRPGAGFNATAVAAAKAAVVAPVAAGGAAAHSAWHSPVPYLFGGLAAMLGLIAFALLILACSYWKLSGYLEGGAGGRGGNDDGGAPADGAKPAASELPPPIWEEKILVIMAGDVKPTYLATPMSSRASSFGDRSSSNGDQADDEKKKVQEVAMGSLVKDGENGEHSESQRDRDEHHIPEV

SEQ ID NO: 22767 - protein, 311 aa, Prosthecochloris aestuarii DSM 271
MANQVRDVVIMGTGPAGLTAAIYTGRTNLKPLVIDGVQPGGQLMITSEIENFPGFPSGIRGPELMDKFREQAARFDVEFALGNVREVDLSRKPFCLYLDDEREVLTRSLIIATGANARWLGLPSEEQYRGRGVSACATCDGFFFRDSEVFVIGGGDTAMEEALFLTRFARHVTVVHRRNEFRASKIMSLRAEKNEKISVELNQVVEEILGDGRKVTGIRLKNVVSGESNTHSCDGVFIAIGHSPNSGLFEGQLDIDEYGYIETAGSSSVTSVQGVFACGDVQDYTYRQAITAAGSGCKSALDAERYLESIR

SEQ ID NO: 22768 - protein, 287 aa, Arabidopsis thaliana
MNLNFAFSPFLVSQRQPFSSHKRNLHTLVAVSANSDNLAGEDNGGISAANKGSGTTARGRRLLKVREEKRKRDYDRLHDYPSWAKVLESACKDDEELRAVLGDSIGNPELMRKKVEERVRKKGKDFQKQKTGSVLSFKVNFRDFNPVDSFIWFELYGTPSDRDVDLIGSVIQAWYVMGRLGAFNTSNLQLANTSLEYDPLYDAEKGFKVMPSSFHDISDVEFQDNWGRVWVDLGTSDIFALDVLLNCLTVMSSEYLGIQQVVFGGKRMGDWEEGMTNPDFGYKYFKI

SEQ ID NO: 22769 - protein, 819 aa, Serratia marcescens
MRVLKFGGTSVANAERFLRVADIMESNARQGQVATVLSAPAKITNHLVAMIDKTVAGQDILPNMSDAERIFADLLSGLAQALPGFEYDRLKGVVDQEFAQLKQVLHGVSLLGQCPDSVNAAIICRGEKLSIAIMEGVFRAKGYPVTVINPVEKLLAQGHYLESTVDIAESTLRIAAAAIPADHIVLMAGFTAGNDKGELVVLGRNGSDYSAAVLAACLRADCCEIWTDVDGVYTCDPRTVPDARLLKSMSYQEAMELSYFGAKVLHPRTITPIAQFQIPCLIKNTSNPQAPGTLIGKDSTDADMPVKGITNLNNMAMINVSGPGMKGMVGMAARVFAVMSRAGISVVLITQFSSEYSISFCVPQGELQRARRALEEEFYLELKDGVLDPLDVMERLAIISVVGDGMRTLRGISARFFSALARANINIVAIAQGSSERSISVVVSNDSATTGVRVSHQMLFNTDQVIEVFVIGVGGVGGALIEQIYRQQPWLKQKHIDLRVCGIANSRVMLTNVHGIALDSWRDALAGAQEPFNLGRLIRLVKEYHLLNPVIVDCTSSQAVADQYVDFLADGFHVVTPNKKANTSSMNYYQQLRAAAAGSHRKFLYDTNVGAGLPVIENLQNLLNAGDELVRFSGILSGSLSFIFGKLDEGLSLSAATLQARANGYTEPDPRDDLSGMDVARKLLILAREAGYKLELSDIEVEPVLPPSFDASGDVDTFLARLPELDKEFARNVANAAEQGKVLRYVGLIDEGRCKVRIEAVDGNDPLYKVKNGENALAFYSRYYQPLPLVLRGYGAGNDVTAAGVFADLLRTLSWKLGV

SEQ ID NO: 22770 - protein, 100 aa, Mycoplasma gallisepticum
MKHITNKAELDQLLSTNKKVVVDFYANWCGPCKILGPIFEEVAQDKKDWTFVKVDVDQANEISSEYEIRSIPTVIFFQDGKMADKRIGFIPKNELKELLK

SEQ ID NO: 22771 - protein, 362 aa, Kluyveromyces lactis NRRL Y-1140
MSKNIVVLPGDHVGKEVTDEAIKVLNAIAEVRPEIKFNFQHHLIGGAAIDATGTPLPDEALEASKKADAVLLGAVGGPKWGTGAVRPEQGLLKIRKELGLYANLRPCNFASDSLLDLSPLKPEYAKGTDFVVVRELVGGIYFGERKEDEGDGVAWDSEKYSVPEVQRITRMAAFLALQQNPPLPIWSLDKANVLASSRLWRKTVEETIKTEFPQLTVQHQLIDSAAMILVKSPTKLNGVVITNNMFGDIISDEASVIPGSLGLLPSASLASLPDTNKAFGLYEPCHGSAPDLPANKVNPIATILSAAMMLKLSLDLVEEGRALEEAVRNVLDAGVRTGDLGGSNSTTEVGDAIAKAVKEILA

SEQ ID NO: 22772 - protein, 206 aa, Oryza sativa
TCAVITGILVQLPLPKHINEEKILNEISLEKDVDGFHPLNIGKLAMKGRDPLFLPCTPKGCMELLTRSGVTINGKRAVVVGRSNIVGLPVSLLLLKADATVSIVHSRTPNPESIVREADIVIAAAGQAMMIKGDWIKPGAAVIDVGTNSISDPTRKSGYRLVGDVDFAEVSKVAGHLTPVPGGVGPMTVAMLLKNTVDGAKRGIVQ

SEQ ID NO: 22773 - protein, 380 aa, Burkholderia sp. 383
MTLASTLDIIAELKAGRMVILVDEEDRENEGDLVIAAEFVTPEAINFMAKYGRGLVCLTLTQERCKQLHLPLMTYRNGTQYGTAFTVSIEAAEGVTTGISAADRARTIATAVAHDVRPEHIVQPGHVFPIMAQPGGVLVRAGHTEAGCDFTALAGLTPAAVICEIIKDDGTMARLPDLIEFAQEHNLKIGTIADLIQYRSRTESIIERIAERTMQTAHGTFRAVLYRDQPSGSPHIALVRGAPSPDVDTPVRVHEPLSVLDLLETGVSTHSWTLDAAMREIAERDLGVIVLLNCGDTKEHLIDVFKAFDEEEKAAALKRRPVDFKTFGIGAQILRDVGVSKMQVLSNPRKLGSMSGYGLEVTGFIPMPGGEAKSCPASNA

SEQ ID NO: 22774 - protein, 115 aa, Pisum sativum
MSKVVLISVMTACMLISSSYGKATLTCEQVTIWLTPCIPYGTLGGSVLPLCCQGVHSLNAAYKNGDDRRLACHCVQDRAALIPLIDYTRINQIGDLCGSKCPFKVYPSTDCDKVK

SEQ ID NO: 22775 - protein, 431 aa, Oryza sativa
MEDDDAGGGGGGGEASPPHAGSAAAMAGAGRDIAASPTSSRSVTQTVNGSHRFVIQGYSLAKGMGVGKHIASETFTVGGYQWAIYFYPDGKNPEDNSAYVSVFIALASEGTDVRALFELTLLDQSGKAKHKVHSHFDRSLESGPYTLKYRGSMWGYKRFFRRTALETSDFLKDDCLKINCTVGVVVSTMDYSKPHSIHVPESDIGYHFGTLLDNQEGVDVICNVAGEKFHAHQLVLAARSSFFRSELFEHESDEEKNEVDTSNEIKEIVIDDMEPKVFKAVLHFMYRDNLVGDDELSASSSDCSIFDTLAGKLLAAADRYELPRLRLLCESYLCKHISVNSVATTLALADRHHAMELKSVCLKFAAENLSAVIRTDGFDYLKDNCPALQSEILRTVAGCEEECSSGGKSQSVWGQLSDGGDTSGRRVRPRV

SEQ ID NO: 22776 - protein, 520 aa, Pseudomonas putida KT2440
MLDATLKSQLKTYLERVTQPIEIVASLDDGAKSRELHDLLVEIASLSNLITFSADGTDARRPSFSLNRPGADISLRFAGIPMGHEFTSLVLALLQVGGHPSKASAEVIEQIQALEGEFNFETYFSLSCQNCPDVVQALNLMAVLNPNVRHVAIDGALFQDEVESRKIMAVPSIYLNGEVFGQGRMGLEEILGKIDTNAGARQAEKINAKEAFDVLVVGGGPAGAAAAIYAARKGIRTGVAAERFGGQVLDTLAIENFISVQETEGPKLATALEEHVKQYDVDIMNLQRGEALIPAAEGGLHEVRLAGGASLKAKTVILATGARWREMNVPGEQEYRGRGVAYCPHCDGPLFKGKRVAVIGGGNSGVEAAIDLAGIVAQVTLIEFDSQLRADAVLQRKLRSLPNVNVITSALTTEVLGNGEKVTGLRYKDRSTDEQHEVALEGIFVQIGLLPNTDWLKGTVELSPRGEIIVDAKGQTSIPGVFAAGDVTTVPYKQIVIAVGEGAKASLAAFDHLIRTSAPA

SEQ ID NO: 22777 - protein, 315 aa, Wolbachia endosymbiont of Drosophila ananassae
MKKAVILFNLGGPDSLNAVRPFLFNLFYDRRIINLPNPFRFLLAKFISAKRENTARKIYEEIGGKSPILENTKMQANALELKLNENRNHVHKVFICMRYWRPFADEVIESVKQFDPDEVILLPLYPQYSTTTTLSSIENWQKNAKRYGLKCNTKMIHRYYDNQDFIEAHTNLIAKYYKLARKIGKPRVLFSAHSLPLSIIKKGDPYASQVERSVELIVEKLAINNLDWSICYQSKIGPVKWLEPSTESELLRAKADGVPVVLSPISFVSEHSETLVELDIEYKAIIKDGYYFRVPTLSTDPLFIKCLADLCINLP

SEQ ID NO: 22778 - protein, 313 aa, Escherichia coli
MLDNVLRIATRQSPLALWQAHYVKDKLMASHPGLVVELVPMVTRGDVILDTPLAKVGGQGLFVKELEVALLENRADIAVHSMKDVPVEFPQGLGLVTICEREDPRDAFVSNNYDSLDALPAGSIVGTSSLRRQCQLAERRPDLIIRSLRGNVGTRLSKLDNGEYDAIILAVAGLKRLGLESRIRAALPPEISLPAVGQGAVGIECRLDDSRTRELLAALNHHETALRVTAERAMNTRLEGGCQVPIGSYAELIDGEIWLRALVGAPDGSQIIRGERRGAPQDAEQMGISLAEELLNNGAREILAEVYNGDAPA

SEQ ID NO: 22779 - protein, 531 aa, Zea mays
MEAVGVTPAPVAAPEKKKLLDLKDPFPAAANGGAKASPAAKWAMKKKLVGGDAGYVLEDVPHLTDYMPQLPTYPNPLQDNPAYSVVKQYFVNPDDTVTQKIVVHKTSARGTHFRRAGPRQRVYFQSDEVNAAIVTCGGLCPGLNTVIRELVCGLYDMYGVSSVVGIEGGYKGFYSKNTVALTPKSVNDIHKRGGTVLGTSRGGHDTAKIVDCLQDRGINQVYIIGGDGTQKGASVIYEEVRRRGLKCSVVGVPKTIDNDIAVIDKSFGFDTAVEEAQRAINAAHVEAESAENGIGVVKLMGRNSGFIAMYATLASRDVDCCLIPESPFYLEGKGGLLEFVERRLKDNGHMVIVVAEGAGQDLIARSMNFVDTQDASGNKLLLDVGLWLSQKIKDHFKKKPSFPITLKYIDPTYMIRAVRSNASDNVYCTLLAHSALHGAMAGYTGFTVAPVNGRHAYIPFYRITEKQNKVVITDRMWARVLCSTNQPCFLSHEDVENMKHDDDEHHHMHNTQLLEGGSSPVSKCNGSAAAV

SEQ ID NO: 22780 - protein, 364 aa, Triticum aestivum
MASDHERLRALKAFDGTKAGVKGLVDAGVTTIPAIFHHPPESLADAPHHHRGHHQFAIPVIDLAGLGTPSERASVVGAMKAAAATVGFFQVTNHGVPESAMSKVLAAVRRFNEEPAEAKAPYYSRDPKRRARYQCNFDLFRSPAASWRDTLYMEMAPEPPPPEQIPPACRTIAPEYTRLVQRLGRILFGLLSEALGLSRSYLEEEAGCLEGLSVGCHYYPACPEPRRTLGTARHSDPSFLTVLLQDAVGGLQVLVEDEKRRPAWVDVPAEAGALVVNVGDYLQILSNDRFRSVEHRVVASSAGPRVSVACFFRADASTRVLAPIVAGGDGDGRARYRSTTVPEMLRHYGTKGLGGVSALQRVRI

SEQ ID NO: 22781 - protein, 335 aa, Bradyrhizobium sp. BTAi1
MTVRVAINGFGRIGRNVLRAIYESGRGDIEVVAINDLGSVDINAHLLRYDSVHGTFPGAVKVNGASIDIGRGSPIRVTAERDPKTLPWKDVDIALECTGIFTAREKASLHLENGSKRVLVSAPAAGADKTIVFGVNHNSLSPGDNVVSCASCTTNCLAPVAAVLHRTIGIDKGFMTTIHSYTGDQPTLDTLHKDPYRARAAAMSMIPTSTGAAKAVGLVLPELNGKLDGVAIRVPTPNVSVVDFKFIASRETTAEEINSVVRTAAGADLEGILGFTDEPLVSVDFTHDPRSSIVHMDQTKVIDGRLCRVMSWYDNEWGFSNRMADTAVAMGRLIG

SEQ ID NO: 22782 - protein, 112 aa, Xylella fastidiosa Ann-1
MKLITAIIRPFKLDEVREALSKVGVSGITVTEVKGFGQQKGHTELYRGTEYVIDFLPKIKIEMVVTDERLDAVIEVIRIAAVTGKIGDGKIFVTKIEQVVRIRTGEIDIDAL

SEQ ID NO: 22783 - protein, 382 aa, Symbiobacterium thermophilum IAM 14863
MPTVTEPRFLEERRKAAQTLTETLSLPAKTDEAWRRTSLEGLDVLQYRPTAARVTLKGSVPEGVVFANLLDAAAEHAELVQRYLGRLFPMDQNLLTAAQAAHLNGGVLLYVPRGVVVEEPLEVVFEAQDGEAQYLHTLVIAEDNAEVTLLERYEGTGDYLSVHVVEVFPLQGARVRYGYLQNHSQDAWAFTFRRGLTGRDATLDWAGGEFGGALVRSEIVNDVSGEGSQSNLKVVFGATGRQHQDIVASQVHNGSYSRSDILGRGVLSGHAHTVFRGNGQINPAAKHAQTFQRQQALVLSETARADSIPALIINEHEVEGAGHAATVGQLDEEQLFYLMARGLTRQEAVRMLVLAFLSPVLEQIPVQELRDEMIRLMGEKVS

SEQ ID NO: 22784 - protein, 65 aa, Glycine max
MEPFFRKQGMPVRFNKGVVELVSDFVVCEERKPLSPQAFCILRLMGIKMGTFWLSFICRWSPHEF

SEQ ID NO: 22785 - protein, 115 aa, Malus x domestica
MASSAVIKLALVVALCMAVSVAHAITCGQVSSNLVPCFDYVRSGGPVPPACCNGIRTINGLAKTTPDRQAACNCLKSLAGSVSGVNPGNAESLPGKCGVNVPYKISTSTNCATVK

SEQ ID NO: 22786 - protein, 376 aa, Synechococcus elongatus PCC 7942
MLDCIVVGAGPAGGSAAYHLARRDRQVLLLEQAQLPRQKACAGGVSPQVARWFDCDLRSVVDHGVDRLRFTWKLGDPVEAELPSEEPFWMVRRDRFDHFLVEQAANLGARIEDGAAVTAVSAEGDGWLVTVGDRAYRSRTLIAADGARGPLAQWLGFPSQKRRYAQACELDVPLPARPDSTAHFEFGLVRNGYIWVFPKSDGYSIGIGTFRGNDATDFRGLLETYLAGFGVSADLDRIVPHPLCVWDGSQPLHRGSALLVGEAASLTDPFTAEGIRPALLSGMRAAEAIDRAIAGDRNALAGYSRTIQQEWGDSMAWAKRISSVFYRVPNLGYQIGIKRPTAPQRMAQILVGELDYSDIATRVIRRLTTGFLPGMR

SEQ ID NO: 22787 - protein, 117 aa, Triticum aestivum
MARVALLAVFAVLAALAVAEMASGAVTCGDVTSAIAPCMSYATGQASSPSAGCCSGVRTLNGKASTSADRQAACRCLKNLAGSFKGISMGNVANIPGECGVSVSFPINNNVNCDTLH

SEQ ID NO: 22788 - protein, 369 aa, Zea mays
MTGCLWPCVGAAVAGHGAGHRKAGLFRSKPRTPAEVVQHARDLVTYILDNKDGCGAGKRDAKHEHRMVELSKEVKEMKGILYGNGEEDPCEEACKQLTKEFFKKDTDTFRQLIVCLQYVDLETQKDITQVIANLQRQKVDSRLVASDYLETNLDLLDILMSGYGNLDIAIHYSTLLRDCIRHQVAARYVLQSPHFRTFFDHIQFPDFNVQSDVFKTFKELMTRHKSTAAEFFSKNYDWFFAEFNSKLILSASNYFIRRKAIQLLRDILLERSNAAVMVRYVSSKEHLMIQMNLLRDESIAIQVEAFHVFKLFVANKEQAPEITGILLANRSKLLRFLKDFTTVEKDDKKFEADKATVISDILALNGAEK

SEQ ID NO: 22789 - protein, 466 aa, Symbiobacterium thermophilum IAM 14863
MVSQPRDIVGEYKYGFRDPENYVFKSDKGLTREIVESISRFKNEPEWMREIRLKAFEVFHAKPLPTWGVDLSAIDFQNIHYFVRATERQGRSWDEVPEDIKRTFDRLGIPEAERKFLAGVSAQYESEVVYHNIRKDLEAQGVLFCDMDTAVREYPHIVKEYFGTVVPMTDNKFAALNTAVWSGGSFIYVPPGVTVEIPLQAYFRINTENMGQFERTLIIVDEGANVHYVEGCTAPIYSTDSLHAAVVEIIVKKGGRCRYTTIQNWSTNVYNLVTKRAVAYDDAVMEWVDGNIGSKVTMKYPAIYLMGPGARGDVISIAVASKGMIQDAGAKIYHFAPDTSSRITSKSISREGGNATYRGHILVEPQAERAKVKVECDALIFDDGSESHTIPYMDIKNSNVTIEHEATVSKVSEEQLFYLMSRGLSEEQALAMIVMGFIEPFAKELPMEYAVELNRLIEMEMEGSVG

SEQ ID NO: 22790 - protein, 229 aa, Wolbachia endosymbiont of Biorhiza pallida
LCDKKIQLGINLTKGLGAGALPDVGKGAAEESIDEIMEHIKDSHMLFITAGMGGGTGTGAAPVIAKAAREARAAVKDRAPKEKKILTVGVVAKPFGFEGVRRMRIAELGLEELQKYVDTLIVIPNQNLFRIANEKTTFSDAFKLADNVLHIGIRGVTDLMVMPGLINLDFADIETVMSEMGKAMIGTGEPEGEDRAISAAEAAISNPLLDNVSMKGAQGILINITGGGD

SEQ ID NO: 22791 - protein, 389 aa, Schizosaccharomyces pombe
MVVHTGNRLNKLRELMKERGYTLYVVPSEDAHSSEYTCDADARRAFISGFDGSAGCAVIGETSAALFTDGRYFNQASQQLDENWTLMKQGFTGVPTWEEYCTQMTKCNEKVGIDSSLITFPAAKALRESLFLKSGAVLVGDHDNLVDIVWGASRPKEPLEKLIVQEIKYAGLGVDEKLHNLREAMKEQKIEAFVVSMLDEVAWLYNLRGADVPYNPVFFAYSLVTLDEAFLYVDERKVTPEVSKHLDGFVKILPYDRVFSDAKNSNLTRIGISSKTSWCIATSFGETKVMPILSPISQAKGIKNDAELKGMKECHIRDGCALVEYFAWLDEYLNSGNKINEFDAATKLEQFRRKNNLFMGLSFETISSTGPNGAVIHYSPPATGSAIID

SEQ ID NO: 22792 - protein, 192 aa, Arabidopsis thaliana
  misc_feature (86)..(86): Xaa can be any naturally occurring amino acid
  misc_feature (106)..(106): Xaa can be any naturally occurring amino acid
  misc_feature (148)..(148): Xaa can be any naturally occurring amino acid
  misc_feature (154)..(154): Xaa can be any naturally occurring amino acid
  misc_feature (182)..(182): Xaa can be any naturally occurring amino acid
MASSMLSSAAVVTSPAQATMVAPFTGLKSSAAFPVTRKTNKDITSIASNGGRVSCMKVWPPIGKKKFLDFILPSLTFSDGRIWLKXKLTYLLPQQSGIPLFLNFEXLEHGIFCTREQRENTSRVTYGWTGTWANVGGFPLFGCTDFDXVLKEVXECQKEYPGAFIRILGFHHTRPGPWTGFXAYKPPRFPEA

SEQ ID NO: 22793 - protein, 473 aa, Parvularcula bermudensis HTCC2503
MTIPVLMPALSPTMEEGTLAKWLKNEGDQVSAGDVIAEIETDKATMEVEAVDEGVLGKILVEAGTEGVKVNAPIAVLLEDGEDKSDIDEADLSAPAAADAAPKKGDTDKPKTSEIDQDTKKKALPDKPSRASAQAAAPEIPDDTPMVETTVRDALRDAMAEEMRRDEQVFVMGEEVAEYQGAYKVTRELLQEFGDRRVVDTPITEYGFAGLGVGAAFAGLRPIVEFMTFNFAMQAIDHIINSAAKTRYMSGGQMACPIVFRGPNAAASRVAAQHSQDYAPWYGHVPGLIVISPYSAMDAKGLLKAAIRNPNPVVFLEHELLYGEKGDVPEAEDFVLPIGKAKIARQGKDVTIVSYSRGVMFALQAADQLAQEGIEAEVVDLRTIRPMDVETVADSVRKTNRLVTVEESWGPMGIGAEIGWQVTRAAFDYLDAPPERVTQEDVPLPYAANLEKLSLPNAEKVVAAAKRVLYLDD

SEQ ID NO: 22794 - protein, 509 aa, Carboxydothermus hydrogenoformans Z-2901
MERVRIFDTTLRDGEQSPGVSLNAMEKLQIARQLQKLGVDVIEAGFPITSPGDKEAVSLIAREVKGVVVAALARASALDIETAWDAIKDAESPRIHTFIATSDIHLKYKLKMDRETVVERAVAAVKLAKKFTADVEFSAEDASRSDLDFLCRVVEAAVKAGATTINIPDTVGYAEPEEFGEFICKILEKVPVMDRAVLSVHCHDDLGLAVANSLAAIKNGARQVECTINGIGERAGNCSLEEIVMALYTRKDVLPFYTGIKTEEIYRTSKLVSNLTGMPVQPNKAIVGKNAFSHESGIHQDGVLKERTTYEIMNPRLVGIPESRLVLGKHSGRHALKERLLELGYELTEEQLNEAFVKFKALADKKKEVTDQDLEAMMEEEIRKVPETYTLDYFHISTGSTIIPTATVGLIKEGEKLEDAATGDGPVDAIYKAINKITGLTPVLEQYSINAVTSGEDALGEVVVKLKNGLGKIVTGRGVSTDILEASAKAYLNGINKLLFDYQAKGEKQ

SEQ ID NO: 22795 - protein, 336 aa, Moorella thermoacetica ATCC 39073
MLKHVVTLIPGDGTGPELIAAARRVLEASGAELEWEVMAAGEGAQEKYGSVLPEETLASIRKNGVALKGPITTPVGTGFRSVNVALRKELDLYANVRPFRNLPNVPSRYQGVDLVIYRENTEDLYAGVEHMVGEDAAESIKIITRKGSERIARAAFEYARRQGRKRVTAGHKANIMKFSDGLFLRTFYDVARDYPEITADDRIVDNLSMQLVQKPEQYDVLVLPNLYGDILSDLCAGLVGGLGVAPGANIGEKAAVFEPIHGSAPKYAGQNKVNPLATILSGVMMLEHLGEKEAAARIQRAILAVLAEGKYLTYDLGGSAGTSDMADAIVRRLEVE

SEQ ID NO: 22796 - protein, 112 aa, Arabidopsis lyrata subsp. lyrata
LVEKFGIDPNNAFAFWDWVGGRYSVCSAVGVLPLSLQYGFSVVEKFLKGASSIDQHFQSTPFEKNMPVLLGLLSVWNVSFLGYPARAILPYSQALEKFAPHIQQVSMESNGK

SEQ ID NO: 22797 - protein, 487 aa, Desulfitobacterium hafniense Y51
MRALEPLIFELSREGRTGVSLPACDVPEIPLEELIPQEFLRDKEPELPEVSEVDVVRHFTRLSSFNHGVDTGFYPLGSCTMKYNPKVNEKLARLPGFSQIHPYQPEELTQGALGLMVELQEELAEITGMDAFTLQPAAGAHGEMTGILIIKAYHDHRQDVKRRKVIVPDSAHGTNPATGAMAGYDIVQVPSNERGGVDIEALRQVANEEVAALMLTNPNTLGLFDENILEIAEIIHAVGGLIYYDGANANAIMGIARPGDMGFDVVHLNLHKTFATPHGGGGPGSGPVGVKEFLAPYLPKPVAIRTPEGRYSWDDDRPLSIGRVRAFQANFGVLVKAYAYIRALGGEGLKAASQNAVLNANFLMSILKEHYHLPYDRVCMHEFIITPKNLKNYGIHTLDIAKRLLDYGYHPPTIYFPLIVEEAMMIEPTETESLETLEQFAQVMIQIAEEVKQDAEMVKNAPHDTLVTRLDETGAARKPDLRWRKPQ

SEQ ID NO: 22798 - protein, 426 aa, Cryptococcus neoformans var. neoformans JEC21
MDNTPRHLFQTPNNVYILQQPWQFVKELGQGAYGCVSSARNSSTGETCAVKKVTNVFQKKILTKRCLRELRLLHHFRGHKNITCLYDMDIVFDPPGSGQFREVYLYEELMEADLHAIIRSGQPLSDAHFQSFLYQTLCGLKYIHSANVLHRDLKPGNLLVNADCELKICDFGLARGFQPGAVQTDQGQAGFMTEYVATRWYRAPEIMLSFANYTSSIDMWSVGCILAELLGGKPIFKGEDYVDQLNKILNLLGTPTEDTLRRVGSPRAQDYIRSLPIKPRVKFETLYPNASPLALDLLSKLLTFDPAKRYGCEEALEHQYLAVWHDPADEPLCEVPFDFSFEEEDSVSGMRDLILEEVRSFRYLVRQQSMPPARKDSHELPPAPPAPQHPGAGVGPAFHERANSEGDMEEHPGSALEKQLERQKLS

SEQ ID NO: 22799 - protein, 446 aa, Desulfitobacterium hafniense Y51
MNYVPNTVDQQEQILTRIGVGSLEELFADIPESVRRQAQLKIREGLSELELVKYMGRLAAENKTVEEYTSYLGAGAYEHFIPSYVDQLLLRSEFYTAYTPYQPEISQGTLQAIYEFQTLVCELTGMDGANASMYDGASALAEAALMSCDATRRKKVLVPQTIHPEYREVLRTYLLPRGVEILEIPYQEGAVDSEALEKALNTEVAAVLIQSPNFFGMIEKAEEIGQMAHAKGGLLVMAVNPVSLGLLKSPGELGADIVVGEGQPFGNPLNFGGPYLGFLACREKYVRRMPGRIVGATKDKNGKKGYVLTLQAREQHIRREKAASNICSNEALCALAFTIHLSGLGKRGLKEMARLNLQKAHYGAEEIGKLPGMSLAFQGPFFHEFVIKTEVSPRKINEALLSHKIIGGLELSRFYPELDQHLLFCVTETKTKEDIDRLVAGMGEIK

SEQ ID NO: 22800 - protein, 91 aa, Oryza sativa
MAGARRTMALVALVAVVAAAVVAERACCSGVRTLNGKASSSADRRTACSCLKNMASSFRNLNMGNAASIPSKCGVSVAFPISTSVDCSKIN

SEQ ID NO: 22801 - protein, 593 aa, Bacteroides thetaiotaomicron VPI-5482
MKQSIKERIHALRMAFRPNNIKAFIIPSTDPHLSEYVAPYWMSREWISGFTGSAGTVVILMDKAGLWTDSRYFLQAEKELEGSGITLYKEMLPETPSITKFLCQNLKPGESVSIDGKMFSVQQVEQMKEDLAPYQLQVNLFGDPLKNIWKDRPSMPDAPAFIYDVKYAGKSCGEKVAAIRAELKKKGIYALFLSSLDEIAWTLNLRGSDVHCNPVIVSYLLVTQDEVVYFISPEKITQQVNEYLQEQQVSLRKYDEAESFLNSFAGENILIDPKKTNYAIYSAINPACKIIRGESPVTLLKAIRNEQEIVGIHHAMQRDGVALVRFLKWLEQSVPSGKETELSVDRKLHEFRAAQPLYMGESFDTIAGYKEHGAIVHYSATEESDVTLQPKGFLLLDSGAQYLDGTTDITRTIALGELTEEEKTDYTLILKGHIALAMAKFPAGTRGAQLDVLARMPIWSHGMNFLHGTGHGVGHFLSVHEGPQSIRMNENPIVLQPGMVTSNEPGVYKAGSHGIRTENLTLVCKDKEGMFGEYFKFETITLCPICKKGIIKEMLTAEEVKWFNDYHRTVYEKLSPSLNEEEKKWLLEATKAI

SEQ ID NO: 22802 - protein, 308 aa, Desulfitobacterium hafniense Y51
MGSVKIGTRDSQLALWQAEWVKRKLEEYYPEREFVLVPMKTKGDKILDVPLAKIGDKGLFTKELEVGLLNGEIDCAVHSLKDLPTVLPPGLEIAAFCEREEPRDVFLSKDGTPLGSLPAGSIIGTSSLRRKAQLQNYRSDLSFADLRGNLQTRWRKLQESDMAGIVLAAAGVKRLGWEDRITEYISEEIMLSAVGQGAIAVEIAAQRADVREMLDLLNHGDTERAVKAERALLYRLEGGCQIPIGAWAVTEQQQIVLKGMVASLDGQRILKVTLSGEHPEELGRQAADLLIAQGALEILQEIRTPLEK

SEQ ID NO: 22803 - protein, 297 aa, Escherichia coli K12
MKQQGTTLPANNHTLKQYAFFAGMLSSLKKQKWRKGMSESLHLTRNGSILEITLDRPKANAIDAKTSFEMGEVFLNFRDDPQLRVAIITGAGEKFFSAGWDLKAAAEGEAPDADFGPGGFAGLTEIFNLDKPVIAAVNGYAFGGGFELALAADFIVCADNASFALPEAKLGIVPDSGGVLRLPKILPPAIVNEMVMTGRRMGAEEALRWGIVNRVVSQAELMDNARELAQQLVNSAPLAIAALKEIYRTTSEMPVEEAYRYIRSGVLKHYPSVLHSEDAIEGPLAFAEKRDPVWKGR

SEQ ID NO: 22804 - protein, 290 aa, Idiomarina baltica OS145
MSVLIDKNTKVICQGFTGGQGTFHSEQAIAYGTQMVGGVTPGKGGQEHLGLPVFNTVKEAVEATGATASVIYVPAPFCKDSIIEAADAGIELIVCITEGIPTLDMLYVKEYLTHKGVRMIGPNCPGVITPDECKIGIMPGHIHKKGKVGIVSRSGTLTYEAVKQTTDEGFGQSTCVGIGGDPIPGSNFIDILELFEKDPETEAIVMIGEIGGTAEEEAAEYIKNHVTKPVVSYIAGVTAPPGKRMGHAGAIIAGGKGTADEKFAALEAAGVKTVRSLADIGKAVREKTGW

SEQ ID NO: 22805 - protein, 500 aa, Cryptococcus neoformans var. neoformans JEC21
MPSLTQTKDLASLLSDASHFKQKGYINGEWVSASDGATFPLYNPATGAKLADMPHMPRSQVAEAINAAKAAFPAWAALTAYQRQNYLLKLFKEMEEHSEDLAIILCTENGKPLAESRVEISYGASFLTWNAAEALRTYGQTIPSPFPGTRNTVIKQPIGVCGLITPWNFPNAMITRKMAPALAAGCTVVIKAPAETPLSALAMCVLCERVGIPPGVVNVVTMDKGQREMAAGLELCENVKVSKISFTGSTPVGRLLMKQSSGTLKKLSFELGGNAAFIIFDDADLDLAVNGVILSKFRAAGQTCICANRIFVHSKIYDDFARRLVERVKAFKVGNGIEEGVTIGPLVSQRGVEKVERHVQDAVGLGAKVLVGGKRIDKGEGSCFYEPTVLVDVPRQCAVSNEETFGPLAPLFKFDDEDDVVERANSSEVGLAAYFFTKDLARTHRVAEKLEVGMVAVNTGAIAQSCVPFGGVKQSGFGREGGPSGIDEFMVEKLITIGGL

SEQ ID NO: 22806 - protein, 228 aa, Triticum aestivum
MVAAMEEEASKGGSEETFAVVNPAGQAAVTGSGDGANHQTGEHDATITRPPPPRSNNYGAVVIGGTFDRLHRGHHLFLQAAAELARERIVIGVCDGPMLAKKKYGYLIQPIETRMENVKDYIKSVKPDLEVHVEPIIDPYGPSIVDEALEAIVVSKETLPGGHAVNRKRAERGLTQLEIEVAELVPEKSTGNKISSTAFRKIEAEKALQQQKLDQQEEQQAVELECRT

SEQ ID NO: 22807 - protein, 604 aa, Burkholderia thailandensis E264
MNARLPDPSPVPARLALLRGAMTREDLAAYVVPSADPHLSEYLPERWQARQWLSGFTGSVGTLVVTADFAGLWVDSRYWVQAEAQLAGTGVALMKMAGGQQTQPHVEWLAEHVPEGTTVGVDGAVLGVAAARALTSALTPRGIVLRTDLDLLDAIWPQRPSLPGDAVFEHAAPQADTARAGKLAQVRRAMHEQGAQWHFVSTLDDLAWLFNLRGADVNYNPVFVAHALVGLERATLFVADGKVSPELATSLAQDGVDVKPYDAAAAALAALPEGAGLLIDPRRVTYGLLQAVPQQVRVIEAVNPSTFAKSRKTPAEIEHVRATMELDGAALAEFFAWFEGALGRETITELTIDEQLTAARARRPGYVSPSFATIAGFNANGAMPHYRATSAAHATIEGDGLLLVDSGGQYLSGTTDITRVVPVGAIGDAHRRDFTIVLKAMMALSRARFPRGIRSPMLDAIARAPMWAAGLDYGHGTGHGVGYFLNVHEGPQVISHHAPAEPYTAMEEGMITSIEPGVYRPGKWGVRIENLVVNRAAGQTEFGDFLEFETLTLCPIDTRCVLPALLDGDERAWLNAYHATVRERVGKHVSGDAKAWLDARTQPI

SEQ ID NO: 22808 - protein, 521 aa, Idiomarina baltica OS145
MAIDIKVPQLPESVADATIATWHVKPGDKVSRDQNLVDIETDKVVLEVVAEADGVIGEIIADEGTTVTAEEVIGKIEEGAGDDSNDDSDSKDSAEEDKKEESSSKDDNASEKSGSGEGSGEKIEVKVPQLPESVSDATIATWHVKAGDAVKRDQNLVDIETDKVVLEVVAPADGVLAEITQDEGATVGADDVIGTVEAGAAASGSADKSSAKSEETSTEQKDEGDSEVAGPAVRRLLGEHGLKPSDVKGTGKGGRVTKEDVEKHVKGQQSKSSSSSSQSASQQPQAAGDRDQKRVPMTRLRKRIAERLLQAKNDTAMLTTFNEINMKPIMDLRKKYKDVFEETHGTRLGFMGFYVKAVTEALKRFPDVNASIDGDDIVYHNFFDVSIAVSTPRGLVTPVLRDTDKMSIADMENGIRELAIKGRDGKLTLEEMQGGNFTITNGGVFGSLLSTPILNPPQSAILGMHKIQERPMVVDGKIEILPMMYLALSYDHRIIDGKQSVGFLVTVKELLEDPQRLILDI

SEQ ID NO: 22809 - protein, 402 aa, Erythrobacter sp. NAP1
MSEKIYDVVVVGGGPAGATAANDLALAGHSVLLMERGGRIKPCGGAIPPRALDDFDIPQSLLVARARSARMIAPSGRAVDMPVGEIGYVGMVDREEFDEWLRERARMSGVERLTATFDKVERDEHAHPIVTFRRERGGPIEKVRARCIIGADGARSSVAKQCLPDAERVKCVFAYHEIIKSPQMGMIANDDAYDPDRCDVFYQGKLSPDFYAWVFPHGDTASIGVGSANKGFSLRGAVSEMRSELDLTRCETIRREGAPIPLKPLKRWDNGADVIVAGDAAGIVAPASGEGIYYAMVGGRYSAEAASQMLLTGEAKALKTARKRFMKDHGRVFWILGIMQYFWYSSDKRRERFVDMCDDKDVQHLTWQAYMNKKLVRKKPLAHVKIFLKDTAHLLGLRPASS

SEQ ID NO: 22810 - protein, 396 aa, Lactobacillus sakei subsp. sakei 23K
MAEKAHYERTKPHVNIGTIGHVDHGKTTLTAAITKMLADKGLAEAQDYANIDAAPEERERGITINTAHVEYETENRHYAHIDAPGHADYVKNMITGAAQMDGAILVVAATDGPMPQTREHILLAHQVGVDYIIVFLNKTDLVDDDELTDLVEMEVRELLSEYDFPGDDIPVIRGSALGALNGNPDDVKAVEELMATVDEYVPTPERDTDKPFLMPVEDVFTITGRGTVASGRIDRGQVTVGDEVEIIGLKEEIAKTTVTGLEMFRKTLDQGQAGDNIGALLRGIDRESIERGQVLAKPGSIQTHKNFKGEVYILSKDEGGRHTPFFSNYRPQFFFHTTDVTGVIELPEGVEMVMPGDNVTFTVELISPVAIEKGLKFTVREGGRTVGAGVVSEIID

SEQ ID NO: 22811 - protein, 340 aa, Thermoproteus tenax
MFKTHTFSGVMKLAVIPGDGIGPEVVSATLKVIEAAARRFSIPLDIKVVEAGDVAARKYGKPMPDEAWKIVDSADAVLKGPVGETAYDVTSAIRMKYVLYANIRPAKNLPGVPAVKPIDCVFVRENVEDVYVGAEYRVGDVAIALKVITREGTARVARVARRYAEMRRRKVTIVTKSNVLRVVDAFFRDVARGELDGLQVEEMYVDAAAMELVRNPSRFDVVLTTNQYGDILTDLAAQVAGSLGLAPSANIGDKKAMFEPIHGAAFDIAGKGIANPIATILSAAMMFEWMGRQDAANAVRGAVEEALRRGVATPDIGGRATTEEVGRQIAAIVESWPTTS

SEQ ID NO: 22812 - protein, 192 aa, Wolbachia endosymbiont of Drosophila ananassae
MIDSGGQYLDGTTDVTKTVAIGNPTDEQITHYTIVLKAHIAIASVIFPPGTTGGELDILARTHLWKFGMDYMHGTGHGVGSYLSVHEGPQAISKGNKVKLTPGMILSNEPGYYIPGEYGIRIENLMYVDKHKNGFLGFKQLTSIPYDRRLISVQMLTKDEIEWINGYHQFVYKNLENSVKDKEWLKKVCDPL

SEQ ID NO: 22813 - protein, 499 aa, Corynebacterium efficiens YS-314
MRLWGAGGLAEAMSTENFVSNQIFINGWVDGTSERSTTTLNPFNGEEVATIRNASQEDVDKAYATAAEVQKEWAAVPPVKKARILNKAAQVIEDNRDAIVELIRRESGSTALKANIEAGLAMASLREAATFPARITGQILPSNTPGKSNYVFREPLGVVGVISPWNFPFALSMRSVAPALACGNGVVLKPASDTPIVGGTLLAHIFEAAGLPTGLFNVVVGAGSEIGDYFVEHRIPRLISFTGSTPVGKQVGATATGGKYIKKVALELGGNAPMVVLSDADINKAVAAASMGSFLHQGQICMAVNRIIVEAPVYDQFLEGFAARVSKVAYGDQLDDATMVGPIVNDSQVESVSGKIDLAREQGARAVVSGPIEGRVIAPHVFADVTPDMELFREEIFGPVVGVVKADNEEHALELANDTEFGLSSAVFTEDLQRGINFARRVEAGMTHINDITVNDEAHVMFGGEKNSGLGRFNGEWAIDEFTTDHWVSVTTGTDAYPI

SEQ ID NO: 22814 - protein, 353 aa, Bacillus cereus ATCC 14579
MEKIERLRSAFDEAGIDGILLTNEHSRRYMANFTGTAGVVLISKDRAQFITDFRYVEQASKQAVGYEVVQHAGLIIDEVAKQVKELGIQKLGFEQDTLTYSSYSVHKEAIDAEFIPTSGLVEKLRLIKTDSEIKILKEAAQIADAAFEHILSFIRPGVSEIEVSNELEFFMRKQGATSSSFDIIVASGLRSALPHGVASEKVIETGDFVTLDFGAYYKGYCSDITRTIAVGEPSDKLKEIYNIVLEAQLRGVNGIKAGLTGREADALTRDYITEKGYGEYFGHSTGHGIGLEIHEAPGLAFRSDIVLEPGMAVTVEPGIYIPGIGGVRIEDDIIVTSEGNEVITKSPKELIIL

SEQ ID NO: 22815 - protein, 478 aa, Thermoproteus tenax
MGRFSRHEFGESIKILDSTLREGEQTPGVIFSEEWRIKIAKSLSDVGVHLIEVGDPNVAPDVRSAISKIIALKRDGEIKSEIVVHSRSVKSDIENATSLEPDRVAIFYGVSDIHLKHKHRKTREEALAIIAEHVEFARGAGVKVRFTAEDATRADLDYLIQVVKTARDAGADRVSIADTVGILTPDRARQLFSKLKEAVPGVGLDIHAHNDLGMAVANSMAATEGGADVVHTTVNGLGERAGITPLQVFVAAYYYHKGVKLIDMAKLPYLASLVEAASGIAQMPTFPITGDNVFTHKAGVHQAGVLANPETYEPFPPEVVGRSRDFSLDKYSGRRAVAHRLERLGVKVDEETLAKVVEELKSTNARRLRDEDLLEILEKVTGVRYKAYVNKHIEAFIWIKVDENVYTTSVARRVSTISGVVNVGEVTGDFDIVARVVASNAEELNRIIEDIRSVRGVKSTLTNIVLKQLGSLQAPSAP

SEQ ID NO: 22816 - protein, 409 aa, Legionella pneumophila subsp. pneumophila str. Philadelphia 1
MSIEVKVPVLPESVADATVAAWHKKVGDKVSRDENLVDLETDKVVLEVPSPVDGVLSDILFNTGDTVGSGDLLAKISQSVSVESQKTEKEEKPVKKEEIKISESESVSTKEDKSTSPVVRRMMAENDLKAGQIQGTGKDGRITKEDVLSYIESNREKANQTAEVQKEPSMRALSFGGREEKRVPMTRLRAKIAERLLQAQHNAAMLTTFNEVNLKAVMDMRSQYKDSFEKKHGVKLGFMSFFTKAVVESLKRFPAVNASIDGQDIVYHGFYDIGIAVSTERGLVVPVIRDADQLSMAEIELAINDAASKARTGKLSMEEMQGGTFTITNGGVFGSLLATPIINPPQTGILGMHKIEERPIVEKGQIVIRPMMYVALSYDHRLIDGKDSVQFLVSVKELLEDPSRLLLNV

SEQ ID NO: 22817 - protein, 343 aa, Wolbachia endosymbiont of Drosophila ananassae
MSKIEEFRSFMHEINVDAFMLHTKDEYLNEYSEELTKLCGFTGTNGLLIVTKDNKCPFFTDGRYITQARNQLDRGNFQVYNIQEEDPREWIKANLTSTASLGYYLQYFTIEDIRKYENICKLIPCLAGKKSDYRKQAVVLHSIEHAGESSKDKCEKVAKSIDKEAEAVLLTDPNSISWLLNLRNENAKYTPCILGRAILYKSGNVDLFIQDKEHSTIEANLGNHINIFDISELENSLHKLNSIVMDPSTTPMSIMAVIKDKQVAEREDPCLIYKAAKNQTEIAGAINAHIRDGVAVTNFLYWLENNVGTELEAEEKILEYRKEQNLFKQLSFQQFQHLMRMEQ

SEQ ID NO: 22818 - protein, 335 aa, Nocardia farcinica IFM 10152
MKLAVIPGDGIGPEVIAEALKVLDVVVPGVEKTEYDLGAKRYHATGEILPDSVLPELREHDAILLGAIGDPSVPSGVLERGLLLRTRFELDHHVNLRPSRLFTGVRSPLAGAPDIDFVVVREGTEGPYTGTGGAIRVRTPHEVATEVSTNTRFGIERVVRYAFAKAQARRKHLTLVHKTNVLTFAGSLWQRTVDEVGAEFPEVTVAYQHIDAATIHMVTDPGRFDVIVTDNLFGDIITDLAAAVSGGIGLAASGNIDASGTNPSMFEPVHGSAPDIAGQSKADPTAAILSVSLLLNHLGDTEAAARIDAAVAKDLAARSGTASTVEIGDRIAAAV

SEQ ID NO: 22819 - protein, 180 aa, Rubrivivax gelatinosus PM1
MSFTTEQQPGVCEQAPAATKGFTLNHSMLRVKDPKVSLDFYTRVLGMRLLRKLDFPEMSFSLYFLAQAEEAAMAPQDVGERTAWTFAQRGILELTHNWGTENDTEFKYHDGNAKPQGFGHICISVPDLDAAVRWFDENGVTYVKRPEQGKMKDVAFIKDADGYWIEIVEPARLAKLGRPA

SEQ ID NO: 22820 - protein, 149 aa, Glycine max
MESSPAAAAKPARGAGGRKGGDRKKSVSKSVKAGLQFPVGRISRYLKKGRYAIRYGAGAPVYLAAVLEYLAAEVLELAGNAARDNKKNRINPRHLCLAIRNDEELGKLLHGVTIASGGVLPNINPVLLPKRSASQTEKPEKAAKAAKSP

SEQ ID NO: 22821 - protein, 266 aa, Bordetella bronchiseptica RB50
MSEFTPKTILVEVRDHVAWITINRPDAMNALARETVIEIDQALQLLEARADVHALVFTGQGRAFCAGGDLKYFKETVGSGDMNKFRAYLNLCQNMYRRVENFPHPTIAAVNGVAVAGGMELIISCDLVIAAESAKIGDGHANFGIIPGGGGAIRLPRKIPMALAKRLLFTGNLLPARELAEYGLVNQVVPDEQLTEAVQALLAQITKNSPLGVRLIKQLINDGYEQPLDTALRLEVVAWESYGLSNDIKEGLQAFQDKRKPRFSGT

SEQ ID NO: 22822 - protein, 115 aa, Malus x domestica
MASSAVINLALVVALCMAVSVAHAITCGQVSSNLVPCFDYVRSGGPVPPACCNGIRTINGLAKTTPDRQAACNCLKSLAGSVSGVNPGNAESLPGKCGVNVPYKISTSTNCATVK

SEQ ID NO: 22823 - protein, 540 aa, Lactococcus lactis subsp. lactis Il1403
MRAHEILNNPFLNKGTAFTMKERQELGLIGLLPPTVQTIEEQAEQTYEQYLTKPSDLEKRHFLMEIFNTNRTLFYYLFNKHIVEFNPVVYDPTIADTIENYSHLFVDPQYAAYLDINHPENITETLKNAAGDREIRLIVVTDAEGILGIGDWGTQGVDISVGKLMIYTAAAGIDPASVLPVVIDAGTNRKELLEDHLYLGNHQERIYGDQYYSFVDQFVETAESIFPKLYLHWEDFGRSNAATILNNYKTKIPTFNDDIQGTGIVVLGGIFGSLDITGEKLTDQVYLCYGGGSAGAGIAGRVHAEMVSEGLSEEEAYKHFFMIDQQGLLFDDMEDLTPAQKPFAKKRADYKDAGDMTDLLNVVKTVKPTILVGTSTNPGAFTKEVVEAMCANTERPVIFPISNPTKKMETTAEQVIEWSDGKAFVATGVPSGTISYKGVDYQIGQANNSLIYPGLGLGMLASEAKLLTDEMIGAAAHSLSGLVDPGKPGAPVLPPFEFVADVSIKVAEAVAKKAQEQGLTESKETDMAKAVRDLKWYPEY

SEQ ID NO: 22824 - protein, 117 aa, Triticum aestivum
MARVALLAVFSVLAALAVAEMASGAVTCSDVTSAIAPCMSYATGQASSPSAGCCSGVRTLNGKASTSADRQAACRCLKNLAGSFNGISMGNAANIPGKCGVSVPFPINNNVNCNNLH

SEQ ID NO: 22825 - protein, 217 aa, Helicobacter pylori J99
MKVAPSLLSADFMHLAKEIESVSNADFLHVDVMDGHYVPNLTMGPVILENVTQMSQVPLDVHLMVENASFFVELFAPLNPQIISIHAENEKHPHRVLQLIKSSGITPGIVLNPHTHEESIKYLLESVGLVLLMSVNPGFGGQKFLDLVLEKCLKVKELIKRYNPSCLLEVDGGVNDKNIFELQQAGVDVVVSGSYIFESKDRKLAIEGLQNVRQPLA

SEQ ID NO: 22826 - protein, 420 aa, Rhodobacter sphaeroides 2.4.1
MRRVVVTGLGMVTPLACGVEETWKRLLAGQSGAGPIQRFDTSNVTTQYACEIPVGDGSDGTFNADDWMEPKDRRKVDDFILYAMAAATQAVKDSGWEPQSEEDRCRTGVMIGSGIGGLSAIADTAVLIKEKGPKRVSPFFIPSALINLASGQVSIRFGYKGPNHAVVTACSTGAHAIGDAARLIQLGDADVMLAGGAESPISEIGIAGFNACKALSTKRGNEPEAASRPWDADRDGFVMGEGAGVVVLEEYEHARARGAKIYAEVLGYGLSGDAYHITAPSEDGDGGFRSMTMALKRAGLEPSAVDYINAHGTSTMADVIELGAVERLLGEAAAAATMSSTKSSIGHLLGAAGAVEAIFCVLAIRDQVAPPTLNLDNPAVEARIDLAPKAARPRKIDVALSNSFGFGGTNASLVLGRVTS

SEQ ID NO: 22827 - protein, 115 aa, Malus x domestica
MASSAVINLALVVALCMAVSVAHAITCGQVSSNLVPCFDYVRSDGPVPPACCNGIRTINGLAKTTPDRQAACNCLKSLAGSVSGVNPGNAESLPGKCGVNVPYKISTSTNCATVK

SEQ ID NO: 22828 - protein, 335 aa, Nostoc punctiforme PCC 73102
MVAATDFKDYYEILGVSKNATPEDIKKAYRKLARKYHPDLNPNDKQAEARFKEINEANEVLSDPAKRQKYDQYGQYWQQAAAGAPPPRGAGTQGYDFSQYSNFNDFIDELLGGLGRSGGRTRQRGANYRTTRRPEGFRDYVDFGYGEDPSSRFTDIPAQDTEAAIALTFSEAFHGTQKRLQIDGETITVRIPPGVKPGSRIRVKGKGQMSPFNQQRGDLYLSIELLPHPFFKFEGDNLACEVPVSPEEAVLGAQIDVPTPDGKVTMKIPAGVDSGQALRLRGKGWRDPKGNRTALIVRLKIVTPKDLSPQERECYEKLRQVSSFNPRQGLEEVRL

SEQ ID NO: 22829 - protein, 230 aa, Ipomoea batatas
KRLVFTSSTAAVHIKQTQQLVYDESSWSDLDFIYANKMGGWMHFASKTLAEKEAWKAAKEKEIEFISIIPPLVIGPFLIPTFPLSLVTALSPIMDPVGNGFHHNIIKQGKFVHLDDLCEAQIFLYQHPKAQGRFICSSHHATIHDVANMIRHNWPEYYVPSEFKGIEKELPIVSFSSKKLQEMGFEFKYTLEDMYRGAIETLRKKGLLPYSTKEPADIEQEQHSGKEPKS

SEQ ID NO: 22830 - protein, 115 aa, Triticum aestivum
MARVALLAVFAVLAALAVAEMASGAVTCGDVTSAVAPCMSYATGQTSAPSAGCCSGVRTLNAKASTSADRQAACRCLKKLAGSGISMGNAANIPGKCGVSVSFPINTKVDCNTLH

SEQ ID NO: 22831 - protein, 273 aa, Ipomoea batatas
KKLVFTSSAGTLNVQPQQKPVYDESCWSDLDFIYAKKMTGWMYFASKILAEKEAWKATKEKKIDFISIIPPLVVGPFITPTFPPSLITALSLITENQAHYSIIKQGQYVHLDDLCEAHIFLYEHPKAEGRFICSSHHTTIHGLGEMIRQNWPEYYIPSQFKGIEKDLPVVYFSSKKLQDMGFQFKYSLEDMYRGAIETLRKKGLLPYSTKELPAAIEEEQETVPLKVQEPTKQEATTVPLKAAAIEPKQETVPLKLEEPTAIEQKQKVVPLKA

SEQ ID NO: 22832 - protein, 442 aa, Bacillus cereus ATCC 10987
MEIFNLVMVAILIAFTGFFVAAEFAIVKVRSSRIDQLVAEGKRGALAAKKVTTNLDEYLSACQLGITVTAMGLGWLGEPTIEKLLHPLFEKWNLNPSISSVLTFGLAFMIMTYLHVVVGELAPKTMAIQKAERVTLLLAGPLMMFYKVMYPFIWVLNGSARVVTGLFGLKPASEHEVAHTEEELRLILSDSYESGEINQAEYKYVNNIFEFDNRIAKEIMVPRTEIIGFYLEDSVEEHMKVIQNERYTRYPIFGEDKDDIIGMVNVKDFFIRYMTEDQKDLSSIRSYMRPIIEVMETTPIHDLLLQMQKKRIPMAVLYDEYGGTAGIVTLEDILEEIVGEIRDEYDEDEAPPIQHVNEQHIIVDGKVLISEVKDLFGLHIEEDDVDTIGGWIMMQNHEIEEGQHVEAEGYEFKVLEKDAYQIKRVEIRKMEEEQEEEKAATV

SEQ ID NO: 22833 - protein, 416 aa, Campylobacter jejuni subsp. jejuni NCTC 11168
MIAYEKIQLKNKLEVYALPVNKNSDVISVDIFYKVGSRNEIMGKSGIAHMLEHLNFKSTKNLKAGEFDEIVKGFGGVDNASTGFDYTHYYIKCAKKNLDKALELFAELMANLNLKDEEFQPERAVVLEERRWRTDNNPLGYLYFRLFNHAFMYHPYHWTPIGFFKDIENWSIEDIKEFHSIYYQPKNAILLVSGDIESKEVFELSKKHFEKIKNTKTIPKIHTKEPKQDGVKRIYLHKNSDTELLALAYKIPNFKHKDIPALNALSELLGSGKSSLMSEILIDKLNLINDYYAYVNDCIDENLFIFICNCNPNVNAEKVEKELLKIIDKLKMGKISQKDLQRVKNNVKSDFIFSLNNASAVANIYGSYLARGDINPLLNYEKDIQNLELKDLISCAKKYFIQENSTTVILRKDSNG

SEQ ID NO: 22834 - protein, 358 aa, Aspergillus oryzae
MAPSISDFPHSVASTQPSVCKVGINGFGRIGRNVLRASLNRTDLQIVAINHTCNTVQDLIYLIRYDSCMGKLSDDISIHALSDTLITINGRQIVLTSERDLQKLNWSAVGVDYVVECTGKFTKRDLALQHVTYGHAKRVVISAPSSDSPTYVYGVNSDNYRADEDRRVVSCASCTTNCVTPVLKVLHQQFGIVQGLLTTVHAATQSQQVLDGYSKKNRRLGRSVFDNIIPTTTGAAKAIATVLPELTGKVTGVSIRVPAPNVSMIDLTVTTEQPTSLAEIMAAFRRAAKTSLAGVLYVSDEELVSSDYKGNPNSAVVDAPACTELNPQFFKIMAWYDNEWGYSNRLLDLTAHVALQEQ

SEQ ID NO: 22835 - protein, 112 aa, Triticum aestivum
  misc_feature (39)..(39): Xaa can be any naturally occurring amino acid
  misc_feature (47)..(47): Xaa can be any naturally occurring amino acid
  misc_feature (55)..(55): Xaa can be any naturally occurring amino acid
  misc_feature (87)..(87): Xaa can be any naturally occurring amino acid
  misc_feature (100)..(100): Xaa can be any naturally occurring amino acid
MAVSELEVDGVVFPPLARPPGSEHAHFLAGAGVRGMEIXGNFIKFTXIGVYLQGXPAVSALAAKWGGKPAADLASDAASSGDVVTGXFEKFTKVTMILPXEGARNRKDGTAS

SEQ ID NO: 22836 - protein, 265 aa, Pseudomonas aeruginosa PAO1
MDSSPGAVRPELVLLERPEQGVALLRLNRPAVLNALNMRLREALAEHVRRLDECADTRVIVLTGNGTAFAAGADLNELAEASALEIQQRGVERHWQALAACRKPLIAAVEGHALGGGCELAMHCDLIVAGASARFAQPEIRVGVMPGAGGTQRLVRAVGKFQALRMLFTGCTVRAPEALAIGLVSEVAADGQALDRALELARQIAGLPPLALAQIKEVVLAGADLPLDQALALERKAFQLLFDSHDQKEGMRAFLEKRTAEYLGK

SEQ ID NO: 22837 - protein, 414 aa, Candidatus Kuenenia stuttgartiensis
MHGRKRVVITGTGAITSLGREKKELWSALCNGESGIKPITSFDTTAFEVKFGGEVSDFNPAEWLDTKEARRLDRFSQFAIAATDIAVTDAGLNFDAIDTARVGVFIGSGMGGLLEFEAQHKNLLNKGPSRVSPFMVPKLMANAASAHAAIRYGLRGPNFAVVAACTTGVISIGEAVRVIQRGDADIMITGSSEAVITPLAVAGFGAMKALSTHNSEPQKASRPFDKNRDGFVISEGAGIVVIEELEAAKKRGATIYAEILGYGMTADAYHIAAPNSNGEGAIRCMTHALNDAGCGVETIDYINAHATSTPLGDQIEVGAIKKVFGDHASKIPVSSTKSMLGHQLGASGSVEIIICAFALNEGVIPPTINYETPDPQCSGLDFVPNEAREKKIHKTLSNSFGFGGHNATIILGKV

SEQ ID NO: 22838 - protein, 112 aa, Arabidopsis lyrata subsp. lyrata
LVEKFGIDPNNAFAFWDWVGGRYSVCSAVGVLPLSLQYGFSVVEKFLKGASSIDQHFQSTPFEKNIPVLLGLLSVWNVSFLGYPARAILPYSQALEKFAPHIQQVSMESNGK

SEQ ID NO: 22839 - protein, 801 aa, Bacillus anthracis str. A2012
  misc_feature (387)..(387): Xaa can be any naturally occurring amino acid
MKKRLVMIGNGMAGIRCMEEILKHDCDSYEITIFGDEPHPNYNRIMLSHVLQGKTNIQDIIMNEYSWYEENEITLYTNERVQSIDREEKVIMTEKNRTLTYDKLIIATGSSAFILPVEGSTLPGVTGFRTIEDTQFMMDTAKEKKKAVVIGGGLLGLEAARGLIDLGMDVHVVHLMPSLMEQQLDTKAASLLREDLEAQGMKFLMEKKTVKILGTNHVEGIQFEDGEVVDCDLIVMAVGIRPNTQIARDAGLIVNRGIVVNDYMLTNDESIYAVGECAEHDGIAYGLVAPLYEQGAILAKHISNLQTDGYSGSIVGTQLKVAGCDLFSAGQIYEDDQTKAISIFNECKRSYKKVLIRDNKVVGIVLYGDTADGTRLFSMLKKEEDIXEYTPASILHKAGEESELDVATMSADDTICGCNGVTKGTIVHAILEQELTTFEEVKGCTKAAGSCGKCRPLVEQVLSHTLGDAFDASAQSAGMCGCTPLSRDEVVAAIHEKGLKSPKEVRNVLGFVHEDGCSKCRPALNYYLRMAIPEEYEDDKASRFVNERMNGNIQHDGTFSVIPRMYGGVTTADDLMKIAEVAKKYDVPLVKITGASRIGLYGVKKQDLPNVWADLNMTSGYAYSKSLRNVKSCVGSRFCRFGTKDSLGLGMLLEQSLEMVDTPHKMKMGVTGCPRNCAEVLTKDFGVVCVENGYQLYIGGNGGTEVREADFVMIVPTEDDVLHIATAYMQYYRETGIYGERTAYWTERLDFDHIKEILQDANMVTKLNERFQTARGTYKEAWGQALETKSLKAMYEVETVK

SEQ ID NO: 22840 - protein, 240 aa, Yarrowia lipolytica CLIB122
MVRSDWRAQEIRRVMTFTGSKEKTARDALEKFDWNVEVAIDHILNTPQVDLSGASKVFDKYRNADSDEIDLDGTIQYITDLGLSLEEPTVLAVAMTAGSPSVGTFTRKPFVEGWAAIGGDTLPAQQKLCRSFAESMTSLNADFQKIYKFTYGFLLQEGQRVLPQETAVDYWRLLLTGKYEHLDKWLSFVTEKYKRNISRDAWNMLYEFMLFQAKDPSLESYDEDGAWPSVIDEYVEFLKE

SEQ ID NO: 22841 - protein, 431 aa, Picrophilus torridus DSM 9790
MNLFIFRRDLRLYDNTALLKSLNNETATIFIMDPAQVKNNEYRSEKALNFMISSLYDLMTDIEGNHGKLAVFHGDPVDVLKRLVNRENINEIYINRDYTPFSIKRDERIKEFSIKNNIKFNALDDYFLSDPELRTGSGSFFKNFTAFYNRAMEINVKKPVYEIKKSNLIPIDGDDMELKYNNYGRKTAIEKMHNFIKNDYSLRDFPELNMTSFLSADIKFGNISIREAYHYIKDPEFRRQLYWRDFYLYIAYHFPYVFGSNFNRKYNIKWENKEKYIDAWKNGLTGYPIVDAAMRSLNETGYINNRLRMIVSSFLVKDLHVDWRIGEKYFAQKLIDYDPASNNGNWQWVASTGVNSRGMYRIINPWIQQKKFDPECKFIKRYVNELSDLEPEIIHNLYKIRLNNYPAPLVDHKTAVMEFRKLINQTPTYLS

SEQ ID NO: 22842 - protein, 660 aa, Triticum aestivum
  misc_feature (288)..(288): Xaa can be any naturally occurring amino acid
  misc_feature (606)..(606): Xaa can be any naturally occurring amino acid
MESRAISPGETALPYAYAPLAPSDVAEERRGGGGGGVRWRACVAVLAASAVVVLVVASALAGSGRVDRVVGGDVVADMPPLAETARSRGRDAGVSEKTSGAADEMVGLLGAGGDADGFPWSNAMLQWQRTGFHFQPEKNWMNAPAGPVYYRGWYHLFYQYNPEGAVWGNIAWGHAVSRDLIHWRHLPLAMVPDQWYDINGVWTGSATVLPDGSLVILYTGSTNASVQVQCLAVPADPNDSLLRNWTKYEANPILVPPPGIGDKDFRDPTTAWFDESDKTWRTVIGSKXDNHGHTGIVMTYKTKDFINYELIPGLLHSVPGTGMWECIDFYPVGGADGSEELYVMKESSDDDRHDWYALGRYDAAANKYTPIDAEMDVGIGLRYDWGKFYASKTFYDPSKNRRVLWGWIGETDSERADVAKGWASLQSIPRTVELDEKTRTNLIQWPVVEIETLRINSTDLGGTTIDTGSVLPLPLRRATQLDIEATFHLDTSAIAAVNEADVGYNCSTSGGAANRGALGPFGLLVLADGALKEQTAVYFYVSRGLDGGLQTHFCQDESRSSLAQDVVKRVVGFTVPVLDGEDLSLRVLVDHSIVESFAMGGRSTAXTSRVYPTEAIYAAAGVYLFNNATGAAVTVEKLVVHEMDDSYNQIFTADDASAAL

SEQ ID NO: 22843 - protein, 365 aa, Buchnera aphidicola
HVDHGKTTLTAAITTVLAKKYGGSARAFDQIDNAPEEKARGITINTSHVEYDTSMRHYAHVDCPGHADYIKNMITGAAQMDGAILVVAATDGPMPQTREHILLGRQVGVPYIVVFLNKCDMVDDEELLELVEMEVRDLLTQYDFPGEKTPIIRGSALKALEGDAVWEEKIVDLANTLDSYIPTPERSIDQPFLLPIEDVFSISGRGTVVTGRVERGVIKVGEEVEIVGIKVTSKTICTGVEMFRKLLDEGRAGENVGVLLRGTKRDDIERGQVLAKPGTITPHIKFESEVYVLSKEEGGRHTPFFKGYRPQFYFRTTDVTGYVELPEGVEMVMPGDNIKMVVTLIHPIAMSDGLRFAIREGGRTV

SEQ ID NO: 22844 - protein, 123 aa, Zea mays
  misc_feature (32)..(32): Xaa can be any naturally occurring amino acid
MDAPKLETRAMAALLAATARAATAAARAARTXTTGDSTLRPRLPSWQMGGAMPTQTRCGGMRSLLQQANNTPDRRTICGCLKNVANGANGSGTYISRAAALPRKCGGALPHKISTNANCNTIK

SEQ ID NO: 22845 - protein, 408 aa, Arabidopsis thaliana
MGSLRRSTSNRSRKKGTAVKMNRMPSSLSPPTPPCSAIVGGTGKSKKRRGGVCLWTRFDRTGFMEVAGCDKSTIIERSSVSAKDLRTAFSHSSKILAREKAIVLNLEVIKAVITSEQVMLLDSLRPEVLTLTDRLKHHFPRKDGPENILQASSHGHQEGGEEGLKSKLPFEFRVLEIAFEVFCSFVDSNVVDLETQAWSILDELTKKVSNENLKDLRSLKTSLTHLLARVQKVRDEIEHFLDDKEDMEDLYLTRKWIQNQQTEAASNSIVSQPNLQRHTSNRISTSMVTEEDDIDDMEMLLEAYFMQLEGMRNKILLMKEHIDSTEAYVKILQNSRRNGLIHLMMLVNIGNYAITAGTVVVNLFGMNIPIGLYSTPDIFGYVVWAVVALCIVLFIVTVGYAKWKKLLD

SEQ ID NO: 22846 - protein, 235 aa, Erythrobacter sp. NAP1
MATRIDDTPYTMRREALATYFDSTAKQAWIDLTSDAKVSGIRATVRAGRKSMRELLVSWLPSDLRRTRILDAGCGTGALAIDAACRGADVTAVDVAGGLVEVARERATGFTGHGKVRWRAGDMLDPSHGTFAHVVAMDSLIHYSPEDLVDAVEGLSERTTRSILFTFAPHTKLLGAMHTVGKAFPKSDRSPAIVPVSETELRARLGRLSDWKIGRSERISSGFYTSQALELVRRG

SEQ ID NO: 22847 - protein, 738 aa, Gibberella zeae PH-1
MAGIVAVTWKFSSEREQWAHRPEPGQWYASRHWSKQLKQWDAEDHEDNLELKTIIWGSLMFCGETETLIPFLNPRASDKCWKRILEMNRSIRQSSESFESCLPSQSIHGLTSDLVPPASIKFQEPKPQLLASRAFRLAGLAVGLGLSALTAYQRNQAQQMSSHAERHGHLDATAGREVVYCHACANEWYRDEDGLTCPECRGEITEIIDPENDPRDLDHHSSASTSPELHPYDSDPDEADIDEHTNQGFVFRRNIREGSGHHHHHDPAYAPTIESFVNMLNQFGARTPDGRSFSHGPGEHGEHQGHGEHERQGHEGQAGEGEHAHPNFARVQRATFTGPFGSGRTTITMISTPMHTTHTVPPGAPGLQTFQEYAQSLSRRPDGPRGLRVTAISLTMGANQPSSIFSDLLRDTGPPPGHEHVGEDGMGGGPPPGFGRGLQDLLNLLTPGNAVHGDAVYSQEALDRIITRLMEANPQSNAAPPATDEALRNLERKPVNKQMLGSEGKAECTICIDEMKEGDMATFLPCSHWFHEECVTLWLKEHNTCPICRTPIEKNDRGASNNSGNNNSSGSNQSQGPASGPSSDRSNPFAAHMPNAYNTDWEPFDWTSQPHSHSRPAQYSRPPSQSQSRLNEVLRNISTQREERDREHGRDRATTSGYSYDTSRLQRRSSHSPTSPRARAPSEHGARMRQRSPSQSSRRSTADSDQQSRTSGHGPISWLRGQFSRGPGTGSPRDGSRQ

SEQ ID NO: 22848 - protein, 827 aa, Magnetospirillum magnetotacticum
MSLTRRDFIKANAVPATAAAAGLATPAIAQPAKANIRWDKGVCRFCGTGCSVLVGVQDGRVVATQGDPDSPVNRGLNCIKGYFLSKIMYGEDRLTRPLLRMKDGKFDKNGEFQPISWDQAFDIMAEKWKEQLKKPDGVTRVGMFGSGQWTIWEGYAASKLYKAGFRSNNLDPNARHCMASAVAGFMRTFGIDEPMGCYDDIEQTDAFVLWGSNMAEMHPILWSRVTDRRLTHEGCKVAVLSTFEHRSFELADIPMVFTPQTDLAILNYICHYIISKNAYNKEFIDKHVNFKKGATDIGYGLRPTHALEKDQANAATPDKADPMTFDEFKAFVAEYTVEKVSKLSGVPADKLEALAKLYADPKVKVVSFWTMGFNQHTRGTWVNNMIYNVHLLMGKISEPGNSPFSLTGQPSACGTAREVGTFAHRLPADMVVMNDKHREIAERCWKLPAGTINPKIGYHAVLQHRMLKDGKLNAYWVMCTNNMQTAPNMNEEGYPGYRNPANFIVVSDPYPTVTALAADLILPTAMWMEKEGAYGNAERRTQFWAPEGQGSGRGRSDLWQIMEFSKRFKIEEVWPEELIAKKPELRGKTLFEVLYKNGQVDKFPLTELQAGFENDEAKAFGFYPQKGLFEEYASFGRGHAHDLAPFESYHKARGLRWPVVDGKETLWRFREGYDPYVKAGEGVKFYGKPDGKAWIFALPYAPAAESPDKDFDLWLSTGRVLEHWHSGSMTRRVPELHKSVPNAVLYMHPNDAAKRNLRNGDVVKVASRRGEVTTRIDTRGRNKPPEGLVFMPFFDESQLVNKLTLDATCPISKETDYKKCAVKVSKA

SEQ ID NO: 22849 - protein, 355 aa, Chlamydophila pneumoniae CWL029
MSHDRILRAQRALSEHNLDAILVEKSEDLAYFLHDEAIAGILLIGQQEVMFFVYRMDKDLYSHIQRVPLTFLTQDVVADLSLYVQKQRYQKIGFDSASTVYHKFAQRQVLPCLWEPLECFTEKIRSIKSEEEIRRMQEAAALGSAGYDYVLTLLREGITEKEVVRQLRAFWAEAGAEGPSFPPIIAFGEHSAFPHSIPTDRPLKKGDIVLIDIGVLLNGYCSDMTRMTALGTPHPKLLESYPVVVEAQKRAMALCKEGVLWGDIDAEAVRVLREHHLDTYFIHGIGHGVGRHIHEYPCSPRGSQVKLESGMTITVEPGVYFPGIGGIRIEDTLCIDKNKNFSLTARPVISELVCL

SEQ ID NO: 22850 - protein, 112 aa, Caulobacter crescentus CB15
MKLIIAVVKPFKLDEVREALVAAGVEGLTVSEVKGYGRQKGQTEIYRGAEYQVNFVPKVKLEAVVDDASAAKAVEAIKGAAATGKIGDGKVFVLNVEEAVRIRTGETGSAAL

SEQ ID NO: 22851 - protein, 178 aa, Triticum aestivum
  misc_feature (141)..(141): Xaa can be any naturally occurring amino acid
  misc_feature (145)..(145): Xaa can be any naturally occurring amino acid
MAPTVMASSATSVAPFQGLKSTAGLPVSRRSNGASLGSVSNGGRIRCMQVWPIEGIKKFETLSYLPPLSTEALLKQVDYLIRSKWVPCLEFSKVGFIFREHNASPGYYDGRYWTMWKLPMFGCTDATQVINEVEEVKKEYXDAYXRIIGFTTSQVQCVSHRKQRAARSGRLNSHHTAH

SEQ ID NO: 22852 - protein, 483 aa, Prunus dulcis
MSSSSSSSSSPNNLPLKPIPGDYGWPFFGHIKDRYDYFYNQGRYDFFKTRIEKYQSTVFRTNMPPGILIASNPKVIALLDAKSFPIIFDNTKVLRRDVLDGTYMPSTAYTGGYRVCAYLDPSEPNHATLKSYFAALLASQHTKFIPLFQSSTSDMFLNLEAQLSKDGKAYFNTLSDDMSFNFAFELFCGQSPSNTKLGSKGPSLVTLWLFPQLAPQITFGLPKFLALAEDFLLHTFSYPAFLVKSPYKKLYDAFYESAASALDLAEGKFGLSREEACHNLLFVAGFNAFGGMKLLFPALIKWVASGGEELHRELRNEIRAVLKESEGEVTFAALEKMTLTKSVVYEALRIEPPVPYQYGKAKEDIVIQSHDATFEIKKGEMIFGNQNFVGKDPKVFENPEEFVAHRFVGEGEKLLKYLYWSNGRQMDDHPTAENKQCPGKDLVVLISRLMLVEFFLRYDTFTVDAGTVLLGSSVTFKSLTKAS

SEQ ID NO: 22853 - protein, 346 aa, Burkholderia sp. 383
MTASRSPRIVRRALPRPPRPPFTDSHMSTPKHAKVLILGSGPAGYTAAVYAARANLSPVLITGIAQGGQLMTTTDVENWPADAKGVQGPELMARFLEHAERFNTEIIFDHIHTAKLHEQPIRLIGDSGEYTCDSLIIATGASAQYLGLPSEELFMGKGVSACATCDGFFYRGQEVAVIGGGNTAVEEALYLTGIAKKVTVIHRRDKFRAEPILIDRLLEKEKEGAVVIKWDHVLDEVTGEDSGVTGLRIKNVKTGATEDLAVQGVFVAIGHKPNTDLFQGQLEMKDGYILTKSGLHGNATSTSVAGVFAAGDVQDNVYRQAITSAGTGCMAALDAQRYLESLHDKK

SEQ ID NO: 22854 - protein, 418 aa, Rhodococcus sp. Q15
MTAVSEPDTRTVVIVGTGIAGSGAAQALRKEGFGGSIILIGSEPEEPYRRPALSKELLSGKASIDRARLRPSTFWTEQGIDLRIGATVTSIDTDSRTVLLADGDSIDYDVLILATGGRSRRLENEDSERVHYLRDIADMRRLQSQLIEGSSLLVVGGGLIGSEVASTARDLGCSVQVLEAQPVPLSRLLPPSIAEKIAALHASAGVALQTGVDLETLTTGADGVTARARDGREWTADLAVVAIGSLPDTDVAAAAGIAVDNGISVDGYLRTSVVDVYAIGDVANVPNGFLGGMHRGEHWNTAQDHAVAVAKTIVGKEEPFESVPWSWSNQFGRNIQVAGWPGADDTVIVRGDLDSYDFTAICMRDGNIVGAVSVGRPKDIRAVRTLIERSPDISADVLADTNRDLTELAAGLVASPVL

SEQ ID NO: 22855 - protein, 372 aa, Ustilago maydis 521
MAQQLVIDNGSGMCKAGFAGDDAPRAVFPSVVGRPRHQGVMVGMGQKDSYVGDEAQSKRGILTLKYPIEHGIVTNWDDMEKIWHHTFYNELRVAPEEHPVLLTEAPLNPKANREKMTQILFETFNAPAFYVAIQAVLSLYASGRTTGIVLDSGDGVTHTVPIYEGYSLPHSILRLDLAGRDLTEYLARILTERGYPFTTTAEREIVRDIKEKLCYVALDFEQEMLTATQSSALEKSYELPDGQVITIGNERFRTPEVLFQPAFLGLEAAGIHETTYNSIMKCDLDIRKDLYGNIVMSGGTTMYAGISDRMQKEITALAPSSMKVKIVAPPERKYSVWIGGSILASLSTFQQMWISKQEYDESGPSIVHRKCF

SEQ ID NO: 22856 - protein, 115 aa, Malus x domestica
MASSAVINLALVVALCMAVSVAHAITCGQVSSNLVPCFDYVRSGGPVPPACCNGIRTINGLAKTTPDRQAACNCLKSLAGSVSGVNPGNVESLPGKCGVNVPYKISTSTNCATVK

SEQ ID NO: 22857 - protein, 206 aa, Arabidopsis thaliana
MALRDLSSSLSSSSSPELHVLAVDDSFVDRKVIERLLKISACKVTTVESGTRALQYLGLDGDNGSSGLKDLKVNLIVTDYSMPGLTGYELLKKIKESSALREIPVVIMSSENIQPRIEQCMIEGAEEFLLKPVKLADVKRLKELIMRGGEAEEGKTKKLSPKRILQNDIDSSPSSSSTSSSSSSHDVSSLDDDTPSSKRIKLESRG

SEQ ID NO: 22858 - protein, 250 aa, Triticum aestivum
MKLNIANPTTGCQKKVEIDDDQKLRNLYDKRISQEVVGDLLGEEFKGYIFKIMGGCDKQGFPMKQGVLTSGRVRLLLHRGTPCFRGFGRRNGERRRKSIRGCIVSQDLSVINLVIVKKGENDLPGLTDTEKPRMRGLKRASKIKKLFNLGKDDDVRSYVNTYRRTFLNKKGKKVSKAPKIQRLVTPLTLQRKRARIADKKKRIAKKKSEAAEYQKLLAQRLKEQRDRRSESMAKRRSKLSAATKAPAASA

SEQ ID NO: 22859 - protein, 498 aa, Rhodococcus sp. Q15
MAVKDEQAGSGRSKLFRTKSIEQSIKDTDEPETKLRKELNSWDLTVFGVAVVIGAGIFTLTARTAGNVAGPSVSLAFVIAAIACGLAALCYAEFASTVPVAGSAYTFSYATFGEFVAWIIGWDLILEFALASSVVAKGWSLYLGEVMGSRSPIVELGPISFDWGAVLVIAVITILLATGTKLSSRVSLVITAIKVAVVLLVIVVGLFYIDTDNYSPYIPPSEPGSTGEGIHQSLFSYVTGAGGSTFGWYGLLAAASLVFFAFIGFDVVATTAEEAKEPQKALPRGILGSLLIVTVLYVAVTLVLTGMVKYTELEGDTSNLATAFAFHDITWAKNVISFGALAGLTTVVMVLMLGQTRVLFAMARDGLMPRRLAPTGKHGTPVRITILVGVVVAVLAGVFPIGTLEEMVNIGTLFAFVLVSIGVLVLRRTRPDLPRGFRVPLVPLVPILAVLACLWLMFNLSVETWMRFVVWMALGVVIYFAYSRQHSMIGKRERGEIE

SEQ ID NO: 22860 - protein, 322 aa, Thermus thermophilus HB27
MKRIGVFTSGGDAPGMNAAIRAVVRQAHALGVEVIGIRRGYAGMIQGEMVPLGVRDVANIIQRGGTILLTARSQEFLTEEGRAKAYAKLQAAGIEGLVAIGGDGTFRGALCLVEEHGMPVVGVPGTIDNDLYGTDYTIGFDTAVNTALEAIDRIRDTAASHERVFFIEVMGRHAGFIALDVGLAGGAEVIAVPEEPVDPKAVAEVLEASQRRGKKSSIVVVAEGAYPGGAAGLLAAIREHLQVEARVTVLGHIQRGGSPTAKDRILASRLGAAAVEALVGGASGVMVGEVEGEVDLTPLKEAVERRKDINRALLRLSQVLAL

SEQ ID NO: 22861 - protein, 583 aa, Xylella fastidiosa Ann-1
MNRSAHSATRNGASWLTHALEAEGVDTLFGYPGGTIMPFYDALVDSRLTHILVRHEQGAALAANGYARASGRVGVCVATSGPGASNLITGIADAMLDSVPMVCLTGQVPSSLLGTDAFQELDVFGLTMPIVKHSFLVRSIQDLPSMVQDAFRIAREGRPGPVLIDLPKDVQMTDASHLQDHVSAAVMAPPQAEAAMIIEAAAAIASAEKPVIYGGGGIALADAVNVFRTFVDTTSIPTTLTLRGLGALPHAHPHYLGMLGMHGTRAANMAIQECDLLLVIGARFDDRATGKVNEFAPFARIVHLDADAYEINKLRNADIAVPGNLVTTLTALSASLSPSTAHPHISSSRYEWHERCIGNRERFGVRYDAPGNDIYAPALLKRLSEMAPVDTIIACDVGQHQMWVAQHCKFEDPRNHLTSGGLGTMGFGLPAAMGAQFAYPERTVVLVSGDGSFMMNVQELTTIARCKLPLKIVLLDNNSLGMVRQWQELFFAERYSEIDLSDNPDFTALVQVFGIPAKRITVRSDVEQGLAYLLAQPGPALLHVQIDARANVWPLVPPNTANSTMLESNPAHVQKETPHAIPA

SEQ ID NO: 22862 - protein, 229 aa, Musa acuminata
MAARITLIAALLALASSHALAFDPSPLQDFCVADYDSNVFVNGFACKKAKDVTADDFYFTGLDKPASTANELGANITLVNVERLPGLNSLGVAMSRIDYAPFGLNPPHSHPRSSEILHVAEGTLYAGFVTSNTENGNLLYAKKLQKGDAFVFPRGLIHFQLNIGDTDAVAFATFGSQSPGLVTTANALFGSKPPIADYILAQPCSLARRPWAASAAAVVGHRSRKWTTA

SEQ ID NO: 22863 - protein, 437 aa, Flavobacteria bacterium BBFL7
MAKTMDFILPKMGESITEGTILNWLVQEGEAFEEGDILVEVGTDKVDNEVPAPVAGVMSKHFFTDGDVVEIGSVIAQFEESDGSVKTVAAPKSANSIEIPKKDSIVNKQPKPVKTTSKTTSVSNSYVNQDLFVSPLIDSMARKHHMSYEELARIPATGHEGRLRKSDVVNYLNEGRPFQFAQAVSNEPDPTAYRIPQLKLDKGTGTIIEMDRMRSMIADHMVYSKHTSPHVTAYVEADLTDLVNWRNNNKAPFQEKYGERLTFTPLFVDAVARAIKEYPNINASVDGKNIIVKENINVGMATALPSGNLIVPVVKYADQKSLQDIAADVNRMANLARENKLGGDDIKGGTFTISNVGTFGSLMGTPIINQPEVAILATGIIKKRAEVMTKDGVDSIEIRSMMMLSLSFDHRVVDGFLGGSFLKQVADNLSQAPTKNY

SEQ ID NO: 22864 - protein, 519 aa, Xylella fastidiosa Ann-1
MNTGISSQPPCIRIFDTTLRDGEQSPGCSMPAQQKLVMARALDALGVDIIETGFPASSQSDYEAMTLIARELRRPTLAVLSRCLQADIETSARALESATKPRLHVFLSTSPLHREHKLRMSKEQVLESVHKHVSLSRTLIDDVEFSAEDATRTEEDFLIEVTRVAIAAGATTINLPDTVGFSTPEEIRNMFTRVIANVEGANKVIFSAHCHDDLGLAVANSLAAIEGGARQIECTINGIGERAGNCALEELTMVLKVRNAFYNIDTSIHTSRIVSTSQLLQRLVGMPVQRNKAVVGANAFAHESGIHQHGMLRHRGTYEIMRPQEVGWVCSHMVLGRHSGRAAVEQRLRALGYLLEEEDLKLVFEEFKQLCEKQRLVTDVDLQVLMQDTTVQHGYRLASMTISDVGNQANALVELSNPQGQRVAETAQGNGPVDALFGALAAATGVKLELDSYQVHSVGIGADARGEANLSVRHNDTQYEGTGTSKDIIEASALAWLDVANRLLRNPENMQNKQNTALA

SEQ ID NO: 22865 - protein, 116 aa, Triticum aestivum
  misc_feature (15)..(16): Xaa can be any naturally occurring amino acid
  misc_feature (20)..(21): Xaa can be any naturally occurring amino acid
  misc_feature (26)..(27): Xaa can be any naturally occurring amino acid
  misc_feature (29)..(30): Xaa can be any naturally occurring amino acid
  misc_feature (35)..(35): Xaa can be any naturally occurring amino acid
  misc_feature (62)..(62): Xaa can be any naturally occurring amino acid
CSWPSPLGVLMLAAXXPRAXXVAIDXXGXXDSLVXPAWSYVPGRPPARSGQCCDGVKNLPIXPARSQSDRQSACNCLKGIARGIHNLNEDNARSIPPKCGVNLPYTISLNIDCSRV

SEQ ID NO: 22866 - protein, 362 aa, Vanilla aphylla
SDSGKDAGRLSAAWQLYKTQEELVQVAKQFGVKLTMFHGRGGTVGRGGGPTHLGILSQPPDTILGSLRVTVQGEVIEQCFGEERLCFRTLQRFTVATLEHGMHHHISPKPEWRSLMDEMAVIATKEYRSIVFQDPRFVEYFRLATPELEYGRMNIGSRPAKRKPSGGIESLRAIPWIFAWTQTRFHLPVWLGFGAAFKHVITKDIRNLHILREMYNGWPFFRVTIDLIEMVFTKGNPGIASLYDELLVSNDLLSFGMELRANYEETKRLLLQVAGHKDLLEGDPHLKRLRLRDPYITTLNVCQAYTLKRIREPSYHAMAPHHVSNETESRKSAAELVKLNPTSEYAPGLEDTLILTMKGIAA

SEQ ID NO: 22867 - protein, 515 aa, Yarrowia lipolytica CLIB122
MLRALNTVQRLSSTRAMSTSSISSLLKNPNLLRNQGYVNGQWVSSKTGDTFSVENPATGETLGQVPEFSVAEADEAVQHAQTAFKTFKHTTGRERSKMLRKWYDLMQENAGDLATLVTLENGKSLADAKGEIGYGASFFEWFSEEAPRIYGDIIPSANPANRIYTIKQPIGVCGIITPWNFPSAMITRKAAAAVAAGCTMVIKPGSETPYSALALAYLAEQAGIPKGVVNVVTTKKNTRAFGNALCENPTVKKVSFTGSTGVGKTLMGASASTLKKLSFELGGNAPFIVFEDADIDRAVDGAIASKFRGTGQTCVCANRIYVHESIAEKFAERMAAVVKDFKVGNGLDPNTTHGPLIHEGAKGKIQEQVDDAVKKGGKVLIGGSDAPEIGKAFFQPTVISGAKSDMLIASEETFGPIAAIFPFKTDAEVIELANKAEVGLAGYFYSKDVYRIQQVAEALEVGMVGVNTGLMTECALPFGGIKESGFGREGSKYGLDDYMVLKTIVVSGVEPHIQP

SEQ ID NO: 22868 - protein, 440 aa, Pseudomonas aeruginosa PAO1
MARLKRTLSLGSVVLFGIAYMTPIIVLGTFGILAETTQGHVPAAYIAASLAMLFTALSYGRMAAAFPVAGSAYTYVRKAIDSRLGFIAGWAVLLDYLFLPMAIWLIGAAYLHSAFPAVPNAVWVLAFIGVTTTINIVGLRLAKNVNGLLMLVQFLVLGAFVALCVHYVLGDPGKPLWSLQPLLGGDLQVPLVMSGAAIACYSFLGFDAVSTLTEETRDPRRNIPRAILLITLLGGLIFIVTSYFVQLAHPSFAFDSADSAAYEIARNIGGDLFVTFFLVGLIVGQFTSGLSAQASASRLLFAMGRDGVLPRPFFGRLGKRFETPANSIILCGVVALLALQMDVTTSTSFINFGAFLAFSLVNLSVVFHYYLGAERRGPRETLLFLVFPGIGLVADLWLMASLDHLAIILGLCWLALGAVYLAAITHGFREPPPEMRFEEG

SEQ ID NO: 22869 - protein, 563 aa, Xylella fastidiosa 9a5c
MCSIFGIFNLQPSDNLQRLRHQALECSQRQRHRGPDWSGVYVDVGAILVHERLAIVDPAGGAQPLLSEDGTLALAVNGEIYNHAVLKGTLQQPYVFQTHSDCEVINALYREETPTSFLNRLNGIFAFALWDKTTGRGLIARDPMGVVPLYWGHDQDGRLRVASEMKALIEHCPDVAQFPPGHWYDTTTGTLVKYYERSWKNYSAVEGVQVSLQELREAFERAVHRQLMTDVPYGVLLSGGLDSSLVAAVAARYARHRIETNDQSEAWWPRLHSFAIGLKDSPDLSAANVAAEALNTVHHGFEYTLQEGLDVLPEVIRHIETYDVTTIRASTPMFLLARRIKAMGVKMVLSGEGSDEIFGGYLYFHKAPNAREFHEELVRKLNALYYYDCLRANKAMMAWGVEPRVPFLDREFLDVAMRMDAQHKMVDKTSDGPQQMEKGILRAAFDGYLPPSILWRQKEQFSDGVGYGWIDGLKAHAETQVSDHALATAETRFQVNPPQTKEAYYYRSIFERFFPSPAAAETVPGGKSIACSSPAAIAWDASFATMADPSGRAVSGVHQQALL

SEQ ID NO: 22870 - protein, 364 aa, Hydrilla verticillata
SDSGKDAGRLSAAWQLYKAQEELIKVAKQYGVKLTMFHGRGGTVGRGGGPTHLAILSQPPDTINGSIRVTVQGEVIEQSFGEERLCFRTLQRFTAATLEHGMHPPLSPKPEWRALMDEMAVVATDEYRSIVFKDPRFVEYFRSATPELEYGRMNIGSRPSKRRPSGGIESLRAIPWIFAWTQTKFHLPVWLGFGSAFKHVIGKDPKNLQMLQEMYNEWPFFRVTIDLVEMVFAKGDPVIAAIYDKLLVSKDLQPFGECLREKYTETKDLLLKVAGHKDLLEGDPYLKQRLQLRDSYITALNACQAYTLKRIRDPGYNVQARPHLSKDMVNNGKSAAELVKLNPGSEYAPGLEDTLILTMKGVRA

SEQ ID NO: 22871 - protein, 305 aa, Hydrilla verticillata
SDSGKDAGRLSAAWQLYKAQEELIQVAKKYGVKLTMFHGRGGTVGRGGGPTHLAILSQPPETINGSIRVTVQGEVIEQSFGEERLCFRTLQRFTAATLEHGMRPPISPKPEWRALMDEMAVVATDDYRSIVFKDPRFVEYFRSATPELEYGRMNIGSRPSKRKPSGGIESLRAIPWIFAWTQTKFHLPVWLGFGSAFKHVIGKDPKNLQMLQEMYNEWPFFRVTIDLVEMVFAKGDPVIAAMYDKLLVSKDLQPFGECLREKYTETKDLLLKVAGHKDLLEGDPYLKQRLQLRDSYITALNACQA

SEQ ID NO: 22872 - protein, 147 aa, Triticum aestivum
  misc_feature (11)..(11): Xaa can be any naturally occurring amino acid
PRVRLPSGVIXYRFVVDGERRCFPDLPCETDAMGNAVNLLDVHDFVPESVESVSEFEAPPSPESSYSFLAPEEKDFAKEPPALPSQLHLGVLNSQNSEEICARPQHIVLNHLFIEKGWGAHPLVALGVTHRFESKYVTVVLYKPIER

SEQ ID NO: 22873 - protein, 276 aa, Picrophilus torridus DSM 9790
MIIDGVKISETKMERLKNEIEKIKNTGINPKMKIILIGNDYGSVVYSKAKMRRGSKLGIDVDLDRYDSISREDLIKLLKRYSQSDDIHGIMIETPVPGINYYDVVNEIPFYKDVDGMTSYNLGNLYLKNEFIAPATARAVVDILDYINIKSGNVAIINRSPVVGRPLSMMLLNRDFTVTVCHSRTVNINEITRSSDIVVVAVGKPNFLDRSYVSDKNIIIDVGINYLNGKTCGDADYENIKDYVNAITPVPGGVGPVTATDIFENFINGLKYQIKG

SEQ ID NO: 22874 - protein, 531 aa, Oryza sativa (japonica cultivar-group)
MEAVGVAPAPAGVPEKKLLEVKESRKAAPAAPSTSMAAKWAMKKKLVGGDAGYVLEDVPHLTDYLPELPTYPNPLQDNPAYSVVKQYFVNTDDTVTQKIVVHKTSARGTHFRRAGPRQRVYFQSDEVNAAIVTCGGLCPGLNTVIRELVCGLYDMYGVTSVVGIEGGYKGFYSRNTVALTPKSVNDIHKRGGTVLGTSRGGHDTGKIVDSIKDRGINQVYIIGGDGTQKGASVIYEEVRRRGLKCSVVGVPKTIDNDIAVIDKSFGFDTAVEEAQRAINAAHVEAESAENGIGVVKLMGRNSGFIAMYATLASRDVDCCLIPESPFYLEGKGGLLEFIEKRLKDNGHMVIVVAEGAGQDLIAKSMNFVDTQDASGNKLLLDVGLWLSQKIKDHFKKKRNFPITLKYIDPTYMIRAVRSNASDNVYCTLLAHSALHGAMAGYTGFTVAPVNGRHAYIPFYRITEKQNKVVITDRMWARVLCSTNQPCFLSHEDVEHLKHDDDEHHLHNTQLLEGESSPVKDSSKCNGTAAPV

SEQ ID NO: 22875 - protein, 304 aa, Streptococcus agalactiae A909
MYDTLIIGSGPGGMTAALYAARSNLKVGLIEQGAPGGQMNNTAEIENYPGYDHISGPELSMKMYEPLEKFEVEHIYGIVQRVENDGDVKRVITEDESYEAKTVILATGAKNSLLGVPGEEEYTSRGVSYCAVCDGAFFRDQDLLVVGGGDSAVEEAVFLTQFAKSVTIIHRRDQLRAQKVLQDRAFANEKIKFVWDSVVKEIKGNEIKVSGVTVENLKTGEISEMTFGGVFIYVGLKPHSSMVSELGITDETGWVLTDTNMKTSIPGLYAIGDVRQKDLRQIATAVGEGAIAGQGVYNYITEHF

SEQ ID NO: 22876 - protein, 533 aa, Debaryomyces occidentalis
MVQVLSVLVIPLLTLFFGYVASSSIDLSVDTSEYNRPLIHFTPEKGWMNDPNGLFYDKTAKLWHLYFQYNPNATAWGQPLYWGHATSNDLVHWDEHEIAIGPEHDNEGIFSGSIVVDHNNTSGFFNSSIDPNQRIVAIYTNNIPDLQTQDIAFSLDGGYTFTKYENNPVIDVSSNQFRDPKVFWHERFKSMDHGCSEIARVKIQIFGSANLKNWVLNSNFSSGYYGNQYGMSRLIEVPIENSDKSKWVMFLAINPGSPLGGSINQYFVGDFDGFQFVPDDSQTRFVDIGKDFYAFQTFSEVEHGVLGLAWASNWQYADQVPTNPWRSSTSLARNYTLRYVIQMLKLTANIDKSVLPDSINVVDKLKKKNVKLTNKKPIKTNFKGSTGLFDFNITFKVLNLNVSPGKTHFDILINSQELNSSVDSIKIGFDSSQSLFYIDRHIPNVEFPRKQFFTDKLAAYLEPLDYDQDLRVFSLYGIVDKNIIELYFNDGTVAMTNTFFMGEGKYPHDIQIVTDTEEPLFELESVIIRELNK

SEQ ID NO: 22877 - protein, 116 aa, Arabidopsis thaliana
  misc_feature (90)..(90): Xaa can be any naturally occurring amino acid
  misc_feature (99)..(99): Xaa can be any naturally occurring amino acid
MASSMLSSATMVASPAQATMVAPFNGLKSSAAFPATRKANNDITSITSNGGRVNCMQVWPPIGKKKFETLSYLPDLTDSELAKEVDYLYXANKWVPCVXNFEFEHGFCVTREQRVT

SEQ ID NO: 22878 - protein, 632 aa, Escherichia coli CFT073
MVSYFYPSLKSPHSIKPVKNYRSINKYTQKPSPFSSISNRHYVFYFSTAKSLAHRAALRHFFNKQTQHAVNTRLTEKVMCSIFGVFDIKTDAVELRKKALELSRLMRHRGPDWSGIYASDNAILAHERLSIVDVNAGAQPLYNQQKTHVLAVNGEIYNHQALRAEYGDRYQFQTGSDCEVILALYQEKGPEFLDDLQGMFAFALYDSEKDAYLIGRDHLGIIPLYMGYDEHGQLYVASEMKALVPVCRTIKEFPAGSYLWSQDGEIRSYYHRDWFDYDAVKDNVTDKNELRQALEDSVKSHLMSDVPYGVLLSGGLDSSIISAITKKYAARRVEDQERSEAWWPQLHSFAVGLPGSPDLKAAQEVANHLGTVHHEIHFTVQEGLDAIRDVIYHIETYDVTTIRASTPMYLMSRKIKAMGIKMVLSGEGSDEVFGGYLYFHKAPNAKELHEETVRKLLALHMYDCARANKAMSAWGVEARVPFLDKKFLDVAMRINPQDKMCGNGKMEKHILRECFEAYLPASVAWRQKEQFSDGVGYSWIDTLKEVAAQQVSDQQLETARFRFPFNTPTSKEAYLYREIFEELFPLPSAAECVPGGPSVACSSAKAIEWDEAFKKMDDPSGRAVGVHQSAYK

SEQ ID NO: 22879 - protein, 315 aa, Ustilago maydis 521
MSSKDMSLDELKDLQKQLSKLATSSDSEAILSIFSKLKSGLSAPTEDVIRQSKIGVAVGKMRSHSDKKVADQAKSLVKDWKAIVDKQRAQSSANSSKAPSSTASPAPTTSKPDGTINGNGTASASPASTPSAAAKSTSSTKIDFEILNDKVRNACLKLLYQSLEIGKESHVWNDSQIFDAAVAVEAAILSNQGKGSVTADYRNKVRSLSLNIKDKNNPDLRVRVVEGDIAADKLVTMTNEELASDKRKREIEELQMQNLFKAKGAAAQEAETDAFQCGRCKQRKTRYYQMQTRSADEPMTTFVTCTNCNHKWKFC

SEQ ID NO: 22880 - protein, 1110 aa, Aspergillus fumigatus
MPLIDNSRSNDAVQSSICNGISHTTIIESVRDPDYRHNDPNRRQKIVIVGLGMVAISFIEKIVKQDAERRKYDIVVIGEEPHIGYNRVGLSSFFEHRKIEDLYLNPKEWYGSFKDRSFDYHLNTKVTDIFPERKTVRTSTGDVIPYDILVLATGSDAVLPTHTPGYNAKGIFVYRTIQDLERLIEFASKHKGETAVTCRREAWFGLEAAKAMKDLRGFRKSQTHCPHQSGFWHRQAPTGDAGTTRNFGKIKRARPGPYYTEKRVPKRSKRDDRQQTSPGITFEDGEEIDCCCICFAIGVRPRDELGPPAGIQCAGRGGFVINESLQTSIPDIYAIGECASWENQTFGIIAPGIEMADVLSFNLTNPDKEPKSFKRPDLSTKLKLLGVDVASFGDFFADRDGPKFLPGQRPSIVDGSVGNADGDKEPSVKALTYKDPFAGIYKKYLFTMDGKYLLGGMMIGDTKDYVKLNQMVKSQKPLEVPPSQFILGAQKEGEENADDLDDDAQICSCHNVTKGDIVENVKSGTCKTIGEIKSCTKAGSGCGGCMPLVQSIFNKAMRDMGQEVIVCMHIPYSRADLYTVIAVKRLRTFVDVMQAVGRKPDSLGCEICKPAIAPILSSLFNQHIMDKELHDLQETNDRFLANIQRNGTFSVVPRVPGGEITADKLITIGQVAKKYNLYCKITGGQRIDLFGAKKQDLLDIWTELVDAGMESGHAYAKSLRTIKSCVGTTWCRFGIGDSVGMAIRLEERYKSIRSPHKLKGAVSGCVRECAEAQNKDFGLIATEKGYNIFVGGNGGAKPRHSELLAKDVPPEKVIPIIDRYLIFYIRTADKLQRTARWIENLPGGINYLREVIIDDKLGIGAEMEQQMEELVNSYFCEWTETVRNPKRRKYFQQFANSDETVDTVEVIKEREQQRPTYWPKDSAGEDFKGHQWSSLSWQPVIEANYFSDEHPQISSANIKRGDTQLAIFKVKGKYYATQQMCPHKRAFVLSDGLIGDDDAGKYWVSCPYHKRNFDNFELNGEQAGRCTNDESMNIATFPVEERDDGWVYMKLPPVEELDSVLGTEKWKVRKGEAPDPFQKVDKRYKGMRGKKACDISTKAPTTQAANIIDW

SEQ ID NO: 22881 - protein, 333 aa, Aspergillus oryzae
MQSVLKPIIGPKKEIHDLSGRVALITGGALGIGYEVARAFVLNGARVIMVNRKEEQGQAAIDKIKEEAGADAKIEWVPCDMGNLAQIKEVFTGIREREERLDLLILSAGINANQYGETHDKIDRHFQVNWLGQFYVCNLLFPLIRKTSKLPDTPAPRIVWETSEQHRAAPKVVHFGSLDEINNPAIDNTELYGRSKLAIILGVKYGFLDRVIKPNEDNIYVLSVHPGAVNTTMQQQWKDAYPGLLGKVLTTAMLAIGRDVEQGAFSALWAATSPEIEEKSWNGYYFSDSAQPGKETSQASDPTLGASLWDLSHRIIQDKVGKDAIVDWNSSKS

SEQ ID NO: 22882 - protein, 481 aa, marine gamma proteobacterium HTCC2207
MSHEIFQNYINGQWVGSSAAIENINPSDTSDIVGHYAKASSEDCLAAIAAANAAFADWSKSGLEQRKQVLDFIGAELIARSAEIGEILAREEGKTRAEGVGEVYRSGQFFQYYGAEALRLMGENTQSVRPGVDVEVHREALGVVGIVTPWNFPMAVAAWKVAPALAYGNAVVLKPAELVPASAWILADIISRSGLPAGAFNLVMGSGRDVGETLCTSPDIQAVTFTGSVGVGRHIARNAIDNMARVQLEMGSKNALVVLDDADMDTAVNCALAGGYFGTGQKCTASSRIIVQSGIHDAFVEKLSAAVSKLVVGHALGEGSQIGPVVDARQLQQNLDYMQIAKDEGAELLVGGERLNLDTDGFFMSPALFVNTTNQMRINREEVFGPIACVIKVDSYEQALEVSNDSDFGLTSGIITNSLHHAGHFKRHSQSGCVMVNLPTAGTDYHVPFGGRKNSSYGPREQGSSAREFYTIVKTNYSKPY

SEQ ID NO: 22883 - protein, 358 aa, Bradyrhizobium sp. BTAi1
MADSIQEVLYAFAKGEMVVVTDDDDREGEGDLIVAASLCTPDKMAFIIRHTSGIVCAPITADDARRLRLDPMVAHNDSNHTTAFTVSIDYKPDGGTGISAEERASCCRALANPNAGANDFARPGHIFPLIARDGGVLLRSGHTEAAVDLCKLSGLPPVGVISELMNDDGTVMKGEQVVRFAAAHNLKHVTIADLISYRQAREKLIERVSTFTTESPIGPLQGFAYRSPFDPITHAAFVYNGIGDGKNVLTRLHKPNIVKDLIAGPQRIQAVLQHFKKAGRGILIYLRDGAAGVPVEPVTEPHTAEADRHRQWREVGVGAQILRDLGVTSIRNLTSSAHDYKGLSGFGIEIVANERLEG

SEQ ID NO: 22884 - protein, 540 aa, Lactobacillus sakei subsp. sakei 23K
MAYQFKLPDIGEGIAEGEIQKWAVAEGDTIAEDDTLLEVQNDKSVEEIPSPVSGKIVKILVGEGEVATVGQVLVEIDAPGVEGNDAPTAETTTPAAEQPAAPAASEGVYQFKLPDIGEGIAEGEIQKWAVAEGDTIAEDDTLLEVQNDKSVEEIPSPVSGKIVKILVGEGEVATVGQVLVEIDAPGHNTATASAPVATTPAPQAAETPVATNNSSDTSVVAISDPNRKVLAMPSVRQFARENNVDISQVPATGKHGRTTKEDIQNFMQNGTALVASTTTTDTKSAPVTTATPEPAVAVKPYESATPELETREKMSPTRKAIAKAMVTSKHIAPHVTLFDEVEVSKLMTHRKKFKDVAAKKDIKLTFLPYIVKALVTVLRDFPTLNASIDDTTSEIVYKHYINVGIATDTDHGLYVPNIKDADSKSIFAIAKEIGENTQKALDNKLKPAEMSGGSMTISNIGSIGGGWFTPVVNYPEVAILGVGRIGTEPIVNEDGELAVGKVLKLSLSFDHRLIDGGTAQRAMNELKELLADPELLLMEG

SEQ ID NO: 22885 - protein, 355 aa, Sclerotinia sclerotiorum
MASRAPNPSSGSRKISFNVSEQYDIQDVVGEGAYGVVCSALHKPSGQKVAIKKITPFDHSMFCLRTLREMKLLRYFNHENIISILDIQKPRNYESFTEVYPIQELMETDMHRVIRTQDLSDDHCQYFIYQTLRALKAMHSANVLHRDLKPSNLLLNANCDLKVCDFGLARSAASQEDNSGFMTEYVATRWYRAPEIMLTFKEYTKAIDVWSVGCILAEMLSGKPLFPGKDYHHQLTLILDVLGTPTMEDYYGIKSRRAREYIRSLPFKKKVPFKTMFPKTSDLALDLLEKLLAFNPVKRITVEEALKHPYLEPYHDPEDEPTANPIPEEFFDFDKNKDNLTKEQLKQLIYHEIMR

SEQ ID NO: 22886 - protein, 118 aa, Zea mays
MAGLMKLACLIFACMIVAGPITSNAALSCGTVSGYVAPCIGYLAQNAPAVPTACCSGVTSLNNMARTTPDRQQACRCLVGAANALPTINVARAAGLPKACGVNIPYKISKTTNCNSVK

SEQ ID NO: 22887 - protein, 671 aa, Idiomarina baltica OS145
MCGIAGVFNHRVNDPIDAQTLVNMAAIMHHRGPDGYGYHIQSEQGIGFSHARLSIIDLDEERAKQPFLSADERLMLTHNGEFYDFKRIRADLTARGARFRTKSDSEIVLHLFERYGLEATLKELRGEFAFGLYDKDEDALYLVRDRFGIKPLYWTETDEGVVFGSELKVLFAHPQVKRAFSAEGLYHQLIQVMVPGSTAFEGVHQVQPGQVVKIKRNNGTLNIDTLKYWDVDFPNEHDYPGDEVDETEYVEGVREKLLEAVQHRMTADVPVGCYLSGGIDSCSILGLASASTQTSVKAFTIGFDSDDYDETPIAREMAEATDADHHIMALKANDLYDHFVKTLWHTERTIYNTLGVAKYLMSQEVHEAGYKVVMTGEGSDELFAGYPAFRKDMFLHGLDHLPEIERLEWQKLLEKNNQLFKGAMLAREEFSSDALNKKVGFTPSCVQPWLSCSSVAKPLINRDLQKQLGNYDPGQAIADTLDETYLAGRHPLDRAQYVWIKTMLEGQILTWGGDRVDMANSMEARPAFLDHHLAEYAFTVPPHLRIKGNKEKYVLREAMKGLLPETLYKREKFAFMAPPAHTDPEKWKAVERLAEEFLSEQAVKDAGLLDFDAVQAVFARHSSSDVTAEEQVQLDAVINHMLGVQVLHHHFVATDVPKQAQQRAQELGWHA

SEQ ID NO: 22888 - protein, 336 aa, Sulfolobus tokodaii
GFTVALIQGDGIGPEIVSKSKRILAKINELYSLPIEYIEVEAGDRALARYGEALPKDSLKIIDKADIILKGPVGESAADVVVKLRQIYDMYANIRPAKSIPGIDTKYGNVDILIVRENTEDLYKGFEHIVSDGVAVGMKIITRFASERIAKVGLNFALRRRKKVTCVHKANVMRITDGLFAEACRSVLKGKVEYSEMYVDAAAANLVRNPQMFDVIVTENVYGDILSDEASQIAGSLGIAPSANIGDKKALFEPVHGAAFDIAGKNIGNPTAFLLSVSMMYERMYELSNDDRYIKASRALENAIYLVYKERKALTPDVGGNATTDDLINEIYNKLG

SEQ ID NO: 22889 - protein, 293 aa, Glycine max
MATVIDGKAVAQTIRSEIADEVRQLSQKYGKVPGLAVVIVGNRKDSQSYVGMKRKACAELGIKSFDVDLPEQVSQAELIKQVHQLNANPDVHGILVQLPLPKHINEEEVLTEISLEKDVDGFHPLNIGKLAMKGRDPLFLPCTPKACIELLQRSGVSIKGKKAVVVGRSNIVGLPASLLLLKADATVTIIHSHTSQPESIIREADIVIAAAGQPMMIKGSWIKPGAAVIDVGTNAVDDPTKKSGYRLVGDVDFEEASKVAGWITPVPGGVGPMTVTMLLKNTVEGAKRYIEAK

SEQ ID NO: 22890 - protein, 396 aa, Pseudomonas syringae pv. tomato str. DC3000
MSAQVLRKRICVLPGDGIGVEVMEAALPVIAALGLPFDLLHADIGWECWRREGETVPDDTWKVMASCDATLLGAITSKPLAEAEAELPLPLQGHSRRYVSPVIQLRQNLDLYANVRPVTDMTGENRFRFVVIRENTEGLYAGLDFGRIPDALVPLLEAREALGAAWQRAGQEDATVTLRLQTRSGLTRIFEYAFDYARNNNFSRVTFVDKPMVLRHSSAFARVIFEETAQRYPDITGAIENVDAVALWMVQRPERFGVIVAENMFGDILSDLGAGVMGGLGFAPSGNFGNSGAYFEPVHGSAPAHAGLTKANPSAMFLAIAMMLEHLGYPAQSDCITRAVSLVARSAVRTYDLGGSHTTCQVGEAIVQQCVELQGLLVDRRERSRSAQGERHVSAL

SEQ ID NO: 22891 - protein, 554 aa, Pseudomonas putida KT2440
MAFYRTPHDVTALPAWKALQQHREAMRGFSMSEAFAADAKRFDQFSLSACGLFLDYSKNLITEQSRDLLVNLANEVGLQDAIKSMFSGEIINASEGRPVLHTALRRPVGDKLSVNGVNVMPEVHKVLNQITELVGRIHDGLWRGYSEKPITDVVNIGIGGSFLGPELVSEALLPYAQRGVRCHYLANIDGSEFHELSANLRAETTLFIVSSKSFNTLETLKNAMAARTWYLAQGGSEAELYRHFIAVSSNKAAAVAFGIREENIFPMWDWVGGRYSLWSAIGLPIALAIGTANFKELLSGAYTMDQHFQTAPFDKNMPVLLALLGVWYGNFWDANSHAILPYDHYLRNITKHLQQLDMESNGKSVLQDGTPVKTDTGPVIWGGVGCNGQHAYHQLLHQGTQLIPADFIVPVVSFNPVADHHQWLYANCLSQSQALMLGKTREEAEAELRAKGLNEADIEKLAPHKVIPGNRPSNTLVVERISPRRLGALVAMYEHKVFVQSVIWGINAFDQWGVELGKELGKSVYQRLVGSLEDSAEDGSTQGLINYFRGKHRG

SEQ ID NO: 22892 - protein, 486 aa, Kineococcus radiotolerans SRS30216
MSQENGRGPDRADAEERQRTTTKVVLISVVAAIGGFLFGFDTAVVNGAVDAVAEEFRLAAGLKGFAVSCALLGAAVGAWFAGRLADRFGRKAVMVIAGALFAVSAVGSAFAFGVWDLILWRVVGGVGVGIASVIAPTYIAEVAPAHIRGRLASLQQLAITVGIFAALLSDAFIANTAGGASETTWFGWDAWRWMFVVGVIPSLVWALLALQIPESPRYLIAQGKTQRAGEVLREVLGTRSLEAVQRKVADIKNSMRREDEPSLRDLRGPRFGLLPIVWVGILLSVLQQGIGINVIFYYSTTLWKAVGFDESDAFTTSVITSVTNVVVTFIAIATVDRIGRKPLLTVGSAGMFLSLTVMAIAFSQASGSGQDVSLPQPWGTIGVIAANVYVISFGATWGPVVWVLLGEMFPNRIRAAGLAVAAAAQWLANFAISTSFPSLAKLGLQYAYGLYAVIALLSFVFVRRAVQETKGRELEEIGAETTSTAP

SEQ ID NO: 22893 - protein, 206 aa, Oryza sativa
MNSLSNGLLKGLRRVLEQQRKPIDFYRKSQAWSSTVSFSDIDEKSEMGGDDDYTDSRRELEPQSVDPKKGWGFRGVHRAIICGKVGQVPVQKILRNGRTVTVFTVGTGGMFDQRVVGDADLPKPAQWHRIAIHNDQLGAFAVQKLVKNSAVYVEGDIETRVYNDSINDQVKNIPEICLRRDGKIRLIKSGESAASISLDELREGLF

SEQ ID NO: 22894 - protein, 463 aa, Solibacter usitatus Ellin6076
MIVMKFGGTSVESAAAIERVAGIVRAREARRPVVVVSAMGKTTNKLLAIASAAIAGKRNEYIPQLHDLRDYHSREARLVVPLSERAELDRFLDEHFQELTELVKGLAVLGELTPRSIDAISSYGERLSSYIVTLAFRHFGMAAEHIDSRDVIITDRRHTQAAPNFPETYARLQKTIPPLAAQSVVVMGGFIGSTEDGVTSTLGRGGSDFTAAIVGAGIQAEEIQIWTDVDGMLTADPTILAGGHRVKTISFAEAAELAYFGAKVLHPATVVPAIEKNIPVMILNSRRPEVPGTHITAHTVHCENAVKSIACKRKITTVSIHSTRMLMAHGFLHRIFEIFDRYQTPVDMVATSEVSVSLTIDNTTHIDLVLGELRQFAEATVEHDSVIVCLVGENIRHTPGVARRVFNSLDGINIRMISQGASLLNISFVIAETDLVNAVRLLHEEFFATLDPNVFERKEAVHA

SEQ ID NO: 22895 - protein, 442 aa, Rhodobacter sphaeroides 2.4.1
MATEILMPALSPTMEEGTLAKWLKKEGDEVRSGDIIAEIETDKATMEFEAVDEGILGKILIAEGTAGVKVNTPIAVLVEEGESVDAVSSAKVPEPQEPADEAAPAQGAPKEAPAPAAKAPAAQAARSEGERVFASPLARRIAKEKGIDLAAVQGSGPRGRIVKADVEGAQPSAAPAAKADAAAPKAEAPAAAAAPVAAPAASAASVAKLFADRDYEEVTLDGMRKTIAARLSEAKQTIPHFYLRREVALDALMAFRADLNAKLESRGVKLSVNDFIIKACAVALQQVPNANAVWAGDRILRLKPSDVAVAVAIEGGLFTPVLRDAHQKSLSALSAEMKDLAARARTKKLAPHEYQGGSFAISNLGMFGVENFDAVINPPHGSILAVGAGIRKPVVGKDGAITTATMMSMTLSVDHRVIDGALGAEFLKAIVENLENPIAMLA

SEQ ID NO: 22896 - protein, 463 aa, Rhodobacter sphaeroides 2.4.1
MATQVLMPALSPTMEEGTLAKWLVKEGDAVKSGQIIAEIETDKATMEFEAVDEGTVGKLLVAEGTSGVKVNTPIAVLVEEGESADEVQAPVPTQKEKQPEPAEASEGKAVDEPLVSSPGAPVPGKRDRSPDWPDGTQMKTMTVREALREAMAEEMRGDEHVFLMGEEVGEYQGAYKISQGLLDEFGDRRVVDTPITEHGFAGIAVGAAFGGLRPIVEFMTFNFAMQAIDQIINSAAKTLYMSGGQMGCPIVFRGPNGAAARVGAQHSQDYAAWYAQIPGLRVVMPYSAADAKGLLKTAIRDPNPVIFLENEILYGRSFEVPVMDDFTIPFGKARIWREGTDVTIVSFGIGMTYALEAADKLAAEGISAEVIDLRTLRPIDYETVIESVKKTNRCITVEEGWPVGSIGNHLAATIMQQAFDWLDAPVLNLTGKDVPMPYAANLEKHALVTTAEVVEAAKSVCYR

SEQ ID NO: 22897 - protein, 451 aa, Glycine max
MATHAALASTRIPSNTRFPSKASHSFPTQCALKRLEVTEFSGLRSTSCVTYANSARESSFFDLVASQLTPKTNGSTPVRGETVAKLKVAINGFGRIGRNFLRCWHGRKDSPLEVVVVNDSGGVKNASHLLKYDSMLGTFKADVKILDNETITVDGKPIKVVSSRDPLKLPWAELGIDIVIEGTGVFVDGPGAGKHIQAGAKKVIITAPAKGADIPTYVVGVNEGDYTHQISNIISNASCTTNCLAPFVKILDEEFGIVKGTMTTTHSYTGDQRLLDASHRDLRRARAAALNIVPTSTGAAKAVSLVLPQLKGKLNGIALRVPTPNVSVVDLVVNVEKKGLTAEDVNAAFRKAAEGPLKGVLDVCDVPLVSIDFRCSDVSSTIDSSLTMVMGDDMVKVVAWYDNEWGYSQRVVDLAHLVASKWPGAAKAGSGDPLEEFCETNPADEECKVYE

SEQ ID NO: 22898 - protein, 113 aa, Prosthecochloris aestuarii DSM 271
MKLITAIIQEDKLDQVREALIQANISRISVSRISGHGRQEDIDIYRGRKIAPNLRPKIKLEIAVNEEFVDVAIDTIVDSARHGSGEIGDGKIFVTPLEQCVRIRTNERGGSAI

SEQ ID NO: 22899 - protein, 532 aa, Arabidopsis lyrata subsp. lyrata
KTTLVELGRTLALEECALWMPTRTGLELQLSYTLRHQHPVEYTVPIQLPVINQVFGTSRAVKISPNSPVARLRPVSGKYMLGEVVAVRVPLLHLSNFQINDWPELSTKRYALMVLMLPSDSARQWHVHELELVEVVADQVAVALSHAVILEESMRARNLLMEQNVALDLARREAETAIRARNDFLAVMNHEMRTPMHAIIALSSLLQETELTPEQRLMVETILKSSNLLATLMNDVLDLSRLEDGSLQLELGTFNLHTLFREVLNLIKPIAVVKKLPITLNLAPDLPEFVVGDEKRLMQIILNIVGNAVKFSKQGSISVTALVTKSDTRDADFFVVPTGSHFYLRVKVKDSGAGINPQDIPKLFTKFAQTQSLATRSSGGSGLGLAISKRFVNLMEGNIWIESDGLGKGCTAIFDVKLGISERSNESKQSGIPKVPAIPRHSSFTGLKVLVMDENGVSRMVTKGLLVHLGCEVTTVSSNEECLRVVSHEHKVVFMDVCLPGVENYQIALRIHEKFTKQRHQRPLLVALTGNT

SEQ ID NO: 22900 - protein, 456 aa, Streptococcus agalactiae A909
MSKIVVVGTNHAGTAAIKTMLSNYGEANEIVTFDQNSNISFLGCGMALWIGEQIDGPEGLFYSDKEQLESMGAKVYMNSPVLNIDYDKKEVTALVDGKEHVESYEKLILATGSQPIIPPIKGVEIQEGSREFKATLENLQFVKLYQNSEEVIEKLAKPGINRVAVVGAGYIGVELAEAFQRIGKEVTLVDVADTCMGGYYDRDFTDMMSKNLEDHGIRLAFGQAVQAVEGDGKVERLVTDKETFDVDMVILAVGFRPNTELGAGKLDTFRNGAWVVDKKQETSVKDVYAIGDCATIWDNSRDDINYIALASNAVRTGIVAAHNACGTELEGAGVQGSNGISIYGLNMVSTGLTLEKAKQAGYNAVETGFNDLQKPEFIKHNNHEVAIKIVYDKDSRVILGCQMVSHEDVSMGIHMFSLAIQEKVTIEKLALTDIFFLPHFNKPYNYITMAALGAKD

SEQ ID NO: 22901 - protein, 90 aa, Prosthecochloris aestuarii DSM 271
MNIYIGNLPYNITEDDLREAFNEFGQVDSANIIIDKFSGRSKGFGFVEMPNDEDAEKAIDSLNDTDFNGRTIKVNQARPREERPVRRDRY

SEQ ID NO: 22902 - protein, 494 aa, Salmonella typhimurium LT2
MSDVTLLAEVTTFLRQRHGQFIAGERQAGNGTNFSVTNPATGKIIADVVSATPAQAEEAMQSARRAFDVWRKMPTLQRGALLLKLADTLAAHREELAQLESVCSGKTIMLSRGLELDQSVAFLRYFAGWAGKITGETLNVSLPSMGEERYTAFTQRQPIGVVVGIVPWNFSIMIAIWKLAAALVCGCTIVIKPSEYTPLTLLRVAELAKEAGFPDGVINVVNGAGGEIAQQLIAHPDCAKVSFTGSVATGEKVRRSATSSGKRVTLELGGKNAALFLNDLTAQAMVNGILEAGYLNQGQICAAAERFYLPQEKLDTVMTLLRQRLSEIVPGSPLDEKTVMGPLANQVQLEKVLRLIQRAREEGDTIVYGGETLPGEGYFLQPTAVKVRSKNSTLMHEETFGPVCSFIGYQNEKEALSHINDSPFGLAASVWSENISKALRYAEDIDAGMVWVNMHTFLDPAVPFGGMKGSGIGREFGSAFIDDYTELKSVMVRY

SEQ ID NO: 22903 - protein, 424 aa, Rickettsia sibirica 246
MTTILVIVIIIMIALSALFAATETAITASSPGKIHKLKIAGNKRAKTILEVLKKKEKVIGTLLIGNSLINTVCTTIATTLFISFLGDNGPIVASGVMAFIIIVFAEVVPKAIAVAKPEQLALKMASTIVIFLKLFKPINIALDYITKIFCFIFRINLNPQISGTEEVRGVIEHYHQEGGVYKSDRNMLGGILDIRNMTVSEIMTHRSSIIALNIDLPHEVIIKTLLSGAHTRIPLWQDNRDNIIGILNLKDLLKALYENNNDAKKVDINKLLTPPWFIPENALVVDQLHAFRERNNHFACVVDEYGTLLGIITLEDVIEEIVGPITDEHDRLNNEIIKKSNTEFIIKGTTTIRDINRELDWNLSDEDANTIAGLIIHKIARIPNQGEVIEIFNLKVIILKKIANKIDSVKITVLPTTEATISSE

SEQ ID NO: 22904 - protein, 170 aa, Ralstonia metallidurans CH34
MKPVMKPVTTDICDANEDRLADGSLRVLTPGFLHFGKRMAFSGPAVTLKVFEDNSMVRATLETPGAGRVLVVDGGGSMRCALVGGMLGVLAEKNGWAGIIVNGCVRDSEELKVCDVGIRALGVHPQKSQKRNVGQEDVTVQMPGAVVRPGNWIYADADGVLVSDEKLDGA

SEQ ID NO: 22905 - protein, 325 aa, Compsopogon caeruleus
GKTTLTAAISATLASMGQIELKKFDEIDAAPEEKARGITINTAHVEYETANRHYAHVDCPGHADYVKNMITGAAQMDGAILVVSAADGPMPQTREHILLAKQVGVPNVVVFLNKEDQVDDPELLELVELEVRELLSQYDFPGDDIPFVTGSALLALEAMTNNPNIVRGEDKWVDKIYSLMDAVDDYVPTPERDMDKTFLMAVEDVFSITGRGTVATGRIERGSIKVGDTIEIVGISNTRSTTITGLEMFQKTLDEGMAGDNIGILLRGIQKQDIERGMVLAQPGTITPHTKFEAEVYVLSKEEGGRHTPFFPGYRPQFYVRTTDV

SEQ ID NO: 22906 - protein, 498 aa, marine gamma proteobacterium HTCC2207
MTTVGHFINGQLTTDGERTQDVYNPSTGAVSKQVVLASKATVEEAIAAAQAAFPAWRNTPAIKRARVMFKFKDLLEQNADKICQMIGEEHGKISHDAAGELQRGIENVEYACGAPELLKGEHSKNVAADVDSWSEFQPLGVVAGITPFNFPAMVPLWMYPMAIVCGNCFILKPSERDPSSTLYIASLLKEAGLPDGVMNVVNGDKEAVDTLLHDEHIKAVSFVGSTPIAEYIYATASANGKRCQALGGAKNHAIVMPDADMDNAVNQLLGAAFGSSGERCMALSVAVAVGDAAGDALVSKMTAAMKALKVGPFNDSNNDFGPVITQQHQQKVVGYIDSAEQQGATIVVDGRKPEIAGHEKGFFVGGTLIDGVTAEMESYKAEIFGPVLQVIRVDSMQAAMDLIDAHEYGNGTCIFTRDGEAARYFSDNIQVGMVGINIPLPVPVAYHSFGGWKRSLFGDLHAYGPDAVRFYTKRKTITQRWPSAGVREGVLFSMPTMS

SEQ ID NO: 22907 - protein, 236 aa, Triticum aestivum
  misc_feature (82)..(82): Xaa can be any naturally occurring amino acid
  misc_feature (90)..(90): Xaa can be any naturally occurring amino acid
  misc_feature (122)..(122): Xaa can be any naturally occurring amino acid
MIEQVCTKKQAGTGPEFPGYRRPTRPVTNSRHLEDLYSRYKERDADMIMVEGTSQLCNDLLVDPQDVVMLVISWHMKAAMIXTSMTRESXTMCEFTRQEFIDGLQSIGVDSIEKLREKLPFXRAEIKDDNKFREIYNFAFAWAREKGQKSLPLETAIGMWRLLFAERHWPLIDHWCQFLQVRHNKAISRDTWSQLLEFVKTIDPQLSNYDEEGAWPYLIDEFVEYLTENGCVQRNK

SEQ ID NO: 22908 - protein, 612 aa, Candida glabrata CBS 138
MENKEHHHHHHHHHHHHSNGSYVSNKVSSLADGSRVGNYQIVKTLGEGSFGKVKLAYHVTTGQKVALKIINKKVLAKSDMQGRIEREISYLRLLRHPHIIKLYDVIKSKDEIIMVIEYAGNELFDYIVQRNKMSEQEARRFFQQIISAVEYCHRHKIVHRDLKPENLLLDEHLNVKIADFGLSNIMTDGNFLKTSCGSPNYAAPEVISGKLYAGPEVDVWSCGVILYVMLCRRLPFDDESIPVLFKNISNGVYTLPKFLSPGASDLIKRMLIVNPLNRISIHEIMQDEWFKVDLAEYLVPQDLKQQEQFNKKSGNEENVEEIDDEMVVTLSKTMGYDKDEIYEALESSEDTPAYNEIRNAYILIKDNKSLIKDMKQDNNVTQELDTFLSQSPPTFQQNGDGMKASEDQKKKHSGRRLASSVTQQRTFHQPPFMDQSKEEDSTISILPTSLPQIHRANMLAQGLPAASKISPLVTKKSKTRWHFGIRSRSYPLDVMGEIYIALKNLGAEWAKPSEEDLWTIRVRWKYDSDESRLIEDGVKKIPNLMKIVIQLFQIETNNYLVDFKFDGWESTYGDSTISTNMSEDEMSTFSAYPFLHLTTKLIMELAVNSQGN

SEQ ID NO: 22909 - protein, 326 aa, Cyanidioschyzon merolae strain DBV201
GTTTLTAAISAVLASKDNTVQLKKFEEIDSAPEERARGITINTSHVEYQTEKRHYAHVDCPGHADYVKNMITGAAQMDGAILVVSAADGPMPQTREHILLAKQVGVPSIVVFLNKADMVDDPELLELVELEVRELLSKYDFPGDTIPFVTGSALLALEACMKNPKIGEGKDKWVDKIFELMKIVDEYIPTPQRDVDKSFLMAVEDVFSITGRGTVATGRIERGRVKVGETIEIVGLKNTKTTTVTGLEMFQKTLDEGIAGDNVGVLLRGVQKTDIERGMVLAKPGSITPHTKFEAEVYVLTKEEGGRHTPFFPGYRPQFYVRTTDV

SEQ ID NO: 22910 - protein, 728 aa, Halobacterium sp. NRC-1
MKTLERDLGLGAVFAISVGAMIGSGIFILPALALKMAGPAVIVAYLLAGLLVVPAALSKSEMATAMPEAGGTYIYIERGMGPLLGTVAGVGTWFSLSFKSALALVGGVPYLVLLFDLPVQPVALGLAALLIVVNLLGAKQTGRLQTVIVSLMLGALGWFVAGSAGQVQQANFQGFLTGGWEGLLAATGLVFVSYAGVTKVASVAEEVENPDRNLPLGILGSLAFTTLLYVGIVAVMVGVTDSGAVAGSATPVAVAADATLGTAGVYAVIAAAVLALVSTANAGILSSSRYPFAMSRDQLAPPTFAEIHDRFGTPTTAITLTGAVVLALIAFVPILDIAKLASAFQILVFVLVNLALVAFRTGTTDYDPDFESPLYPWMQGFGVLSGLALLTQMGWVPIAGAAVITLGSVVWYRVYARPRVRREGAATDVVRRRLGRDVLTETEALVDATGAEAGGPEVLVALTREASADRERALLSLAADRARNEDGQVVVVRFDEVPDQAPLDHAADVQSPADVRFEERTEGLSTEFDVDIAYGEVVSHDTKRAILNVAEQRSVDTVVAEHERLRLRSRLLGDPIDWVVRHAPCDVLLVENRGYDAPQNVVLEGDGGPYDPATVAVADAVAGAAGGTVTLQFPLSADHPDKRQETVHAYQDELAGLLSAPVRTADLRADGGDQTAPDLVVRTGAHRRVRGGRGSHTQTAADCTELTVYPHESRQPGLLRRLAERLVF

SEQ ID NO: 22911 - protein, 325 aa, Galdieria sulphuraria
GKTTLTAAISATLASSSGSKAKKFDEIDAAPEEKARGITINTSHVEYETDKRHYAHVDCPGHADYVKNMITGAAQMDGAILVVSAADGPMPQTREHILLAKQVGVPNIVVFLNKEDQVDDPELLELVELEVRELLSNYDFPSEEIPFVCGSALLALETLTKSPNLKRGENKWVDKIYELMDAVDDYIPTPQRDMDKPFLMAIEDVFSITGRGTVATGRIERGQIKVGDTIELVGLKNTKTTTITGLEMFQKTLEEGIAGDNVGILLRGIQKDDIERGMVLAKPGTITPHTKFEAEVYILKKEEGGRHTPFFSGYRPQFYVRTTDV

SEQ ID NO: 22912 - protein, 178 aa, Triticum aestivum
  misc_feature (109)..(109): Xaa can be any naturally occurring amino acid
  misc_feature (143)..(143): Xaa can be any naturally occurring amino acid
MAPTVMASSATSVAPFQGLKSTAGLPVSRRSNGASLGSVSNGGRIRCMQVWPIEGIKKFETLSYLPPLSTEALLKQVDYLIRSKWVPCLEFSKVGFIFREHNASPGVLXDARYWDNVGKLPMFRDCTRRHTVINEVEESRRSXPDAYVRIIGHNIASCSSSCLSTGCKIRKAKVSHGN

SEQ ID NO: 22913 - protein, 318 aa, Galdieria sulphuraria
AISATLASLYGNKPKKFDEIDAAPEEKARGITINTSHVEYETDKRHYAHVDCPGHADYVKNMITGAAQMDGAILVVSAADGPMPQTREHILLAKQVGVPNIVVFLNKEDQVDDPELLELVELEVRELLNNYDFPGEEIPFISGSALLALENLMKSPNIKRGDDKWVDKIYKLMDAVDEYIPTPKRDIDKPFLMAVEDVFSITGRGTVATGRIERGQIKVGDTIELVGLKNTKTTTITGLEMFQKTLDEGIAGDNVGILLRGIQKDDIERGMVLAKPGTITPHRKFESEVYILKKEEGGRHTPFFTGYRPQFYVRTTDV

SEQ ID NO: 22914 - protein, 414 aa, Pennisetum glaucum
MAGMAPEGSQFDAKHYDSKMQELLSTGETEEFFTSYDEVFESFDDMGLQENLLRGIYAYGFEKPSAIQQRGIVPFCKGLDVIQQAQSGTGKTATFCSGILQQLDYGLVECQALVLAPTRELAQQIEKVMRALGDYLGVKVHACVGGTSVREDQRILASGVHVVVGTPGRVFDMLRRQSLRPDHIKMFVLDEADEMLSRGFKDQIYDIFQLLPAKIQVGVFSATMPPEALEITRKFMNKPVRILVKRDELTLEGIKQFYVNVEKEDWKLDTLCDLYETLAITQSVIFVNTRRKVDWLTDKMRSRDHTVSATHGDMDQNTRDIIMREFRSGSSRVLITTDLLARGIDVQQVSLVINYDLPTQPENYLHRIGRSGRFGRKGVAINFVTRDDDRMQFDIQRFYSVVIEELPTNVADLL

SEQ ID NO: 22915 - protein, 533 aa, Moorella thermoacetica ATCC 39073
MAEKILIYDTTLRDGSQGEGISLSVEDKLKIASRLDRLGVDYIEGGWPWANPKDMEFFLRAREVIWRQARLVAFGRTRKPGQAAAEDANLLAIKRAGVKVATIFGKSWDLHVTAALGTTLAENLAMIGDSVAFLVDQGLEVIYDAEHFFDGFKANPDYALETLKAAAKAGASWIVLCDTNGGCLPWEIEEAVARVRQEIQVPVGIHAHNDGDLAVANTLAAVTAGCRQVQGTINGFGERCGNADLCSVMPNLELKMGYQCLPPGQLAFLTEVSRYVSEIANVVPAGNQPFVGYSAFAHKGGIHVSAVLKAPDTYEHIRPQQVGNERRVLMSDQAGASNLRCKAEEMGLELNPERERGIIEGIKELERQGYQFEGADASLELFLRKTTGEYRQQFEVEYVKALVEKRAGQEAISEAIVKLRVGDQVVHTAAEGNGPVNAMDNALRKALEEVFPAIRHMRLTDYKVRVLDEKDATSARVRVLIESRDGSNSWNTVGVSTNIIEASWEALLDSMEYALLKQQQELNKRAAAPCEPY

SEQ ID NO: 22916 - protein, 805 aa, Bacillus subtilis subsp. subtilis str. 168
MGKKQLVLVGNGMAGVRAIEEILSVAKDEFQITIFGAEPHPNYNRILLSKVLQGDTDIKDITLNDWDWYEENNIQLYTNETVIKVDTENKTVITDADRIQPYDELILATGSVPFILPIPGADKKGVTAFRDIKDTDTMLAASKQYKKAAVIGGGLLGLEAARGLLNLGMDVSVIHLAPFLMERQLDATAGRLLQNELEKQGMTFLLEKQTEEIVGDDRVEGLRFKDGTSIEADLVVMAVGIRPNTTLGAESGIPVNRGIIVNDYMQTEIPHIYAVGECAEHRGIAYGLVAPLYEQAKVLAKHMCGIETKPYEGSVLSTQLKVSGVEVFSAGDFNESEEKKAIKVFDEQDGIYKKIVLRGNQIVGAVLFGDSSEGNRLFSMIQKEADISETSKISILQPLSQEAGTSITAAMSDDEIICGCNGVSKGAIIQAIQEKGCSSTDEIKACTGASRSCGGCKPLVEEILQHTLGSDFDASAQKEAICGCTTLSRDEVVEEIKAKGLSHTREVMNVLGWKTPEGCSKCRPALNYYLGMINPTKYEDDRTSRFVNERMHANIQKDGTYSVVPRMYGGVTNSTDLRKIADVVDKYEIPLVKMTGGQRIDLIGVKKEDLPKVWEDLDMPSGYAYGKTLRTVKTCVGEQFCRFGTQDSMALGIALEKKFEGLNTPHKVKMAVSACPRNCAESGIKDLGVVGIDGGWELYVGGNGGTHLRAGDLLMKVKTNEEVLEYAGAYLQYYRETANYLERTSAWLERVGLSHVQSVLNDPEKRQELNGRMNETLSVHKDPWKDFLEDKQTSKELFENVVTTS

SEQ ID NO: 22917 - protein, 357 aa, Moorella thermoacetica ATCC 39073
MYKIAVLPGDGIGPEIVPEAVKVLEAVSRRVGIEFQFTEALVGGAAIDARGIALPPETLELCRQSDAVLLGAVGGPKWDTLPPAERPETAALLPLRKELGLYANLRPAFLYDSLVEASPLKKEIVTGTDLIIVRELTGGLYFGAKKREQTAEGEMAYDTMYYTRAEIERIVRLAFTIARQRRCHLTSVDKANVLTTSRLWRDTVEDIKGEFPEVTVEHMYVDNCAMQLVRRPAQFDVIVTENTFGDILSDQASVLTGSIGMLPSASIGGAVALYEPCHGSAPDIAGQQKANPLATILSAAMMLKYSFKMDQAAAAIEAAVGRVLAKGYRTPDLYVPGTQLVGTAEMGQLVRRELEEG

SEQ ID NO: 22918 - protein, 214 aa, Brassica napus
MTSFSTFSEMLGSEYESPVTLGGEYCPKLAASCPKKPAGRKKFRETRHPVYRGVRLRNSGKWVCEVREPNKKSRIWLGTFLTAEIAARAHDVAAIALRGKSACLNFADSAWRLRIPETTCPKEIQKAAAEAALAFQAEINNTTTDHGLDMEETIVEAIFTEENNDVFYMDEESMLEMPALLASMAEGMLLPPPSVHFGHNYDFDGDADVSLWSY

SEQ ID NO: 22919 - protein, 325 aa, Erythrotrichia carnea
GKTTLTAAISATLSKMSEISLKKFDEIDAAPEEKARGITINTAHVEYETENRHYAHVDCPGHADYVKNMITGAAQMDGAILVVSAADGPMPQTREHILLAKQVGVPNIVVFLNKEDQVDDEELLELVDIEVRELLSQYDFPGEDIPCIPGSALKALEAMSANMETKRGENEWVDKIYSLMDAIDDYVPTPERDVDKTFLMAVEDVFSITGRGTVATGRIERGIIKVGDTIEIVGLADTRTTTITGLEMFQKTLDEGMAGDNIGILLRGVGKEDIERGMVLAQPGTITPHTNFEAEVYVLTKEEGGRHTPFFAGYRPQFYVRTTDV

SEQ ID NO: 22920 - protein, 246 aa, Oryza sativa
MKLNIAYPTTGRQKKLEIDDDQKLRAFYDRRLAAEVEGDVLGDEFKGYVFKIMGGQDKQGFPMKQGVLTNGRVQLLMSPGDQCFRGHGRRNGERRRKSVRGCIVSPDLSVLNLVIVKKGEKDLPGLTDEEKPRMRGPKRASKIRKLFNLSKDDDVRKYVNTYRRTFEANGKKHSKAPAIQRLVTPETLQRKRRKAAVKKAKHEKSRTEAAEYHKLLVQRLKEQRERRSESLAKKRAMRVASQASKE

SEQ ID NO: 22921 - protein, 523 aa, Escherichia coli K12
MSQQVIIFDTTLRDGEQALQASLSVKEKLQIALALERMGVDVMEVGFPVSSPGDFESVQTIARQVKNSRVCALARCVEKDIDVAAESLKVAEAFRIHTFIATSPMHIATKLRSTLDEVIERAIYMVKRARNYTDDVEFSCEDAGRTPIADLARVVEAAINAGATTINIPDTVGYTMPFEFAGIISGLYERVPNIDKAIISVHTHDDLGLAVGNSLAAVHAGARQVEGAMNGIGERAGNCSLEEVIMAIKVRKDILNVHTAINHQEIWRTSQLVSQICNMPIPANKAIVGSGAFAHSSGIHQDGVLKNRENYEIMTPESIGLNQIQLNLTSRSGRAAVKHRMDEMGYKESEYNLDNLYDAFLKLADKKGQVFDYDLEALAFIGKQQEEPEHFRLDYFSVQSGSNDIATAAVKLACGEEVKAEAANGNGPVDAVYQAINRITEYNVELVKYSLTAKGHGKDALGQVDIVANYNGRRFHGVGLATDIVESSAKAMVHVLNNIWRAAEVEKELQRKAQHNENNKETV

SEQ ID NO: 22922 - protein, 770 aa, Bacillus subtilis subsp. subtilis str. 168
MKKQRLVLAGNGMAGIRCIEEVLKLNRHMFEIVIFGSEPHPNYNRILLSSVLQGEASLDDITLNSKDWYDKHGITLYTGETVIQIDTDQQQVITDRKRTLSYDKLIVATGSSPHILPIPGADKKGVYGFRTIEDCQALMNMAQHFQKAAVIGAGLLGLEAAVGLQHLGMDVSVIHHSAGIMQKQLDQTAARLLQTELEQKGLTFLLEKDTVSISGATKADRIHFKDGSSLKADLIVMAAGVKPNIELAVSAGIKVNRGIIVNDFMQTSEPNIYAVGECAEHNGTVYGLVAPLYEQGKALASHICGVPCEEYQGSAPSAALKIAGIDVWSAGKIQEDERTTSIKIYDEQAGVYKKALFVDDKLRVILFGDTRDKQRLLDSLLKQRDISIAKKQIIEPETSGPLFESMPSSETICQCNTVTKGAIEDAVHTNSLTTVEEVKHCTKATGSCGGCKPLVEDLLRYMTNSEYTKPASTPSFCSCTDFTEDDIIAELQRRPFTNPAEVMNQLDWKTKNGCSTCVPAIQYYLEMLYPGFVQPEPATEETCILIPQMYGGRTNAEQLRTIANIIEAYSIPDVSITHGQRLKLSGIKPADLPNMKKDLKMPVYTNEHRHALQSIKACTCGQNRSIQQLAAQIERQLEMLPLPAPISISLSCETDCTEAALQDVGAIRTQAGWDIHIGGVRGTHARSGALFCVTENEDSTAGMIKGLIQYYRETDHYLEGVHQWIDRLGIVHIREVLFEEDLRAQLLESLQTDLSLIQNPTVETGAYKKG

SEQ ID NO: 22923 - protein, 129 aa, Triticum aestivum
MAPSTRRVNAILVVGLLLAAAMAAVAADAAEAEAAAEVSCGDAVSALIPCGSFLVGAVAGAPSESCCRGAQGLRRMAGTPGARRALCRCLEQSGPSFGVLPDRARQLPALCKLGISIPVSPHTDCDKIQ

SEQ ID NO: 22924 - protein, 256 aa, Thermoplasma acidophilum
MHLIVASRSDPASVRMLDYLTEKYTFSEKGGVLNHGDFDLVIIEDRHIFHDMSLSGKYDYLVVLSRHSSAADVKSLTAHPTGNFGPSADLGGKPRTINISCPRVMSGTLRRMMESYSGSRFEVTFEATHHGPIFDIPNYYVEIGTTENEWNDPEALSTTVDSVMNPDVRDYDAFVGVGGGHYAPKIKEYFRENSVNIGHIISKHDHDALEPWEIDMAVKRTPGCKGFIMDRKGTRGNVREMVKKYADENSLELITI

SEQ ID NO: 22925 - protein, 172 aa, Oryza sativa
MEHQGQHGHVTSRVDEYGNPVGTGAGHGQMGTAGMGTHGTTGGMGTHGTTGGMGTHGTTGTGGGQFQPMREEHKTGGVLQRSGSSSSSSSEDDGMGGRRKKGIKEKIKEKLPGGNKGEQQHAMGGTGGAYGQQGHGTGMTTGTTGAHGTTTTDTGEKKGIMDKIKEKLPGQH

SEQ ID NO: 22926 - protein, 517 aa, Moorella thermoacetica ATCC 39073
MADTGKRIYIFDTTLRDGEQSPGVSLNIQEKLEIARQLARLGVDVIEAGFPIASPGDFEAVRAVAREVEGPVIAGLARINERDIDRAWEALQEAQKPRIHVFIATSDIHLKYKLRMSRQEVLEAVRRGVARAKGYCQDIEFSPEDAVRSDLDFLCQVLATAIEAGATVLNIPDTVGYATPEEFGRLISQIRQRVPGIDKVRISVHCHNDLGLAVANSLAAIENGALQVEGAINGIGERAGNAALEEVIMALYTRRDYYGCRTGIVTEEIYRTSKLVSSLTGMPVQYNKAIVGKNAFTHEAGIHQDGVLKERTTYEIMNPAMIGLVQNNIFLGKHSGRHALRSRLEELGFKLTEAELDKAFARFKELADRKKEISDRDLEAIVEHEVKRIPEKFVLEHIHISTGNRVVPTATIGIRVGEELKEEAACGEGPVDAAFKAIDKLTRIPVCLKSYNLNAVTGGKDAVGEVTVKIEYDGRVFIGRGISTDVLEASARAYLNAINKVVYEVGEENLQQASTAQ

SEQ ID NO: 22927 - protein, 575 aa, Xanthomonas campestris pv. campestris str. ATCC 33913
MAKKKTVARFMAETLESAGVERIWGVTGDSLNGLTDALREMHSIEWMHVRHEEVAAFAAGAEAAVTGKLAVCAGSCGPGNLHLINGLFDCHRSRQPVLAIAAHIPSSEIGLSYFQETHPQELFRECSHFVELVTNPAQLPEVLHRAMRTAILQQGVAVVVIPGDIALMEVDKHLSAAWPVLRAPRLLPAAEDVQQLAEILQQSKAVTLLCGSGCAGAHDAVVALADTLGAPIVHALRGKEHVEWSNPFDVGMTGLIGFSSGYHAMLNCDTLIMLGTDFPYRQFYPKDATIVQVDRDPAALGRRTPLQLGIAADVGETIAALLPQLERREERGFLDKSLAHYRKAREGLDELAVPADEGEPLHPQFVTRLISQIADEDAVFTCDVGTPTVWAARYLRMNGQRRLLGSFNHGSMANAMPQALGVQAACPGRQVISLSGDGGFAMLMGDFISLAQLNLPVKVVVFNNASLGFVAMEMKAAGYLDTGTELRNPDFAAMSNAMGILGLRVETSSQLERALRQAFAHSGPALVDVRIATQELVVPPAIKLEQAKGMGLYLLKAVMSGRGDEVLALAKTNLR

SEQ ID NO: 22928 - protein, 651 aa, Arabidopsis thaliana
MQDILGSVRRSLVFRSSLAGDDGTSGGGLSGFVGKINSSIRSSRIGLFSKPPPGLPAPRKEEAPSIRWRKGELIGCGAFGRVYMGMNLDSGELLAIKQVLIAPSSASKEKTQGHIRELEEEVQLLKNLSHPNIVRYLGTVRESDSLNILMEFVPGGSISSLLEKFGSFPEPVIIMYTKQLLLGLEYLHNNGIMHRDIKGANILVDNKGCIRLADFGASKKVVELATVNGAKSMKGTPYWMAPEVILQTGHSFSADIWSVGCTVIEMATGKPPWSEQYQQFAAVLHIGRTKAHPPIPEDLSPEAKDFLMKCLHKEPSLRLSATELLQHPFVTGKRQEPYPAYRNSLTECGNPITTQGMNVRSSINSLIRRSTCSGLKDVCELGSLRSSIIYPQKSNNSGFGWRDGDSDDLCQTDMDDLCNIESVRNNVLSQSTDLNKSFNPMCDSTDNWSCKFDESPKVMKSKSNLLSYQASQLQTGVPCDEETSLTFAGGSSVAEDDYKGTELKIKSFLDEKAQDLKRLQTPLLEEFHNAMNPGIPQGALGDTNIYNLPNLPSISKTPKRLPSRRLSAISDAMPSPLKSSKRTLNTSRVMQSGTEPTQVNESTKKGVNNSRCFSEIRRKWEEELYEELERHRENLRHAGAGGKTPLSGHKG

SEQ ID NO: 22929 - protein, 542 aa, Mesorhizobium loti MAFF303099
MIRTVPTKPYSDQKPGTSGLRKKVPVFQQEHYAENFIQSIFDALDGFQGKTLVIGGDGRFYNREVIQKAIAMAAANGFGKVMVGQGGILSTPAASHVIRKYKTFGGIILSASHNPGGPHEDFGIKYNAGNGGPAPEKLTDAIFAKTKAISSFKTSDIDTIDIDTIGTVKAAGMTVEIIDPVADYAELMESLFDFDALRRLFKSGFRMRFDAMHAVTGPYAKEILENRLGAPSGTCRNFKPLPDFGGHHPDPNLVHAKHLYDEMMGPDAPDFGAASDGDGDRNLIIGKGIFVTPSDSVAMLAANARLAPGYKDGLKGIARSMPTSGAADRVAEKLGIGIYETPTGWKFFGNLLDAGMATICGEESAGTGSNHVREKDGLWAVLLWLNILAARGESCKQVVTEHWAAYGRNYYSRHDYEEVESDRANALVDELRAKLGSLPGTSVRGLKIAKADDFAYHDPVDGSTSEHQGIRILFEGGSRVVFRLSGTGTSGATLRVYIERYEPDKARHDLDTQAALADLIAAADDIAGIKSHTGRNKPSVIT

SEQ ID NO: 22930 - protein, 591 aa, Cicer arietinum
MSSTNDIGPLSLENFKNNLSASWRVVGLKTSNATYQISQPETHLREEKQKEKDGRSSVGLPQWTDSPVKLARRQLIEKRMANRAAELVKQDDEVIVKLEDSAIERSKSVDSAVLGKYNIWRKENENENADNTVRLMRDQIIMARVYLSIAKMKNKLQLYQELQSQLKESQRALGEATSDADLHHNEHEKIKAMGQVLSKAKDQLYDCKLVTGKLRAMLQTSDEQVRGLKKQSTFLSQLAAKTIPNGIHCLSMRLTIDYYLLPPEKRKFPRTENLVNPNLYHYALFSDNVLAASVVVNSTVVNAKDPSKHVFHLVTDKLNFGAMNMWFLLNPPGKATIYVENVDEFKWLNSSYCPVLRQLESATMKEYYFKAGHPTTTGASNLKYRNPKYLSMLNHLRFYLPQVYPKLDKILFLDDDIVVQKDLTGLWDVDLHGKVNGAVETCGESFHRFDKYLNFSNPHIAKNFDPNACGWAYGMNMFDLKVWKKKDITGIYHRWQNLNEDRVLWKLGTLPPGLMTFYGLTHPLNKSWHVLGLGYSPSVDRSEIENAAVVHYNGNMKPWLEIAMTKYRPYWSKYVKYNHPYLRNCKLSEWS

SEQ ID NO: 22931 - protein, 530 aa, Triticum aestivum
  misc_feature (188)..(188): Xaa can be any naturally occurring amino acid
MEAGTWAVVVAAAAAYLAWFWRMSRGLSGPRVWPLVGSLPGLLQHAEDMHEWIVGNLRRTGGTYQTCIFAVPGVARRGGLVTVTCDPRNLEHVLKARFDNYPKGPFWHGVFSDLLGDGIFNSDGDTWVAQRKTAALEFTTRTLRTAMSRWVSRSIHHRMLPILSDAAASGAHVDLQDLLLRLTFDNIXCGLAFGKDPETLARGLPENAFATSFDSATEATLNRFIFPECVWRCKKWLGLGMETTLARSVAHVDRYLSAVIKTRKLELAGKSDGSTPHDDLLSRFMRKGTYSDDSLQHVALNFILAGRDTSSVALSWFFWLVSTHPDVERKIVRELCAVLAASRGADDPALWLAAPFDYEELDRLVYLKAALSETLRLYPSVPEDSKHVVADDYLPDGTFVPAGSSVTYSIYSAGRMKTVWGEDCLEFRPERWLSADGTKFEPHDSYRFVAFNAGPRICLGKDLAYLQMKNIAGSILLRHRLAVAPGHRVEQKMSLTLFMKHGLRMVVRPRDLAPTLDELPAAAPAVAACA

SEQ ID NO: 22932 - protein, 329 aa, Arabidopsis thaliana
MASSIVTSSLKPLAMADSSSSTIFSHPSISSTISSSRIRSSSVSLLTGRINLPLSFSRVSLSLKTKTHLKKSPFVSFVAQTSDWAEEGGEGSVAVEETENSLESQDVSEGDESEGDVSEGDVSEGDESEGDVSEGAVSERAEFPEPSEEAKLFVGNLAYDVNSQALAMLFEQAGTVEIAEVIYNRETDQSRGFGFVTMSSVDEAETAVEKFNRYDLNGRLLTVNKAAPRGSRPERAPRVYEPAFRVYVGNLPWDVDNGRLEQLFSEHGKVVEARVVYDRETGRSRGFGFVTMSDVDELNEAISALDGQNLEGRAIRVNVAEERPPRRGY

SEQ ID NO: 22933 - protein, 112 aa, Erwinia carotovora subsp. atroseptica SCRI1043
MKKIDAIIKPFKLDDVREALAEVGITGMTVTEVKGFGRQKGHTELYRGAEYMVDFLPKVKIEIVVSDDIVDTCVETITQTAQTGKIGDGKIFVFDVARVVRIRTGEEDEEAI

SEQ ID NO: 22934 - protein, 233 aa, Ralstonia solanacearum
MSSPSLAAPALARARDRLARRRTAGVLSRHHLLIIAIAIVIAIIALLLPRTCHAAAGAQAAPAPQPAAAGPCPTALDFRVRRLQDDAPQNLCQYAGRVVLVVNTASYCGYTYQYEGLEALYARFRDKGLTVLGFPSNDFEQEPGTGKQIADFCYNTYGVKFPMFSKTSVVGPAASPLYHWLAQQTGQPPKWNFHKYLLDRSGRVVAVYPSKVEPGDPALIKRIDALLAEPAPR

SEQ ID NO: 22935 - protein, 498 aa, Aspergillus oryzae
MASSFASILKDASLFVERSYVNGQWVSSNSNATFNVTNPANEAQVGVAPESTLDDLNVAIEAAADAFPTWRSVPGRQRGRILRRIADLLVENKEDIGKIITAENGKAKGDAEGEVMFAASFFEWFGEEASRIYGDIIPHSSAAGRTRVIKEPVGVCGLIVPWNFPLAMGARKVAAALAAGCTVVMKSDGLTPFASNAMAVVAERAGVPKGVFNVVTALNNTPQLGLAMCESDIIKKISFTGSTRVGKLLMKQSSSTLKKLSLELGGNAPFIVFNDADIETAITSALISKFKVTGQTCVCANRFYVQEGIYDRFAQRLVEEVSKFKVGNGLEDPSVTHGPLTNGVAKVEEHIKDAVSKGAKVLLGGNRLPALGKNYHELTILGDANDSMLVSKEETFGPVAALMKFKTEDEVVQRANNCEVGLASYLITSNLGTSHRVSERLEFGMVAINTGVISDAPAPFGGVKHSGMGREGSKYGVDDYMTIKMITTGGINTVYTRL

SEQ ID NO: 22936 - protein, 572 aa, Burkholderia xenovorans LB400
MLKNPATKYRSFKPIDLTDRQWPSRTITRPPIWMSTDLRDGNQSLFEPMDAQRKMRMFKTLVQIGFKEIEVAFPSASQTDFNFVRELIEGGHIPDDVTIEVLTQARDDLIERTFESLRGVPRAIVHLYNATAPEFRKIVFNLEKSGVKELAQNAARTMKRIAATMPETQFTFQYSPEVFSGTEIEFAKEVCDAVFDIWEPTPEHKAIVNLPATVEMSTPNIYADQIEWMHRNLKRRDSLVISVHPHNDRGTAVAAAELAVMAGADRIEGCLFGNGERTGNVDLVTLALNLYTQGVDPGLDFSNINEVARTAEECTQLPIHPRHPYVGDLVFTAFSGSHQDAIKKGFAVQKPDAMWEVPYMPIDPADLGRTYDSVIRVNSQSGKGGIAYLLEQGYGVVLPRRLQVDFSSAVQRFTDDSGQEVTSAQIWELFQQEYVQNATPVHYVGHSLSERDGREHIKLTVDINGTRRVLNGAGNGPLDALMHAIGVPVRIQHYEERALTQGADARAVAVAEMAGADVTGSAFGVGIDANLVTASIRAVISGVNRAYARVNAQAKERFFEAAMNDATESVGV

SEQ ID NO: 22937 - protein, 572 aa, Magnaporthe grisea 70-15
MTNNRCELIAQAPHISAPQGPGRGRPKITSAMEEPRPFPPKLLKTHFDFVGAVVWPIWFLINSGCPALPERARLVDSAQSFMDSAVAGAADIGRYGRRIVRMIWDPEPTNDPIANRPAWCLGYEYTLETNITSKTKGEDSKLSTATSSDQQRPPAQANKVPQMPSAQLPTEAAATALSGNTTPPTPEAALEPTKITSQPAAIDTPPDSVDSSFDSSMAYDDVPDDGGWPPAFLNDFESRIWMTYRSGFEPIPRSTDPTASSRMSFAMRLKTMADQQAGFTTDSGWGCMIRTGQSLLANSLLTCRLGRSWRRGQAPDEERKLLSLFADDPRAPYSIHNFVAHGAAKCGKYPGEWFGPSATARCIHALANATENSFRVYSTGDLPDVYEDSFMEVAKPDGKTFHPTLILISTRLGIDKINQVYWESLTATLQLPQSVGIAGGRPSSSHYFVGAQRSDEDQGSYLFYLDPHHTRPALPFHEDPQLYTPSDVDSCHTRRLRRLHIREMDPSMLIGFLILDEENWHAWKSSVKHVQGKSIITVSEHDPSKGSASGRPSAIDEVETLSDDDGDTVLDG

SEQ ID NO: 22938 - protein, 489 aa, Polaromonas sp. JS666
MNLKRPSLFRQQCHIDGQWVDASDQATLAVVNPANDEVIACVPRLTDKDVQSAIRAADKALPAWREMSAKDRSKILRRWYDLCMTHQEDLATILTTEQGKPLSEARGEIAYGSGFIEWFSEEAKRVYGDIIPAPTADRRIIVIKQPVGVVAAITPWNFPNAMITRKAGAALAAGCTIVVKPASATPFSALALADLAVEAGIPPGVFNVVTGRSDVVGGALTSSPVVRKLSFTGSTEVGKQLMAQCAGTVKKVSMELGGNAPFIVFGDADLDAAVAGVMASKFRNAGQTCVCANRIFVQDMIYDVFAAKLKVAVEAQVVGDGMQAGVNLGPLIDAAAVNKVQEHISDAIALGANVLTGGQAHALGGHFFQPTILINVSSEAKLMNEETFGPVAPLIRFSTEEEVVSMANDTPFGLAAYFYTGSYERAWRVSEALECGIVGLNEGIISTELAPFGGIKESGVGREGSKYGIEDYVEVKYICAGGLGKKRAA

SEQ ID NO: 22939 - protein, 592 aa, Prosthecochloris aestuarii DSM 271
MCGIAGELRFDSAAASSTTVDAMLGILEPRGPDAQGVFAHNRICFGHRRLKIIDLSDCASQPMVDSALGLVLVFNGAVYNYRELCTELVGKGYSFFSQSDTEIIIKAYHAWGEDCVGHLQGMFAFAIWERDTGRTFFARDRLGIKPLYFTEDNASMRFASSLPALLKSGAVDTAIDPAALDCYMSFHSVVPAPWTIFRGIRKLPPATTMMVEPDGRKQQRTYWQPDYSRSDEERRRSAGEWIDAVHDALKLAVQRRLVADVPVGVLLSGGLDSSLVVGLLSELVQRHLSTFSVGFEDVAEEEGNEFRYSDIIAERYSTDHHKIFVDHRELQTHLSDCVRAMSEPMVSHDVIGFYLLSREVSQHVRVVQSGQGADEVFAGYHWYPPMMNTPPTEAYSTYSGVFFDRDFNEYRQAVNSSFITEDHAAAFVRNHFAMPGAEEPIDKALRLDSTIMLVDDPVKRVDNMTMAWGLEARVPFLDHELVELAAKIPAEYKVKDGGKYVLKEVGRRIIPHEVIDRPKGYFPVPALKYLEGEYLDMAKNILNQDAAKQRKIFNREYVDMLLNAPQDHITPLRGSKLWQITLLEYWLQEQGL

SEQ ID NO: 22940 - protein, 889 aa, Desulfovibrio vulgaris subsp. vulgaris str. Hildenborough
MCGIAGIISRKDRNVSSQPLNRMLTSQEHRGPDAGYGVSFRRQSTGAFAAGRRHSADALAAGLEPAPVWLGHRRLSILDLSDKSAQPLRRGDLHIVFNGELFNYIELRSELTALGEHFETSGDTEVLLASYRHWGAGCLERFNGIFAFAIFDASRGSLFAARDPFGVKPFHYGVKPFHYAVTHDFLIFASEIKAISASGLVLRKWDPDVASAYLSYALTTAPQGRTFFENIRQIPPGHCLTLASPDDEPSVTRYYAPRITETPRSLHELVDEGAGLIRQSCRIRMRSDRDVGLCLSSGIDSANVAAALVAEGIAPECYSIDAASSSMLDEFPLITALADKLGLHVNPIRHPDAIPTADIVRYMLFNDEPSLFWGSYNQFHLYREMRKLGVIVSMSGHGGDELFCGYQRYYPAVVRDMLAQRRIMSLIWWCLRQSRHLMQDRRTIRSTWDSYSHPLGWANDYAHDIAALHLKHTIADPEEWISTFVGASSWGEQQQKSLFTYELQYLLRDADRNSMAHGIEERVPLLDTRLYEFCASVPLKDLCQDGYLKGLARQLFPAIPESLRFHQIKRGLYTDISSKLPQLQADLMPLVHRSPLLRELVDLQKLPQQLPGIVWWRLCSLAVLDVSGIEEWTAQTPLPRLVDDEMAERIGGVPSGTGRTAVIRHVLDEGLSYLEPGALHGLAETVGLIESAAIPGCIIEAGCALGGSTMVLATAKAKERPLHVFDVFGCIPPPGSNDGEEARARFAVIAAGESTGLNGKRYYGYEPDLLKNVQDNFVALGLPPAEHGITFVPGLYENTLYPSGPVALAHIDCDWYQSVKTCLERIAPHISPGGRMIIDDYDHYSGCRRAVDEFLEASNGQFIRERYARVHLVRTKADGQETDVHRPGD

SEQ ID NO: 22941 - protein, 325 aa, Bangiopsis subsimplex
GKTTLTAAISATLASESNVTAKKFDEIDAAPEEKARGITINTAHVEYETDARHYAHVDCPGHADYVKNMITGAAQMDGAILVISAADGPMPQTREHILLAKQVGVPNIVVFLNKEDQVDDEELLELVELEARELLCQYDFPGNDIPFVSGSALLALEAVSSNPQIRRGQDKWVDKILALMDAVDDYIPTPERDVDKTFLMAVEDVFSITGRGTVATGRIERGIVKVGDSIEIVGLRDTQTTTITGLEMFQKTLDEGMAGDNIGILLRGVQKKDIERGMVLAQPGTITPHTEFEAEVYVLTKEEGGRHTPFFPGYRPQFYVRTTDV

SEQ ID NO: 22942 - protein, 363 aa, marine gamma proteobacterium HTCC2207
MSTAHTKDTEMTNHSNNPAIGGKTSLKTIREAINDALREEMRRDPTVIVLGEEVSGGAGCEGEDDAYGGVFGVTKGLMPEFGRERVIDTPISEAAIIGAAAGAANNGLRPVAELMFFDFIGVSFDQIFNQAAKFRYMFGGKSKTPMVIRGTVGGGWRAGAQHSSMLHSIVTHIAGLKVVMPANAYDAKGLMVQAIRDDDPVIFLEHKVMYDIACEVPDEQYAIPFGEAAFPRQGSDVTIVAISNMVTHAITVADILAKEGISCDVIDPRTVSPLDHEAILESVEVTGRLVIIDEGNPRCGLATDIAGIVAEHGFYSLKAPIRTVTAPHTPVPFAPELEDAYLPNAEKLMVAVREVLAAGPSGA

SEQ ID NO: 22943 - protein, 372 aa, Candida glabrata CBS 138
MLRGSATRLTAMRGFSSTRLAQKALTIGLIPGDGIGKEVIPAGKQILEKVGPKFDLDFKFIDLHAGWETFQNTGKALPDETVEVLRRDCQGALFGAVQSPTTKVEGYSSPIVALRKAMGLFANVRPVKAVEGTNDRPVDMVIVRENTEDLYIKIEKTYTDPATGTRVAEATKRISEVATRRIATIALDIALQRLQSRGHATLTVTHKSNVLSQSDGLFREICKDVYESNKDKYGKIQYNEQIVDSMVYRMFREPECFDVVVAPNLYGDILSDGAAALVGSLGVVPSANVGPEIVIGEPCHGSAPDIAGRGIANPIATIRSTALMLEFLGYPEAAQPIYKAVDSNIRENQIKTPDLGGKSTTQQVVDDILSKI

SEQ ID NO: 22944 - protein, 309 aa, Bacillus anthracis str. 'Ames Ancestor'
MRKIIVGSRKSKLALTQTNWFIDQLKALGLPYEFEVKEIVTKGDVILDVTLSKVGGKGLFVKEIEHALLTKEIDMAVHSMKDMPAVLPEGLMIGCTPKRVDPRDAFISKSGASYKELAEGAILGTSSLRRSAQLLAARPDLQVKWIRGNIDTRLRKLKEEDYDAIILATAGLQRMGWDNEVITEHLDETLCVPAVGQGALAIECREDDKDLLQLLAHINDAVTEKTVAAERVFLHKLEGGCQVPIAGYATITENDAIELTALVGSMDGSVLLKETVVGTDPEKVGLEAADRLIKQGAKELILAANKGQQ

SEQ ID NO: 22945 - protein, 325 aa, Dixoniella grisea
GKTTLTAAISTTLALANGSIAKKYADIDSSPEERARGITINTAHIEYETETRHYAHVDCPGHADYVKNMITGAAQMDGAILVVSAADGPMPQTREHILLAKQVGVSHIVVFLNKEDQVDDEELLELVELEVRELLDKYKFPGDEIPFCPGSALLALTAIEKNPTVKRGEDKWVDKIFALMDAVDTYVPTPERDVDKTFLMAVEDVFSIMGRGTVATGRIERGTIKVGDTIEIVGLKPTRSTTITGLEMFQKTLDVGMAGDNIGILLRGIQKNDIERGMVLAQPGTITAHTDFEAEVYVLTNEEGGRHTPFFTGYRPQFYVRTTDV

SEQ ID NO: 22946 - protein, 107 aa, Glycine max
MAKFFAAMILALFAISILQTVVMAANEQGGHLYDNKSKYGSGSVKSYQCPSQCSRRCSQTQYHKPCMFFCQKCCRTCLCVPPGYYGNKAVCPCYNNWKTKEGGPKCP

SEQ ID NO: 22947 - protein, 450 aa, Erythrobacter sp. NAP1
MAVTDHVNLEQFMEGVKKRNPGQPEFVQAVHEVAQDIFEFMEDKVEYHEAQILRRIAEPDRIVSFRVCWEDDNHNIRVQRGWRVQNNNAIGPYKGGIRFHPSVTESVLKFLAFEQTFKNSLTGLPMGGGKGGANFNPKGKSDAEVMRFCQSFMTELYRHIGPDTDVPAGDIGVGGREIGYMFGQYKRITNRWEGVLTGKGQEYGGSQMRPEATGYGAVYFLQNMLKHQGKDVEGHTAVISGSGNVATHAAEKITQLGGKVLTLSDSGGFIHDPDGIDQEKIDWVKHLKTVKRGRISEYVDEFKSATFHEGRPWNIAADLALPCATQNELNEDEAKALVSNGCKGVSEGANMPTTLEGVKVFHDAKILYGPGKAANAGGVAVSGLEMSQNSERISWNHERLGEMLTDLMSGIHEKCTEYGEQDGGYVDYVKGANIAGFKKVADAMLAFGVV

SEQ ID NO: 22948 - protein, 310 aa, Dehalococcoides sp. CBDB1
MIATVTLNPCLDKHIDVHGLVLYETNRWHRMSKYAGGKGIDVSRAVYEMGFDTIACGLLGGEEGREIETLLTEQGLKYHFTPISQPTRSCFIIYDTKTHRQTNLNAPGPRIAPPELKMFYEDLLRESAASSLIVMSGSVPPGVPSSVYFTLISHARKLGKQTILDTAGKYLREGLKAKPCLVKPNIREAEELLGRKLETEAEIILAAKEIVRMGAGIEVISMGKKGLIACDGKQVIKASSAYVRVKSTVGAGDSTVAGFAISLRRGDSLEEACRLGVAMGTAAVMTPGTELCHREDVQYWLPRIKIRRLA

SEQ ID NO: 22949 - protein, 325 aa, Flintiella sanguinaria
GKTTLTAAISATLSIFGSIAAKKFDEIDAAPEEKARGITINTAHVEYETEKRHYAHVDCPGHADYVKNMITGAAQMDGAILVVSAADGPMPQTREHILLAKQVGVPHVVVFLNKEDQVDDAELLELVELEVRELLSQYDFPGDDIPFVAGSALLALEAMIANPKTIRGQNQWVDKIHSLMDAVDSYVPNPERDIDKTFLMAVEDVFSITGRGTVATGRIERGQIKVGDTIEIVGLRETRSTTITGLEMFQKTLEEGIAGDNIGILLRGIQKKDIERGMVLAKPGTITPHTQFEAEVYILTKEEGGRHTPFFPGYRPQFYVRTTDV

SEQ ID NO: 22950 - protein, 409 aa, marine gamma proteobacterium HTCC2207
MAAKSRCIILGASHAAAQLAPTLRQQGWTGSISMISNEYALPYHRPPLSKDYLAGTKTAEQILIRPAAVYSKCNVGITMGVTAAAIDRSNKQLLLDDGMALDYDKLVLTTGARVRKIDIPGVDLNGVFYLRDLNDAQQIKMFTGANKRAVIIGGGYIGLETASALRKLGMQVTVLEAMPRILQRVTAPEVAAFYSRIHAEEGVEIVADVQAVSISGAKQVESVQCHDGTEYEADIVIIGVGVIPNTELAEQAGLKIDNGIVVDEYARTSDEDILAAGDCTSHYNPIYQRHLRLESVQNALDQASVAANTICGNLKPYSALPWFWSDQYDLKLQIAGLSQGYTDVVVRGDIDGSRSFAAFYMREGKLLAVDAVNRPQEFMFGKKLIMQGNQLDTAQLADDSLSLKTLLTS

SEQ ID NO: 22951 - protein, 393 aa, Staphylococcus aureus subsp. aureus MRSA252
MQFDNIDSALMALKNGETIIVVDDENRENEGDLVAVTEWMNDNTINFMAKEARGLICAPVSKDIAQRLDLVQMVDDNSDIFGTQFTVSIDHVDTTTGISAYERTLTAKKLIDPSSEAKDFNRPGHLFPLVAQDKGVLARNGHTEAAVDLAKLTGAKPAGVICEIMNDDGTMAKGQDLQKFKEKHKLKMITIDDLIEYRKKLEPEIEFKAKVKMPTDFGTFDMYGFKATYTDEEIVVLTKGAIRQHENVRLHSACLTGDIFHSQRCDCGAQLESSMKYINEHGGMIIYLPQEGRGIGLLNKLRAYELIEQGYDTVTANLALGFDEDLRDYHIAAQILKYFNIEHINLLSNNPSKFEGLKQYGIDIAERIEVIVPETVHNHDYMETKKIKMGHLI

SEQ ID NO: 22952 - protein, 325 aa, Porphyridium aerugineum
GKTTLTAAISATLSVISNVTAKKFDEIDAAPEEKARGITINTAHIEYETEKRHYAHVDCPGHADYVKNMITGAAQMDGAILVVSAADGPMPQTREHILLAKQVGVPQVVVFLNKEDQVDDKEILELVELEVRELLSKYEFPGDDIPLAAGSALLALEAMLANPKIVRGQNEWVDKIYTLMDHVDSYIPAPERDVDKTFLMAVEDVFSITGRGTVATGRIERGIIKVGDTIEIVGLRETRTTTITGLEMFQKTLEEGIAGDNIGILLRGIQKKDIERGMVLAKPGSIKPHNQFEAEVYILSKEEGGRHTPFFAGYRPQFYVRTTDV

SEQ ID NO: 22953 - protein, 116 aa, Triticum aestivum
MARAQVMLMAVALVLMLAAVPRAAVAIDCGHVDSLVRPCLSYVQGGPGPSGQCCDGVKNLHNQARSQSDRQSACNCLRGIARGIHNLNEDNARGTPLKCGVNLPYTISLNIDCSRV

SEQ ID NO: 22954 - protein, 396 aa, Burkholderia sp. 383
MAKGKFERTKPHVNVGTIGHVDHGKTTLTAAITTVLTKKFGGEAKAYDQIDAAPEEKARGITINTAHVEYETANRHYAHVDCPGHADYVKNMITGAAQMDGAILVCSAADGPMPQTREHILLARQVGVPYIIVFLNKCDMVDDAELLELVEMEVRELLSKYDFPGDDTPIVKGSAKLALEGDTGELGEVAIMSLADALDTYIPTPERAVDGAFLMPVEDVFSISGRGTVVTGRVERGIVKVGEEIEIVGIKPTVKTTCTGVEMFRKLLDQGQAGDNVGILLRGTKREDVERGQVLAKPGSITPHTHFTAEVYVLSKDEGGRHTPFFNNYRPQFYFRTTDVTGSIELPKDKEMVMPGDNVSITVKLIAPIAMEEGLRFAIREGGRTVGAGVVAKIIE

SEQ ID NO: 22955 - protein, 324 aa, Rhodella violacea
KTTLTAAISATLSLLSGGKAKKFDEIDSAPEEKARGITINTAHVEYETEQRHYAHVDCPGHADYVKNMITGAAQMDGAILVVSAADGPMPQTREHILLAKQVGVPTLVVFLNKEDQVDDVELLELVELEVRELLSNYDFPGDDIPIVAGSALLALEAVIANSKLKRGEDKWVDKIFALMDAVDTFIPTPERDVDKTFLMAVEDVFSITGRGTVATGRIERGIVKVGETIEIVGVKNTQTTTITGLEMFQKTLEEGMAGDNIGILLRGVQKENIERGMVLAKPGTITPHTEFEAEVYILNKDEGGRHTPFFSGYRPQFYVRTTDV

SEQ ID NO: 22956 - protein, 362 aa, Halobacterium sp. NRC-1
MTEATADRTALTDGGRDVVEHRQLVIVGSGIAALSAATYAARSNNDPLLFEGDEPGGQLTLTSEVENYPGFPEGIAGAELIQEMKTQATRFGAEVEHGIVESVDDSGRPFRLTLTNGDVYTADAVIVASGASARTLGIPGEDELMGQGVSTCATCDGAFFRGEDMIVVGGGDAAAEEASFLTKFADTVYLVHRRDELRAEDYWADRIREHVADGDIEVLWNTEAVEVHGSPEEGVTGASLVRHPEGHPTAKLDADETEQLELDIGAFFIAIGHTPNTSFLADTGVVCDDAGYVQTVGGAGGGQTKTDVTGVFGAGDVVDYHYQQAVTAAGMGSKAAIDADEYLESVADGVTGETADATPADD

SEQ ID NO: 22957 - protein, 419 aa, Rhodobacter sphaeroides 2.4.1
MPLLVMKFGGTSVADLARIKNAAQKVKREVERGYDVIVIVSAMSGKTNELVGWVEQTSPLFDAREYDAVVSSGENVTAGLMALTLQEMEVPARSWQGWQVPIRTTSQHSAARFLEIPRENLDAKFAEGFKVAVVAGFQGVSPEGRITTLGRGGSDTTAVAFAAAFAAERCDIYTDVDGVYTTDPRIASKARKLEKIAYEEMLELASLGAKVLQTRSVELAMRYKVKLRVLSSFEDTDETSGTLVCDEEDIMESKVVSGVAYSRDEAKMTLVTVEDRPGVAAAIFGPLAEAGVNVDMIVQNISEKDYGSHPGSVTDMTFSCPINQVARARKALEDAKAEGTIVYDDLVVDTEVAKVSVVGIGMRSHAGVAATMFKALAADGVNIKVIATSEIKISVLIDRKYMELAVQALHDAFALETAN

SEQ ID NO: 22958 - protein, 103 aa, Triticum turgidum subsp. durum
AVVAAMLLAVTEAAVSCGQVSSALSPCISYARGNGASPSAACCSGVRSLASSARSTADKQAACKCIKSAAAGLNAGKAAGIPTKCGVSVPYAISSSVDCSKIR

SEQ ID NO: 22959 - protein, 118 aa, Triticum aestivum
MEALYLLASLATTILTSTLLSLLLLLRLPFARRSAPGGTGAGAARLYEGRVRHSRRRPAGHAFEYAVRYALVDLDLLPLSGHLSAAEARSIASTSGPVRLLTVPKSVGYEQNPLSVYY

SEQ ID NO: 22960 - protein, 665 aa, Photorhabdus luminescens subsp. laumondii TTO1
MIDVQINEVPLKEHSPSINDCLDEQKLLYDMLLSREFDNRSAIVTRQGRAWFHVSAAGHEGLAVLPQLMEKNDVLVPYYRDRALVLARGMSIVEMTRELMGKATSHSAGRTMSNHFCSKEHNIFSVVSLTGTQCIPAAGAAWASVLDNKNGLVVCGVGDAATRQGEFYEAVSFAVEKRLPVVFVVSDNKLGISTSTEKMAPYRLGIFNECLIRRVDARKPETLFTVAQEVFNKARFERTPCILVCRMDRLDSHSNSDSHKLYRTPDELEVLQDPIENYVAYLKEKGAITEQALAEQKERIKADVAEIFERVYHEEEPDPASVSTYLCNREGTPTVHVEMEAEETQVKAVNQVLDEALSQHPNVLIFGEDIEDPKGGVFGFTRGLSTRYPDRVINAPLSEATIIGSSVGLSASGWRPIVELQFIDFVGLGLNQLQSQLGTLSWRTVGKWRCPVVIYAPYGAYLPGGGIWHSQSSDGILAHIPGINVLVPTTPADTVALFRTALSLDMPSLILIPKHLMRERHERRLVSPVSLGQANIVRAGKDITLVAWGNTTQLATMAALQAEKDNIDIEVIELRSLVPWDKQRIAESLRKTGRLIVVQEDTRTASVGASIIADILDENDNFFSLLAPPRLVTREDIHIPFNPCLEKAVLPGTDDILASVYAVMS

SEQ ID NO: 22961 - protein, 340 aa, Synechococcus sp. RS9917
MTLRVAINGFGRIGRNFMRCWISRGANTDIEVVGLNDTSDPKTNSHLLTYDTMLGRIQGAEIGYTDDTLIVNGKTIKCYSDRNPLNLPWKEWDIDLVIESTGVFNTDEKASMHLQAGAKKVILTAPGKGDGVGTFVVGVNADQYRHEDFNILSNASCTTNCMAPIVKVIDQEFGIVKGSMTTVHSYTGDQRILDASHRDLRRARAAAMNIVPTTTGAAKAVALVYPAVKGKLDGLALRVPTPNVSLVDMVFNVSKTTTSEEVNAVLKAASEGSAKGIIKYCELPLVSTDHAGTDESTIVDAELTKVMGGDQVKILSWYDNEWGYSQRVVDLAEIVAKNWK

SEQ ID NO: 22962 - protein, 310 aa, Salinibacter ruber DSM 13855
MSTRPESLATVTDIDCTGQTALVTGSTSGIGRVAAYALGRLGAEVIVHGRDREAGEAVVEGIREEGGEAAFVAADFTEAAAIRTLAETVRTETDGLDLLLNNAGGLFREGRLVEGIERTFYVNHLAPYLLTAELLDHLREDARVVTMASDAHRGAELDLDRVRTVDGYSGMGAYAHSKLANVLFASELARRLDAAGRPAVSNSLHPGFVPGSQFGRFLPGPLSGLFQMLGVVPGTSSVADGAAELLHVAVSPDTADVSGRYFSGQSPTTPAAAARDRAAAERLWHRSAELLGMDVPLSDAVSGSAATDAS

SEQ ID NO: 22963 - protein, 560 aa, Triticum aestivum
MAAAAVASNGGAAPVPGRLASVYSEVQTSRIAHALPLPSVLRSHFTLADGPASTAAGSPDEIAKLFPCLYGQPSAAVVQSAEPVETKPLKIGVVLSGGQAPGGHNVICGIFDYLQERAKGSTMYGFKGGPAGVMKGKYVELTTDFVYPYRNQGGFDMICSGRDKIETPEQFQQAEDTVNRLDLDGLVVIGGDDSNTNACLLGEYFRGRNLKTRVIGCPKTIDGDLKCKEVPTSFGFDTACKIYSEMIGNVMTDARSTGKYYHFVRLMGRAASHITLECALQTHPNVALIGEEVAEKKETLKNVTDYITDVVCKRAELGYNYGVVLIPEGLIDFIPEIQKLIAELNEILAHDVVDEAGAWKSKLEPASRELFDFLPKTIQEQLLLERDPHGNVQVAKIETEKMLIAMVETELEKRRAAGKYSAHFRGQSHFFGYEGRCGLPTNFDSSYCYALGYGAGALLQFGKTGLISSVGNLAAPVEEWTVGGTALTALMDVERRHGKNKPVIKKAMVELDAAPFKKFASLRDEWASKNRYISPGPIQFSGPGSDASNHTLMLELGAEI

SEQ ID NO: 22964 - protein, 420 aa, Lotus japonicus
MVLSNTASSGSESDLSIHSTFASRYVRTSLPRFKMPQESIPKEAAYQIINDELMLDGNPRLNLASFVTTWMEPECDKLIMASINKNYVDMDEYPVTTELQNRCVNMIAHLFNAPLGDSDTVGTVGSSEAIMLAGLAFKRTWQNRRKAEGKPHDKPNIVTGANVQVCWEKFARYFEVELKEVKLSEGYYVMDPQKAVDLVDENTICVAAILGSTLNGEFEDVKRLNDLLIEKNKETGWDTPIHVDAASGGFIAPFIYPELEWDFRLPLVKSINVSGHKYGLVYAGIGWVIWRNKEDLPEELIFHINYLGADQPTFTLNFSKGSSQIIAQYYQLIRLGYEGYKHVMENCRDNMLVLKEGLQKTGRFEIVSKDNGVPLVAFTLKDHTHYNEFQISDSLALRVDSAGIQHAPKYSARDRGPCSH

SEQ ID NO: 22965 - protein, 308 aa, Lactococcus lactis subsp. lactis Il1403
MTEKKYDVVIIGSGPAGMTAAMYTARSEMKTLLLERGVPGGQMNNTAEIENYPGYETIMGPELSMKMAEPLEGLGVENAYGFVTAIEDHGDYKKIITEDDEFVTKSIIIATGANHRKLEIPGEEEYGARGVSYCAVCDGAFFRNQEILVIGGGDSAVEEALYLTRFGQSVTIMHRRDKLRAQEIIQQRAFKEEKINFIWDSVPMEIKGDDKKVQSVVYKNVKTGEVTEKAFGGIFIYVGLDPVAEFAGNLGITDEAGWIITDDHMRTSLPGIFAVGDVRQKDFRQITTAIGDGAQAAQEAYKFVAELD

SEQ ID NO: 22966 - protein, 364 aa, Escherichia coli CFT073
MMSKNYHIAVLPGDGIGPEVMTQALKVLDAVRNRFAMRITTSHYDVGGAAIDNHGQPLPPATVEGCEQADAVLFGSVGGPKWEHLPPDQQPERGALLPLRKHFKLFSNLRPAKLYQGLEAFCPLRADIAANGFDILCVRELTGGIYFGQPKGREGSGQYEKAFDTEVYHRFEIERIARIAFESARKRRHKVTSIDKANVLQSSILWREIVNEIATEYPDVELTHMYIDNATMQLIKDPSQFDVLLCSNLFGDILSDECAMITGSMGMLPSASLNEQGFGLYEPAGGSAPDIAGKNIANPIAQILSLALLLRYSLDADDAASAIERAINRALEEGIRTGDLARGAAAVSTDEMGDIIARYVAEGV

SEQ ID NO: 22967 - protein, 194 aa, Triticum aestivum
  misc_feature (22)..(22): Xaa can be any naturally occurring amino acid
  misc_feature (125)..(125): Xaa can be any naturally occurring amino acid
  misc_feature (127)..(127): Xaa can be any naturally occurring amino acid
MATMVALSSFAVVGRSAARSPXVVAPRRRALVVRAQTEPGMDSTKETTSASTSSSSSPSTSATPTPIPAAPKPMTKKANPSVWDALAFSGPAPERINGRLAMVGFVAALTVEAARGGGLLDQAGXGXGLGWFLVTAGVFSVASLVPLLQGQSVESKSSGFWSADAELWNGRFAMLGLVALAATEFITGAPFVNI

SEQ ID NO: 22968 - protein, 537 aa, Escherichia coli CFT073
MPEARRSKETRTQTMSQQVIIFDTTLRDGEQALQASLSVKEKLQIALALERMGVDVMEVGFPVSSPGDFESVQTIARQVKNSRVCALARCVEKDIDVAAESLKVAEAFRIHTFIATSPMHIATKLRSTLDEVIERAIYMVKRARNYTDDVEFSCEDAGRTPIADLARVVEAAINAGATTINIPDTVGYTMPFEFAGIISGLYERVPNIDKAIISVHTHDDLGLAVGNSLAAVHAGARQVEGAMNGIGERAGNCSLEEVIMAIKVRKDILNVHTAINHQEIWRTSQLVSQICNMPIPANKAIVGSGAFAHSSGIHQDGVLKNRENYEIMTPESIGLNQIQLNLTSRSGRAAVKHRMDEMGYKESEYNLDNLYDAFLKLADKKGQVFDYDLEALAFIGKQQEEPEHFRLDYFSVQSGSNDIATAAVKLACGEEVKAEAANGNGPVDAVYQAINRITDYNVELVKYSLTAKGHGKDALGQVDIVANYNGRRFHGVGLATDIVESSAKAMVHVLNNIWRAAEVEKELQRKAQHNENNKETV

SEQ ID NO: 22969 - protein, 576 aa, Burkholderia xenovorans LB400
MLSTQEAEAQQGEAQQQAVVADAPFSSLSTRMHQMFPALTCAEIDRLRRFGEIGQWNAGELLFETGYTGPGMFVLLEGRVKVYQRDGIGREVLIGEHGAGHFLAEVGQLSGRPALVNGMALSSVEALLIPPEGLRALIVAEAELGERIMRALILRRVSLIEKGAGGPILIGNSNDARLVMLQGFLSRNGHPHSVIDERDEDALRLIEQFAAQKEDMPLVICPDGSVLRHPSMPELATCLGLLPDLDDAHVYDVAIVGAGPAGLATAVYAASEGLSVIVLDSRAPGGQAGASARIENYLGFPTGISGQALAGRAFVQAQKFGAHVAIPVNVKALHCAERPHRLELKCGGHITARAIVIASGAVYRRPALEGLDRFEGRGVYYWASPVEAKLCKRQEIVLVGGGNSAGQAIVYLATHAAKVHVLIRRSGFEATMSRYLIDRIRSLPNVFVHPNSEIGRLDADETGLSSVSLKKPLPDGTDHFDTRHLFLFTGADPNTDWLRTCGVELDAKGFVLTGTSAEGASVCDLATTVEGVYAIGDARAGSTKRVAAAVGEGAAVVAQIHQLLAVAAGDAVPVDA

SEQ ID NO: 22970 - protein, 336 aa, Desulfitobacterium hafniense Y51
MSVRIAINGFGRIGRLSMRAILERKSSLDIVAVNDLGSPDLLGHLFKYDSIHDILPYDVEVKENTLEVLDQKVAFLAEKDPGKLPWRELGVDLVIEATGRFTKREQAALHLQAGAKKVIISAPGKHEDITIVMGVNEHLYNPAEHHILSNASCTTNGLAPLAKVLLEEFGIEQGMMTTTHSVTNDQRILDLEHKDWRRARAAYESMIPTTTGATKAVELVLPDLKGKLKGLAVRVPTPNVSLIDFVANLSRSTTKEEVNQKLREAAEGSLKGYLAYSELPLVSHDFNGNPHSAIVDGLSTLMLGERMVKVLAWYDNEWGYSNRIVDLVEYIAGQGL

SEQ ID NO: 22971 - protein, 116 aa, Arabidopsis thaliana
MMRVVLPLCLLLASIFAWGSEAAISCNAVQANLYPCVVYVVQGGAIPYSCCNGIRMLSKQATSASDKQGVCRCIKSVVGRVSYSSIYLKKAAALPGKCGVKLPYKIDPSTNCNSIK

SEQ ID NO: 22972 - protein, 563 aa, Escherichia coli CFT073
MRRFAELSKTLQTKDKAMAIHNRAGQPAQQSDLINVAQLTAQYYVLKPEAGNAEHAVKFGTSGHRGSAARHSFNEPHILAIAQAIAEERAKNGITGPCYVGKDTHALSEPAFISVLEVLAANGVDVIVQENNGFTPTPAISNAILVHNKKGGPLADGIVITPSHNPPEDGGIKYNPPNGGPADTNVTKVVEDRANALLADGLKGVKRISLDEAMASGHVKEQDLVQPFVEGLADIVDMAAIQKAGLTLGVDPLGGSGIEYWKRIGEYYNLNLTIVNDQVDQTFRFMHLDKDGAIRMDCSSECAMAGLLALRDKFDLAFANDPDYDRHGIVTPAGLMNPNHYLAVAINYLFQHRPQWGKDVAVGKTLVSSAMIDRVVNDLGRKLVEVPVGFKWFVDGLFDGSFGFGGEESAGASFLRFDGTPWSTDKDGIIMCLLAAEITAVTGKNPQEHYNELAKRFGAPSYNRLQAAATSAQKAALSKLSPEMVSACTLAGDPITARLTAAPGNGASIGGLKVMTDNGWFAARPSGTEDAYKIYCESFLGEEHRKQIEKEAVEIVSEVLKNA

SEQ ID NO: 22973 - protein, 199 aa, Lycopersicon esculentum
MASPSLSKSNFSLHSFSSSPSLSQFPHFTSITVVQPKFFPSQLTFKRCQNAPSFPIIRAQNSPDFVPDAKFYKVEAILRPWRIQQVSSALLKMGIRGVTVSDVRGFGAQGGLTERQAGSEFSEDTFVAKVKMEIVVSKDQVEGVIAKIIEEARTGEIGDGKIFLTPISDVIRVRTGERGEKAERMMGGHADMSSALSTS

SEQ ID NO: 22974 - protein, 461 aa, Aspergillus oryzae
MASHMPPATGAGASAPRKVEEITQMAQNYDYNPSIPLRYWLRTAATLLREARIYEREGHDEQAYFLLFRHAQLVLVNLAKHSEAKDEQNRKALMEAEKEVSRNLEKLEILRPRINKRHKRYTELMNDRQARSPPLGTNHTAPNQQQPQDPALVGVAEPLEAGENRDLAVKLARTEIHRRATARKAVRQAGITPQEEQRRRTAGIWGDWENALDKNGPETDNDLSRRIQNISTPLTSAAQTQAPAPPAKVKPVADGGDGRSNLDPSSFTFKPSAYLENGTPLRTVFLPPELRSTFLSLAASNTRRNLETCGILCGTLISNALFISRLLIPEQTSTSDTCETVNETAIFEYCDSEDLMILGWIHTHPTQTCFMSSRDLHTHSGYQVMLPESIAIVCAPSKTPDWGVFRLTDPPGLKTVLNCTQPGLFHPHAETNTYTDALRPGHVFEAKGLEFETVDLRPNGS

SEQ ID NO: 22975 - protein, 332 aa, Listeria monocytogenes str. 1/2a F6854
MPNEVYDVTIIGGGPIGLFSAFYSGLRSMKTKIIDAEPAVGGKVRYFFPEKIIRDIGGIPAITGENLVANLKQQAETFHPTIVCSERVVDVTKLADGTFQLTSHNGSIHFSKTIVIATGSGTFEVNKLEALHAEDFPFAIHYDVKNIEQFRDKVVVVSGGGNSAIDWAQTLEPIAKQVHLIYRGEDFKAHEESVRELKNSRVEIHIHHEISELIGTNNQLTEITVCCNQTQTTKTIETEALFINHGVKVDLGTMAEWGFKQADFGIVVDDEMKTTVPGIFACGDSATYPRKIRIIAAGLHEGPIAINSAKKYLEPTAADEAMISTHHESFIG

SEQ ID NO: 22976 - protein, 590 aa, Streptomyces coelicolor A3(2)
MAVSVTLPALGESVTEGTVTRWLKAEGERVEADEPLLEVSTDKVDTEIPAPASGVLSSIKVAEDETVEVGAELALIDDGSGAPAAAPAPQAEQVAEPAPEPAPAAPSTEQAAPAPAPTADAAAGGSAQGTDVVLPALGESVTEGTVTRWLKSVGDSVEEDEPLLEVSTDKVDTEIPAPASGTLLEIVVGEDETAEVGAKLAVIGAAGAAPAAAPAAPAAPAQEAPAAPAQPEPTPAPAPAQAAPAPAPQAPAAPAPQPAAPAPAPAPAAAPAAPAAAQPVDDGAYVTPLVRKLAAENGVDLSTVKGTGVGGRIRKQDVAAAAEAAKAAAPAPAAAPAAPAAKKAPVLEASPLRGQTVKMPRIRKVIGDNMVKALHEQAQLSSVVEVDVTRLMKLRARAKDAFAAREGVKLSPMPFFVKAAAQALKAHAPVNAKINEAEGTITYFDTENIGIAVDSEKGLMTPVIKNAGDLNLAGIAKATADLAGKVRASKISPDELAGATFTISNTGSRGALFDTIIVPPGQVAILGIGATVKRPAVIETEDGPVIGVRDMTYLTLSYDHRLVDGADAARYLTAVKAILEAGEFEVELGL

SEQ ID NO: 22977 - protein, 240 aa, Lactobacillus reuteri
MGQGLSQQKVPRISSGCVHKARGASFRSADHVRWGAPHDRRRRSADRYSIHPMQVAGILANLHMDPETVCAGYLHDIVEDTGATLDDIKELFGSTIAMIVDGDTKLGKIRYKSNKEQMAATHRKLLLAMSKDIRVMIVKLADRLHNMRTLKHLRPDKQRRISNETLEIYAPIADRLGISTIKWELEDLSLRYLNPQQYYRIVHLMNSRRDQRVDYIDESIKLIKKAIADLDLGPNVEFMA

SEQ ID NO: 22978 - protein, 140 aa, Shewanella sp. ANA-3
MIIACPHCDTLNRVPQERLTEQPTCGKCKQNLFAAAPIELTSANFINHAHKSELPLVVDFWASWCGPCKSFAPTFSAAAKAWEPQFRFGKINTEEQQALAAQFGIRSIPTLMIFKQGHVIAQQAGALPKPALDQWLHSYC

SEQ ID NO: 22979 - protein, 322 aa, Rhodosorus marinus
TLTAAISATLASQTDVTAKKFDEIDAAPEEKARGITINTAHVEYETDNRHYAHVDCPGHADYVKNMITGAAQMDGAILVISAADGPMPQTREHILLAKQVGVPNIVVFLNKEDQVDDPELLELVDLEARDLLSQYDFPGDEIPFVPGSALLALEALVDNPKIAKGEDKWVDRILELMAAVDEYIPTPERDVDKAFLMAVEDVFSITGRGTVATGRIERGIVKVGDSIEIVGLRDTQTTTITGLEMFQKTLDEGMAGDNIGILLRGVQKKDIERGMVLAEPGTITPHTQFEAEVYVLTKEEGGRHTPFFPGYRPQFYVRTTDV

SEQ ID NO: 22980 - protein, 486 aa, Pseudomonas aeruginosa PAO1
MIKHWINGREVESKDVFENYNPATGELIGEVASGGAAEIDAAVAAAREAFPKWANTPAKERARLMRRLGELIDRNVPHLAELETLDTGLPIHQTKNVLIPRASHNFEFFAEVCTRMNGHSYPVDDQMLNYTLYQPVGVCGLVSPWNVPFMTATWKTAPCLALGNTAVLKMSELSPLTANELGRLVHEAGIPPGVFNVVQGYGASAGDALVRHRDVRAVSFTGGTATGRRIMEAAGIKKYSMELGGKSPVLVFEDADLERALDAALFTIFSLNGERCTAGSRIFVQESVYPQFVAEFAARARRLIVGDPQDPKTQVGSMITQAHYDKVTGYIRIGLEEGATLVAGGLERPAGLPAHLSKGQFIQPTVFADVDNRMRIAQEEIFGPVVCLIPFKDEAEALRLANDVEYGLASYIWTQDIGKAHRLARGIEAGMVFINSQNVRDLRQPFGGVKASGTGREGGEYSFEVFAEIKNVCISMGSHHIPRWGV

SEQ ID NO: 22981 - protein, 325 aa, Stylonema alsidii
GKTTLTAAISATLAAQNDIVAKKFDEIDAAPEEKARGITINTAHVEYETAERHYAHVDCPGHADYVKNMITGAAQMDGAILVISAADGPMPQTREHILLAKQVGVPNIVVFLNKEDQVDDEELLELVELEARELLSQYDFPGDDIPFVAGSALLALEALMGNPKTAKGDNKWVDKILDLMNAVDDYIPTPERAVDKTFLMAVEDVFSITGRGTVATGRIERGIIKVGDSIEIVGLRDTLTTTITGLEMFQKTLDEGLAGDNIGILLRGVQKKDIERGMVLAQPGTITPHTQFEAEVYVLTKEEGGRHTPFFPGYRPQFYVRTTDV

SEQ ID NO: 22982 - protein, 325 aa, Rhodochaete parvula
GKTTLTAAISATLASLNQVESKKFDEIDAAPEEKARGITINTAHVEYETNNRHYAHVDCPGHADYVKNMITGAAQMDGAILVVSAADGPMPQTREHILLAQQVGVPNIVVFLNKEDQVDDEELLELVELEVRELLSQYDFPGDSIPFVTGSALLALDAMTNNSGIQPGEDKWVDKIHSLMKAVDEYIPTPERDIDKTFLMAVEDVFSITGRGTVATGRIERGIIKVGDTIEIVGLAETRSTTITGLEMFQKTLDEGMAGDNIGILLRGVQKQDIERGMVLAQPGTITPHTHFEAEVYVLTKEEGGRHTPFFPGYRPQFYVRTTDV

SEQ ID NO: 22983 - protein, 325 aa, Chondrus crispus
GKTTLTAAISATLAAASDTKAKKFDEIDAAPEEKARGITINTAHVEYETENRHYAHVDCPGHADYVKNMITGAAQMDGAILVVSAADGPMPQTREHILLSKQVGVPNIVVFLNKEDQVDDDELLELVELEVRELLTQYDFPGDDVPFVAGSALLALNKVTNENNIKRGKDKWVDKIHSLMDSIDEYIPTPVRDTEKTFLMAVEDVFSITGRGTVATGRIERGIIKVGDTIEIVGLKKTTTTTITGLEMFQKTLDEGMAGDNIGILLRGVQKKDIERGMVLAQPGTITPHTLFEAQVYILTKEEGGRHTPFFSGYRPQFYVRTTDV

SEQ ID NO: 22984 - protein, 492 aa, Arabidopsis thaliana
MLLRTMAATSPRPPPSTSLTSQQPPSPPSQLPLRTMPGSYGWPLVGPLSDRLDYFWFQGPDKFFRTRAEKYKSTVFRTNIPPTFPFFGNVNPNIVAVLDVKSFSHLFDMDLVDKRDVLIGDFRPSLGFYGGVCVGVNLDTTEPKHAKIKGFAMETLKRSSKVWLQELRSNLNIFWGTIESEISKNGAASYIFPLQRCIFSFLCASLAGVDASVSPDIAENGWKTINTWLALQVIPTAKLGVVPQPLEEILLHTWPYPSLLIAGNYKKLYNFIDENAGDCLRLGQEEFRLTRDEAIQNLLFVLGFNAYGGFSVFLPSLIGRITGDNSGLQERIRTEVRRVCGSGSDLNFKTVNEMELVKSVVYETLRFNPPVPLQFARARKDFQISSHDAVFEVKKGELLCGYQPLVMRDANVFDEPEEFKPDRYVGETGSELLNYLYWSNGPQTGTPSASNKQCAAKDIVTLTASLLVADLFLRYDTITGDSGSIKAVVKAK

SEQ ID NO: 22985 - protein, 395 aa, Salinibacter ruber DSM 13855
MGLLLLYVALAIGVSFLCSVMEAVLLSVTPSYVAALEREGSTVGKRLHQFKENVDRPLAAILSLNTIAHTVGAAGVGAQAAVVFGEAYTGIVAGVLTLLILVLSEIIPKTLGAVYWRTLTPALVRLLTATIIVMWPLVKLSQGLTYLLSQDEDEAAFSREEFTAMAELGEEEGVFEEKESRILRNLFRFNSLRVKDVMTPRTVIFQMPEHRTIGDVVEEHDEFRFSRIPVYDDDPDDITGYVLKDEMLLRAAQEEFDVSLSEISRDILVVHETLALPDLLERLLDRLEHIALVVDEYGGVAGVVTMEDVVETLLGLEIVDEADSVEDMQALARKQWFKRARELGMVSDEALEAPTNAEAEASSETVLESDTTAETESQVAAEMARRSSSESPSDE

SEQ ID NO: 22986 - protein, 325 aa, Palmaria palmata
GKTTLTAAISATLAVTGNTQLKKFDEIDAAPEEKARGITINTAHVEYETDNRHYAHVDCPGHADYVKNMITGAAQMDGAILVVSAADGPMPQTREHILLAKQVGVPHVVVFLNKEDQVDDEELLELVELEVRELLAQYDFPGDDIPFVAGSALLALECVTSNPKTKKGDDKWVDKIYSLMDAIDDYIPTPERDVDKTFLMAVEDVFSITGRGTVATGRIERGIIKVGDTIEIVGIRETRTTTITGLEMFQKTLDEGMAGDNIGILLRGVQKKDIERGMVLSQPGTITPHTQFEAEVYILTQEEGGRHTPFFSGYRPQFYVRTTDV

SEQ ID NO: 22987 - protein, 316 aa, Rubrivivax gelatinosus PM1
MTTPLHARVLILGSGPAGYTAAVYAARANLEPVLITGMAQGGQLMTTTEVDNWPADVHGVQGPELMQRFLEHAERFKTQVVFDHINAVDFSKRPFTLTGDSGRYTCDALILATGASAMYLGLPSEEAFMGRGVSGCATCDGFFYRDQEVCVIGGGNTAVEEALYLSNIASKVTLVHRRDKFKAEAILVDKLMEKVAAGKIELKLFHVLDEVLGDSSGVTGVRLKNTQTGETQDLMLKGCFIAIGHRPNTEIFQGQLEMKDGYIITRTGLNGFATMTSVPGVFAAGDVQDHVYRQAITSAGTGCMAALDAQRFLEQG

SEQ ID NO: 22988 - protein, 460 aa, Bacillus licheniformis
MHTLEKMEQTNVQMARDYVTKAYETVRQRNLHESEFLQAVKEIFDSLVPVLARHPKYIEHRILERIAEPERMITFRVPWVDDEGNIQVNRGYRVQFNSAIGPYKGGIRFHPSVNASIIKFLGFEQIFKNSLTGQPIGGGKGGADFDPKGKSDREIMSFTQSFMNELYRHIGPDTDIPAGDIGVGAREVGFMFGQYKKIRGRYDAGVLTGKGLEYGGSLTRKEATGYGLVYFVEEMLKDQGLRFENSTVVVSGSGNVALYAMEKAAQFGGKVVACSDSDGYVYDEKGISLETVKRLKESGNGRIREYVSEHPEAHYFEGCSGIWSIPCDIALPCATQNEIDEEAAGVLISNGVKAVGEGANMPSEEGAVKRFLDAGVLFGPAKAANAGGVAVSALEMAQNSARLHWTAEETDEKLRMIMTDIYKRSVEAASEYGRPGNLLDGCNIAGFIKVADAMIAQGVV

SEQ ID NO: 22989 - protein, 487 aa, Mesorhizobium loti MAFF303099
MRAQPTASHYVNGRYIDDEQGAPLPVIYPATGETIAMLRSATPNVLELAIEAARAAQPAWARLKPVERGRILRRAADILRARNADLARIETLDTGKAIQETLVADAPSAADCLEYFGGAVAAYNGEAVDLGGPFAYTRREALGVCVGIGAWNYPIQIAGWKSAPALAMGNAMVFKPSENTPLSALALAEIYSEAGLPDGLFNVVQGYGDVGAGLVGHDVVAKVSVTGSVPTGRKVLSLAGSKMKHATMELGGKSPLIVFDDADIENAIGGAMLGNFYSTGQICSNGTRVFVQSGIHDRFVERLVERTKKIRIGNPLDPETQMGPLVSKAQHEKVVGYIGIGKQDGAVLACGGNVPSLQGFDGGFFVEPTVFTGVTDTMRIAREEIFGPVMSVLKFDGEDEVIDRANDTEFGLAAGVFTRDLPRAHRVIAELQAGTCWINAYNLTPVEIPFGGFKQSGIGRENSLAALALYSQLKSIYVETGDVASPY

SEQ ID NO: 22990 - protein, 522 aa, Vibrio sp. Ex25
MLDQAIQQQLKQYLANVKEDVRLVVSLDESKASNDILSLANQIAEMSDFITVERDDNASARKPVMTVTNPVKGTALRFAGLPMGHEFTSLVLALLHSGGHPIKLEPEVIEQIAALDKELDVEVFISLSCQNCPDVVQAFNMMAAINPKVKATMIDGALFQDEVKQRDIMAVPSVFVNGELFGQGRMSLTEILNKVDDGASEKAAKALSEKDPYDVLVVGGGPGGSAAALYAARKGIRTGVVAKRFGGQVMDTMAIENFISVKRTEGPKLATDLAEHLKEYDVDVVTEQQAQKLMGAAHTEDGLIHIQLESGATLKSKSVILSPGARWREMNVPGEQEYRNKGVAYCPHCDGPLFKGKKTAVIGGGNSGIEAAIDLAGIVEHVTVLEFADVLRADQVLIDKASSLPNVDIITMAQTTEVVGDGTRVTSLKYKDRNTDEIKEIELSGIFVQIGLVPNTEWLKDSEVALSERGEIEVGSRGETSLEGVFAAGDATTVPYKQIIIAMGEGAKASLGAFDYLIRKQG

SEQ ID NO: 22991 - protein, 457 aa, Kineococcus radiotolerans SRS30216
MSPILPGNPVELPVEAAGGVPATTVLSTADGAVVTRTVLPCGARVLTEAMPGQRSASVGCWVGVGSRDETKGHFGSTHFLEHLLFKGTERRDAMDIASAFDAVGGEANAATGKEHTTYYARVLDADLPMAIDVVTDMVTSAVLDDDDFTSEREVILEELAMNDDDPGDVAHERFAELVLGRHPLARPIGGTPDTIRAVGRDDVWAHYREHYQPSSLVFTAAGGLDHDEVVACVQRELDRAAGDLAQAAPRPRRTSGEVSGGLEAGAALVVDRQTEQAHVLLGMTGITATDERRFTLSVLNAVLGGGMSSRLFQEVREKRGLAYSVYSFNANYADSGYVGLYAGCSPAKAAQVAELMLAELEKLATSPLEAEELGRGVGQLTGGLVLGLEDSGSRMNRLGKSELTHGQFLDVDGVLANVRAVTAEDVQTLAADLLSRPRSVTVVGPFADDTAFRGVVR

SEQ ID NO: 22992 - protein, 1011 aa, Oryza sativa
MTDTTDDIAEGISFQAFEDDCRLLGSLLHDVLLRELGPRFIHLLERITILAQSAVNMRSAGVEDTAVVVEKQLGAELAAMSLEDSLCLARAFSHHLNLMTIADTYHRVRKARNFADLSKSCDDTFAKLIQSGVSPEELYDTVCKQHLLEFNERADLSLEDKEILIEDLVREITAIWQTDELRRHKPTPVDEARAGLHIVEQSLWKAIPHYLRRVSNALKKNTGKPLPLTCTPIKFGSWMGGDRDGNPNVTAKVTRDVSILSQWMAIDLYIRELDTLSFELSINRCSEKLANLANDILLKESASEDQKTNTWNQTGPQNNLKLQHSLALPAQLPSGADLPSCTECNDGESQIRMSKLPGNPKHKRSLEAQTVHKNALAQLFQYALHFFSTNIEMTWSEKCYGEAMASPLALNITEKREDSPLPSPSHRPMGRTPSGGQLRKMFTESQIGRSSFRKLLEPSISERPGSTPYRVVLGDVKEKQSCGSSVLADGRLADLIRRVATFGMVLMKLDVRQESGRHTETLDAITSYLDLGVYSEWDEQKKLDFLTRELKGKRPLVPPYIQVTADVQEVLDTFRVAAELGSDALGAYVISMASNASDVLAVELLQKDARLTVSGDLGRPCPGGTLRVVPLFETVNDLREAGPAIRKLLSIDWYRDHIIKNHNGHQEVMVGYSDSGKDAGRFTAAWELYKAQEDVVAACNAFGIKVTLFHGRGGSIGRGGGPTYLAIQSQPPGSVMGTLRSTEQGEMVQAKFGLPQTSVRQLEIYTTAVLLATLRPPQPPRDDKWRGVMEEISRVSCAQYRSTVYENPEFIKYFQEATPQAELGYLNIGSRPAKRRTTPGISNLRAIPWVFAWTQTRLVLPAWLGVGRGLQDACDKGHTHELRAMYEEWPFFQSTVDLIEMVVAKADAPMAKHYDDVLVHDAGRRTLGAELRQELARTENCVLAVSGHKKLSANNRSLRKLIDSRLTYLNPMNMLQVEVLRRLRQDDDNRKLRDALLITINGIAAGMRNTG

SEQ ID NO: 22993 - protein, 151 aa, Synechococcus elongatus PCC 7942
MQIEFREFNPFDCWIWVEFSTVPAPLEQQYLEELFDSWFFLGKLGGFNAENLQAQEEGLELSYMSYQSAQERSSLAALMHNMGEVEYQGRWARCWFDLGTSDAIALDVLLNALQRLSEEMVGLEQVFVGGENADWPSPGRRSLDFAADDWN

SEQ ID NO: 22994 - protein, 215 aa, Fagus sylvatica
MARRADEEYDYLFKVVLIGDSGVGKSNLLSRFTRNEFCLESKSTIGVEFATRTLQVEGRTVKAQIWDTAGQERYRAITSAYYRGAVGALLVYDVTKPTTFEQVWLKELRDHADSNIVIMLIGNKTDLKHSRAVRTEDAQGFMLRKKALSFIETSALKATNVEKAFQTILCLRFTGIISKKSLSSDEPAPSVIKEAVKHIVVGGSEANTKKPCCSN

SEQ ID NO: 22995 - protein, 561 aa, Kineococcus radiotolerans SRS30216
MNAGPVDPTTTAAWSSLSEHRSATTPDLRGWFAADPARARDLTLDVADLHVDLSKNLVTADTVALLLQLAEQTGVLARRDAMLAGEHVNVTEDRAVLHTALRRPAGASPALEVDGQDVDGDVQAELAKVFTFADAVRSGEWRGVTGKAITTVVNIGIGGSDLGPVMAYEALKPSVRAGLECRFVSNIDPTDVAETTKDLDPETTLFIVASKTFGTLETLTNARLARAWLWRGLAAAGVLADSDEARQEAVAKHFVAVSTALDKVAAFGIDPANAFGFWDWVGGRYSVDSAIGTSLAVAIGPEAFREFLAGFHAVDEHFRTTAPERNVPLLMGLLNVWYVNFLDAHTHAVLPYSQYLHRFPAYLQQLTMESNGKSVRYDGEPVTTHTGEVFWGEPGTNGQHAFYQLIHQGTRIVPSDFIAFATPAHPLVDGDADVHALFMANFFAQTKALAFGKTAEEVRAEGTAEDVVAARVFSGNRPTTSIMAPSLTPAVLGQLIALYEHVTFVEGAVWGIDSFDQWGVELGKKLALEIAPALTGDTAALEAQDPSTGALIRYYLEHRRD

SEQ ID NO: 22996 - protein, 168 aa, Synechococcus sp. RS9917
MSIFVGNLPFRAEQEDVIELFAAYGEVTNCALPLERDTGRKRGFAFIEMADEAAEAAAIEALQGAELMGRPLRINKAEPRGSAPRRGGGGYGGGGYGGGGYGGGGRGADRGGYGDGGGSGARGWEDRSYGGGAPQAGADDDGRSRRRRGGAAPAPQSDDYGDYGGAEG

SEQ ID NO: 22997 - protein, 403 aa, Papaver rhoeas
MDGTQEAAATDTVMGEAPSGVIAGEGPQPPPASEGGGGGGMENIPATLSHGGKFIQYNIFGNIFEVTAKYKPPIMPIGKGAYGIVCSALNSETSEQVAIKKIANAFDNKIDAKRTLREIKLLRHMDHENVVAIRDIIPPPDRGAFNDVYIAYELMDTDLHQIIRSNQALSEEHCQYFLYQILRGLKYIHSANVLHRDLKPSNLLLNANCDLKICDFGLARITSETDFMTEYVVTRWYRAPELLLNSSEYTAAIDVWSVGCIFMELMDRKPLFPGRDHVHQLRLLLELIGTPSEADLGFVNDNAKRYIRQLPRHPRQSLTEKFPHVHPSAIDLVEKMLTFDPRVRITVEDALAHPYLATLHDISDEPVCMTPFNFDFEQHALSEEQMKELIYREALAFNPEYQP

SEQ ID NO: 22998 - protein, 257 aa, Carboxydothermus hydrogenoformans Z-2901
MSVIEMVREEGIAILTINRANVLNALNTEVLLELKKVLSQIKEDTSIKVVIITGAGEKAFVAGADISEMVKQSVDEGYRYSRLGQEVLALIENLPQPVIAAVNGYALGGGCELAMACDMRIASEKAKFGLPEINLGIIPGFGGTKRLTELVGKAKAMELILTGEMIDAAQAERLGLVNQVVKADKLLETAKTLAQKIASKSQIAVRAAKLAVNKSLYTDIETANACEAGLFGVCFASEDRKEGMMAFLEKRPAKFKN

SEQ ID NO: 22999 - protein, 305 aa, Xylella fastidiosa Ann-1
MPLLRIATRKSLLAMRQSEYVAARLRMLCPDLDVVLVPMSTRGDEILDRSLAAIGGKGLFLKELELAMLRGDADCAVHSLKDVPMDLEPPFMLAAVLSRDDPADALISNVYLSLESLPIGARVATSSLRRQAQLRFYRPDLRLFDLRGNVNTRLAKLDNGDYDAIVLACAGLRRLGLEQRMTARLAPPEWLPAPGQGAIAVESLTEDARIGTLLAGLDDLPTRQCVVAERTMNRALHGSCHVPVGAYASYGVGGMRLQGLVGCVADGRLVRAELCSAKDEGDMLGRAVAQCLLDAGAAELLAATA

SEQ ID NO: 23000 - protein, 253 aa, Fusobacterium nucleatum subsp. vincentii ATCC 49256
MENIKLKKLDNGITLITENLPDISTFSMGFFVKTGAMNETKKESGISHFIEHLMFKGTKNRTAKEISEFVDFEGGILNAFTSREMTCYYIKLLSSKLDIAIDVLTDMLLNSNFDEESIEKERNVIIEEIKMYDDIPEEIVHEKNIEYALRGIHSNSISGTVSSLKKIDRKAILNYLEKHYVAENLVIVVAGNIDEKYLYKELNKRMKDFRKAKKKEVLDLTYEIKKGKKSCKETFKSNTSMLLLQKEFLQNLI

SEQ ID NO: 23001 - protein, 257 aa, Fusobacterium nucleatum subsp. vincentii ATCC 49256
MSVVSYKQENFIGIVTIERPEALNALNSQVLDELSSTFASINLETTRVVLLTGSGTKSFVAGADIAEMSTLNSDEGTKFGYKGNEVFRKIETFPLPVIAVINGFALGGGCELAMSCDFRICSENAIFGQPEVGLGITPGFGGTQRLARLIGLGKAKEMIYTANNIKANVALDIGLVNYVYPQESLMEEAMKLAGKIAKNAPFAVRACKKAINEGIDTDMDRAIIIEQKLFGSCFATEDQKVGMKAFLDKVKGVNIKQ

SEQ ID NO: 23002 - protein, 210 aa, Zea mays
  misc_feature (187)..(187): Xaa can be any naturally occurring amino acid
DARRFRSGIPGSTHASGRLLILQGSHGRAQPASSGLTDETAFSCCSDPDPSTKDFLLQQTMLRIKDPKKSLDFYTRVLGLTLLQKLDFPAMKFSLYFLAYEDKNDIPKDKSEKTAWTFSRKATLELTHNWGTEDDETQSYHNGNSDPRGFGHIGIAVPDVYSACKRFEELGVKFVKKPDDGKMKGLXAFIQDPDGYWIEILNPNKIATII

SEQ ID NO: 23003 - protein, 359 aa, Glycine max
MAANNAFQTNPAAICFYLRSFHLRRTMSEAPPSQPPPPTANASPPPYWCYHCEKRVSIETLANLPDVVCGECKNGFVESIHTPSRSRSPSASSDDPYFGSQFLQVLRLIAQSARDDDASPPPPPSRSPENDFLRIELGGWDNDEENDNDNNDDEEFEEHEEAEDRSGNEDPHGRDDEDLRRRRRELLRLRIRDLATRTRSMRNRILDWAEILMGLEDNSIEFRLQLPESDRYVGNPEDYVDAAEYEALLHTLAESDGGGRRGAPPASKAAVEALPTVKVASESEAVACAICKDLLGVGDLAKRLPCGHGYHGDCIVPWLSSRNSCPVCRYELPTDDKEYEEERVVNSASSSGGDGSAIA

SEQ ID NO: 23004 - protein, 331 aa, Thermus thermophilus
MKVGINGFGRIGRQVFRILHERGVEVALINDLTDNKTLAHLLKYDSTYGRFPGAVGYDEENLYVDGKAIRATAIKDPREIPWKQAGVGVVVESTGVFTDGEKARAHLEAGAKKVIITAPAKNEDITVVLGVNHEQYDPAKHHILSNASCTTNSLAPVMKVLEKAFGVEKALMTTVHSYTNDQRLLDLPHKDLRRARAAALNIIPTTTGAAKATALVLPSLKGRFDGMALRVPTPTGSISDITALLKREVTAEEVNAALKAAAEGPLKGILAYTEDEIVLRDIVMDPHSSIVDGKLTKAIGNLVKVFAWYDNEWGYANRVADLVELVLKKGV

SEQ ID NO: 23005 - protein, 932 aa, Aspergillus oryzae
MAATKIDGTQIAKNIRAGLKNEIQQIQESNPRFKPSLVIFQGTYVRMKLKAAEEAGIICKIVNLPETAIESELLQDITKANNDPSVHGILVQLPLPQHMSEHTITSAVADEKDVDGFGAINIGELAKRGGHPLFVPCTPQAVMELLRVSGVNPAGKKAVVLGRSDIVGSPVSYLLNKADATVTLCHSKTPDVESIIKTADILVAALGKTEFVKGEWLKPGVVVIDVGINYKPDPSKKSGQRLVGDVDFESAVQVASQITPVPGGVGPMTVAMLMQNVVNSAKAYFEKQKDRHITPLPLKLARPVPSDIAISRAQYPKAITQIASEIGISPHELEPYGHTKAKVSLDVLDRLAHRRNGKYILVCGITPTPLGEGKSTTTLGLTQAIGAHLNRIVFANVRQPSQGPTFGIKGGAAGGGYSQVIPMDEFNLHLTGDIHAITAANNLLAAAIETRMFHEATQKDGPLYKRLVPAKKGKREFQPVMFKRLKKLGITKTNPDELTNEEIRRFARLDIDPETITWRRVLDVNDRHLRGITVGQAPTEKGLTRETGFDISVASECMAILALSNSLEDMRDRLGRMVVATSKSGDPVTCDDIGAGGALAALMKDAIKPNLMQSLEGTPVLVHAGPFANISIGASSVIADKLALKLAGTEPDEDHEAKTGFVVTEAGFDFTMGGERFFNIKCRSSGLTPDTVVIVATVRALKVHGGGPEISPGAPLNEVYRTENVDILRKGCVNLKKHIENARQYGVPVVVAINRMETDTEAEIDVIREEAIAAGAEDAIPANHWAEGGAGAVDLAKGVLAASSKPKDFKLLYELEGTIQERIERIGKVMYGAEKIELSELAQKKVDTYTAQGFGHLPICIAKTQYSLSHDPALKGAPTGFTVPIRDVRLAVGGGYLYALAADIQTIPGLPTAPGYLNVDIDTETGEIDGLF

SEQ ID NO: 23006 - protein, 532 aa, Arabidopsis lyrata subsp. petraea
KTTLVELGRTLALEECALWMPTRTGLELQLSYTLRHQHPVEYTVPIQLPVINQVFGTSRAVKISPNSPVARLRPVSGKYMLGEVVAVRVPLLHLSNFQINDWPELSTKRYALMVLMLPSDSARQWHVHELELVEVVADQVAVALSHAAILEESMRARNLLMEQNVALDLARREAETAIRARNDFLAVMNHEMRTPMHAIIALSSLLQETELTPEQRLMVETILKSSNLLATLMNDVLDLSRLEDGSLQLELGTFNLHTLFREVLNLIKPIAVVKKLPITLNLAPDLPEFVVGDEKRLMQIILNIVGNAVKFSKQGSISVTALVTKSDTRDADFFVVPTGSHFYLRVKVKDSGAGINPQDIPKLFTKFAQTQSLATRSSGGSGLGLAISKRFVNLMEGNIWIESDGLGKGCTAIFDVKLGISERSNESKQSGIPKVPAIPRHSSFTGLKVLVMDENGVSRMVTKGLLVHLGCEVTTVSSNEECLRVVSHEHKVVFMDVCLPGVENYQIALCIHEKFTKQRHQRPLLVALTGNT

SEQ ID NO: 23007 - protein, 233 aa, Aspergillus oryzae
MHSPSPQLLRALRTSISAPNVTNRLCANTRSVSPISRITPHVQTYRNNSSHARPVRMVPRAHTAKPASRDRGPQSTEDTQTDFAALNVLGNIPAPTTAIDACLDNGFHLDNGLKLTNGDGLLLVGGEAFSWRPWTAMGGEKNAMVNKKGQFEVDEQAWGLLGLVWPRPDLLIIGMGASVFPLSPETRRQINSLGVRVEVLDTRNAAAQFNLLATERGVSEIAAAMIPIGWKGR

SEQ ID NO: 23008 - protein, 472 aa, Escherichia coli CFT073
MTTHLVWFRQDLRQHDNLALAAACRNSSARVLALYIATPRQWAAHNVSPRQAELINTQLNALQIALAEKGIPLLFREVDDFAASVEIVKQVCAEYRVTHLFYNYQYEVNERARDVQAERTLRNVVCEGFDDSVILPPGAVMTGNHEMYKVFTPFKNAWLKRLREGMPECVAAPKVRSSGSIEPAPSITLNYPRQSFDTAHFPVEEKAAIAQLRQFCLNGAGEYEQQRDFPAVEGTSRLSASLATGGLSPRQCLHRLLAEQPQVLEGGPGSVWLNELIWREFYRHLMTYYPSLCKHRPFIAWTDRVQWQSNPAHLKAWQEGKTGYPIVDAAMRQLNSTGWMHNRLRMITASFLVKDLLIDWREGERYFMSQLIDGDLAANNGGWQWAASTGTDAAPYFRIFNPTTQGEKFDREGEFIRQWLPELRDVPGKAVHEPWKWAEKTGVTLDYPQPIVDHKEARLRTLAAYEEARKGA

SEQ ID NO: 23009 - protein, 168 aa, Oryza sativa
MAALPLATAEVCDANSNPIIAGELRALPPIFKIYGRRQVFAGPVATVKVFEDNVLVRELLQEKGHGRVLVVDGGGSVRCALLGGNLAQLAQINGWVGIVVNGCIRDVDEINGCDVGVRALNSHPMKSGKKGAGEKRVPVTIEGTRICDGEWLYADADGILISRTELTV

SEQ ID NO: 23010 - protein, 338 aa, Desulfovibrio vulgaris subsp. vulgaris str. Hildenborough
MRKTRIGINGFGRIGRQVFRAIHERYGDKAEVVAINDLFDAATNFHLLEYDTNYGRAPFTPEVDGNMARVGDWQVTCFAQRDPAQLIWGDVGVDVVIESTGIFRSAKQAHVHIENGAKKVIISAPAKEEDITIVMGVNHHAYDPQKHHVVSNASCTTNCLAPVALIIQEKYGIATGAMTTVHAYTNDQRILDLPHKDLRRARAAGLNIIPTSTGAAQAVAKVIPELKGKFTGYSLRVPIPTVSVVDFTAILERDATTEGLRADLKEAAQGRLSGILAFSEKPLVSSDFKGDPHSSIVEAEYTTVQDGRLAKVVAWYDNEWGYSCRLADLIMLMQEKGL

SEQ ID NO: 23011 - protein, 325 aa, Thorea violacea
GKTTLTAAISAILSLSGNTKLKKFDEIDAAPEEKARGITINTAHVEYETTDRHYAHVDCPGHADYVKNMITGAAQMDGAILVVSAADGPMPQTREHILLAKQVGVPNIVVFLNKEDQVDDAELLELVELEVRELLHQYDFPGDAIPFVAGSALLGLNYVTENPETQKGENKWVDKIYKLMDAIDSYIPTPERDIDKTFLMAVEDVFSITGRGTVATGRIERGVIKVGDTIEIVGLKETRTTTITGLEMFQKTLDEGIAGDNIGILLRGIQKKDIERGMVLAKPGTITPHTQFEAEVYILTQEEGGRHTPFFSGYRPQFYVRTTDV

SEQ ID NO: 23012 - protein, 526 aa, Erwinia carotovora subsp. atroseptica SCRI1043
MLDNTMKVQLKAYLEKLTKPVELIATLDDSAQSAEVRTLLTEIAELSNQVSFIENNTVVEKNGQPARKPSFLITNPGSQSGPRFAGAPMGHEFTSLILALLQVGGHPSKEAKELLDQIRNLDGSFHFETYYSLSCHNCPDVVQALNLMAVLNPNITHTAIDGGVFQDEIQSRNVMGVPTIFLNGEHFSQGRTSLAEIVTKIDTGAGAKQVDKLNQRDVYDVLIIGSGPAGAAAAVYSARKGIRTGLVGERFGGQVLDTVDIENYISVPKTEGAKLATALKSHVDDYDVDVIDAQSAEALIPGGEPGKPHQVITVSGATLKARSVIIATGARWRNMNVPGEDQYRTRGVTYCPHCDGPLFKGKHVAVIGGGNSGVEAAIDLAGVVKHVTLLEFAPELKADSVLQEKVRSLPNVDIILNAQTTEVKGDGQKVTGLSYKDRITDTVHDLPLEGIFVQIGLLPNTHWLEGTVARNRIGEIEIDAKCETSVKGVFAAGDCTTVPYKQIIIATGEGAKASLSAFDYLIRTRA

SEQ ID NO: 23013 - protein, 344 aa, Medicago truncatula
MATQVGYVKSVFPVATTRKISHCQSSLLPCRIGYTARVSHVPLVKKVSSDAVRISCCSNNARESDFGAEKLEETEKSYSVVMKFGGSSVANAVRMKEIANLILSFPEERPIIVLSAMGKTTNKLLLAGEKAVSCGVTNADSIDELSDIKDLHLRTVEELGVDRDVISKHLEELEQLLKGIAMMKELTPRTQDYLVSFGECMSTRIFAAYLNKIGVKARQYDAFEIGFITTDDFTNADILEATYPAVAKRLHSDWVSDPAIPIVTGFLGKARKSCVRTTLGRGGSDLTATTIGKALGLQEIQVWKDVDGVLTCDPNICPQAQPVPYLTFDEAAELAYFGAQAFVE

SEQ ID NO: 23014 - protein, 322 aa, Cryptomonas paramecium
TTLTAAISATLAIYTGITKKFDEIDSAPEERARGITINTAHIEYETEKRHYAHVDCPGHADYVKNMITGAAQMDGAILVCSAADGPMPQTREHILLAKQVGVPHVVVFLNKVDMVDDSELLELVQLEIQELLSKYDFPGDKIPFVSGSALLALEALTKKPKLTRGEDKWVDTIYNLMDKIDAYIPTPEREIDKNFLMAVEDVFSITGRGTVATGRIERGKVKLGETIEIVGLRETRTTTITGLEMFQKSLEEAIAGDNVGILLRGIQKVDIERGMVLSKPGSITPHTKFEGEVYVLTKEEGGRHTPFFTGYRPQFYVRTTDV

SEQ ID NO: 23015 - protein, 324 aa, Chroomonas sp. SAG 980-1
GKTTLTAAISAVLAKGSGKGKKFDEIDSAPEERARGITINTAHIEYETENRHYAHVDCPGHADYVKNMITGAAQMDGAILVCSAADGPMPQTREHILLAKQVGVPHIVVFLNKADMVDDEELLELVQLEVQELLDKYDFPGDEIPFVAGSALLALEAVTNNPTIKKGEDKWVDSIYSLMEKVDTYIPTPERDIDKTFLMAVEDVFSITGRGTVATGRVERGQVKVGDTIEIVGLRETRTTTITGLEMFQKSLEEAMAGDNVGILLRGIQKADIERGMVLSQAGTITPHTKFEGEVYVLTKEEGGRHTPFFTGYRPQFYVRTTDV

SEQ ID NO: 23016 - protein, 424 aa, Thiomicrospira crunogena XCL-2
MSHPKNVIYAQAGGVTAVINASAAGVIEMTRRHPETFGKTYAAINGIVGVLEERMVDTSELGEATLDRLKTQPGAAFQACRFDLDTIEENPAQYERVLEVFRAYDIGYFFYNGGNGSMLTAQKVADYCSDHGHPVTCIGVAKTIDNDLALSHCSPGFGSAAKYIATSLLEATLDLFSMHNTSTRFFVLEAMGRNTGWLTIAGGLIKTVLPDVPLIVLPAERAFDQKAFLERVKTLIATRGYCVCIVSEGLTDSDGNYISIENIEHTQHNDYTQLGGVAHSLSSLVANTFNCKTHSAVPDYLQRSASHMVSETDWEMAYRAGKAAVQAALDGHHGVLPTIDVISQSPLVWRYQNVDLYQVAELEKRVPDAFLTEDGMDITQEAIEYLQPLIKGERPVKFHNGLPDIAPIHFDLVPPTLSAYKAIK

SEQ ID NO: 23017 - protein, 228 aa, Chlamydophila pneumoniae CWL029
MALLILLRHGQSVWNEKNLFSGWVDIPLSQQGIEEAFSAGRAIQNLPIDCIFTSTLVRSLMTALLAMTNHHSKKIPYIVHEDPKAKEMSRIYSAEEENNMIPLYQSSALNERMYGELQGKNKKQTAEQFGEERVKLWRRSYKTAPPQGESLYDTKQRTLPYFEKNILPQLQNGKNVFVSAHGNSLRSLIMDLEKLSEEEVLSLELPTGKPVVYQWKNHKIEKHPEFFG

SEQ ID NO: 23018 - protein, 325 aa, Pyrenomonas helgolandii
GKTTLTAAISTVLAANSSGPGKKFDEIDSAPEERARGITINTAHVEYETASRHYAHVDCPGHADYVKNMITGAAQMDGAILVCSAADGPMPQTREHILLAKQVGVPHIVVFLNKADMVDDEELLELVELEVQELLSKYDFPGDEIPFVAGSALLALETAVGKPDIGRGEDKWVDTIFELMDKIDEYIPTPERETDKSFLMAVEDVFSITGRGTVATGRIERGQVKVGDTIEIIGLRETRTTTITGLEMFQKSLEEALAGDNVGILVRGIQKTDIERGMVLAAPGSITPHTKFEGEVYVLTKEEGGRHTPFFTGYRPQFYVRTTDV

SEQ ID NO: 23019 - protein, 475 aa, Amycolatopsis mediterranei
MSPREVVIVGYGMAGARLADEIRRRDPIAERVRLTVLGAEKHAAYNRVLLSAVVAGGMSAESVRLHDDEWAQRHNIDLRLGVDVARIDREKRCVELADGSSIDYDALVLATGANPWIPPVEGLEAGPGVVAFRSLDDCAKILDAARFGAPVAVLGGGLLGLEAARGLAGRGNQVTVVHPLGHVMERQLDPAAGHVLARQLTDMGVTFKFGATAARYLPGDGLKLDDGSLVPADLVVVAAGVRAETSLAVEAGLDVDLGILVDDTLRTSDGRIHALGDCARHPGAPAGLIQPAWEQASVLADVLTGTNAAARYRGTTAVTRLKARGIDLAALGETQLDAGNPNVEVLTFNDPTGGRYGKLVVRENRVTGAILLGLPDAAATITQFHDRGTLLPEDRLGVLLGRALPTGATPAASPADLPAAAVICRCNNVTKGRLIEAWKAGATDTPALARATRATTGCGGCSDTVGGIANWLAAQ

SEQ ID NO: 23020 - protein, 321 aa, Rhodomonas abbreviata
GKTTLTAAISAVLSTNTGGNSKKFDEIDSAPEERARGITINTAHVEYETEKRHYAHVDCPGHADYVKNMITGAAQMDGAILVCSAADGPMPQTREHILLAKQVGVPHIVVFLNKADMVDDEELLELVELEVQELLSKYDFPGEDIPFVAGSALLALETAAGNPSIGRGEDKWVDTIFELMDKIDEYIPTPEREVDKSFLMAVEDVFSITGRGTVATGRIERGLVKVGDTIEIIGLRETRTTTITGLEMFQKSLDEAMAGDNVGILVRGIQKTEIERGMVLAAPGSITPHTKFEGEVYVLTKEEGGRHTPFFTGYRPQFYVR

SEQ ID NO: 23021 - protein, 472 aa, Salinibacter ruber DSM 13855
MASVSLPPQKILAFGMRIRTFVLAVVGLLFVPIGAAAMPLSDPANVAEALQSAEQTQTNLDYVWTILAAALVFFMQAGFALLESGFSRAKNAVNIIMKNVMDASAGALVFFAVGFGLMFGTSWGGLIGTDGFFLTGTGDQPQTWVYAFYFFQAVFAATAATIVSGAVAERIKFSGYLIFSVTITGLIYPVFGAWAWGGLFNGSGWLEALGFIDFAGSTVVHSVGGWAALAGALVVGPRVGKYADDGTPRSIPGHSLPLAALGVFILWLGWFGFNAGSTTAGSTAIAKIAMNTFVAAGAGAVAAMAITWIDGGTPDATMTLNGVLGGLVGITAGCAALTPPYAILTGAIAGAVVVYGTRALEWYVDDPVGAIAVHGLAGAWGTIAAGLFNSAGFSLSQVGVQVVGVAAAFLWTFPVSYLVFSIVDAAIGIRLNGKKETVGLDRMEHDVEAYPEFTTDGDRQAPAPEADEVVAR

SEQ ID NO: 23022 - protein, 840 aa, Amycolatopsis mediterranei
MPTLVVAGHGMVAHRLVEAVRAEDPSGNWHIVVLSEEPRPAYDRVALTSYVDTWDPATLALPGSDYAGDEHVDLRLGEPAVSVDRDARTVTTASRRGRRVRRSGAGHRLAAVRAAGARARLDGCFVYRTIEDLDAIRAAAVDKPGRGRRSAVVIGGGLLGLEAAKALRDMGLSPHVVEMAPRLMPLQVDEGGGSMLPRMITALDVTVHTGTSTDAIEADGSRLLAKLGNGTELDVDLVVFSAGVRPRDDLARQSGLELGPRGGVLTDASCRTGDPAIYAIGECAAVEGKVYGIVAPGYAMAEIVAAQLTGGAGTFPEPDTSTKLKLMGVDVASFGDAHAKTEGALEVAVNDAVAGTYKKLVVTDDGKTLLGGVLVGDATEYNTLRALVGRPLPAEPGAILAPAGGGAAVGVDALPDAAQICSCNAVSKGAITQAIHEDGCDTVPKLKACTRAGTACGSCVPLLGRLLSAAGVEQSKAVCEHFPQSRAELFEIVQATRITTFSELIGRYGSGSGCAICKPAVASILATLGNGHVLGGEQMTLQDTNDRYLANLQRNGTYSVVPRIPGGEITPDKLIVIGEVARDFGLYTKITGGQRIDLFGATVDQLPLIWRRLVDAGFESGHAYGKALRTVKSCVGSTWCRYGVQDSVGLAIELELRYRGLRSPHKLKSAVSGCARECAEARSKDFGIIATENGWNLYVGGNGGTTPRHAELLVSDVDTETLIRTIDRFLMFYVRTADRLQRTAPWIEELDGGLDHLRAVIVDDSLGICEDLDAAMAKHVDNYADEWKGVLEDPEKLARFTSFVNAPGAPDPAISFREERQQKVPVMLGVPGFSNSEVRR

SEQ ID NO: 23023 - protein, 408 aa, Thiomicrospira crunogena XCL-2
MALIVQKYGGTSVGNVERIQNVADKVAKFIDEGHQVVVTLSAMSGETNRLTALAKEVQEQPSRREMDVLLTTGEQVTIALLSMALQQKGYDSISYTGWQVPIKTNDIHSKARIEEIDSDKIRNQLDQGKVVVVAGFQGVTPEGDITTLGRGGSDTTAVALAAALKADECQIYTDVDGVYTTDPRVVPEAKRLDVVTFDEMLELASLGAKVLQIRSVEFASKYKVPLRVLSSMKEGGGTLLISEEDFEDLDMEKPLISGIAFSRDEAKLMILGVPDKPGVAYQILGPISDANIEIDMIIQNQSVDGTTDFTFTVARGDLHAAQKILEKTAESLGAREVICDDTIVKISMVGVGMKSHSGIASTMFKTLADHNINIQMIGTTEIKISVVIEESYLEEAVQALHAAFELDK

SEQ ID NO: 23024 - protein, 311 aa, Triticum aestivum
MASFGSIAVALVVCAMLLQTCVATRRLQALVQEQPITMKYHKGALLSGRIAINLVWYGNFSAPQRAIVTDFVSSLASASASPAPQPEPSVATWFKTAQKYYASSKARFPALALGSHVFDRSYSLGRRLRERDLVRLAARGGPSRAINVVLTADDVAVDGFCMSRCGSHGASPRSRAGRFAYVWVGNPATQCAGQCAWPFHQPQYGPQMAPLAPPNGDVGVDGMVVSLASMVVGTVTNPFGNGFFQGPAEAPLEAATACAGVYGKGAYPGYAGSLLVDPATGASFNANGAHGRKYLVPALVDPDTSACSTLG

SEQ ID NO: 23025 - protein, 525 aa, Arabidopsis thaliana
MEPVEAFNVYYLWMGLTNFAPLLGALISDAYIGRFKTIAYASLFSILGLMTVTLTACLPQLHPPPCNNPHPDECDDPNKLQLGILFLGLGFLSIGSGGIRPCSIPFGVDQFDQRTEQGLKGVASFFNWYYLTLTMVLIFSHTVVVYLQTVSWVIGFSIPTSLMACAVVLFFVGMRFYVYVKPEGSVFSGIARVIVAARKKRDLKISLVDDGTEEYYEPPVKPGVLSKLPLTDQFKFLDKAAVILDGDLTSEGVPANKWRLCSIQEVEEVKCLIRVVPVWSAGIISIVAMTTQATFMVFQATKMDRHMGPHFEIPAASITVISYITIGIWVPIYEHLLVPFLWRMRKFRVTLLQRMGIGIVFAILSMFTAGFVEGVRRTRATEMTQMSVFWLALPLILMGLCESFNFIGLIEFFNSQFPEHMRSIANSLFPLSFAAANYLSSLLVTTVHKVSGTKDHPDWLNKDLDRGKLDYFYYLIAVLGVVNLVYFWYCAHRYQYKAGSQIEDFNEEKSLLDIEPNQRHDQSPS

SEQ ID NO: 23026 - protein, 759 aa, Arabidopsis thaliana
MAMTPVASSSPVSTCRLFRCNLLPDLLPKPLFLSLPKRNRIASCRFTVRASANATVESPNGVPASTSDTDTETDTTSYGRQFFPLAAVVGQEGIKTALLLGAVDREIGGIAISGRRGTAKTVMARGLHEILPPIEVVVGSISNADPACPDEWEDDLDERIEYNADNTIKTEIVKSPFIQIPLGVTEDRLIGSVDVEESVKRGTTVFQPGLLAEAHRGVLYVDEINLLDEGISNLLLNVLTDGVNIVEREGISFRHPCKPLLIATYNPEEGAVREHLLDRVAINLSADLPMSFEDRVAAVGIATQFQERCNEVFRMVNEETETAKTQIILAREYLKDVKISREQLKYLVLEAVRGGVQGHRAELYAARVAKCLAAIEGREKVTIDDLRKAVELVILPRSSLDETPPEQQNQPPPPPPPPQNSESGEEENEEEQEEEEDESNEENENEQQQDQIPEEFIFDAEGGLVDEKLLFFAQQAQKRRGKAGRAKNVIFSEDRGRYIKPMLPKGPVKRLAVDATLRAAAPYQKLRREKDISGTRKVFVEKTDMRAKRMARKAGALVIFVVDASGSMALNRMQNAKGAALKLLAESYTSRDQVSIIPFRGDAAEVLLPPSRSIAMARNRLERLPCGGGSPLAHGLTTAVRVGLNAEKSGDVGRIMIVAITDGRANITLKRSTDPESIAPDAPRPTSKELKDEILEVAGKIYKAGMSLLVIDTENKFVSTGFAKEIARVAQGKYYYLPNASDAVISATTRDALSDLKNS

SEQ ID NO: 23027 - protein, 521 aa, Triticum aestivum
  misc_feature (36)..(36): Xaa can be any naturally occurring amino acid
  misc_feature (187)..(187): Xaa can be any naturally occurring amino acid
  misc_feature (286)..(286): Xaa can be any naturally occurring amino acid
  misc_feature (315)..(315): Xaa can be any naturally occurring amino acid
  misc_feature (406)..(406): Xaa can be any naturally occurring amino acid
  misc_feature (419)..(419): Xaa can be any naturally occurring amino acid
  misc_feature (434)..(434): Xaa can be any naturally occurring amino acid
  misc_feature (443)..(443): Xaa can be any naturally occurring amino acid
  misc_feature (455)..(455): Xaa can be any naturally occurring amino acid
  misc_feature (476)..(476): Xaa can be any naturally occurring amino acid
  misc_feature (478)..(478): Xaa can be any naturally occurring amino acid
MVLSHAASAGSSDESVHSTFASRYVRASLPRFRMPXNSIPKEAAYQIINDELMLDGNPRLNLASFVTTWMEPECNKLMMDSINKNYVDMDEYPVTTELQNRCVNMIAHLFNAPLGETETAVGVGTVGSSEAIMLAGLAFKRRWQNKMKAAGKPCDKPNIVTGANVQVCWEKFARYFEVELKEVKLSXGYYVMDPEKAVEMVDENTICVAAILGSTLNGEFEDVKMLNDLLVKKNEETGWDTPIHVDAASGGFIAPFLYPELEWDFRLPLVKSINVSGHKYGLVYAXGIGWCIWRSKEDLPDELIFHINYLGADQXPTFTLNFSKGSSQVIAQYYQLIRLGFEGYRNIMGHCQENAMVLKEGLERTGRFNIVSKDQGVPLVAFSLKDSSRHDEFEISEFLRRFGWIXVPAYTMPPNAQHXTVLRVVIREDFNRTXAERLLIDIXKCSTTRPLPSRXNGARPAHPTANCEREGLASNXVXSLWKKASRKKKTRVLTWHRSHLHMVNPISIPAVFKTFHNYKVS

SEQ ID NO: 23028 - protein, 445 aa, Haloarcula marismortui ATCC 43049
MSKTPPGPKGEPLFGSSRTYARDPFRFISALERAYGDVARFDMGPMDTVMLCDPTAIERVLVSEADRFRKPDFQGDALGDLLGDGLLLSEGETWEQQRKLANPAFSMARLSGMADRITGHAEDRIADWSHGDVIDAEQSMTRVTLDVILDLMMGVELSEQRVQTIEEQLLPLGQRFEPDPIRFAMPQWMPMPDDAEFNRAVRTLDEVLDDIIEVREDSLGTDEDGPMDFLSVLLRARDDGNQSPEQLRDEMMTMLLAGHDTTALTLTYTWFLLSEHPEVEQRVHEELDDVIGDDRPGMEHVRELDYLEWVIQEAMRLYPPVYTIFREPTEDVTLSGYEVEAGTTLMVPQWGVHRSERFYDDPETFDPERWKPERASERPRFAYFPFGGGPRHCIGKHLAMLEAQLITATTASQYRLEFQGETPLELLPSLTAHPRQKMSMRVQER

SEQ ID NO: 23029 - protein, 305 aa, Lactococcus lactis subsp. lactis Il1403
MIYTVTLNPALDYFMNYEELALGEVNRTGKTQISAGGKGIMESRMLSLVGAKSKALGFLGGFSGQYIKDFLNENQIDSDFTEIEDLTRINVKLKSQENETSLDAAGPKLQESEINHFLEKFDHLKEDDIVVFAGTIPKSLGEDFYERLIAKVQKQKATFVMDVDGQKLLDSLPAHPLLIKPNREELEAIFETSFKNNEQIIPYGQKLLEMGAQNVIVSMAGDGALLFTNEKVYFAQGIKGELKNSIGAGDSTVAGFLAEYSQSKDPLLAFRQAIACGTSKAFSDDMPSRAFLEEIYKKVNISEVK

SEQ ID NO: 23030 - protein, 600 aa, Oryza sativa
MDFTNLLITVLLLLAPLKYKSDVATASDDEDFFKTCSSHRCSKHGPEIRYPFRLSTQPPSCGAPGMQLSCSGQDTILDHPVLGSCKVTMIYYRHVIMNAIPLVDSSPHCLLHKFISVNQSTAVYRPHTLKAASLVGCSRDSIDTNQYNSIVGPTSCLSLANNASQFWYLAYPYEYMSILPLGCTIVSKDIPMPYSYDKNGPNFDISIFTETAKRVISTGETVFTWYSSNVTSICQQCEHEGPRVTIIAGTFIVLSLIVATALYISLKSRYNEEIHLKVEMFLKTYGTSKPTRYTFSEVKKIARRFKDKLGHGAFGTVYKGELLNGVPVAVKMLENSVGEGQEFINEVATIGRIHHANIVRLLGFCSEGTRQALIYEFMPNESLEKYIFPHGSNISRELLVPDKMLDIALGIARGMEYLHQGCNQRILHFDIKPHNILLDYSFNPKISDFGLAKLCARDQSIVTLTAARGTMGYIAPELYSRNFGAISYKSDVYSFGMLVLEMVSGRRNTEPTVENQNEFYFPEWIYERVMNGQDLVLTMETTQGEKEMVRQLAIVALWCIQWNPKNRPSMTKVVNMLTGRLQNLQVPPKPFTSSQNQLVI

SEQ ID NO: 23031 - protein, 539 aa, Arabidopsis thaliana
MASRIINHSKKLKHVSALLRRDHAVAVRCFSNSTHPSLVGREDIFKARLNYSSVERISKCGTGNVTMLSGISTTSTKLSSPMAGPKLFKEFISSQMRSVRGFSSSSDLPPHQEIGMPSLSPTMAEGNIARWLKKEGDKVAPGEVLCEVETDKATVEMECMEEGFLAKIVKEEGAKEIQVGEVIAITVEDEDDIQKFKDYTPSSDTGPAAPEAKPAPSLPKEEKVEKPASAPEAKISKPSSAPSEDRIFASPLARKLAEDNNVPLSSIKGTGPEGRIVKADVEDFLASGSKETTAKPSKQVDSKVPALDYVDIPHTQIRKVTASRLAFSKQTIPHYYLTVDTCVDKMMGLRSQLNSFQEASGGKRISVNDLVIKAAALALRKVPQCNSSWTDEYIRQFKNVNINVAVQTENGLYVPVVKDADKKGLSTIGEEVRFLAQKAKENSLKPEDYEGGTFTVSNLGGPFGIKQFCAVINPPQAAILAIGSAEKRVVPGTGPDQYNVASYMSVTLSCDHRVIDGAIGAEWLKAFKGYIETPESMLL

SEQ ID NO: 23032 - protein, 649 aa, Triticum aestivum
  misc_feature (640)..(640): Xaa can be any naturally occurring amino acid
MIPLCASSSPSTPAIIAPRPRRLRHRTTTPSLPHSRSPHRLHLLASSSTPRPLARAHRPGSVVTAAEMVFSVTKKETKPYEGQKPGTSGLRKKVTVFQQPHYLANFVQSTFNALPADQVKGATIVVSGDGRYFSKDAVQIIAKMAAANGVRRVWVGQDSLLSTPAVSAIIRERISADGAKATGAFILTASHNPGGPTEDFGIKYNMGNGGPAPESVTDKIFSNTKTVTEYLIAEDLPNVDISVIGVTSFTGPEGPFDVDVFDSATDYIKLMKTIFDFESIKKLLASPKFSFCFDGLHGVAGAYAKRMFVDELGASESSLLNCVPKEDFGGGHPDPNLTYAKELVDRMGLGKTSNVEPPEFGAAADGDADRNMVLGKRFFVTPSDSVAIIAANAVQSIPYFASGLKGVARSMPTSAALDVVAKNLNLKFFEVPTGWKFFGNLMDAGMCSVCGEESFGTGSDHIREKDGIWAVLAWLSILAYKNKDNLGGDKLVTVEDIVLQHWATYGRHYYTRYDYENVDAEAAKELMANLVKMQSSLSDVNKSIKEIQPTVADVVSADEFEYKDPVDGSVSKHQGIRYLFGDGSRLVFRLSGTGSVGATIRIYIEQYEKDSSKTGRASSDALSPLVDVALKFSKIKEYTXGRSAPTVIT

SEQ ID NO: 23033 - protein, 425 aa, Candida glabrata CBS 138
MAKSTTKKVSKKDLKLAKKEVESSSDSSSSSSSSSESSSSDSSSSESSDDEEPKKTKESSDSSSSDSSSSESDSDSESDSEESKEDKKESSSSSSSSSSDSESDSEESKEDKKESSDSESSSSSSSSSSDSESDSDSSSSDEEEEAKEEKDSKKRKAEDEEEESSPKKAKTDGEPATVFVGRLSWSIDDEWLKQEFEHIGGVVAARVMYERGTDRSRGYGYVDFEDKSYAEKAVKEMHGKEIDGRPINVDMSTSKPTVNPREDRQKRFGDIPSEPSDTLFLGNLSFNADRDNIYEIFGKFGEIISVRIPTHPETEQPKGFGYVQYTSIDDAKKALEALQGEYIDNRPVRLDYSTPKPNNGGNGGNGGSRGGFRGGRGGNSGGFRGGRGGNNGGNRGGFRPSGSGANQAPLGKPRTAFAGQKKTFD

SEQ ID NO: 23034 - protein, 95 aa, Nicotiana tabacum
APGLNYARYLEDLSEKDPQAFICHFYNTYFAHSAGGRMIGRKVAEKILNKKELEFYKWDGDLSQLLQNVREKLNKVAENWTREEKNHCLEETEKS

SEQ ID NO: 23035 - protein, 416 aa, Halobacterium salinarum
MTESGPLENMLAQMEQAREYVDIDDGIYERLKSPERTLSVSLPVRMDDGSVEVFDAYRCQFDSARGPYKGGIRYHPTVSEEEVSALAGWMTWKTALVDLPFGGAKGGIVCNPKELSDNEIEQLTRRYTEGIRRMIGPETDIPAPDMNTDPRTMAWVMDTYSVYQGYAVPEVVTGKPPEIGGTDGRVEATGRGVSIITEETFEYFDTDIQDADVAIQGFGNVGSVTADLLSERGANIVAVSDVTGAIHDPTGLDIADVQAYADANGGRLEGYDAEPISNDDLLTLDVDALIPAAIEDVITVDVAERLAADVIVEAANGPTTFDAAQVLSDRGVPVVPDILANAGGVIVSYLEWVQNSQQYSWDVEEVNRDLRQRLTGAFDEMLVAYEDRNIPTLRTAAYTIALERSADAHEFRGLFP

SEQ ID NO: 23036 - protein, 204 aa, Zea mays
MASSMLSSAAVATSPAQATMVAPFTGLKSSAAFPVTRKSNTDITSIANNGGRVSCMKVWPPVGKKKFETLSYLPDLTDVELAKEVDYLLRNKWIPCVEFELEHGFVYREHGSTPGYYDGRYWTMWKLPLFGCTDSAQVLKEVQECKTEYPNAFIRIIGFDNNRQVQWISFIAYKPPSFTGGLISFQKQPKKNPNPFPFPMAGFT

SEQ ID NO: 23037 - protein, 272 aa, Burkholderia xenovorans LB400
MTQLSTDLRHHGQSLLQDLDGFSIEIDAARERADIILHRPPLNVISMHARDQLRAAFEALDDDPRVRVIVVRAQGEHFSSGGDIKGFLEASPEHVSKLAWNIAAPARCSKPVIAANRGFCFGVGFELSLACDFRIATDTTFYALPEQKLGQIPGSGGSARLQQMVGIGRTKDIVMRSRRIPGKQAYEWGIAVECVADAELEATTDALVDELRAFSPLAQRTAKKLLNDTEDAPLSIAIELEGHCYSRLRTSDDFREGVEAFHGKRKPVFRGS

SEQ ID NO: 23038 - protein, 629 aa, Zea mays
GYLEAGRAGGYSYPQSSPSPLKLRDHLHRSPVSLFHTPASSPASRSPSVSWLAGRERERLFSSFVRNALGSCIDYAPVTSFPLGVRPAATGVDAAELAFELDENLSEAEPSCEPDAHELLAGAQARHHIFRDELVVKAFKEAERAHRGQKRASGDPYLQHCVETAVHLANIGANATVVSAGLLHDTIDDSFMDYDHIFRMFGAGVADLVEGVSKLSHLSKLARDNNTASRTVEADRLHTMFLAMADARAVLIKLADRLHNMNTIEALPLVKQQRFAKETMEIFVPLANRLGIASWKDHLENICFKHLNPEEHKELSSKLLMSFDEALLTSTLHNLDKSLRDEGISYHSLSGRHKSLYSIYSKMIKKNLTMDDVHDIHGLRLVVETEEDCYRALDIVHKLWPRVTGRFKDYICHPKLNGYRSLHTVIMCEGVHPFEIQIRTKEMHLQAEYGFAAHWRYKEGGCRHSFVLQMVEWARWVLTWQCETLSKERPSSLSSSVGIRPPCPFPLHSEDCSYSYSRQCNYEGPIFVIMLEHDKMSVQELPANSTVVDLMERVGANSPRWSPYSFPLKEELRPRVNHKPISDPNRKLSMGDVVELTPALPDKSLSEYREEIQRMYERGGFALATTPRS

SEQ ID NO: 23039 - protein, 532 aa, Arabidopsis lyrata subsp. petraea
KTTLVELGRTLALEECALWMPTRTGLELQLSYTLRHQHPVEYTVPIQLPVINQVFGTSRAVKISPNSPVARLRPVSGKYMLGEVVAVRVPLLHLSNFQINDWPGLSTKRYALMVLMLPSDSARQWHVHELELVEVVADQVAVALSHAAILEESMRARNLLMEQNVALDLARREAETAIRARNDFLAVMNHEMRTPMHAIIALSSLLQETELTPEQRLMVETILKSSNLLATLMNDVLDLSRLEDGSLQLELGTFNLHTLFREVLNLIKPIAVVKKLPITLNLAPDLPEFVVGDEKRLMQIILNIVGNAVKFSKQGSISVTALVTKSDTRDADFFVVPTGSHFYLRVKVKDSGAGINPQDIPKLFTKFAQTQSLATRSSGGSGLGLAISKRFVNLMEGNIWIESDGLGKGCTAIFDVKLGISERSNESKQSGIPKVPAIPRHSSFTGLKVLVMDENGVSRMVTKGLLVHLGCEVTTVSSNEECLRVVSHEHKVVFMDVCLPGVENYQIALCIHEKFTKQRHQRPLLVALTGNT

SEQ ID NO: 23040 - protein, 334 aa, Desulfitobacterium hafniense Y51
MTIRIGINGFGRIGRNVFRAAYGRENIEIVAVNNRSTGEILPHLLKYDSVHGIFPAQIQHTEDGFTVDGQLVKVVSHTDPGDIPWGELGVDIVIESSGKFNNGPACQKHLNNGARKVVISAPAKEEDITLVMGVNEEIYDPQKHHIISNASCTTNCLAPVAKVIHENFGLKRGLMTTVHSYTNDQQILDQSHKDLRRARAAGLSIIPTTTGAARAVALVLPELKGKLNGFSMRVPTPNVSVIDLVAEIEKNTTIEELNGVLRHASENKLKGILDYTDLPLVSSDFNGSSASSIVDGLSTMVMEDNLIKVISWYDNEWGYSCRVVDLVEYVSRQI

SEQ ID NO: 23041 - protein, 466 aa, Solanum tuberosum
MAAHSSTLTISLLLMLIFSTLSSASDMSIISYDETHIHHRSDDEVSALYESWLIEHGKSYNALGEKDKRFQIFKDNLKYIDEQNSVPNQSYKLGLTKFADLTNEEYRSIYLGTKSSGDRRKLSKNKSDRYLPKVGDSLPESVDWRDKGVLVGVKDQGSCGSCWAFSAVAAMESINAIVTGNLISLSEQELVDCDKSYNEGCDGGLMDYAFEFVINNGGIDTEEDYPYKERNDVCDQYRKNAKVVKIDSYEDVPVNNEKALQKAVAHQPVSIAIEAGGRDLQHYKSGIFTGKCGTAVDHGVVAAGYGSENGMDYWIVRNSWGAKWGEKGYLRVQRNVASSSGLCGLATEPSYPVKTGANPPKPAPSPPSPVKPPTECDEYSQCPVGTTCCCVLEFRRSCFSWGCCPLEGATCCEDHSSCCPHDYPVCNVRQGTCSMSKGNPLGVKAMKRILAQPIGAFGNGGKKSSS

SEQ ID NO: 23042 - protein, 313 aa, Enterococcus faecalis
MIVTVTMNPSIDISYLLDHLKLDTVNRTSQVTKTPGGKGLNVTRVIHDLGGDVIATGVLGGFHGAFIANELKKANIPQAFTSIKEETRDSIAILHEGNQTEILEAGPTVSPEEISNFLENFDQLIKQAEIVTISGSLAKGLPSDFYQELVQKAHAQEVKVLLDTSGDSLRQVLQGPWKPYLIKPNLEELEGLLGQDFSENPLAAVQTALTKPMFAGIEWIVISLGKDGAIAKHHDQFYRVKIPTIQAKNPVGSGDATIAGLAYGLAKDAPAAELLKWGMAAGMANAQERMTGHVDVENVKKHLMNIQVVEIAK

SEQ ID NO: 23043 - protein, 196 aa, Zea mays
RRKIAQKMAESKHLIPHFSYVEEIDVTELEDLRVSLNAKFGESRGKLTLLPLLARAMVIALRDFPQINARYDDEAGQVTRYGAVHIGIATQSDGGLMVPVMRHAETRDLWSMAAEIGRLAQAVRSGGAGRDELSGSTITITSLGPLGGIVTTPVINHPEVGIVGVNRIVERPAFRNGAVVARKLMNLSSSFDHRER

SEQ ID NO: 23044 - protein, 173 aa, Tripsacum dactyloides
MEGGESAKGTVLVTGASGFVGSWLVMKLLQAGYTVRATVRDPANVGKTKPLMDLPGATERLSIWKADLAEEGSFDDAIRGCTGVFHVATPMDFQSKDPENEVIKPTVEGMISIMRACKEAGTVRRIVFTSSAGTVNLEERQRPVYDEDSWTDVDFCRRVKMTGWMYFVSKTLA

SEQ ID NO: 23045 - protein, 593 aa, Schizosaccharomyces pombe
MVKRHKNTIGVWRLGKTLGTGSTSCVRLAKHAKTGDLAAIKIIPIRYASIGMEILMMRLLRHPNILRLYDVWTDHQHMYLALEYVPDGELFHYIRKHGPLSEREAAHYLSQILDAVAHCHRFRFRHRDLKLENILIKVNEQQIKIADFGMATVEPNDSCLENYCGSLHYLAPEIVSHKPYRGAPADVWSCGVILYSLLSNKLPFGGQNTDVIYNKIRHGAYDLPSSISSAAQDLLHRMLDVNPSTRITIPEVFSHPFLMGCTSLSSMDSTTPPTPSLSIDEIDPLVVDCMCVLWKKSSSKKVVRRLQQRDDNDEKYVYKVLSEILRDDMLKKQRFDENKYLSLYDLIHDNNLFTKASISTTSLVKSNVSTNSRKSSNFEDELARRVSSPLSALNQMSQSPIPIRVSSDKDYDSYACHEVVSNPSTLDDDYNYMFVCPPEEYTYSTDNVRTDSLDLQSLPTPTLEQLESVPFNRYGYVRIFPSTTLSSTASGYYTPDSLSTPEPSIDGLTNLDDVQVGGFVQGSGNQNRRPISFPVISNMQPNITNVRSASAPLCSSPVPSRRYSQYATNARYTPRKVSSGSVLRKISSFFRKD

SEQ ID NO: 23046 - protein, 219 aa, Brassica napus
  misc_feature (169)..(169): Xaa can be any naturally occurring amino acid
MHCSRHNNMSLLWITGLCVTALVVVRISNWWYRWSNPKSNGKLPPGSMGFPIIGETFDFFKPHRFYEISPFLKKKMLRYGPLFRTSILGVNTVISTDMDVNLDILRHENEYFNLSYPDGLVKPLGKESMFLKTGNIHKHIKKICMRLLGSENLKRKIIKDMDHVTCEHXSLKVGQGRFDLRDLASSVFFLSFFICLLSSTNINWLLSNLVKILINNLSL

SEQ ID NO: 23047 - protein, 322 aa, Emiliania huxleyi
KTTLTAAISATLAAYSGSKKDISLIDSAPEEKARGITINTAHVEYETETRHYAHVDCPGHADYVKNMITGAAQMDGGILVVSAADGPMPQTREHILLAKQVGVPHLVVFLNKADQVDDEELLELVELEVQELLENYDFPGDEIPFVSGSALLALQAVEGGPKAKGDDKWVDKIFDLMESVDNYIPAPERDTEKTFLMAVEDVFSITGRGTVATGRIERGILKIGDTIEIVGLKDTQTTTVTGIEMFQKTLDEGMAGDNVGILIRGVQKTDIERGMVLAQPGTISPHKKFEAEVYVLGKDEGGRHTPFFTGYRPQFYVRTTDV

SEQ ID NO: 23048 - protein, 532 aa, Arabidopsis lyrata subsp. petraea
KTTLVELGRTLALEECALWMPTRTGLELQLSYTLRHQHPVEYTVPIQLPVINQVFGTSRAVKISPNSPVARLRPVSGKYMLGEVVAVRVPLLHLSNFQINDWPELSTKRYALMVLMLPSDSARQWHVHELELVEVVADQVAVALSHAAILEESMRARNLLMEQNVALDLARREAETAIRARNDFLAVMNHEMRTPMHAIIALSSLLQETELTPEQRLMVETILKSSNLLATLMNDVLDLSRLEDGSLQLELGTFNLHTLFREVLNLIKPIAVVKKLPITLNLAPDLPEFVVGDEKRLMQIILNIVGNAVKFSKQGSISVTALVTKSDTRAADFFVVPTGSHFYLRVKVKDSGAGINPQDIPKLFTKFAQTQSLATRSSGGSGLGLAISKRFVNLMEGNIWIESDGLGKGCTAIFDVKLGISECSNESKQSGIPKVPAIPRHSNFTGLKVLVMDENGVSRMVTKGLLVHLGCEVTTVSSNEECLRVVSHEHKVVFMDVYLPGVENYQIALCIHEKFTKQRHQRPLLVALTGNT

SEQ ID NO: 23049 - protein, 503 aa, Bartonella quintana str. Toulouse
MPAVQETIRQVHEIGVDQYKYGFETKIKTEKAPKGLNEDIIRFISAKKREPEWMLTWRLQAFHRWLIMQEPDWARIEYPQIDFQGLHYYAAPKNHTGPKSLEEVDPELLATYEKLGIPLKEQEILAGVRKQSDLSTFDDRIYASGQVAVDAVFDSVSVVTTFKKELARAGVIFCSISEAIIEHPTLIKEYLGTVVPAGDNYYAALNAAVFTDGSFVYIPKGVRCPMELSTYFRINERNTGQFERTLIIADENSYVSYLEGCTAPQRDENQLHAAVVELVALKNAEIKYSTVQNWYPGDKDGKGGIYNFVTKRGDCRGDNSKISWTQIETGSAITWKYPSCLLRGDNSRGEFHSIAVANGYQQIDSGTKMVHLGKNTSSRIVSKGISAGFANNTYRGQVIAHRKAQNARNFTQCDSLLIGNDCGAHTVPYIEAKNATAQFEHEATTSKISDDQLFYVMQRGIPEEEAIALIVNGFVKEVIQKLPMEFVVEAQKLIGISLEGSVG

SEQ ID NO: 23050 - protein, 324 aa, Isochrysis sp. SAG 927-2
GKTTLTAAISATLSIWNAGLTKKLDEIDSAPEEKARGITINTAHVEYETEGRHYAHVDCPGHADYVKNMITGAAQMDGGILVVSAADGPMPQTREHILLAKQVGVPRLVVFLNKADQVDDDELLDLVQLEVQELLEKYDFPGEEIPFVSGSALLALQAVESGPKKKGEDKWVDKIYDLMEAVDNYIPAPVRDTDKTFLMAVEDVFSITGRGTVATGRIERGSLKIGDTIEIVGLKNTKETTVTGIEMFQKTLEEGMAGDNVGILIRGVQKTDIERGMVLAKPGSIKPHKKFEAEVYILGKDEGGRHTPFFTGYRPQFYVRTTDV

SEQ ID NO: 23051 - protein, 297 aa, Pavlova gyrans
GKTTLTAAISATLAIYSEKAAKKFDEIDSAPEERARGITINTSHIEYETENRHYAHVDCPGHADYVKNMITGAAQMDGAILVISAADGPMPQTREHILLAKQVGVPNLVVFLNKADQVDDEELLELVELEARELLSNYDFPGDDLPFVSGSAYLALEALKESGPMERGKNDWVDKIYALMDAVDEYIPAPERDVDKTFLMAVEDVFSITGRGTVATGRIERGIIKVGDTIEIVGITDTTSTTVTGVEMFQKTLDEGMAGDNVGILLRGVQKDQIQRGMVLSKPGSIKPHKKFEAEVY

SEQ ID NO: 23052 - protein, 418 aa, Chlamydophila pneumoniae CWL029
MIETREEVGSANFVSLERAIEDLRAGKFVIVVDEASREDEGDLIIAGEKITVEKMTFLLQHTTGVVCAALSQERLLSLDLPPMVKDNRCRFKTPFTVSVDAAHGVTTGVSAADRTKVVQLLADPKSKPEDFISPGHFFPLASSPGGVLKRAGHTESTVDLMELAGLQPCGVLAELVNEDYSMMRLPQILEFARKHNIAVIPVTSIIAHRMLSDRLVSKISSARLPTIYGDFTIHVYESLLEGMQHLALVKGNVAGKSNVLVRVHSECVTGDILGSKRCDCGEQLSSAMSYIAEKGTGVLVYLRGQEGRGIGLGHKVRAYALQDNGYDTVDANLAMGFPVDSREYGIGAQILVDLKLTTIKLITHNPQKYFGLQGFGLSITERVPLPVRISEDNEQYLRTKQERMGHWLDLPCCNNRVQ

SEQ ID NO: 23053 - protein, 324 aa, Pavlova lutheri
GKTTLTAAISGTLAIYGKAARKFDEIDSAPEEKARGITINTSHIEYETETRHYAHVDCPGHADYVKNMITGAAQMDGAILVISAADGPMPQTREHILLAKQVGVPNLVVFLNKADQVDDEELLELVELEARELLSNYDYPGDELPFVSGSAYLALEAVKEKGPIPRGENPWVDKIFALMDAVDEYIPAPVRDVDKTFLMAVEDVFSITGRGTVATGRIERGVVKVGETIEIIGITATTSTTVTGVEMFQKTLDEGMAGDNVGILLRGVQKDQIQRGMVLAKPGSITPHTKFEAEVYILKKEEGGRHTPFFPGYRPQFYVRTTDV

SEQ ID NO: 23054 - protein, 287 aa, Thiomicrospira crunogena XCL-2
MEAMIIDVTQDNFDEMVLNNSMHVPVLVDFWAPWCGPCKQVMPMLEKLAHDLAGRFILAKVNTEEQEALATQYQIRSIPSFKIFHQGQMVQELQGAQSASDFREALEPYLKPDLSEDLRQQAQQAFNAGEYDQAVKLLGDASEANPNNFRIHLDLAKMYFQSGHLDKAESLMEKLPDEAKQSKEGKSLQALFKFTQIVANADDIETVQKTLQNDPNNAEALYHLSGYLMLHNHPDKAMSCLLKLFSVAPDYQDGVAKKTLIETFEMLQDERPELVNTYRRQLQNLLF

SEQ ID NO: 23055 - protein, 325 aa, Heterosigma akashiwo
GKTTLTAAITATLSLGGTAQLKNYEDIDAAPEERARGITINTAHVEYETDNRHYAHVDCPGHADYVKNMITGAAQMDGAILVVSAADGPMPQTREHILLAKQVGVPHIVVFLNKEDQVDDEELLGLVELEVRDLLSNYDFPGDDIPCIPGSALQALQAIQENNTIKKGENKWVDKIYQLMEAVDEYIPAPERDVDKTFLMAVEDVFSITGRGTVATGRIERGVVKVGETVQIVGLSETRETTVTGIEMFQKTLDEGMAGDNVGILLRGVQKEDIERGMVLAKPGTINPHTNFESEVYILRKEEGGRHTPFFAGYRPQFYVRTTDV

SEQ ID NO: 23056 - protein, 455 aa, Cryptococcus neoformans var. neoformans B-3501A
MPPNASKTVFVANIPYDVSEEQLANVFSEAGPVANVEIKFDANTGRSKGYAFVQFYDEATALSAVRNLQDAPVNGRNLRVELSTDEPGPRRRGPGPGAVGVGAAPGAGGPGVGGPSASLGGPRPMVPAPGPGGAPPFTSAGAGAPGYPPRAPFDPRYPQVHSQSHENTPPPAGVGARRQGGDDIDLRMAPQGIDLLPGQKAVDTISKTLAGIAPGQMGDVMTSMKSLIQTNPDQARQLLSQQPQLAYALFQAMLLLNLVDPSVLSSIQPLAASASAAASGGAASVAPGPGGAGARAPNYPPYPPPTQTQGPPGGQQAFRPPPQALYGGAPPLPNQNQNQNQNQNPPYPPYPSGPGVPGGVSGAGAGIPPPTSTPVPPTPHPAHAVPVGPPGGPAPPAPGLASLPPAAQAALSTLPPDQQQMLLQVLQLSPAQIAALDPTQKASVMQLRQQFLGTA

SEQ ID NO: 23057 - protein, 853 aa, Pseudomonas syringae pv. tomato str. DC3000
MNTTVFPRTDVKTLIVVGNGMVGHHCVEQLIEGGALEHYRIHVFGEESQRAYDRVHLSEYFTGRDAESLAMSEMALYEQAGLTLHLGVPVLEIDRGRHEIITAEGCFCYDKLILATGSYPFVPPIEGAQGNSRLVYRTLEDLDTIRYAASKAKRGVVVGGGLLGLEAANALKSLGLEAHVVEFAPRLMPVQLDEHGGAALKARIEALGVGVHLSRATQSISDGKQYRYRMNFANDEFLETDLIVFSAGIRPQDSLARQCALELGPRGGVAIDEHCRTSDADIYAIGECAAWNGSVFGLVAPGYQMARGVAAQLCGKETDAFFGADMSTKLKLLGVDVGSIGDAHGALAGAVSYRFIDEASGSYRRLVVSADGKQVLGAVLVGDNSYYDTLLQYAQNGITLPADPSSLILPRGEGAPTLGADALPATATICSCHNVSKGSICSAIDNGCTDLAGIKACTKAATGCGGCTALLKQVFEHELIARGVAVDKSLCEHFAYTRQELYSIVRVEGIESFDELLDRHGKGAHGCDICKPAVGSILASCWNRPITEPSLVPLQDTNDTFMANMQKNGTYSVVPRIPGGEITPDGLIAIGAVAKKYDLYTKITGGQRIDLFGAQLHELPDIWSELIAAGFETGHAYGKSTRTVKSCVGSTWCRYGVQDSVAMALRIEDRYKGLRSPHKLKFAVSGCTRECAEAQSKDVGVIATENGWNLYLCGNGGMRPRHAELFATDLDDETLIRYIDRFLMLYIRTADKLQRTSVWRKTLEGGLDYLKAVILDDSLGLAAELESQMQLVVDRYECEWANALKDPEKLKRFRTFVNDGRSDPDVHFVKERAQRRPAKPEELALIPLFKEVV

SEQ ID NO: 23058 - protein, 136 aa, Shewanella sp. MR-4
MSQLLHTMLRVGNLERSIAFYTQVLGMKLLRTSKNPEYKYSLAFVGYGEESTGQAVIELTYNWGTEKYDLGTAFGHIAIGDEDIYARCEAIAAAGGKVTRAPGPVAGGTTEIAFVEDPDGYKIEFIQMKSATQGLG

SEQ ID NO: 23059 - protein, 345 aa, Methanosarcina acetivorans C2A
MHHNVFTNNPTVPIDVKNRSVSELMDGMLKTGFQGRKLAESVQAWNNMLKEKNTTVFMGLSGAMVPAGMRRIISHMIRERMIDCLVSTGANLFHDCHEALGRKHYVGSHLANDEKLFEQGVDRIYDIFAVEEEFRTADNLIADFAQEIGEITCSSREFMYLLGKELGRRGAAEDSIVVSAYRHNVPIFVPALSDSSIGIGLTIARRRGLKLEIDQIKDVDEITQIVEKSERTGVVYVGGGVPKNFIQQTEVIASILGMDIGGHDYAIQYTSDSPHWGGLSGCTFDEAVSWGKIAPQAKKVQVFVDATIALPIVAHALHEKTHDLKRIAPVFFWDGPEGLAIDYKE

SEQ ID NO: 23060 - protein, 446 aa, Cryptococcus neoformans var. neoformans B-3501A
MPLKRPSPGPHPLDLNPYERLQFEEKENRRSHNDTDHHATLTSRQEGLRRRAALGENVDISADGESKEDEGYSAQKRNDRLSSPEDTKTGEGKGKKSPLMSNLKLDDFRDTLEAGIERKFAPLHIPPHRRLQTAAVALWALLLPICMIVLLLLLSLPPMWLILIPYFIWISFDRAPIHGGRPKEWARKGFIWKYFADYYPCSIVKEAELPPNRPYLFGYHPHGIIGMGAFATFATEGTNFSEYFPGIKPHLLTLGSNFKIPFYRELLMIHGCGSVSKRSCANVLSQGPGSAIAIVIGGASESLSAHPGTADLTLKKRFGFVKMAIREGADLVPVFSFGENDIYAQLANAKGSMVYKLQKKFEKVFGFTLPLFYGRGLFNYNYGLMPFRHPIVSVVGKPIHVERDPHPSDEKVQELQGKYIAELTRIWDKYKDLYARGRTKELTLVE

SEQ ID NO: 23061 - protein, 184 aa, Photobacterium profundum SS9
MALKSLAIVEAEWFFYPHIRVRMMMTTFYDISADNIRGESVSMNEFAGKLVLVVNTASECGFTPQYRGLQDLYAKYKDQGLVIIGFPCNQFGGQEPGENTDIAESCLINYGVDFPMFAKVDVNGADSHALFQYLVKALPGTFGSKVKWNFTKFMISRDGKPLKRFAPTKKPESMEADIVRALKA

SEQ ID NO: 23062 - protein, 364 aa, Synechococcus elongatus PCC 7942
MTATLPTAPRRTVFPFTAIVGQEEMKLALLLNVIDPKLGGVMIMGDRGTGKSTTIRALADLLPEIEVVAEDPYNSHPSDPELMSNEVRDRIARGETPTIGRAKVQMVDLPLGATEDRVCGTIDIEKALSEGVKAFEPGLLAKANRGILYVDEVNLLDDHLVDVLLDSAASGWNTVEREGVSIRHPARFVLVGSGNPEEGELRPQLLDRFGMSVEVRTVKDPELRVQVVEQRSTFDQNPQTFLDRYASEQDSLQARIVAAQTLLPSVELDYDLRVKISEVCSELDIDGLRGDIVTNRAAKALTAFEGRSEVTLEDIQRIVAPCLRHRLRKDPLESVDSGGKVAKVFCRVFGLPEPTDTSAFSLVS

SEQ ID NO: 23063 - protein, 485 aa, Thermoanaerobacter tengcongensis MB4
MLKEYNSLIFELSKEGKKAYTLPPLDVEEKPLEDMLPKEMLREKEVDLPEVSEVDVIRHYTLLSQKNYGVDIGFYPLGSCTMKYNPKINEDMASLPGFTELHPYQPEETVQGALKLMYELEKALCEITGMDRFSLHPAAGAHGELTGLMIIKAYHEHRNDKKRKKIIVPDSAHGTNPASAAVAGFDVIEIKSNKEGAIDLEALKAVLNDEVAGLMLTNPSTLGLFEENIVEIARLVHEAGGLLYYDGANLNAIMGISRPGDMGFDVVHLNLHKTFSTPHGGGGPGSGPVGVKKELADFLPVPTVEEKDGRYFLDYDRPLSIGKVRSFYGNFNVMIKAYSYILTMGAEGLKRASELAVLNANYLKEKLKGYYKVAVDKTCMHEFVLAGLAEKSGDVRTLDVAKRLIDYGFHPPTIYFPLIVEEALMIEPTETETKETLDAFAETLIKIAKEAKENPELLKEAPHNTPVRRLDEVLAARNPVIRWTK

SEQ ID NO: 23064 - protein, 313 aa, Magnetospirillum magnetotacticum MS-1
MYGREHLGPWWGYVAGWGFVVGKTASCAAMALVLAAYAAPPGWERPVAAAAVVVLTAVGYRGVTRTARLARGIVAVALLAIATAVVASLAGTTPRWSVVLDADGAHGGWYGVLQAAGLLFFAFAGYARVATLGEEVRDPRRTIPRAVLVSLGTVVALYAVVAVTLLAVLGPARLAASAAPLADAVAAGSWSWAGPVVSVAAVAASAGALLALLAGVIRTGLAMARTGDLPGWFAAAHPVHRVPHRAELTVGAAVVLLVLATDLRGAIGFSSFGVLVYYLVANLSALRQTAPHRLYPRVLPVLGALGCVALVVT

SEQ ID NO: 23065 - protein, 554 aa, Arabidopsis thaliana
MEISNAMLLVAIVTGYWLWFKRISRWLKGPRVWPLLGSLPGLIEQRDRMHEWITENLRACGGTYQTCIFAVPFLAKKQGLVTVTCDPKNLEHMLKTRFDNYPKGPTWQSVFHDLLGQGIFNSDGDTWLFQRKTAALEFTTRTLRQAMGRWVNRGIKLRFCPILATAQDNAEPVDLQDLILRLTFDNICGLAFGKDTRTCAPGLPENGFASAFDRATEASLQRFIIPKFMWKLKKWLGLGLEVSLSRSLGEIDEYLAAVINTRKQELMSQQESGTHQRHDDLLSRFMMKKTESYSDTFLQHVALNFILAGRDTSSVALSWFFWLITMHPTVEDKIVREICSVLIETRGTDDVASWTEEPLGFDEIDRLVYLKAAISETLRLYPSVPEDSKHVENDDVLPDGTFVPAGSSVTYSIYAAGRMKSTWGEDCLEFNPERWISPIDGKFINHDQYRFVAFNAGPRICLGKDLAYLQMKTIAAAVLLRHRLTVVPGHKVEQKMSLTLFMKNGLLVNLYKRDLQGIIKSLVVKKSDGVSNGQCNGVIGEGVAVYLNTGVAVV

SEQ ID NO: 23066 - protein, 715 aa, Synechococcus sp. RS9917
MGFKLLHLHLHGLFRSHELELGRDADTGGQTLYVLELARGLAARPEVEQVEVVTRLIQDRRVSSDYAQPQETIAPGATILRLPFGPRRYLRKEQLWPYLDELADQLVARLQQPQHRPDWIHAHYADAGYVGALVSRRLGIPLVFTGHSLGREKLRRLLAAGGDHKQIEQSFSISRRIDAEELALAHADLVITSTRQEAQEQYCRYGRFRADQAEVVPPGVDASRFHPRSTPAESEAVDGLLDPFLRDPSLPPLLAISRAVRRKNIPALVEAFGRSSLLRQRHNLVLVLGCREDPRQLEKQQREVFQQVFDLVDRYDLYGQVAYPKQHRRAQIPAIYRWAAQRRGLFVNPALTEPFGLTLLEAAACGMPMVATDDGGPRDILARCDNGLLVDVTDLEALQDGLERAGSDPERWRRWRDNGIEAVSRHFSWDAHVCHYLALMQRRIERAQSLSSSQPRSLLLEPRPLADRLLLLDLDSSLEQPETEALQALRQQLNAPLGSAKSSAGSLGVLTGRSLAAARQRFAELHLPQPAVWITRAGTEIVYADQQDPDPLWSERIWVDWQRQDVERALADLSAHLERQDPAEQGPFKLSFLLRQSGEAILPLVRQRLRQRRLAARPHLRCHWFLDVLPLRASRSEAIRFLSLRWQLPLERILVVASQQGDGELVRGLPATVVLADHDPSLECFRQQQRVFFASRSRLSGLLEGLQHYRFLSRR

SEQ ID NO: 23067 - protein, 348 aa, Actinosynnema pretiosum subsp. auranticum
MWIGYSADGRRRRPVRWWGVTEAFTWETDEDIKLAATLRRDAEAANAADSTRAYLKAIGRVRLLTADQEVELARRVEAGLYAEHLLDLPPAARGSRRPVELRRVVRDGQRAKDHLLEANLRLVVSIAKRYTGKGMALLDVIQEGNLGLVRAVEKFDYAKGFKFSTYATWWIRQAITRALADQSRTIRLPVHMVEVVTKLARIERDLLHRNGREATAEEVAVELDVTPEKVVELRQHARTPVSLDQTIGAEADTSIGDLIADENAVAPLEAVSSALLSADLRAVLETLTPREAGVVRMRYGFPDGVLHTLDEVGRVYGVTRERIRQIESRTMAKLQHPARSRGLEGYLD

SEQ ID NO: 23068 - protein, 517 aa, Rhodopirellula baltica SH 1
MRRGANLSHPAQRRAIQYHLARGHRGVIQFNPNIRNSSPFFCTEPIMSLLRFDASGSINDDYGITQAQIDSLKGQMETLRTEMVETDQKQYESGDIPADKQPLDARFFWLPEEMLEAYAKEREASELGRIFKVANGLHDQIDAAVVLGIGGSYMGARAMMEACCDPYHNEMSRAARGSKPRMYFEGNNVDNDASDSLLQRVRAGGYADSDAEKRHAIIVISKSGGTMETAVAFRQFLANLESELGSEAEDWLSRLVVPVTGESGKLHDLATEIGCDEIFTVPDGVGGRFSVLSPVGLVPAAFLGLDCMKLLEGAVAMNEHFKTADYADNVVMQYVAVNHLLSQHRDKSIRVMSVWSKALESVGLWYDQLLAESNGKDGKGVTPLTTLNTRDLHSRHQQHQQGRNDKVFNNVIVESQRTDSLAVGHSQRNQDTLNDIAEKTLPDIMAAAIKGTNDALHADGRPTTDIILPQIDTHVLGQLFQMLMIATVIEGRLLGINPYGQPGVEQYKTNMNKNLGR

SEQ ID NO: 23069 - protein, 340 aa, Fusobacterium nucleatum subsp. vincentii ATCC 49256
MDNEEHDDLLEDETEDKLDDTDEENDETEEHFTEFDDEFNPEYIEDVSEDELSNEKLLNLGNSAKVDEPIKMYLREIGQVPLLTHDEEIEYAKKAYEGDEEASKKLIESNLRLVVSIAKKHTNRGLKLLDLIQEGNIGLMKAVEKFEYTKGYKFSTYATWWIRQAITRAIADQGRTIRIPVHMIETINKIKKESRIYLQETGKDASPEILAERLGMEVDKIKAIQEMNQEPISLETPVGSEEDSELGDFVEDQKTTSPYEATNRAILREELDAVLKTLSPREEKVLRYRYGLDDSSPKTLEEVGKIFNVTRERIRQIEVKALRKLRHPSRKKKLEDFKVD

SEQ ID NO: 23070 - protein, 455 aa, Nocardioides sp. JS614
MRRRLVVVGGGAAGMSAASAARRVDRELEVVVLESGAHAAYGLCGLPYFLSDVVTEVDSLRAYPPTFFQEQRDINLRFGAEVVRIDPERQLVNFRSEGQSEHLHYDKLILTAGATPSLPPIPGLDDDHVFTIRNVAESVRLRCLLDAGHIGHATVVGGGYIGLEVVESFAERGVSVTLIEALPGLMANLDPEFSRRVEEEVRLHAEVRLSSGLVSLVRTDEGLTLSLADGDTIETDVVVVATGVRPASGLGSSIGANTGPHGALLVDEQMRTSVPNVFAAGDCIAPNHIVTGRPTFIPLGPAANKTGRVAGTVAAGGTACFSGVAGTAIVKVFGLGIGRTGLTLAEALSAGYDAQATDAVGRSRAKYFPGSAPIDVRLVHNSDGRLLGAQFVGVGDEVAKRVDVAAVALHAGLSVEDLADLDLSYAPPFAPVYEPILLAANSAVASLKPMEDLAH

SEQ ID NO: 23071 - protein, 416 aa, Magnetospirillum magnetotacticum MS-1
MLRKHPRYVEAAVLERVCEPERQIIFRVPWVDDIGRVQINRGFRVEFNSALGPYKGGLRFHPSVYLGIVKFLGFEQIFKNSLTGMPIGGGKGGSDFDPRGRSDGEVMRFCQSFMTELYRHIGENTDVPAGDIGVGGREIGYLFGQYKRITNRYESGVLTGKGISWGGSLVRTEATGYGTVLFAQNMLETRGQELDGRRVVVSGSGNVAIYATAKAQQLGANVVAFSDSSGYVVDEAGVDLELLRQIKEVERGRVADYAARRPGARVVTDGSIWDVPCDVALPCATQNELDEAAAKQLVANGVVAVAEGANMPTTPSAVALLQEAGVLFAPGKAANAGGVATSALEMQQNASRDAWSFEYTEDRLAQIMAGIHDRCVETADEYGTPGNYVLGANIAGFTKFADAILAGDPLDRLTAC

SEQ ID NO: 23072 - protein, 964 aa, Amaranthus hypochondriacus
MASGKVEKMASIDAQLRLLAPKKVSEDDKLVEYDALLLDRFLDILESLHGSGIRETVQELYEHAAEYERTHDTKKLEELGNLITSLDAGDSIVIAKSFSQMLNLANLAEEVQLAYRRRIKKTKKGDFADESSAITESDFEETLRRLVDLKKSPEEIFATLKNQTVDLVLTAHPTQSVRRSLLQKHGRIRDCLSQLYAKDISPDDKQELDEALQRAIQAAFRTDEIRRVQPTPQDEMRMGMSYFHETIWKGVPKFLRRVDTALKNIGINERVPYNVPLIQFSSWMGGDRDGNPRVTPEVTRDVVLLARMMAANMYFTQITDLMFELSMWRCNDEVRARAQELHSQSKSDAKHYIEFWKQIPLSEPYRVILGDVRDKLYNTREHAHKLLANGSSDVPEESTFTHIDQFLEPLELCYKSLCASGDQPIADGSLLDFMRQVSTFGLSLVKLDIRQESDRHTEVMDAITTHLGIGSYRSWSEEKRQEWLLSELRGKRPLFGSDLPMSYEVADAIGTFRVLAELPNDSFGAYIISMATAPSDVLAVELLQRECGIKKPLRVVPLFEKLADLQSAAASMTRLFSIDWYKNRINGTQEVMIGYSDSGKDAGRLSAAWQLYKVQEQLIQVAKEYGVKLTMFHGRGGTVGRGGGPTHLALLSQPPDTIHGSLRVTIQGEVIEQSFGEEHLCFRTLERYTAATLEHGIDPPTSPKPEWRALMDEMAVITTKEYRSVVLQEPRFVEYFRSATPELEYGRMNIGSRPAKRKPGGGIETLRAIPWIFSWTQTRFHLPVWLGCGAAFKHVIEKDIKNLAMLKDMYNQWSFFRVTIDLLEMVFAKGDPGIAALYDKLLVKDELKPFGENLRKSYLEAQKFLLEIAGHKDPLDADPYLKQILRLRDPYTTTLNVFQVYTLKRIRDPSFHVTVRPHLSKEMDANSLAADLVKLNPTSEYPPGLEDTLILTMKGIAAGMQNTG

SEQ ID NO: 23073 - protein, 461 aa, Arabidopsis thaliana
MASSSSQRRCVFVGNIPYDATEEQLREICGEVGPVVSFRLVTDRETGKPKGYGFCEYKDEETALSARRNLQSYEINGRQLRVDFAENDKGTDKTRDQSQGGPGLPSTTTVTESQKQIGGPVDSNMHQPVGLHLATTAASVIAGAIGGPQVGSQFTQSNLQVPASDPLALHLAKMSRSQLTEIISSIKLMATQNKEHARQLLVSRPQLLKAVFLAQVMLGIVSPQVLQSPNIVQAPSHMTGSSIQDAQLSGQNLLPPLAQRSQQLSRAPHSQYPVQQSSKQPFSQIPQLVAQPGPSSVNPPPRSQVKVENAPFQRQQVVPASTNIGYSSQNSVPNNAIQPSQVPHQALPNSVMQQGGQTVSLNFGKRINEGPPHQSMNRPSKMMKVEDRRTTSLPGGHVSNSMLPNQAQAPQTHISPDVQSTLLQQVMNLTPEQLRLLTPEQQQEVLKLQQALKQDHMMQPS

SEQ ID NO: 23074 - protein, 112 aa, Ralstonia solanacearum
MKLIMAIIKPFKLDEVREALSQVGVSGITVTEVKGFGRQKGHTELYRGAEYIVDFLPKVKIEVAVPDDVLERAVEAIEKSARTGKIGDGKIFVTDVEQVIRIRTGETGGDAL

SEQ ID NO: 23075 - protein, 151 aa, Casuarina glauca
ALTEKQEALLKQSWEVLKQNIPAHSLRLFALIIEAAPESKYVFSFLKDSNEIPENNPKLKAHAAVIFKTICESATELRQKGHAVWDNNTLKRLGSIHLKNKITDPHFEVMKGALLGTIKEAIKENWSDEMGQAWTEAYNQLVATIKAEMKE

SEQ ID NO: 23076 - protein, 342 aa, Aspergillus oryzae
MASMSNPASGAANPSSRKTFTVGTRKSKLALSQTDLVVSALKKVYPNYEFKIHSQETAGDLNTTIAFREFTTKNLWTEELEEHLMAGNVDFIVHSLKDVPTTLPPACTLGPMMEREDSRDVLVIKQGLPNMSLSDLPAGSVVGTSSIRRTAQLALKYPHLKVIDVRGNIGTRLAKLDAEDSPYTCIILAAAGLLRLGLDDRISQYLDSKNGGMLYAVGQGALGIEIRKDDQVMRDMLNNIGHNETTFASTAERSLLRTLEGGCSAPLGVETEWIKSSDGSKKLRMRSIVVSVDGKESAEVEIDGSVDSVQAAEDFGVTVAKELVTKGAEKILEDIQRSKQAA

SEQ ID NO: 23077 - protein, 91 aa, Arabidopsis thaliana
  misc_feature (28)..(28): Xaa can be any naturally occurring amino acid
  misc_feature (45)..(45): Xaa can be any naturally occurring amino acid
  misc_feature (52)..(52): Xaa can be any naturally occurring amino acid
  misc_feature (70)..(70): Xaa can be any naturally occurring amino acid
MVLVLALADLHVPHTAADLPPKFKSMLXPGKIQHIICTGNLCIKXIHDYLKXICPEFAYRFGGGVFTEDXGLKTLLFGIPRGFFGPGVPGF

SEQ ID NO: 23078 - protein, 350 aa, Listeria monocytogenes str. 1/2a F6854
MTYKITSLAGDGIGPEIMTSGLQVLEAVAKKYNHTFEIESHTFGGAGIDVAQDPIPSSTLKACQDADAILLGAIGGPKWDNASKRPEDGLLALRKALGLFANIRPIQVPSSITHLSPLKKEIVENTDFVVVRELTGGLYFGEPKHWDESAAVDSLTYTRAEIERIIEKAFEIAATRNKKVTSVDKANVLASSKLWRKIAEEVASRHPDITLEHLYIDAAAMLMIQRPTTFDVIVTENLFGDILSDEASVITGSLGMLPSASHAENGPSLYEPIHGSAPDIANQNIANPMSMISSVSMMLRQSFSLFKEADAIDAAATRTMQAGFLTADLGGNTTTTDFTDEVLKQIEGGE

SEQ ID NO: 23079 - protein, 399 aa, Bacillus cereus ATCC 10987
MAVEVVMPKLGMAMKEGIITSWNIKAGDHVSKGELIASINSEKIETEIEAPADGTVLDIAVSEDEGVPPGTVICYIGKLNEKVEINESINVVEEKAPNLEPKKVQHPEPYAKEVAKQRIKISPVAKKIAKSENLDIKALVGTGPGGRITKVDVLKAIEERVTIPEVLEQEESKVIPVTGMRKAIANRMHASLQNSAQLTLTMKVDVTDLVALHKEIAAVVQKRYDNKLTITDFVSRAVVLALGEHKEMNSAYMDDTIHQFEHVHLGMAVALEKGLVVPAIRFANNLSLVELSKQIKNVAQKAREGSLSSDDMQGTTFTISNLGSFGIEYFTPVLNTPETGILGVGAIEHVPVYKGKKIKKGSMLPLSLTFDHRVLDGAPAAAFLRTIKRYLEEPVTILL

SEQ ID NO: 23080 - protein, 405 aa, Escherichia coli CFT073
MSSVDILVPDLPESVADATVATWHKKPGDAVVRDEVLVEIETDKVVLEVPASADGILDAVLEDEGTTVTSRQILGRLREGNSAGKETSAKSEEKASTPAQRQQASLEEQNNDALSPAIRRLLAEHNLDASAIKGTGVGGRLTREDVEKHLAKAPAKESAPAAAAPAAQPTLAARSEKRVPMTRLRKRVAERLLEAKNSTAMLTTFNEVNMKPIMDLRKQYGEAFEKRHGIRLGFMSFYVKAVVEALKRYPEVNASIDGDDVVYHNYFDVSMAVSTPRGLVTPVLRDVDTLGMADIEKKIKELAVKGRDGKLTVEDLTGGNFTITNGGVFGSLMSTPIINPPQSAILGMHAIKDRPMAVNGQVEILPMMYLALSYDHRLIDGRESVGFLVTIKELLEDPTRLLLDV

SEQ ID NO: 23081 - protein, 187 aa, Oryza sativa
MLHVVYRVGDLDKTIKFYTECLGMKLLRKRDIPEERYTNAFLGYGPEDSHFVVELTYNYGVESYDIGTAFGHFGIAVEDVAKTVDLIKAKGGTVTREPGPVKGGKSVIAFIEDPDGYKFELIERGPTPEPLCQVMLRVGDLDHAINFYEKAFGMELLRKRDNPQYKVATVRNHCMDLPRDTHGFCLP

SEQ ID NO: 23082 - protein, 368 aa, Lactobacillus delbrueckii
MNLDKLQNWLQENGMDVAYVSSPTTINYFTGFITDPEERIFKLFAFKDAEPFLFCPALNYEEAKASAWDGDVVGYLDSEDPWSKIAEEIKKRTKDYQNWAVEKNGLTVAHYQALHAQFPDSDFSKDLSDFIAHIRLFKTESELVKLRKAGEEADFAFQIGFEALRNGVTERAVVSQIEYQLKLQKGVMQTSFDTIVQAGKNAANPHQGPSMNTVQPNELVLFDLGTMHEGYASDSSRTVAYGEPTDKMREIYEVNRTAQQAAIDAAKPGMTASELDGVARKIITDAGYGEYFIHRLGHGIGMEVHEFPSIANGNDVVLEEGMCFSIEPGIYIPGFAGVRIEDCGVLTKDGFKPFTHTSKELKVLPVKE

SEQ ID NO: 23083 - protein, 325 aa, Cryptococcus neoformans var. neoformans JEC21
MARETLSSAGTRYNKTAVFTADGVLFDMDGTLTDSIAAVEAAWTAKAEEFGLEPEAVIKATHGRRASDNLQDLIPNLRKEHIDREVEKFEQSILAFADTPPRSRRSSSASSTRTSRSDSRSMSGSMGPLAPFTPMRSCTPAATKPFSTDEALNLTSFKLSESRGLEPQSDDSVFEDEADDLIDMSVRILPGVRSLINSLPQDKYAIATSGAKTYCHGCLNRTGITIPKVCVTADDPRLLRGKPFPDPFLLAAADLGIDPTRAVIFEDSPSGIKAAVAAGATVIAVCTSHQRHQIEHLDAHFVVDTMDQIEVVQGKDGQLEFTIRH

SEQ ID NO: 23084 - protein, 510 aa, Gossypium hirsutum
MPSFDTILLRDLVAAACLFFITRYFIRRLLSNPKRTLPPGPKGWPIVGALPLLGSMPHVELAKLAKKYGPVMYLKMGTCNMVVASTPDAARAFLKTLDLNFSNRPSNAGATHIAYNSQDMVFAEYGPRWKLLRKLSNLHMLGGKALEDWSQVRAVELGHMLRAMCESSRKGEPVVVPEMLTYAMANMIGQVILSRRVFVTKGSESNEFKDMVVELMTSAGLFNIGDFIPSIAWMDLQGIEGEMKKLHNRWDVLLTKMMKEHEETAYERKGKPDFLDIIMDNRENSAGERLSLTNVKALLLNLFTAGTDTSSSIIEWALAEILKNPKILNKAHEEMDKVIGRNRRLEESDIPKLPYLQAICKETFRKHPSTPLNLPRVSTQACEINGYYIPKNTRLSVNIWAIGRDPDVWGNPLDFTPERFLSGRFAKIDPRGNDFELIPFGAGRRICAGTRMGIVLVEYILGTLLHSFDWMLPPGTGELNMDEAFGLALQKAVPLSAMVRPRLAPTAYVS

SEQ ID NO: 23085 - protein, 522 aa, Uromyces viciae-fabae
MPAVMAGPVSFAPPEGKSSKVAIVIAVFAAFGGFLYGYDTGYIAGVKAMPFWLRSAGQRGPDGKYMITTSQDSMVTSILSVGTFVGALLAYPIGDRFGRRIGIMIACAIFSVGVALQTASTKIPMFVVGRVFAGLGVGVASCLVPMYQSECAPKWIRGGIVACYQWAITIGLLVASITVNATKDFDSANSYRIPIGIQFIWAAILTIGLLVLPESPRYLLLKGREDEAWKSLSRLYSAPYDDPDVQAEFSEIMASLEKERSFGKTTLLDCFKTDKRKNLQRTLTGLGVQGWQQASGINFFFYYGTTFFKNAGIENAFLVTVATNVVNVVMTIPGIWAVDKVGRRTMMICGAAMMFTCELILACVGTFTATSNLASQKVLVAFSCIFIGLFAATWGPIPWVVTSEIYPLATRGKQMAMSTASNWAVNFFIGFITPYLVDSGAGQAGLGVKVFWLWAALCFGAMVFSFLLIPETKGLSLEQVDLLYTNSTVLKSNTYRSQLIANNLHEGMTPAEKAYQEKLEHI

SEQ ID NO: 23086 - protein, 422 aa, Schizosaccharomyces pombe
MNPSCVVYVGNIPYEMAEEQVIDIFKQSGPVKSFQLVIDPESGQPKGYGFCEYHDPATAASAVRNLNNYDAGTRRLRVDFPTADQIRRLDKLLGPSRYGYYPQSYANQSYTYGNNFGSYPPTQPSTQPLPQSYGYPSYPPAGYRGGSARPSGVLANDEVYRVLAQLAPNEIDYMLSAIKALCLEAPEQAAQLFETNPQLSYAVFQAMLMKRYTSESVVADLLIPAGVNLPGAQEPNRGYFSPMHTYSSAVPGPISVPSAPYGRASSTIAEVSPMYGSHAAPYASTPSAAVGSSRGSTPASATVPISPARGFPTTSAYNPAPPAYGMANPAYGSTGIRSSSIPSSGSIRSPSLTTTSAQATTNATNNITTTTAAQDENATKAALIAQLMALTDDQINVLPPDQKERILQIRQALPSSYKTESK

SEQ ID NO: 23087 - protein, 165 aa, Glycine max
MRTIPTTTTTPIAPAATTISPYSQHSTWHSPVPYLFGGLAAMLGLIAFALLILACSYWKLSGQLLNEENAERDLESVAGEKQGDSANKDSVKVYEEKILVIMAGDDKPTFLATPKASSVTRCVPNHFEENLENHVTSEKLEKNPVQQPTSPQPQETTQQQSLPRQ

SEQ ID NO: 23088 - protein, 177 aa, Zea mays
  misc_feature (53)..(53): Xaa can be any naturally occurring amino acid
  misc_feature (63)..(63): Xaa can be any naturally occurring amino acid
MAASSTATSVHDFIVKDASGKDVDLSAYKGKVLLIVNVASQCGLTNSNYTEPXQLYEKYQDQXLYPVQMPRLGEILAFPCNQFGGQEPGTNEEIAQFACTRFKVEYPIFDKVDVNGNNAAPIYKFLKFSKGGLFGDSIKWNFSKFLVDKEGRVVDRYAPTTSPLSIEKDIKKVLGSF

SEQ ID NO: 23089 - protein, 336 aa, Pseudomonas fluorescens
MPRHICITGASGFLGSHIVEKLLHHGCTVDALLRRPTAHLQGLAARHAQLRLHVVDLAQPGACNALFSECDTVIHCAASVTNNARPGSRLWQQTLEMNVNGTQNVIDGIRQAASVRTFVYTSSMAAILSPDMPAGHAFSEADWNHASLEASDPYWYSKTAAERLVTDAFQPWPCEPRVVCINPSVIIGPVLDPRHAATSIAILHDLHTGKTPACPDLNFHFVDVRDLAELHVRAALDDVIEGRFIVPGHEASMLELATMIKQRFPDSKAPQRRAPDWLMYLSAMLNPRLSRRYLRQNLGVRRVFDDQRARRAFQLSYRPLEHSVADTLQSLSPTAP

SEQ ID NO: 23090 - protein, 338 aa, Mucor racemosus
MVTQVGINGFGRIGRIVLRASLSNPEVQVVAINDPFIPLEYMVYMFKYDSVHGRFQGTVEAKDGKLVVNGKEISVFSERDPAQIPWGSVEAAYVVESTGVFTSIDAASAHLQGGAKKVIISAPSGDAPMFVCGVNLEKYTSDLKVISNASCTTNCLAPLAKVINDNFGIVEGLMTTVHATTATQKTVDGPSNKDWRGGRGAGANIIPSSTGAAKAVGKVIPELNGKLTGMAFRVPTPDVSVVDLTVRLEKGATYEEIKAVIKKASENELKGILGYTNDQVVSTDFVGDAQSSIFDAAAGIALNDKFVKLVSWYDNEFGYSNRVIDLLAYAAKVDAAAQ

SEQ ID NO: 23091 - protein, 430 aa, Zea mays
MDDAGRPPPHAPVAVTASASASATAAPAPPQPSATAAVDRSSPDPDALYEEGMWQQMAMDSGATMQPGSYPERPGEPDCTYYLRTGLCRFGMSCRFNHPPDRNLAIASARMKGEYPERAGQPECQYYLKTGTCKFGPTCKFHHPREKAGIAGRVQLNTSGYPLRPNEKECAYYLKTGHCKYANTCKFHHPELFNVVPSSRGSPIYTSVHSSASAGPQSYTGTMPSWAFPRASFIPSPRWQSPSNYAPMIVPQGLVQMQSWNSYTGQLQSPGAQQTYGSSQQGEASTGNQGMLSPYRPSSFPVPQYALQRENVFPERPDEPECQYYMKTGDCKFGAVCKFHHPRVRSLPPPDCVLSPMGLPLRPGEELCKFYSRYGICKFGANCKFDHPTVVAPMVYAYGFSASASPASASTNVPMARRLLGSPPGSGYTS

SEQ ID NO: 23092 - protein, 328 aa, Pylaiella littoralis
GKTTLTAAITAVLSLSSGLGEANAKKYEDIDAAPEERARGITINTAHVEYETETRHYAHVDCPGHADYVKNMITGAAQMDGAILVVSAADGPMPQTREHILLSKQVGVPHIVVFLNKEDQVDDLELVELVELEVRELLSNYDFPGDDIPIITGSALQALDAISKEPDIKKGDNKWVDKIYSLMDSVDSYIPTPVRDVDKAFLMAIEDVFSITGRGTVATGKIDRGIVKVGETVDLVGLGDTKSTTVTGVEMFQKTLDEGVAGDNVGILLRGLQKGEIERGMVLAKPGTITPHNTFESELYILTKEEGGRHTPFFPGYRPQFYVRTTDV

SEQ ID NO: 23093 - protein, 325 aa, Skeletonema costatum
GKTTLTAAITATLALEGDSVAKDYSDIDGAPEERARGITINTAHVEYETADRHYAHVDCPGHADYVKNMITGAAQMDGAILVVSAADGPMPQTREHILLAKQVGVPHIVVFLNKQDQVDDDELLELVELEVRELLSQYDFPGDDIPICPGSALRAIEAISSNPEIKRGDNPWVDKIYGLMDAVDSYIPTPERDVEKTFLMAIEDVFSITGRGTVATGRIERGVVKVGETVEIVGVVDTQTTTITGIEMFQKTLDEGFAGDNVGILLRGVTREDIERGMVLSKPGTITPHTNFESEVYVLTKDEGGRHTPFFTGYRPQFYVRTTDV

SEQ ID NO: 23094 - protein, 270 aa, Streptomyces avermitilis MA-4680
MAERADERRFGDHVVVRRHTRGQVAELVLDRPKAMNAVSTDMARAIAGACEALAHDTDVRVAVLTSTHERAFCVGADLKERNSFSDADLLRQRPVARAAYTGVLELPMPTVAAVHGFALGGGFELALSCDLIVADGTAVVGLPEVSVGVIPGGGGTQLLPRRVGAARAAELIFSARRLTGAEARELGLVDELVEEGQDRTEALALAFRIAANSPVGLRAAKRALRLGHGLDLRAGLEVEDAAWRSVAFSGDRAEGVAAFNEKRKPEWPGE

SEQ ID NO: 23095 - protein, 341 aa, Solanum chacoense
MAELLSNWSSTLEAVPPSHCIPVHERPSDPVEIVDSIPVIDLGKANGEERSAVVKDLLKAFEEYGFFQIINHGVPVDLMDEAMKVYKEFFSLPAEEKAEYAKDAANDTNRGAATLYSSSAKHYDSEEHRYWRDVLEHSCNLDGKDKKTWPSNPPRYREVIGAYGDELRRVSKVILGLLAEGLGLEAGFFDKELGQRMLVNHYPACPDPSLTLGVGGHCDPNLITIIQQEVYGLQILKDDKWIGVQPIRNAFVVNSGLPITVVSNGKLTSVAHRVVTNTTHSRTSIGTFICPHDIVEPAKALVGPENPPQFKSFNWGIDFMPHYLSKKSVYHASLEPFKIDA

SEQ ID NO: 23096 - protein, 339 aa, Pseudomonas aeruginosa PAO1
MARKISYQQAINEALAQEMRRDPSVFIMGEDNAGGAGAPGEDDAWGGVLGVTKGLYHQFPGRVLDTPLSEIGYVGAAVGAATRGMRPVCELMFVDFAGCCLDQILNQAAKFRYMFGGKAVTPLVIRTMVGAGLRAAAQHSQMLTSLWTHIPGLKVVCPSSPYDAKGLLVQAIRDNDPVIFCEHKLLYSMQGEVPEELYSVPFGEANFLRDGDDVTLVTYGRMVHLALDAAASLARQGISCEVLDLRSTSPLDEDSILESVEKTGRLVVVDEANPRCSMATDIAALVAERAFSALRAPIRRVTAPHTPVPFSDALEDLYIPDAAKIEAAVRQALEGRDAA

SEQ ID NO: 23097 - protein, 216 aa, Arabis pumila
MSSFSAFSEMFGSDYESMISSVGDYSPTLATSCPKKPAGRKKFRETRHPVYRGVRQRNSGKWVSELREPNKKTRIWLGTFQTAEMAARAHDVAAIALRGRSACLNFADSVWRLRIPESACAKDIQKAAAEAALAFQNELMSDTATTDHGLDMEETLVEAIVTAEQIDTFYIDEETMFGMPSLMANMAEGMLLPLPSIQWINNYDVEGDADMPLWSY

SEQ ID NO: 23098 - protein, 449 aa, Thermoanaerobacter tengcongensis MB4
MIVMFPYLPISSEDEKEMLKTIGKNSIEELFEVIPKEVRLNRPLNLGKPMSELEVRKRLGSYADENKNLSQLVSFLGAGVYDHYIPSVVKHIISRSEFYTAYTPYQPEISQGTLQAIFEYQTMITNLTGMEVTNASMYDGASACAEAAMMACDATKRKSIIVSKTVNPETRKVLKTYMHFKEVEVVEIEDADGVTDIEKLKEVIGPNTAAVIVQYPNFFGIIENLQEIEKITHEQKAMLITYVHPIPLGILKSPGEIGADIAVGDGQSLGNGLHYGGPYLGFLATTQKLLRRMPGRIVGQTKDVDGKRGFVLTLQAREQHIRREKATSNICSNHSLNALTAAVYLATIGKKGIKEVAYQCLQKAHYAYTVLTESGKYKPAFNKPFFMEFALKTDKDVAEINKKLLEEGILGGYDLQRDYEKYKNVMLLAFTEKRTKEEIDRLKSLLEVM

SEQ ID NO: 23099 - protein, 406 aa, Xanthomonas campestris pv. vesicatoria str. 85-10
MSGMVIVGAGQAGLQTAESLRSGGYTGSIVLLGDEPCAPYHRPSLSKGFLLGEVSDTQLYIRAPGALNRKGIQWHASARVMRIEHATRTLHLDDGSTLGYTGLCLATGARARRLEVPGAGLGHVCMLRGMADTRALAAILPHTSRVVVIGGGFIGLEFASIARRLGKQVVVLEAADRLMARVVSPQLADFFLRLHRDNGATIELGSNVSALSGNRGVVTAVHTADGRVFPADLVVVGIGVIPNGELAQQAGLACDRGALIVDACARSSSPGIVGAGDCTVRQRAGSGLLRLESVQNAIEQAKSAAASLLGEHRPYPALPWFWSEQYEVRLQMAGFAAGHTQAVVRGDLATSTFSLFYYVDGELCAVDSINRPQDHLAARKLLELGRSPTPQQAADPNFALTSLIPA

SEQ ID NO: 23100 - protein, 294 aa, Oryza sativa (japonica cultivar-group)
MSAVVCGKRASSSFFEDLTHPTGGSPPAAKRTRCGGAFFPPPPPPTWPRGVTKNDLVARLSTQFPAMSLEDFGFGVTMTLNDLTQMIEKALDKSGNNVDSAIRSLLNLHLESVQNNSGVAFEPIQETTEVQVSAEVVSDGNEIGAPSESAPCPENFPSNGSEWVELLVNEMTTASNMDDAKSRATRVLEAFEKAVVSHVNAQGPHDFQKENAVLKGQMESLTRENTILKRAFAIQHERQDYDAKNQELQDEKQRIAEFQEQVRNLELNNYRLSMLLRQAQQGSSIPGRFNPDVF

SEQ ID NO: 23101 - protein, 677 aa, Cryptococcus neoformans var. neoformans B-3501A
MACFLPSSRAPGPIRLEDSLSDIILEKSTNLELPTYDTLDGSEELEQRLKALKDEIQDAKVDWYIVPSEDEHQSEEVGDSEKRRQYISGFTGSAGTALIPSSTSQSALLFVDSRYWIQAEQQVPKGWKVVRVGSSSGGGSGRADAQSGWVDWVVNKLEDGSRVGIDPKLISLDLVHSIQSRLSSTDSSITLVPLSTNLIDKIRNVPARSLGPISPYPLALSGEDTPSKLSRVRKAISQAVGGNRKSKVKEWVYILPTLPAIAWLLNYRCPSDIPFCPVAYAYLVLTPSQCAVFVDKRKVENELDERWKGEDVEVRDYGVEEVGKFVKAFVNENSEERNVRVFSPAECSWALAEACSPSKIATITCPVDVLKAVKNPVEQQNFRNAYLRDGRAMVRWLAWLEKMLLKNGKKVGEWAAAQGLTRERRKEDYFAGLAYEDISASGPNSALPHYAPQRGKDRLIDPDTTYLIDSGAQYQDATIDTTRTFYFGSTPSPELKRAYTRVLQGHMAVSMAKFPRGMPGDRLGMLARKALYDDGLDFGHGVGHGIGSYLGVHENPMYSHDIAFKPGHITTVEPGYYKEGEWGIRIESVLLCKQVETPEDGEASQFLEWERITQVPIQTSLVDWSLMAKYEMRWLNEHNKTVQEALEPLLQGDEDAEAREWLKKACKPHKIWPWDGV

SEQ ID NO: 23102 - protein, 315 aa, Arabidopsis thaliana
MADSSSSTIFSHPSISSTISSSRIRSSSVSLLTGRINLPLSFSRVSLSLKTKTHLKKSPFVSFVAQTSDWAEEGGEGSVAVEETENSLESQDVSEGDESEGDASEGDVSEGDESEGDVSEGAVSERAEFPEPSEEAKLFVGNLAYDVNSQALAMLFEQAGTVEIAEVIYNRETDQSRGFGFVTMSSVDEAETAVEKFNRYDLNGRLLTVNKAAPRGSRPERAPRVYEPAFRVYVGNLPWDVDNGRLEQLFSEHGKVVEARVVYDRETGRSRGFGFVTMSDVDELNEAISALDGQNLEGRAIRVNVAEERPPRRGY

SEQ ID NO: 23103 - protein, 553 aa, Haloarcula marismortui ATCC 43049
MTDTAEKYEAVVVGCGPGGAAAAATLARNGVETLVLERGVDAGSKNVSGGLIYAEESAPYTIDGLFPDFREEAAERPVTENLIHNIAGDRVKSFDIGDLHHHDTAWADAVLRRKMDSWLAQQVHERTRETGGGLLTEVHVTGLLRERGEIVGVTTEELDPIKADIIVAADGVNSELARDAGLMDWDEPEEWFQGVKAVVDMEPEVINDRFDVASDDGAAHLFSGDLFDGVRGGGFLYTNESSLSIGTVFHLDSIAEERAEPHELLDSLLTHPLMAQWLGDEYDEREYSAKLVPDSKKAAHPSPHEDRLVLVGDAAGQMQAQGPIIKGMNHAVTAGALAAEAFADARARGDPSQAGKLYEKKLHDEGVMDKLRPTGYRVFGQLGELGPVDNLSNAIAESAVGRFGVRAAAGLLERAYSSPRLVSMIPDTKLPYVTLPTVIAEELGEPVTDENTVSPPDLGDRIGDLTYDVGDPHIELVDKSFEASGTAVTACPVSAEDFGGGCYRDEMVQTNGSEEHLVSLDTQPCVECGTCAIVADTEWEHPAGGKGVEFNQG

SEQ ID NO: 23104 - protein, 685 aa, Magnetococcus sp. MC-1
MQELDPQLMLAGINDGALGSIFLDDQEQIVFWNRWMERASGLKRAEVLGRPLREVFPELVGGRLLRAVATALETGLPALLSHKLNLWPLPLYPSYAVRPHGPRLCQQIMINALRPHGEKRFVLIQIQDISHTVQREQLLQEQTRVLMQREEELTASRLKADQANQAKSEFLANMSHEIRTPMNAIIGMADLLLETELNKDQRRYVQIFARAGASLLELINDVLDLSKVEADRLELEHRPFDLWALVEGAVEIFTLRTQEKGVKLDFELSARAPRYVISDQKRLRQILVNLLGNAVKFTQSGQIQLWVDVRDCEDAGGWLYFRVQDSGIGMSKAQQKSIFEPFVQADASVTRQHGGTGLGLAICKKLVELLSGDIWLESELGQGSRFHFTARFTHTALVAESERAFTSAKLHGRHVLLLGSQPQNRVLLESVLRRAGCQITTVTHQAQLAGHLLEPPAGLRPFHAVLVDCYNSMARVHQQIASVRANGSVMPMVLLVGEARQEDIQIAADLGVLLLERPVSHGRLLEALGATMEQGEAALLSSSLSPTAAIEMLKQVPLKILLTEDSVDNAVLFKAYLKQYPLEITHAANGAEALTLFEQHHYDLVFMDLQMPVMDGYSATRAMRFFEKQQRRPPTPILALTAYALSGDADKSRDVGCDAHLVKPIKKLELLSSIAQYGLKISLES

SEQ ID NO: 23105 - protein, 344 aa, Bacillus cereus ATCC 10987
MTRTVSMSTAINEAMKISMRRDENVILIGEDVAGGAQVDHLQDDEAWGGVLGVTKGLVQEFGRNRILDTPISEAGYMGAAMAAAATGLRPIAELMFNDFIGSCLDQVLNQGAKFRYMFGGKAKVPVTVRTMHGAGFSAAAQHSQSLYALFTSIPGIKVVVPSTPYDAKGLLLAAIEDDDPVIFFEDKTLYNMKGEVPEGYYTIPLGKADIKREGSDVTIVAIGKQVHTALAAAEQLSKKGLEVEVIDPRSLSPLDEDTILASVEKTNRLIVIDEANPRCSIATDIAAIVADKGFDLLDAPIKRITAPHTPVPFSPPLEKLYLPTPEKVIETVSEMIGDQSLLHV

SEQ ID NO: 23106 - protein, 166 aa, Bordetella parapertussis
MNTMYDFSAPTITGAERALADFRGQVALVVNVASRCGFTPQYSGLEELYRSYRNEGFVVLGFPCNQFGRQEPGDEAAIAQFCETQYAISFPLFAKIDVNGAHAHPLYRWLKAHKPGLLGTRAIKWNFTKFLVGRDGLPLRRYAPAHTPESLRHDIARACAAPGPTP

SEQ ID NO: 23107 - protein, 285 aa, Triticum aestivum
  misc_feature (196)..(196): Xaa can be any naturally occurring amino acid
  misc_feature (204)..(204): Xaa can be any naturally occurring amino acid
  misc_feature (232)..(232): Xaa can be any naturally occurring amino acid
  misc_feature (239)..(239): Xaa can be any naturally occurring amino acid
  misc_feature (256)..(256): Xaa can be any naturally occurring amino acid
MAAATSHNVIVSAQSHRWNSKNSRLDRRGVYVRLVSVGSCCSGNRKLGLVCASGSQSSVIDPVHLPSNGKGDHSPKKSSESSLILIRHGESMWNEKNLFTGCVDVPLTPKGVDEAIEAGKRICNIPIDVIFTSAMIRSQMTAMLAMMQHRRKKVPIITHKESEQAQSWSKIYSEDTKEQPIPVITVWKLNERMYGXWNGLIKQXTDNRFGKDKVLKGAGITNIPPPNGETLXMCANRAXSYLKDQGCPHLHGWKDXMVVGIAKSLRTNIMALKKLLPRKVNGFNC

SEQ ID NO: 23108 - protein, 667 aa, Nicotiana sp.
MAAAAPSPSSSAFSKTLSPSSSTSSTLLPRSTFPFPHHPHKTTPPPLHLTHTHIHIHSQRRRFTISNVISTNQKVSQTEKTETFVSRFAPDEPRKGSDVLVEALEREGVTDVFAYPGGASMEIHQALTRSSIIRNVLPRHEQGGVFAAEGYARATGFPGVCIATSGPGATNLVSGLADALLDSVPIVAITGQVPRRMIGTDAFQETPIVEVTRSITKHNYLVMDVEDIPRVVREAFFLARSGRPGPVLIDVPKDIQQQLVIPDWDQPMRLPGYMSRLPKLPNEMLLEQIVRLISESKKPVLYVGGGCSQSSEDLRRFVELTGIPVASTLMGLGAFPTGDELSLSMLGMHGTVYANYAVDSSDLLLAFGVRFDDRVTGKLEAFASRAKIVHIDIDSAEIGKNKQPHVSICADIKLALQGLNSILESKEGKLKLDFSAWRQELTEQKVKHPLNFKTFGDAIPPQYAIQVLDELTNGNAIISTGVGQHQMWAAQYYKYRKPRQWLTSGGLGAMGFGLPAAIGAAVGRPDEVVVDIDGDGSFIMNVQELATIKVENLPVKIMLLNNQHLGMVVQWEDRFYKANRAHTYLGNPSNEAEIFPNMLKFAEACGNPAARVTHRDDLRAAIQKMLDTPGPYLLDVIVPHQEHVLPMIPSGGAFKDVITEGDGRSSY

SEQ ID NO: 23109 - protein, 664 aa, Nicotiana sp.
MAAAAAAPSPSFSKTLSSSSSKSSTLLPRSTFPFPHHPHKTTPPPLHLTPTHIHSQRRRFTISNVISTTQKVSETQKAETFVSRFAPDEPRKGSDVLVEALEREGVTDVFAYPGGASMEIHQALTRSSIIRNVLPRHEQGGVFAAEGYARATGFPGVCIATSGPGATNLVSGLADALLDSVPIVAITGQVPRRMIGTDAFQETPIVEVTRSITKHNYLVMDVEDIPRVVREAFFLARSGRPGPVLIDVPKDIQQQLVIPDWDQPMRLPGYMSRLPKLPNEMLLEQIVRLISESKKPVLYVGGGCSQSSEELRRFVELTGIPVASTLMGLGAFPTGDELSLSMLGMHGTVYANYAVDSSDLLLAFGVRFDDRVTGKLEAFASRAKIVHIDIDSAEIGKNKQPHVSICADIKLALQGLNSILESKEGKLKLDFSAWRQELTVQKVKYPLNFKTFGDAIPPQYAIQVLDELTNGSAIISTGVGQHQMWAAQYYKYRKPRQWLTSGGLGAMGFGLPAAIGAAVGRPDEVVVDIDGDGSFIMNVQELATIKVENLPVKIMLLNNQHLGMVVQWEDRFYKANRAHTYLGNPSNEAEIFPNMLKFAEACGNPAARVTHRDDLRAAIQKMLDTPGPYLLDVIVPHQEHVLPMIPSGGAFKDVITEGDGRSSY

SEQ ID NO: 23110 - protein, 267 aa, Ralstonia solanacearum
MTQRVPATAQVFSLLIMAVMHKLVLIRHGESTWNLENRFTGWVDVDLTDTGIAQARQGGRLLREAGFTFDLAYTSVLKRAIRTLWHVQDEMDLMWIPTRTEWRLNERHYGGLSGLNKAETAAQYGDQQVLVWRRSYDTPPPALEAGDERDAYGNPRYAGLPREQVPLTECLKDTVARVLPLWETSIAPDIKSGKRVVIAAHGNSIRALVKYLDNISDDDIVGLNIPNGTPLVYELDANLKPIRHYYLGDQEAIAASLAAVAGQGKAK

SEQ ID NO: 23111 - protein, 122 aa, Zea mays
MAAVLNSRKTPQVVAVLVVVALLASSASAAITCGQVGSSLAPCIPYATGRASALPASCCSGVKSLNSAARTSADRQAACRCLKSLANSVKSVNMGTVATIPGKCGVSVGFPISMSTDCNKIS

SEQ ID NO: 23112 - protein, 481 aa, Burkholderia xenovorans LB400
MAIPSYTDTRLLINGEWCDAASGKTLDVINPATGQAIGKVAHAGIADLDRALAAAQRGFEAWRKVPANERATTMRRAAALVRERASDIGRLMTQEQGKPFAEARIEVLAAADIIEWFADEGRRVYGRIVPSRNLAAQQLVLKEPIGPVAAFTPWNFPVNQVVRKLSAALACGCSFLVKAPEETPASPAALLQAFVEAGVPAGTVGLVFGDPAEISGYLIPHPVIRKVTFTGSTPVGKQLAALAGAHMKRATMELGGHAPVIVAEDADVALAVKAAGGAKFRNAGQVCISPTRFLVHNSIREEFAAALVKHAEGLKLGDGLAEGTTLGPLANARRLSAMSKVLDDARKTGAKVETGGERVGSEGNFFAPTVLTNVSLEADVFNNEPFGPIAAIRGFDKLEEAIAEANRLPYGLAGYAFTKSFSNVHLLSQQVEVGMLWINQPATPSPEMPFGGVKDSGYGSEGGPEAMEGYLVTKAVSVMAV

SEQ ID NO: 23113 - protein, 1637 aa, Staphylococcus aureus
MNKNSKKKLDFLPNKLNKYSIRRFTVGTASILVGATLIFGVANDQAEAAENNTTQKQDDSSDASKVKGNVQTIEQSSANSNESDIPEQVDVTKDTTEQASTEEKANTTEQASTEEKADTTEQATTEEAPKAEGTDKVETEEAPKAEETDKATTEEAPKAEETDKATEEAPKTEETDKATTEEAPAAEETSKAATEEAPKAEETSKAATEEAPKAEETEKTATEEAPKTEETDKVETEEAPKAEETSKAATEKAPKAEETNKVETEEAPAAEETNKAATEETPAVEDTNAKSNSNAQPSETERTQVVDTVAKDLYKKSEVTEAEKAEIEKVLPKDISNLSNEEIKKIALSEVLKETANKENAQPRATFRSVSSNARTTNVNYSATALRAAAQDTVTKKGTGNFTAHGDIIHKTYKEEFPNEGTLTAFNTNFNPNTGTKGALEYNDKIDFNKDFTITVPVANNNQGNTTGADGWGFMFTQGNGQDFLNQGGILRDKGMANASGFKIDTAYNNVNGKVDKLDADKTNNLSQIGAAKVGYGTFVKNGADGVTNQVGQNALNTKDKPVNKIIYADNTTNHLDGQFHGQRLNDVVLNYDAATSTITATYAGKTWKATTDDLGIDKSQKYNFLITSSHMQNRYSNGIMRTNLEGVTITTPQADLIDDVEVTKQPIPHKTIREFDPTLEPGSPDVIVQKGEDGEKTTTTPTKVDPDTGDVVERGEPTTEVTKNPVDEIVHFTPEEVPQGHKDEFDPNLPIDGTEEVPGKPGIKNPETGEVVTPPVDDVTKHGPKAGEPEVTKEEIPFEKKREFNPDLKPGEEKVTQEGQTGEKTTTTPTTINPLTGEKVGEGEPTTEVTKEPVDEITQFGGEEVPQGHKDEFDPNLPIDGTEEVPGKPGIKNPETGEVVTPPVDDVTKHGPKAGEPEVTKEEIPFEKKREFNPDLKPGEEKVTQEGQTGEKTTTTPTTINPLTGEKVGEGEPTTEVTKEPVDEITQFGGEEVPQGHKDEFDPNLPIDGTEEVPGKPGIKNPETGEVVTPPVDDVTKHGPKAGEPEVTKEEIPFEKKREFNPDLKPGEEKVTQEGQTGEKTTTTPTTINPLTGEKVGEGEPTTEVTKEPVDEITQFGGEEVPQGHKDEFDPNLPIDGTEEVPGKPGIKNPETGEVVTPPVDDVTKHGPKAGEPEVTKEEIPYETKRVLDPTMEPGSPDKVAQKGENGEKTTTTPTTINPLTGEKVGEGEPTTEVTKEPIDEIVNYAPEIIPHGTREEIDPNLPEGETKVIPGKDGLKDPETGEIIEEPQDEVIIHGAKDDSDADSDSDADSDSDADSDSDADSDSDADSDSDSDSDSDSDSDSDADSDSDSDSDSDADSDSDADSDSDADSDSDSDADSDSDSDADSDSDSDSDSDADSDSDSDSDSDADSDSDADSDSDSDSDSDADSDSDSDSDSDADSDSDADSDSDADSDSDADSDSDSDSDSDADSDSDADSDSDADSDSDADSDSDSDSDSDADSDSDSDSDSDSDADSDSDADSDSDSDADSDSDADSDSDADGDSDADSDSDADSDSDSDSDSDSDSDSDADSDSDSDSDSDADRDHNDKTDKPNNKELPDTGNDAQNNGTLFGSLFAALGGLFLVGRRRKNKNNEEK

SEQ ID NO: 23114 - protein, 751 aa, Cryptococcus neoformans var. neoformans JEC21
MGPNTRPAPQAPTHYSRHRPQSITGNNAPQSRTKPRIGQYIVERTLGTGSFGKVKLATHAVTGHQVALKLINRSKITTPDMNARVKREIQYLKVLRHPHIIKLYEVITTPTDVIMVMEYAGEELFNYIVQKGKHGMTEDEARRFFQQMIGAIEYCHKHHIVHRDLKPENLFLDSRRNIKIGDFGLSNLMTDGDFLKTSCGSPNYAAPEVISGKLYSGPEIDVWSAGVIMFVLLCGKLPFDDEHIPTLFKKIENGVFHIPSHVSEPARHLLKRMLEVDPLKRCTIAEIRQMPFFQENLPRYLQPLPELADMERYPSLTMDDMTTLLLINEGQADPKKVAEDKGLVFSEDLGVIDPDIVEELLEKITTYSEGMVWEALKMPGDNQVKVAYQLVRDHRRILKDSNAYEDEDSSAMEEFMASSPPAWNADIAPPIDVQQNGADEYPDLEDVDLEIQDIPNAHFDVLDSSLPGWMTPPSSSTSAMSTPTTTHPTSAQNSANPSFSSVTSDTTASGSTAEEAARALLSPAPSSASQSVTSFSSPTPQPQPQRRLDKSMTKPKWHFGIRSRSPPMEVMLEIYRTLNVLGMQWRLKDIPLPDIGGAPPGGYSEEVELVLEDLKEKNGERPVMGRKPPSKKDAMAQEKLAQGLYHVETRARYGDVMVRMDLQLYRVDDQHYLVDFRNLGYYMVSEKDMSLPDVSRQGHSHEEGASNAGGSVPSATSATAAGAKEAGIGGVSGPFHFLEMACQLIAELASG

SEQ ID NO: 23115 - protein, 452 aa, Rickettsia sibirica 246
MVLNIKAPENIVLKPTITVFGVGGAGSNAVNNMISANLQGANFVVANTDAQSLEHSLCTNKIQLGVSTTRGLGAGASPEVGALAAQESESEIRNYLENSNMVFITAGMGGGTGTGSAPVIARIAKELGILTVGVVTKPFHFEGGHRMKTADKGLIELQQFVDTLIVIPNQNLFRIANEQTTFADAFKMADDVLHAGVRGVTDLMIMPGLINLDFADIKAVMSEMGKAMMGTGEASGEDRAIKAAESAIANPLLDHSSMCGARGVLINITGGSDMTLFEVDNAANRIREEVDNLDANIIFGSTFNPELKGMIRVSVVATGIDADKVPTYKPAIAETTNIVPEETYNKAIAQPTQIEEMPDFNSYSTENIEITDSPINQNFIGNEKELGLHANTFNKSEDDSPKPSFLGKIWGSLRASNNQTLERKNVVVSTLDQDNKESDIHDIPAFLRKKRD

SEQ ID NO: 23116 - protein, 467 aa, Listeria monocytogenes str. 4b F2365
MLYSEDDKRKQESYRIPLFGSEEESTSIPKYVLKKEPMEPRIAYQLVKDQLMDEGNARQNLATFCQTYMEKEAEILMAETLEKNAIDKSEYPQTAELENRCVNILADLWNAPKDMSYLGTSTVGSSEACMLGGLAMKFRWRNHAEKRGLDIQAKRPNLIISSGYQVCWEKFCVYWDVDMRVVPMDKEHLSIDVDKVFDLVDEYTIGIVGILGITYTGKFDDIQLLDEKVEAYNEANEHQLVIHVDGASGAMFTPFVNPELPWDFRLKNVVSINTSGHKYGLVYPGVGWILWKDKEYLPKELIFEVSYLGGSMPTMAINFSRSASQIIGQYYNFLRYGFEGYREIHEKTKKTALYLAKSVEKSGYFEIINDGANLPIVCYKMKEGLDVEWTLYDLADQLLMKGWQVPAYPLPADLSDTIIQRFVCRADLGYNVAEEFAVDFADALHNLEHARVLYHDKERNDSYGFTH

SEQ ID NO: 23117 - protein, 483 aa, Rickettsia sibirica 246
MAEFTPITIAYGDGIGPEIMEAVLYILRKAEARIRLETIEVGEKLYKKHYTSGISEESWESIQRTGIILKAPITTPQGGGYKSLNVTIRKTLQLFANIRPAVSFHPFTRTLHPNLNLTIIRENEEDLYAGIEYRQTHNMYESMKLISHTGCEKIIRYAFEYAVKNNRKKVMCLSKDNIMKFSDGILHKVFNEIAKEYPQINNAHYIIDIGTARLATKPEIFDVIVTSNLYGDIISDLAAEISGSVGLAGSANIGQHYAMFEAVHGSAPDIAGKDIANPSGLLNAAIMMLVHIGQGDIATLIENAWKKTIEDGVHTADIYNEQSSSKKVGTKEFAAEVTKRLGQLPTKLPKADYPLIAEKQESNIDYKIDTKEVKKLVGTDIFVNMNVSAAHDIADKINKLDLGNFELKTISSKGLKLWPRDTRFETVSDHWCCRFMNKDGTEIKHLDITRLLEALSTANIDFIKVENLFEFDGVAGYSLAQGE

SEQ ID NO: 23118 - protein, 554 aa, Bacillus cereus G9241
MSRKIVVVGGVAGGASVAARLRRLSEEDEIIMVERGEYISFANCGLPYYIGGVITERQKLLVQTVERMSKRFNLDIRVLSEVVKINKEEKTITIKNVTTNETYSEEYDILILSPGAKPIVPSIPGIEEAKALFTLRNVPDTDRIKAYVDEQKPRHATVIGGGFIGVEMVENLRERGIDVTLVEMANQVMPPIDYEMAAYVHEHMKKHNVELVLEDGVDTLEEHGTVVRLKSGSIIETDMIILAIGVQPESSLAKDAGLALGVRGTIKVDERFQTSDPHIYAIGDAIEVKDFVTETETMIPLAWPANRQGRMLADIIHGHTDSVYKGTLGTSVAKVFDLTVASTGVNEKILKRLNIPYEVVHVQANSHAGYYPNATPVLIKLIFNKDSGKIYGAQALGRDGVDKRMDVIATAMKANLTVIDLPDLELSYAPPYSSAKDPVNMVGYAASNIVDGFVETVQWHEIDHIVENGGYLIDVREPNELKQGMIKGSIHIPLDELRDRLDEVPVDKEIYITCQLGMRGYVAARMLMEKGYKVKNVDGGFKLYGTVVPERVVY

SEQ ID NO: 23119 - protein, 318 aa, Diospyros kaki
MESFPVINMEKMNGEERAATMGLINDACENWGFFELVNHGIPPELMDTVERVTKAHYKKCMEQRFKELVASKALEGIQAEVTDMDWESTYFLRHLPQSNISEVPDLDEEYRRVMKDFAERLEKLAEYLLDLLCENLGLEKGYLKKAFYGTKGPNFGTKVANYPPCPKADLIKGLRAHTDAGGIILLFQDDKVSGLQLLKDDQWIDVPPMKHSIVINLGDQLEVITNGKYKSVLHRVVAQTDGTRMSIASFYNPGNDAVIYPAPALVEKEVEEKEVYPKFVFDDYMKLYAALKFQAKEPRFEAMKAVEANVNLGPIATV

SEQ ID NO: 23120 - protein, 394 aa, Rickettsia sibirica 246
MAKAKFERTKPHVNIGTIGHVDHGKTSLTAAITIVLAKTGGAQATAYDQIDAAPEEKERGITISTAHVEYETKNRHYAHVDCPGHADYVKNMITGAAQMDGAILVVSAADGPMPQTREHILLAKQVGVPAMVVFLNKIDMVDDPDLLELVEMEVRELLSKYGFPGDEIPIIKGSALQALEGKPEGEKAINELMDAVDSYIPQPVRATDKPFLMPIEDVFSISGRGTVVTGRVESGIIKVGEEIEIVGLKDTQKTTCTGVEMFRKLLDEGQAGDNVGILLRGTKREEVERGQVLAKPGSIKPHDKFEAEVYVLSKEEGGRHTPFTNDYRPQFYFRTTDVTGTIKLPADKQMVMPGDNATFTVELIKPIAMQEGLKFSIREGGRTVGAGVVTKINN

SEQ ID NO: 23121 - protein, 368 aa, Archaeoglobus fulgidus DSM 4304
MKEVNKVEFEDLGISENGLNAVRRKGFEKPTEIQREIIPRFFEGEKDMVGQAQTGSGKTAAFALPILDLVDERSKDVQAIVITPTRELALQVKDEIESLRGGKKVHVLAVYGGQPIFPQIERLRKGVQIVVGTPGRVIDHLERRTLSLEKVRFFVLDEADRMLDMGFIDDIERILRHAGAERRVLMFSATMPPEVLRLARRYMRDYEVVRVHSKITPENVEHRCLKVNPEKRFEHLCRILDENNFYGIVFCQTKKETRELGRRLRARGYKADALNGDIPQHKRESILRNFRKGYTRVLVATDVAARGIDVKDLTHVVNYSIPQDPEAYIHRTGRTGREGKRGKAITFVAPWESRKLKIIERTAKVRFR

SEQ ID NO: 23122 - protein, 365 aa, Yarrowia lipolytica CLIB122
MYSTGAKTLKIGLIPGDGIGREVIPAGRKILENLPSNKLKFEFVDLKAGFELFKQTGTALPDETVDELRKCDGALFGAVSSPTTKVAGYSSPIVALRKKMGLYANVRPVKAVQATDKKVDLVIVRENTEDLYIKEERAYEQDGQKVAEAIKRITERATDKIATIATKIALQREQVRKLEGGKLFHEKPILTITHKSNVLSTSDGLFREVARASAEKELKAEGVSADAIIINEQIVDSMVYRLFREPQFFDVVVAPNLYGDILSDGAAALVGSLGVVPSANVGDDFVIGEPCHGSAPDIEGKGISNPIATIRSTALMLEFLGYPEEAAKIYKAVDANLVEGKLLSPDLGGSASTEQVTNDIISKMN

SEQ ID NO: 23123 - protein, 573 aa, Streptomyces avermitilis MA-4680
MTTDRNKTAERDTTHKPLRVTARGRAVLADPRLNRGTAFTDEERRALGLVGLVPPRVLTQDEQADRAYAQFREQPGDLAKNVYLTALHDRNEVLFYRLVGDHLEEMLPIVYTPTVGTAIKRYSYEYRRPRGIYLSVNAPDDIERSLRAAGLGADDVDLIVATDGEGILGIGDWGVGGIDIAVGKLAVYTAAAGVDPRRTLPVMLDVGTNRQELLDSPLYLGNRHPRVDRDTYDAFIDAYVTAATKLFPRALLHWEDFGPANARRIFNHYRDDVFTFNDDIQGTGAVNLAAVLSGAKAGDLPLRDHRIVVLGAGSAGIGVADQLRDALVAEGLSSDEATARFWCVDRYGLLTADQGDKLRDFQVPYARPADEVSDWQRDDDLPGIPLDEVVRRVHPTILIGTSGQGGAFTETVVREMAAHTPRPIILPMSNPTDLAEAKPADLLAWTDGKALVATGSPFDPVELNGTTYRIGQANNALIFPGLGLGAIVARATRVTDRMLRAAADAVANQTDVTDPGAPVLPPVRDLRETSFAVAVAVARAAAEDDVARAGTDDIEAAVRAVTWEPVYPPVQAV

SEQ ID NO: 23124 - protein, 165 aa, Triticum aestivum
  misc_feature (126)..(126): Xaa can be any naturally occurring amino acid
MPTVMAMGSFAGAAVLPRGSAGRFGARSLPALGRRTLIVRAQTNKPKTSTSIWNALASSGPAPDRINGRLAMVGFVTALAVEAGRGDGLLSQLGSGTGQACFAYCVAVLSVASLVPLLQGESAEGXRAGAIMNANAELWNGRFAMLGLVALAATEIITGAPFINV

SEQ ID NO: 23125 - protein, 306 aa, Bacillus halodurans
  misc_feature (1)..(1): Xaa can be any naturally occurring amino acid
  misc_feature (139)..(139): Xaa can be any naturally occurring amino acid
  misc_feature (147)..(147): Xaa can be any naturally occurring amino acid
  misc_feature (231)..(231): Xaa can be any naturally occurring amino acid
XIYTVTLNPSIDYIVQVENFQQGVVNRSERDRKQPGGKGINVSRVLKRLGHETKALGFLGGFTGAYVRNALEKEEIGLSFIEVEGDTRINVKIKGKQETELNGTAPLIKKEHVQALLEQLTELEKGDVLVLAGSVPQAXPQTIYRSXTQIAKERGAFVAVDTSGEALHEVLAAKPSFIKPNHHELSELVSKPIASIEDAIPHVQRLIGEGIESILVSFAGDGALFASAEGXFHVNVPSGEVRNSVGAGDSVVAGFLAALQEGKSLEDAVPFAVAAGSATAFSDGFCTREEVERLQQQLQRTIKKEG

SEQ ID NO: 23126 - protein, 302 aa, Staphylococcus aureus subsp. aureus MRSA252
MSVFIDKNTKVMVQGITGSTALFHTKQMLDYGTKIVAGVTPGKGGQVVEGVPVFNTVEEAKNETGATVSVIYVPAPFAADSILEAADADLDMVICITEHIPVLDMVKVKRYLQGRKTRLVGPNCPGVITADECKIGIMPGYIHKKGHVGVVSRSGTLTYEAVHQLTEEGIGQTTAVGIGGDPVNGTNFIDVLKAFNEDDETKAVVMIGEIGGTAEEEAAEWIKANMTKPVVGFIGGQTAPPGKRMGHAGAIISGGKGTAEEKIKTLNSCGVKTAATPSEIGSTLIEAAKEAGIYELLLTVNK

SEQ ID NO: 23127 - protein, 232 aa, Gloeobacter violaceus PCC 7421
MAHLILIRHGQSLWNAANKFTGWVDVPLSERGRAEATIASCKLRDYRVNVCFTSMLMRAIETAVITLTECDDICGGKIPIIKHEADDENWHGWDNYDGDPAAELPIYPTATLDERYYGDLQGLDKAETTAKYGKEQVQIWRRSYSVRPPGGESLEDTRKRVYPYFTNRILGHIKQGDNVLVAAHGNSLRSIIMILETLSEEEVPKVELATGVPIVYELDKAAHMLSKAVLTN

SEQ ID NO: 23128 - protein, 385 aa, Helicobacter pylori J99
MVHQSEMENYNIGQASIEEVSDPAYKGAKIVVVGVGGGGSNMIKHLVEYGVHQDVTPIATNTDGQHLKNNPAPVKILLGKESTGGLGAGGVPDIGKKAAEESADEIREAIKDAKLVIVSTGLGGGTGTGATPTIVKIAKEVGALTIAIVTKPFKYEGNQKRKRAEEGLKELEQSSDSILVIPNDKILLTMKKNASTTECYREVDDVLVRAVSGISTIITKPGNINVDFADLKSALGFKGFALMGIGEATGEDSAKLAVQNAIQSPLLDDASIEGAKSIIVFFEHHPDYPMMAYSQACDFIQDQAHQDVDVKFGQHTSENIPIDHVRVTIIATGSERNSNGAGLESIATPSQPVVKPTRKVGNGEYLRIPTEEELSIPTTIRIQQD

SEQ ID NO: 23129 - protein, 175 aa, Oryza sativa
MAPSVMASSATSVAPFQGLKSTAGLPVNRRSSSSSFGNVSDGGRIRCMQVWPIEGIKKFETLSYLPPLTVEDLLKQIEYLLRSKWVPCLEFSKVGFVYRENHRSPGYYDGRYWTMWKLPMFGCTDATQVLKELEEAKKAYPDAFVRIIGFDNVRQVQLISFIAYKPPGCEESGGN

SEQ ID NO: 23130 - protein, 525 aa, Psychrobacter arcticus 273-4
MIDQSLLDAVKSYSANMTRPISFVLGSGEHSKRAELVDFLTKIAGTTDKINFDAQANDDTLPSPISFKVINHIDGALMDTGIVFSGIPGGHEFTSLILAILQAGGHTLKLDEGIQKLIKRFNKPLQFQTYVSLSCHSCPEVVQALNQFALLNDDISNEMIDGALFQEQVEANNIQGVPAVFLNGKPFANGLIDTAKLIEKLQEQFPDLLAEADDDAEQLEQQDVTIIGAGPAGVAAAIYTARKGLKVTMVADRIGGQVKDTQDIENLISVPLTTGSELSANFEKHLREYNITLKEHVSVKEISETADENYSIHLNTGETFETRSIILATGAQWRKLGVAGEEENIGKGVAFCAHCDGPFFKGKDIAVVGGGNSGIEAALDLAGIVKHVTVLEFADDLKADQVLINKAKEKSNIDIITSAATQEIKATDGKVSSLVYQDRNSNDNKELDVAGVFVQIGLIPNTEFVKGFIDLNRFGEIEIDERCRTDRKGIFACGDVTTVPFKQINIAMGEGSKAALSAFEYLVMQ

SEQ ID NO: 23131 - protein, 83 aa, Arabidopsis thaliana
  misc_feature (69)..(69): Xaa can be any naturally occurring amino acid
MAEASDLLQWPRKDNRRFLHVVYRVGDLDRPIEIYTEVFAMKLLRKRDILEEKYSNAFLVFGPETSNLXVELTYNYGVSSYDI

SEQ ID NO: 23132 - protein, 485 aa, Oceanospirillum sp. MED92
MPIQLKDSGLLKTNAYINGQWVAGEAGETFPVINPATGEELAQVASVTAVQTKEAINAAEKAMKAWRALPAKERSDLLERWYGLILDNQEDLAQLMTAEQGKPLFESRGEVMYGASFLKWFAEEGKRVYGDVLPATQDRRSIVIKQPVGVVAAITPWNFPNAMITRKVAPALAVGCAMVLKPAAETPLSALALAELGERAGLPAGLFSVLTTADAVAVGGEMTSNPVVKKVTFTGSTGVGKLLMKQCADTVKRTSMELGGNAPVIIFDDADLDKAVAGALVSKYRNSGQTCICANRIMVQAGIYDAFVEKFSAAVAEFRIGDGLEEATTHGPVITEKAVGDIHSKVTAAVESGATVVQGGQPSELGSYFYEPTVLTNVTRDMSLFKEEIFGPVAPIFKFETEEEAIDMANDTEFGLASYVYTNDLGRIWRVSEGIEYGMVGVNETMISSEVIPFGGVKESGQGREGSKYGLDDYLETKYICMGGL

SEQ ID NO: 23133 - protein, 519 aa, Oryza sativa (japonica cultivar-group)
METSAAAAPNGGAAAAEQQQRRRLPDFQQSVRLKYVKLGYHYLISHGMYLLLSPLMALVAVQLSTVSPGDIADLWEQLRFNLLSVVACSTLLVFLSTLYFLTRPRPVYLLDFACYKPDPQRKCTRETFMRCSSLTGSFTDANLDFQRKILERSGLGEDTYLPPAVLRVPPNPCMDEARKEARTVMFGAIDQLLEKTGVKPKDIGVVVVNCSLFNPTPSLSAMVVNHYKLRGNVISYNLGGMGCSAGLLSVDLAKDLLQVHPNSYALVVSMENITLNWYFGNNRSMLVSNCLFRMGGAAILLSNRRSDRRRSKYELVHTVRTHKGANDKCFGCVTQEEDEIGKIGVSLSKDLMAVAGDALKTNITTLGPLVLPLSEQLLFMATLVAKKVLKMKIKPYIPDFKLAFEHFCIHAGGRAVLDELEKNLELTDWHMEPSRMTLYRFGNTSSSSLWYELAYTEAKGRIRKRDRIWQIAFGSGFKCNSAVWKALQTVNPAKEKNPWMDEIDNFPVEVPKISKVGNA

SEQ ID NO: 23134 - protein, 217 aa, Salmonella typhimurium LT2
MNQTLLSSFGTPFERVELALDALREGRGVMVLDDEDRENEGDMIFPAETMTVEQMALTIRHGSGIVCLCITEDRRKQLDLPMMVENNTSAYGTGFTVTIEAAEGVTTGVSAADRVTTVRAAIKDGAKPSDLNRPGHVFPLRAQAGGVLTRGGHTEATIDLMTLAGFKPAGVLCELTNDDGTMARAPECIAFAGQHNMAVVTIEDLVAYRQAHERKAS

SEQ ID NO: 23135 - protein, 131 aa, Desulfovibrio vulgaris subsp. vulgaris str. Hildenborough
MKEVIAIIRPNRINATKKAMVEAGLPAFTGARCMGRGRKPVEFELLKHLEGSGEDTADVLPALAQGGRLIQKRMLTIVVPDERVSAVVDVLMKANRTGQPGDGKIFVRPVIDVARIRTGETGATAIDEMKG

SEQ ID NO: 23136 - protein, 326 aa, Rickettsia sibirica 246
MQITVREALRDAMQEEMIRDDKVFVIGEEVAEYQGAYKVTQGLLEQFGPKRVIDTPITEYGFAGLAVGAAFAGLRPIVEFMTFNFAMQAFDHIVNSAAKTHYMSGGQVKCPIVFRGPNGAASRVAAQHSQNYTACYSHIPGLKVVAPYSAEDHKGLMLTAIRDDNPVVFLENEILYGHSFDVPKTIEPIPFGQAKILREGSSVTIVTFSIQVKLALDAVNVVQNDNIDCEVIDLRTIKPLDTETIIESVKKTNRLVVVEEGWFFAGVGASIASIVMKEAFDYLDAPIEIVSGKDLPLPYAVNLETLALPSESDVIEAVKKVCYYSI

SEQ ID NO: 23137 - protein, 1820 aa, Anabaena variabilis ATCC 29413
MNRQHKHHRCNPVNFLSKQNLLPFLLGIVILLVVVMLWLRLQAEEEIKIQQLIKQQAIATQTELVTQLKTRILALKRIGKHWEMHGSIPQAQWELEARAYLEDYGGYQAIKLVDPSWQVLRSVSVAKNKAAENLEIMPKFPQCKGATAQPSHETTLTHTVNLNQGDRVFFACVPLWMGDKFGGAVLGIFQVKQFFESVLHIAPGYKIRVFDGQELIYGQDRQSSTLPSWQQSVNINFDGMTWQLQIYPTPELLKDLYSPLPTVVLVAGIFNAGAVTLLIYFAQATKLSNHQIGRINQELADRIEKQTQVEIALRASENRLRELLETVRVIPWEVDLKTQHFTYVGPQAETLLAYPIAQWYEENFWDNHLHPHDRDWAVRFCQEAANKGQNHELEYRMLAADGRVVWLRDVVNVVEVDGTPVMLRGFMFDITDLKRVEETLRLRERALAASSNGIVISDAKLPNYPVIYVNSAFEQITGYKATEIVGRNCRFLQGNDTTQPAIEELRSALKAGKNCKVILRNYRKDGSLFWNQLSVSPIYNDNGQLSHFIGIQTDISDRQQAEASLRRQALTFENIYDGVIITNLQGQILDWNPAAERMFGYSKDHICGQSISILHKVEEDAALNSAIIAEITKQGRWSGEINFVRQDGSQGICETTIVALQDDQGQTVATISVNRDITERKHAELLLRRSEERFQAFMNHSPTPAWITDIDGTIVYLSETYRRTFQLPTQELIGTNIFDIYPPELIQTFRETIQIVARTHQVMETVESVPCSDGTVRDFLVYKFPISSKPDECLIGGIAIDITERKQAEAALRKSEERWQLVIEGNQDAIWDWNIITNETFRSARWAELIKEQNYQPIADHADCISRIHPDDYERVMAVRQDCLSRKIPNYVVEYRLRCNDDSYKWVLVHATGQWDERGNPVRMVGSIKDITERIEAQEALQRQLHRTLLLEKITQKIRQSLDSKEIFETAATQIGQALAVDRCLIHSYISHHDPHIPLVAEYNNVLDYCSMQKWEFTTTGNRHILQMMSQDKAIASANVYTDPLLQTAVPSCCEIGVKSMLAVRTSYQGEPNGAICLHQCKYFRQWTPEEIELLEAVAAQLGIALAQAQLLEQETRQREELTIKNFALEQAKRAAEAANRAKSEFLAMMSHEIRTPMNAVIGMTGLLLDTELTSQQRDFVETVLTSGDALLSIINDILDFSKIESGKLELEEQPFEVRTCVEQVIDLLAAKAAQKDIELAYLIHPQVPMQIAGDLTRLRQILTNLLNNAIKFTPEGEVVVSVRSQPSPNQKTKNCCEIIFTIKDTGIGIAPETMDLLFQPFVQADASMTRKYGGTGLGLVISKRLGEMMGGYLWVESRGCVGGNPPPGWQRKNSISSASVATGSTFYFSMTVPVVAHADLETSITSPVQLSGKRLLIVDDNPTNRQILRLQAEPWQMETYTAPSGAEALALIDQGMAFDIAILDVQMPEMDGLTLARQIRQRPSYQHLPLVILTSWGQPDTDLSDIEFAACLNKPIKQSQLFDVLAASLGNQPIRASVVPDRSAQVNSCLAQQIPLRILLAEDIVVNQKVALLILKKLGYRADVVANGLEVLEALQRQSYDVVLMDVNMPEMDGLKASQIICQTWSPRSRPYIIAMTANAMRGDREACLAAGMDHYISKPLQLEELAKALGKCHPSTSSTEKALEKTSSQNQTFTDISDLKFATIDTKILQALRDMLGGDKVAFAELINCYLTESPKLIENLNVAINTEDTQGIWKTAHKFKSSSGSVGAVFLAQLCKLLEAKGRNNNLEGCIELGSQLCQEYELVKTALYREVNKETP

SEQ ID NO: 23138 - protein, 405 aa, Desulfitobacterium hafniense Y51
MINMEFRFNTIEEAIEDIRQGKMIVVVDDEERENEGDLLMAAEKSTPEAINFMATYGRGLICVPMTAERIQALNLEPMVTHNTDPHGTAFTVSVDGCDCTTGISAFERANTVKVLLDPHSRPENLRRPGHIFPLKAREGGVLVRAGHTEGAVDLARLAGFQPAGVICEILKDDGTMARVPDLMEFVKKHDLKIVTIKDLIHFRRQKEKLVERVVGIELPTDFGDFKAVGYRSLLDGQEHIALVKGDVDDGEPVLVRVHSECLTGDVFHSRRCDCGEQLSAALESIQKEGRGVLLYMRQEGRGIGLLNKLKAYKLQEEGKDTVEANLALGFPADLRDYGVGAQILVDLGIRKVRLMTNNPRKIVGLEGYGLEIQERVSMEMPVKPENEHYLHTKKIKLGHYLPGVR

SEQ ID NO: 23139 - protein, 254 aa, Brassica rapa subsp. pekinensis
DPICMQIIKDAFLTSCGHSFCYMCIVTHLHNKSDCPCCSHYLTTAQLYPNFLLDKLLKKTSAHQISKTASPVEQFRHSIEQGREVSIKELDVLSTILAEKKRKLEQEEAERNMQILLEFLHMLKKKKVDELNEIQNDLQYIKEDVNAVERHRIELYRARDRYSMKLRMLADDPLGSKSRSSSVDRNTIGLFPSSRSAHGGLASGNLMYKKMDGSQRKDVSVTELNSQHMSQSGLAVMRKKRVHAQFNDLQECYL

SEQ ID NO: 23140 - protein, 106 aa, Arabidopsis thaliana
MDVGRNNRKNMSFRSSPEKSKQELRRSFSAQKRMMIPANYFSLESLFLLVGLTASLLILPLVLPPLPPPPFMLLLVPIGIMVLLVVLAFMPSSHSNANTDVTCNFM

SEQ ID NO: 23141 - protein, 348 aa, Shewanella sp. ANA-3
MLACRGIWLIKGNTLTSPSPAFGVLLVNLGTPDEPTPKAVKRFLKQFLSDPRVVDLSPWLWQPILQGIILNTRPAKVAKLYQSVWTEQGSPLMVISEQQAQKLATDLSATFNQTIPVELGMSYGNPSIESGFAKLKAQGAERIVVLPLYPQYSCSTVASVFDAVAQYFTQVRDIPELRFSKQYFDHEAYIAALAHSVKRHWKTHGQADKLILSFHGIPLRYATEGDPYPEQCRATAKLLAQALELTDGQWQVCFQSRFGKEEWLTPYADELLADLPRQGVKSVDVICPAFATDCLETLEEISIGGKETFLHAGGEAYHFIPCLNDDELHIELLRQLVQEQAQPWIRAE

SEQ ID NO: 23142 - protein, 604 aa, Oryza sativa (japonica cultivar-group)
MAERLTRIAIVSEDKCKPKKCRQECKKSCPVVKTGKLCIEVTPASKLAFISEELCIGCGICVKKCPFDAIEIINLPKDLEKDTTHRYGPNTFKLHRLPVPRPGQVLGLVGTNGIGKSTALKVLAGKLKPNLGRFKNPPDWQEILTYFRGSELQHYFTRILEDNLKAIIKPQYVDHIPKAVQGNVGQVLDQKDERGVKAELCVDLELNQVIDRNVGDLSGGELQRFAIAVVAVRNAEIFMFDEPSSYLDVKQRLKAAQVVRSLLRPNSYVIVVEHDLSVLDYLSDFICCLYGKPGAYGVVTLPFSVREGINIFLAGFVPTENLRFRDESLTFKIAETQESAEEIETYQRYKYPTMSKTQGNFKLTVVEGEFTDSQIVVMLGENGTGKTTFIRMLAGLLKPDTVEGTEIEIPEFNVSYKPQKISPKFQHSVRHLLHQKIRDSYTHLQFVSDVMKPLQIEQLMDQEVINLSGGELQRVAICLCLGKPADIYLIDEPSAYLDSEQRIVASKVIKRFILHAKKTAFIVEHDFIMATYLADKVIVYEGRPSIDCTANAPQSLVSGMNKFLSHLDITFRRDPPNYRPRINKLDSTKDREQKSAGSYYYLDD

SEQ ID NO: 23143 - protein, 352 aa, Zea mays
MQLAHLFSFDSATTSVATFVVLVVTALYLSLKKRYNEAIHLKVEMFLKTYGTSKPTRYTFSEVKKIARRFKEKVGQGGFGTVYKGQLPNGVPVAVKMLENSTGEGEDFINEVATIGQIHHANIVRLLGFCSEGTRRALIYEFMPNESLGRYIFLPQELLVPEKMLDIAIGIARGMEYLHQGCNQRILHFDIKPHNILLDYSFNPKISDFGLAKLCARDQSIVTLTAARGTMGYIAPEIYSPNFGGVSYKSDVYSFGMLVLEMVSGRRNSDPGIENQNGVYLPEWVYERVVTGQDLTLSKKIADQEKETVRQLAIVALWCIQWNPKNRPSMTKVVNMLTGRLQNLPIPPKPYA

SEQ ID NO: 23144 - protein, 509 aa, Xanthobacter autotrophicus Py2
MPLAAAQPVSGPLAIPHFIAGRKVSGTSGRTAPVFNPATGVQSGEVALASEAEVRAAVEAANAAAPGWAATTPLRRARILNAFLRLLEERIDTLAEVISAEHGKVFSDAKGEIQRGMEVVEFATGAPQLLKGEITEDVGTRVDSHAVRQPLGVVAGITPFNFPAMVPMWMFPVALACGNCFILKPSERDPSASLLLAEWLKEAGLPDGVFTVVQGDKVAVDALLTDPGVEAISFVGSTPIARYIYETAARTGKRCQALGGAKNHMIIMPDADMDQAVDALMGAAYGSAGERCMAVSVAVPVGEGTAEALMEKLEPRVRALKVGPGTDPEAEMGPLVTKQHLEKVSGYVDSGVAEGAKLVVDGRGLKLQGYEGGYFIGGTLFDHVTSDMRIYREEIFGPVLAVVRADSYATAARLINTHEFGNGTAIFTRDGDAAREFAHQIKVGMVGINVPIPVPMAFHSFGGWKASLFGDHHMHGPEGVRFYTRLKTITTRWPTGIRAGADFVMPTMK

SEQ ID NO: 23145 - protein, 442 aa, Candida glabrata CBS 138
MVDNKDENKDKPAVRKPEQVEGHTVTKFFNKLNGQPESYVSKSNYVFGKTLGAGTFGVVRQARYSPTNEDVAVKILLKKALKGNDVQLQMLYDELSILQMLKHPNIVEFKDWFESKDKFYIVTQLAVGGELFDRILAKGKFTERDAVSITMQILSAVDYMHSKNVVHRDLKPENVLYIDKSDDSQLVIADFGIAKQLQDNDDLIFKAAGSLGYVAPEVLTNNGHGKPCDIWSIGVIVYTLLCGYSAFVAETVDGFLEECTQNKYPVTFHKPYWDNISDEAKNFILRALTLDPAERPTAAELMKDPWITNTRPETANIYPEIRKGFDLRKKLRDAIEIVKLNNRIKKLRSLYMVETDTDIEENVASVAFNTLASSLNDLRLHSQKRVGQLTAEQRRLKSALTQDTFAQIVRAATKNKERIWGEKTASPTPSQSSTSSTSTNKK

SEQ ID NO: 23146 - protein, 170 aa, Oryza sativa
EKYQQYNRLSGTEFSNELNLGSTEEYWCRQDAAQAIALVLWKGLGLDEGNTVGSWQGNSEKVLLGIGGGHYAPRHMDIVIKDGIWVGHLLSGYSLPMEVSPQGNGKSYSDVGGMWKHSIKVSYDATKAAFPGGQVIAHLDQKSFKGWQKNAIMSYLQELNIRIGKPNDFI

SEQ ID NO: 23147 - protein, 454 aa, Bacillus subtilis subsp. subtilis str. 168
MKVVKFGGSSLASGAQLDKVFHIVTSDPARKAVVVSAPGKHYAEDTKVTDLLIACAEQYLATGSAPELAEAVVERYALIANELQLGQSIIEKIRDDLFTLLEGDKSNPEQYLDAVKASGEDNNAKLIAAYFRYKGVKAEYVNPKDAGLFVTNEPGNAQVLPESYQNLYRLRERDGLIIFPGFFGFSKDGDVITFSRSGSDITGSILANGLQADLYENFTDVDAVYSVNPSFVENPKEISELTYREMRELSYAGFSVFHDEALIPAFRAGIPVQIKNTNNPSAEGTRVVSKRDNTNGPVVGIASDTGFCSIYISKYLMNREIGFGRRALQILEEHGLTYEHVPSGIDDMTIILRQGQMDAATERSVIKRIEEDLHADEVIVEHHLALIMVVGEAMRHNVGTTARAAKALSEAQVNIEMINQGSSEVSMMFGVKEAEERKAVQALYQEFFAGVLIS

SEQ ID NO: 23148 - protein, 621 aa, Ashbya gossypii ATCC 10895
MLRCIRRFSSRGAAASAVATGIPVGREAKRLMSKPLVTRLSVDGPIECPLSGMQLLNSPLFNKGSAFTQKERAAFGLEGLLPPQVNTLDEQVERAYKQLCYLKTPLAKNDFMTSMRMQNKVLFFELVRRHIRELVPIIYTPTEGDAIAAYSHRFRRPEGVFLDITEPDSIEERLASYGEDKDVDYVVVSDGEGILGIGDQGIGGIRIAISKLALMTLCGGIHPGRVMAVTLDVETNNKKLARDELYMGNRFARVRGKQYDEFLDKFIKALKKRFPSAVLHFEDFGVENARPLLDRYRTELPCFNDDIQGTGAVVMASFLAALKHTDRNLLDSKVLVYGAGSAGIGIADQIVNHMVSYGASVDEARSKIFTMDRRGLIMDSMRAGSTRAQQAYAKPDDEWEGVNTKSLVEVVSRIKPTCLIGCSTQAGAFNKAVVQEMHKHNERPIIFPLSNPTRLHEAVPEDLLEWTNYQALVATGSPFHPVNGYRISENNNCFSFPGIGLGAVLARATIISDKMISAAVDQLASLSPLKPGDSRPGLLPPLEVINDTSAKVATAVILQALEEGLARVEHEAVPNSTLGERVRVPRDFDKCLEWVKVQMWKPVYRPLLKVQHDPSVHTFQH

SEQ ID NO: 23149 - protein, 216 aa, Glycine max
METLCSALVFPSFRITTSAFSKCGIRASIAVEQQTSQTKVALLKIGTRGSPLALAQAYETRDKLMASHPELAEEGAIQIVIIKRFNMTENVTSILSIDDMLPAVAQGAIGIACRSNDDKMAEYLASLNHEETRLAVSCERAFLEKLEGSCRTPIAGYASRNEDGNCLFRGLVASPDGIRVLETSRIGPYAFEDMIKMGKDAGEELLSRAGPGFFSR

SEQ ID NO: 23150 - protein, 307 aa, Staphylococcus aureus subsp. aureus MRSA252
MTKKMGLLVVAYGTPYKESDIEPYYTDIRHGKRPSEEELQDLKDRYEFIGGLSPLAGTTDDQADALVSALNKAYADVEFKLYLGLKHISPFIEDAVEQMHKDGITEAITVVLAPHYSSFSVGSYDKRADEEAAKYGIQLTHVKHYYEQPKFIEYWTNKVNETLAQIPEEEHKDTVLVVSAHSLPKGLIEKNNDPYPQELEHTALLIKEQSNIEHIAIGWQSEGNTGTPWLGPDVQDLTRDLYEKHQYKNFIYTPVGFVCEHLEVLYDNDYECKVVCDDIGANYYRPKMPNTHPLFIGAIVDEIKSIF

SEQ ID NO: 23151 - protein, 472 aa, Salinibacter ruber DSM 13855
MANTPIEFGTDGWRAVIADDYTFANLERVAQATANWLHDDYGDTPSIVLGHDTRFLGAEFAERAARVLADAGVSVTLADSIVPTPAVSWATQAAGHDAGVVITASHNPPSYNGYKIKAHFGGPAPPDMIASVEGAVPDHNLDGTSLAPFGTLAADGAVQTDGVRGGYLDALRDALNISAIQNADLTIAHDAMFGAAQGLVEALLGDGVVSLRHDLNPGFHGVAPEPIADRLGELSDTVAQSDAAVGLANDGDGDRIGMVDEDGTFVSSHRILALLVKYLYEERGLTGSIVKTFSTTHLLDKMGARYGLDVETTPIGFKHIAPKMAEGNVLVGGEESGGIAAAGHIPERDGVYIGLLIVEMMVERGMTLSALVDELLEEFGPHYNYRDDIHIREDQKADVLDRLDNQGGLESVNGHAVEEVRTLDGFKHVTDHGWLLIRPSGTEPVLRVYSEAESPEAAEALVKDASAQLGLN

SEQ ID NO: 23152 - protein, 162 aa, Caulobacter crescentus CB15
MAISLSAPRTTELKPRIVVFGVGGAGGNAVNNMIEAGLEGVEFVVANTDAQQLQFAKTDRRIQLGVQITQGLGAGAHPEVGMSAAEESFPEIGEHLDGAHMVFITARMGGGTGTGAAPIIAKWARERGILTVGVVTKPFHFEGRHRMRLADSGIQELQRYVD

SEQ ID NO: 23153 - protein, 265 aa, Mesorhizobium loti MAFF303099
MQLGGFFELSNEPVSFETRDNIAIIAINRPDRRNAIDERTSPQLRIAVDRFESDDHLAVGILRGEGPVFCSGMDLQAFVDGEAEEILFGDGHLGGLVSRARTKPVLAAVQGAAIAGGFELMLACDLVVSTENCKFGLPEAKRGLVAGAGGALRLGEMLPPVLANEILLTGLLFEAPRAYQLGLVNRLVPEHFLLEAAMSLADSIAQNAPLSVRASLALVKAQSEKARNSLWTLNDELLRELMRSNDALEGATAYKAKRRPIWRGD

SEQ ID NO: 23154 - protein, 1021 aa, Cryptococcus neoformans var. neoformans B-3501A
MRISRPLGQLNLYSRTSPRISFPLPSARVISAPLRQSLPPPRLRVNTPLVSRSFSISSTHLAKMSADVEMTSQSAKIIDGTAIAKQIRTSISQAITDLHASNPTFHQPHLVIFQLGSSAASSTYIRMKLKAAEESGMTVEHIKIPSDEESGALKGTGVKRVLEAVKKANQDEKVSGILVQLPLEGAGKAEEKAVVDSVDVTKDVDGFHPENIGLLSSRISEPFFTPCTPAGAIKLIESTGFNLAGSNVVVLGRSDIVGTPVCALLRKKDATVTQCHSRTKNVERIISQADVIVAAIGQAEFVRGEWLKPGAIVIDVGTNYIPDASKKSGQRLVGDVHFESASKVASYITPVPGGVGPMTVAMLMNNTFEAAKRQWSSRRAKQLIPLPLEIKEKVPSDIEIAVAQTPKPVAEIAEEIGVHPDEVESYGRYKAKIELSVLDRLKERKDGKYIVVAGITPTPLGEGKSTTTIGLAQALGAHLHKTAIACVRQPSQGPTFGIKGGAAGGGYSQVIPMTEFNLHLTGDIHAITAANNLLAAAIDARMFHEATQTDKGLFNRLCPPKKGVRTFSKPMIARLHKLGINKTNPSDLTEEEAARFARLDIDPATLTWNRVLDTNDRYLRQITVGQAPTEKGLERKTAFDIAVASECMAVLALSKDLADMRARLGRMVVASSKAGEPITAEDIGCAGAMAVLMKDAIKPTIMQTLEGTPVFVHAGPFANIAHGNSSIIADRIALKLAGVEEGDDESRNGYVITEAGFGADIGMEKFCNIKTRVSGLKPSAVVLVATIRALKMHGGGPAVTPGKPLDQVYVEENLELLEKGCANLGKHIENAKKFGLKVVVAINKFSNDTAAEMALVQEYALKVGADYAVPADHWARGGAGAVDLANAVIEACATPSTFDFLYDLNQPLTKKIEIIAKEMYGADGISLSAEAQAEIDRYEKQGYGGLPICMAKTALSLSDDPSKKGVPTGFTLPIRNVRLSAGASFVYPLVGDMSTMPGLTTRPGFYDIDLNPDTGEIEGLF

SEQ ID NO: 23155 - protein, 194 aa, Triticum aestivum
SFPHTCLTVSEKSDPRPRYCRRSKSEDEFALFVLPTLGEHSYSSRRPMHTSILTGARRVNEILNGHEDLCKRHFRMETDIFQALVQKLRENDRLVDGRDVSVEEQVAIFLYALSKNATNDTLADWFQHSGQTISYYFGEVLSAITELYSVYIRPPSLHPHPILSKEKFYPFFMDCIDAIDGTHIPLKLPADEQE

SEQ ID NO: 23156 - protein, 961 aa, Sesbania rostrata
MANRNLEKMASIDAQLRLLVPAKVSEDDKLVEYDALLLDRFLDILQDLHGEDLKETVQEVYELSAEYEGKHDPKKLEELGNLITSLDAGDSIVVAKSFSHMLNLANLAEEVQIAHRRRNKLKKGDFADESNATTESDIEETLKKLVGEMKKSPQEVFDALKNQTVDLVLTAHPTQSVRRSLLQKHGRVRNCLTQLYAKDITPDDKQELDEALQREIQAAFRTDEIRRTPPTPQDEMRAGMSYFHETIWKGVPKFLRRVDTALKNIGINERVPYNAPLIQFSSWMGGDRDGNPRVTPEVTRDVCLLARMMAANLYYSQIEDLMFELSMWRCNDELRVRADELNRSSKKDAVAKHYIEFWKIIPPSEPYRVVLGEVRDRLYQTRERSRHLLAHGYSDIPEEETFTNLEEFLEPLELCYRSLCACGDRAIADGTLLDFLRQVSTFGLSLVRLDIRQESDRHTDVLDAITKHLEIGSYQEWSEEKRQQWLLSELSGKRPLFGPDLPQTEEIRDVLDTFHVIAELPPDNFGAYIISMATTPSDVLAVELLQRECHIKHPLRVVPLFEKLADLEAAPAALARLFSIEWYRNRINGRQEVMIGYSDSGKDAGRFSAAWQLYKAQEELIKVAKKFGVKLTMFHGRGGTVGRGGGPTHLAILSQPPDTIHGSLRVTVQGEVIEQSFGEQHLCFRTLQRFTAATLEHGMHPPISPKPEWRAMMDQMAVIATEEYRSIVFKEPRFVEYFRLATPELEYGRMNIGSRPAKRRPSGGIETLRAIPWIFAWTQTRFHLPVWLGFGAAFKKVIEKDVRNLHMLQEMYNQWPFFRVTLDLVEMVFAKGDPGIASLNDRLLVSKDLWPFGEQLRNKYEETKKLLLQVAGHREILEGDPYLKQRLRLRDSYITTLNAFQAYTLKRIRDPNYNVKVKPRISKESAVELVTLNPTSEYAPGLEDTLILTMKGIAAGMQNTG

SEQ ID NO: 23157 - protein, 764 aa, Aspergillus nidulans FGSC A4
MASVYKAVSKRKSRDITKQQDQDDEDVMMEEMLADADDTSDSDEDEENTADAAKKQLAAGMMPKTRVLMLTSRGVTSRHRHLLNDMTSLLPHTHKESKLDSRKKAAGYNLLLNSLADLHSCNVIFFLEAKKNGQDLYLWLSRPPNGPTVKFHVNNLHTMAELNTGFAGNCLKGGRGIVVFDKSFDEQGPVMSQPGNEYRGLIREMLRSVFCVPKRGVKGMKPFIDRVIGIYGVDGKIWIRVYEIRESESGNKKKDGEEVTEKPAHNPKDGPEISLVEIGPRFVLTPIVILEGSFGGPVIYENKEFVSPNQVRREIRISKAARYWLSPSFAIITQMNVQRVKSLDSSLAPELLLAAVMASPSQYSPLWLQGTQKYLPDIIPSQLLMVMELFSVFAYPSGKESPSAMSFQYLVTELLLHIFRSCDTISDIINLAATCRRFRDVINRSNKLQILMDVAEMEFGPVDDIIQIATHNTSQPAHLFRTAPLTASLLKQIAQIGRAAQKWATIYPVKKWKLDYENRRSLTDEEQFRLRRAIYRLWLYHRAFHRREYDRYSRNLLNTVVERAQLLHNWTTSELADIEDIRTVIGDVVQNHICPSNGTIQRKFRKRYPESNYQLTFNIHLNYPISNTQTPYGFHDSSLNPTDHDQYFHLTHYTSFGNYSAKYRSRFRNDIFHEPGSEGWGDEIPHYYVVQDMMKLDPGQILWLRENCPLKEQVETFVLSLGDWFRDNGETFGDTLAWVIKERGEDLEEFRVAIVERELGIACN

SEQ ID NO: 23158 - protein, 310 aa, Thermobifida fusca YX
MSDVRNVIIIGSGPAGYTAAIYAARAELKPLVFEGAITAGGALMNTTEVENFPGFPDGIMGPELMDNMRKQAERFGAELVPEDVTEVDLTANPKVVKAGDQTFYARAVIVATGSGYRKLGVPGEEEFSGRGTSWCATCDGFFFRDQDIAVVGGGDSAMEEAIFLTRFARSVTVIHRRDQLRASKIMQERAFANEKISFLWNTEVVEILGDTRVHAVRLRNRVTGEESTLNISGLFIAIGHDPRVELFKGQLELDEQGYLKVDSPTTHTNIPGVFACGDVVDHRYRQAITAAGSGCAAALDAERYLTEEAG

SEQ ID NO: 23159 - protein, 107 aa, Thermobifida fusca YX
MATIQNVTDDTFEEVVLKSKLPVLVDFWAEWCAPCKMIAPVLEQIAEEQEGKLTVVKINADQNPDTVRQYGVMGLPTLNLYKNGEVVKQLVGAKPKRVIEKELEEFL

SEQ ID NO: 23160 - protein, 328 aa, Hyaloperonospora parasitica
MTKMTAEMPNAVATGGKKVDASTIAEPFSSAVRQYIEHDMAGVGPKLIGLLAHGDPAAKKYAEWTGKACARDGIRYELREVPKDDLLAALQQANEDPDVHGILVYYPCFGTFPSFFGGTMDDFLRDSISIKKDVEGLGQFYRGNLYRNIRYVDDEKTQKCVLPCTPLAIVKILEHLGIYDKARENTGNQLEGVSITVINRSDIVGRPLAALLANDGADVYSADIDSLYLFRRGKLIPSEETPETACKKSRVIITGVPVKSYKLSLEWVSENTIVINVASFKNVDEAGLLQIKGVQYVPLVGKVTVAMLERNLLRLYENFHWKPRKVWQ

SEQ ID NO: 23161 - protein, 408 aa, Novosphingobium aromaticivorans DSM 12444
MSIEVKVPTLGESVSEATVGQWLKKPGEAVALDEPIVSLETDKVAVEVPAPAAGVLGALVANEGDTVAVGALLALIEDGVAAAGAQAPAPRTEAPVPPASASEAPAAPAGDAAVLSPAVRRAVLEYGIDPSTVKGTGKDGRLTKEDVMAAAAAKQAAPAAAVSAQAATPAAAPAGGRNEERVKMTRLRQTIAKRLKSAQETAALLTTFNDVDMSAVMEARAKYKDVFEKKHGVKLGLMSFFAKASVLALKDIPSVNAQIQGDEIVYFDYVDISVAVSAPNGLVVPVVRDVDKMSFADIEKSIADYGKKARDGALTMADMAGGTFTISNGGVFGGLMSTPIINPPQSAVLGLHRIEDRPVVRNGEIVIRPMMYIALSYDHRIIDGREAVTALKTIKEAIEDPTRLLIDL

SEQ ID NO: 23162 - protein, 339 aa, Cryptococcus neoformans var. neoformans JEC21
MVVKVGINGFGRIGRIVLRNAIEHGDLEVVAVNDPFIDLDYMVYMFKYDSTHGRFKGSVEVKDGKLYINNKAIAVFGEKDPANIKWGEAGAEYVVESTGVFTTTEKAGVHLKGGAKKVVISAPSADAPMFVCGVNLDAYKPEYQIVSNASCTTNCLAPLAKVIHDNFTIIEGLMTTVHATTATQKTVDGPSHKDWRGGRGAAANIIPSSTGAAKAVGKVIPSLNGKLTGMSFRVPTSDVSVVDLVCRIEKGASYEEIKNVIKKASESPELKGILGYTEDAVVSTDFIGSTESSIFDAQAGIALNANFVKLVSWYDNEYGYSRRVCDLISYIAGVDAKAQ

SEQ ID NO: 23163 - protein, 296 aa, Novosphingobium aromaticivorans DSM 12444
MSILVDKNTKVITQGMTGATGTFHTEQALAYGTQMVGGVTPGKGGTTHIGLPNFNTVAEAKAATGATASCIYVPPPFAADSILEAIDAEMELIVCITEGIPVLDMVKVKRALSGSKSRLIGPNCPGVLTPNECKIGIMPGSIFKKGSVGVVSRSGTLTYEAVFQTSNIGLGQTTAVGIGGDPVNGTNFIDVLELFLADDETKSIIMIGEIGGSAEEEAAQFLKDEAKRGRKKPMVGFIAGRTAPPGRRMGHAGAIVSGGQGGAEDKIAAMEEAGIRVSPSPSLLGETLAEVLKERV

SEQ ID NO: 23164 - protein, 575 aa, Desulfitobacterium hafniense Y51
MIQERYRFWLTSPYFDEDTRSEVAAINDEKEIEDRFYTDLEFGTGGLRGVLGAGTNRMNIYVIRKATQGLADLILEGEEAGKNRGVVIAYDSRRFSDRFAKEAALVLAGNGIKAYLFDDLRPTPELSFAVRHLKAQAGLVITASHNPKEYNGYKVYWEDGGQVPPDRADRILAHIKAHQAWDDILPLEEAEARAKGLLVEIGEEIDAVYLSKVKELALYPELSRAKGSNRSIVYTPLHGAGNVLVNRILTEMGYSVFTVPEQEKPDPEFTTVPYPNPEIPSTFDLARSYGKARNAQMLIATDPDADRLGMALRTPQGDYRQLTGNQVGTLLSYYLLTQKKRLGILPEQAVVIKTIASTDLADLLVKDLGARVENVLTGFKFIAEKEQEMEIQGSGDFQFGFEESYGYLAGHFVRDKDAVIASLLLAEAALYYQEKEGRSLLEVLEDIYGKYGYFIDDQISITLEGKAGKEQMEKMMVKLRETDVKSFGGIAVACIDDYELRKGRRMIAPFHSYELALPQSNVIRYSFQGGGFVMARPSGTEPKIKFYFNIRGVDPQRLQATLENVKKDLLELIKD

SEQ ID NO: 23165 - protein, 205 aa, Aspergillus oryzae
MSSRKKVLLKVIILGDSGVGKTSLMNQYVNKKFSASYKATIGADFLTKEVLVDDRLVTMQIWDTAGQERFQSLGVAFYRGADCCVLVYDVNNSKSFEALDSWRDEFLIQASPRDPENFPFVVIGNKIDVEESKRMISSKRAMTFCQSKGNIPYFETSAKEAVNVEQAFEVIARSALAQEEAEEFSGEFSDPINIHLDSERDGCAC

SEQ ID NO: 23166 - protein, 135 aa, Triticum aestivum
  misc_feature (24)..(24): Xaa can be any naturally occurring amino acid
  misc_feature (41)..(41): Xaa can be any naturally occurring amino acid
  misc_feature (56)..(56): Xaa can be any naturally occurring amino acid
  misc_feature (65)..(65): Xaa can be any naturally occurring amino acid
  misc_feature (78)..(78): Xaa can be any naturally occurring amino acid
  misc_feature (82)..(82): Xaa can be any naturally occurring amino acid
  misc_feature (103)..(103): Xaa can be any naturally occurring amino acid
  misc_feature (105)..(105): Xaa can be any naturally occurring amino acid
  misc_feature (107)..(107): Xaa can be any naturally occurring amino acid
MARLNSKAVVSAVVLAAVVLMMAXKGKATALSCGQVDSKLXAPCVPTDRGKAPPIXQGCCSGVQXAERLGRSSPGPQXACKXLKDLATSINSINMDKSPGVPXNXAXQLPFPINISTNCNMTIQYIPSRTSSKDP

SEQ ID NO: 23167 - protein, 385 aa, Brassica napus
  misc_feature (180)..(180): Xaa can be any naturally occurring amino acid
  misc_feature (335)..(335): Xaa can be any naturally occurring amino acid
MERARRLAYRGIVRRLVNESKRHRNGEITPHHVPSVVPHAPSRYISSLSPFLSNNHHRSVNLPKHHHHNHNQTRSISVDAVKAGDTFPRRHNSATPDEQAHMAKYCGYDHIDSLVDDTVPKQIRIDSMKFSKSARAPAESEMIAHMTELASKNKVFKSFIGMGYYNTHVPTVIIRNILEXNPAWYTQYTPYQAEISQGRLESLLNFQTMITDLTGLPMSNASLLDEGTAAAEAMAMCNNIQKGKKKTFVIASNCHPQTIEICKTRADGFDLKVVTKDLKEIDYSCGDVCGVLVQYPGTEGEVLDYGEFVKNAHANGVKVVMATDLLALTVLKPPXEFGADIVVGSAQRFGVPMGYGGPHAAFLATSSEYKRMMPGRIIGVSVDST

SEQ ID NO: 23168 - protein, 429 aa, Halobacterium salinarum
MAQTPPPESAPSTDSEPETALETARRQLQAAAEHVDIADGVIERLTHPTRVVQVSVPVERDDGTVTVYDGYRAQHDDVRGPYKGGLRYHPGVSAEECVGLSMWMTWKCAVMDLPFGGAKGGVVVDPKTLSADEHERLTRRFAAELRDEVGPSQDIPAPDMGTDAQTMAWFMDAYSMQQGETVPGVVTGKPPVAGGSHGRAEAPGRSVAIATREAINYYDIPIDDATVAVQGYGSVGANAALLLDDWGARVVAVSDVNGGVLDTDGLDTHAIPSHGNQPAAVMRHDAPNTLTNEELLELDVDVVIPAAVGNVITAANADRIQADIVVEGANGPTTSAADRILEERAVPVIPDILANAGGVTVSYFEWLQDINRRTWSPERVRDELESEMLSAWNAVRSEVDDGDLSWRDAAYVVALQRIGRAKEARGLWP

SEQ ID NO: 23169 - protein, 473 aa, Lactococcus lactis
MKWSTKQRYRTYDSYSESDLESLRKLALKSPWKSNFHIEPETGLLNDPNGFSYFNEKWHLFYQHFPFGPVHGLKSWVHLVSDDLVHFEKTGLVLYPDTKYDNAGVYSGSALAFENFLFLIYTGNHRGEDWVRTPYQLGAKIDKNNQLVKFTEPLIYPDFSQTTDHFRDPQIFSFQGQIYCLIGAQSSQKNGIIKLYKAIENNLTDWKDLGNLDFSKEKMGYMIECPNLIFINGRSVLVFCPQGLDKSIVKYDNIYPNVYVIADDFTTGSKNQLKNAGQLINLDEGFDCYATQSFNAPDGSAYAISWLGLPETSYPTDKYNVQGVLSMVKKLSIKDNKLYQYPVEKMKELRQMEQDLLLADNNIITSNSYELEVDFRQQTSTLLSLMTNEKGDSALKVEIDKENNTITLIRNYEKRLAHVKIEKMNVFIDQSIFEIFINDGEKVLSDCRVFPNKNQYSIRSQNPIKIKLWELKK

SEQ ID NO: 23170 - protein, 579 aa, Bacteroides fragilis YCH46
MAKKVAEQLVDTLIEAGVRRIYAVTGDSLNEVNEAVRQNEAMKWIHVRHEETGAYAAGAEAQLTGLPGCCAGSSGPGHVHLINGLYDAHRSGAPVIAIASTIPTGEFGTEYFQETNTVKLFNDCSFYNEVATTPEQFPRMLQSALQTATTRKGVAVVGLPGDLAKKPAVKVESSEQIYPLASSVCPAEEDLIRLAGMLNHYERITLFCGIGCKGAHEEIIRMSETLNAPVAYTFKGKMEVQYDNPYEVGMTGLLGMPSGYYSMHEAEVLVMLGTDFPYSAFLPDDIKIVQVDIKPERLGRRAKVDLGLCGDVRSTLRALLPMLQQKKNDSFLRKQLKRYEGVKKDLAAYTEDKGKMDQIHPEYVMSEINNISSDDAIYTVDTGMTCVWGARYLQATGKRHMLGSFNHGSMANALPQAIGAALACPDRQVIALCGDGGLSMTLGDLETVVQYKLPIKIIVFNNRSLGMVKLEMEVDGLPDWQTDMLNPNFAQVAEAMGMTGFNVSDPEEVLNTLCNAFELEGPVLINVMTDPNALAMPPKIELGQMVGFAQSMYKLLINGRSQEVIDTINSNFKHIREVF

SEQ ID NO: 23171 - protein, 111 aa, Thiomicrospira crunogena XCL-2
MQINITGHHIEITDALRDYVTEKMQKLTRHFDHVTNAHVILTVEKQQQKAEATVHASGKDLFAEHTCDDMYASIDALIDKLDRQIIKHKEKIGSHHQKSGGVKNMTTEEEA

SEQ ID NO: 23172 - protein, 462 aa, Bacillus subtilis subsp. subtilis str. 168
MPDQLTVYNPATGEEIKTIPQQSATEVEEAIERSHQAFKTWSKTSANERTSLLKKWYELIVEHKEELADLITKENGKPYQEAVGEVLYGAGYIEWFAEEAKRVYGRTVPAPTTGKRIVVTRQPVGPVAAITPWNFPNAMITRKAAPALAAGCTFIIKPAPDTPLSAYELARLAYEAGIPKDVLQVVIGDGEEIGNVFTSSPKIRKITFTGSTPVGKILMKNSADTVKHVSMELGGHAPLIVDEDADIDLAVEQAMASKYRNAGQTCVCANRLIVHESIKDEFAAKLSEQVSKLKVGNGLEEGVNVGPIINKRGFEKIVSQIDDAVEKGAKVIAGGTYDRNDDKGCYFVNPTVLTDVDTSMNIMHEETFGPVAPIVTFSDIDEAIQLANDTPYGLAAYFFTENYRRGIYISENLEYGIIGWNDGGPSAVQAPFGGMKESGIGREGGSEGIEPYLETKYLSIGL

SEQ ID NO: 23173 - protein, 320 aa, Staphylococcus aureus subsp. aureus MRSA252
MKMINKLIVPVTASALLLGACGASATDSKENTLISSKAGDVTVADTMKKIGKDQIANASFTEMLNKILADKYKNKVNDKKIDEQIEKMQKQYGGKDKFKKALQQQGLTADKYKENLRTAAYHKELLSDKIKISDSEIKEDSKKASHILIKVKSKKSDKEGLDDKEAKQKAEEIQKEVSKDPSKFGEIAKKESMDTGSAKKDGELGYVLKGQTDKDFEKALFKLKDGEVSDVVKSSFGYHIIKADKPTDFNSEKQSLKEKLVDQKVQKNPKLLTDAYKDLLKEYDVDFKDRDIKSVVEDKILNPEKLKQGGAQGGQSGMSQ

SEQ ID NO: 23174 - protein, 354 aa, Bipolaris oryzae
MAEFVRAQIFGTTFEITSRYTDLQLVGMGAFGLVCSAKDQLTNQAVAVKKIMKPFSTPVLSKRTYRELKLLKHLRHENIISLSDIFISPLEDIYFVTELLGTDLHRLLTSRPLEKQFIQYFLYQILRGLKYVHSAGVVHRDLKPSNILVNENCDLKICDFGLARIQDPQMTGYVSTRYYRAPEIMLTWQKYDVEVDIWSAGCIFAEMLEGKPLFPGKDHVNQFSIITELLGTPPDDVIQTICSENTLRFVQSLPKRERQPLANKFKNAEPDAVDLLENMLVFDPRKRVRAEQALAHAYLAPYHDPTDEPVADEKFDWSFNDADLPVDTWKIMMYSEILDYHNVDAAVQEQENGS

SEQ ID NO: 23175 - protein, 137 aa, Lotus japonicus
AGGAYETFKKNLPTNSVLFYTVILEIAPTAKDMFSFLKESGPKHSPQLQAHAEKVFALTRDAATQLVAKGEVTLADASLGAVHVQKAVTDPHFVVVKEALLQTVKEAVGADEWSDDLSTAWEGAYDGLATAIKKAMG

SEQ ID NO: 23176 - protein, 486 aa, Pseudomonas aeruginosa UCBPP-PA14
MIKHWINGREVESKDVFENYNPATGELIGEVASGGAAEIDAAVAAAREAFPKWANTPAKERARLMRRLGELIDRNVPHLAELETLDTGLPIHQTKNVLIPRASHNFEFFAEVCTRMNGHSYPVDDQMLNYTLYQPVGVCGLVSPWNVPFMTATWKTAPCLALGNTAVLKMSELSPLTANELGRLVHEAGIPPGVFNVVQGYGASAGDALVRHRDVRAVSFTGGTATGRRIMEAAGIKKYSMELGGKSPVLVFEDADLERALDAALFTIFSLNGERCTAGSRIFVQESVYPQFVAEFAARARRLIVGDPQDPKTQVGSMITQAHYDKVTGYIRIGLEEGATLVAGGLERPTGLPAHLSKGQFIQPTVFADVDNRMRIAQEEIFGPVVCLIPFKDEAEALRLANDVEYGLASYIWTQDIGKAHRLARGIEAGMVFINSQNVRDLRQPFGGVKASGTGREGGEYSFEVFAEIKNVCISMGSHHIPRWGV

SEQ ID NO: 23177 - protein, 430 aa, Photorhabdus luminescens subsp. laumondii TTO1
MEHVSTSTLLIILIIMVIVSAYFSASETGMMTMNRYRLRHLAKQGNHSARRVEALLRHPEQLISLILIGNNLVNILASALATIIGMRLYGDAGVAIATGILTFIVLIFSEVMPKTIAALYPEKVAFPSSFLLRPLQKIMLPLVWVLNKITLLLMRCLGIKQPTGSSHAMSKDELRTIVHESNAKLSQQHQDMLISILDLEKVTIGDIMVPRNEIVGIDINDDWKSIIRQLTHSPHGRIVLYRDSLDDAIGMLRVREAYRLMTEKKEFTKRNLIKAADKIYYVPVSTPLNIQLVNFQRNKEKAGLIVDEYGDIQGLVTVEDILEEIVGDFTTSMSPSLAEEVSPQSDGTILVDGTANIRELNKAFNWALPVDGPRTVNGMVLEELGEIPALNVQVQIGKYNFEVLSVNDNVIKQVRVTPISLFSDQKAQVI

SEQ ID NO: 23178 - protein, 321 aa, Coxiella burnetii
MNKPQHHSLIILGSGPAGYTDAIYVARANLKPIMITGMEQGGQLMTTTDVANWPGEAPGLQGPKLLERMQKHAGGALNTQFIFDHINKPDLNPRPFLLQGDNATYSCDALIIATGASARYLGLPSEKPYMGKGVSACATCDGFFYRAKKVAVVGGGNTSVEEALYLSHIASHVTLIHRRDKLRAEKMLSAQLIKKVEEGKVAIVWSHVIEEVLGDDQGVTGVHLKHVKEEKTQDLTIDGLFIAIGHDPNTKIFKEQLEMDEAGYLRAKSGLQGNATATNIPGVFPAVVVRGQLYRQTIAAAGMGCMPALDAERYLDSLNQA

SEQ ID NO: 23179 - protein, 465 aa, Vigna radiata
MAVARSDSNSEPCTSYNCYNVAALTETILETSQVSNLKDRYVLGEQLGWGQFGVQDCSDKLTGEVLACKSIAKDRLVTSDDLRSVKLEIEIMARLSGHPNVVDLKAVYEEEGFVHLVMELCAGGELFHRLEKHGWFSESEARVIFRHLMQVVLYCHENRVVHRDLNPENILLATRSSSSPIKLADFGLATYIKPGQSLHGLVGSPFYIAPEVLAGAYNQAADVWSAGVILYILLSGTPPFWGKTKSRIFEAVKAASLKFPLEPWDRISESAKDLIKGMLCTDPSRRLTAQEVLDHCWMESNQTNQEQLGENQIQSCKQWDVGGSSFSASFSPGIRTLAFSLALLHVMLNRPTFTCRSSFSSFLEEPVTPCVLSAGFSFKSVGDSSGLEFSSPIPSMLSFSFLSPSPVVEHKSCKLGCSANMSDVDAIAGEASLESYFYYKILNLCIEHDAKETNRKPTEAKRSIE

SEQ ID NO: 23180 - protein, 453 aa, Salinibacter ruber DSM 13855
MAQSGDRSPTARLGLLDATMVGMGAMIGAGIFVLTGLAAEIAGPAAILVFALNGVVTVLTGISYAELASAIPKSGGGYVFVREVFSGPTSFLMGWMLSFAYMIAGALYALGFSSNFVEFVHLYWAGLPTGPVWHILYALTVVGLFALLNAVSTEASGGAETVVTIIKIIILLVFAGFGAFAVEGSNFEPFFAKDDSSVAILKAMGLTFIAFEGYDLIATVTEEVENPRENIPKAIFISLVATVAIYLIVVWVAIGTLGAEELGRAGETGIAEAATSFMPTIPLLGEGAALIVFGAVFSTVSALNAVVIASSRVVFAMGREDQLPNPLGQISARFGTPLAAVVVSAAVMLGSVVFLPIEQVGRVSSLFFLVSFVVVNWSVIRLRNRRPNMRRPFEMPFYPAIPILAIVLNLVLAYFLLRDDPYTLVLGVGWIAIGGLVYAALQWRRTETEAAGA

SEQ ID NO: 23181 - protein, 110 aa, Arabidopsis thaliana
  misc_feature (83)..(83): Xaa can be any naturally occurring amino acid
MPSSMLSSATMVASPAQATMVAPFNGLKCYAAFPATLKANNDITSITSNGGRDNCIAVWPALGKKKFETLSYRSDLTDSELAXGVHYLIPNQGVSCVKFEVEHGFVYPEH

SEQ ID NO: 23182 - protein, 130 aa, Oryza sativa
  misc_feature (77)..(77): Xaa can be any naturally occurring amino acid
MAASVMASLALKPSASPLLERSKLRGKGTMARPSLIIVAKKAKKIQTSQPYGPAGGVVFKEGVDASGRVAKGKGLYXQFSNKYGANVDGSSQYIPQKDWSSPGDVYVGGKAGYFSGAITLAAILVERRYH

SEQ ID NO: 23183 - protein, 274 aa, Glycine max
MWSALKRNYEVSEEIGRGRFGTIFRCFHPLSNQPYACKLIDKSLLLDSTDRHCLQNEPKFMSLLSPHPNILQIFHVFEDDHYLSIVMDLCQPHTLFDRMLHAPFSESQAASLIKNLLEAVAHCHRLGVAHRDIKPDNILFDSADNLKLADFGSAEWFGDGRSMSGVVGTPYYVAPEVLLGREYDEKVDVWSCGVILYIMLAGIPPFYGDSAAEIFEAVVRANLRFPSRIFRTVSPAAKDLLRKMISRDSSRRFSAEQALRHPWILSAGDTAELT

SEQ ID NO: 23184 - protein, 89 aa, Triticum aestivum
PRVSSAIAPCLSYARGQGSAPSAGCCSGVRSLNSAARTTADRRAACNCLKNAARGISGLNAGNAASIPSKCGVSVPYTISTSTDCSRVN

SEQ ID NO: 23185 - protein, 117 aa, Oryza sativa
MARAQLVLVAVVAALLLAAPHAAVAITCGQVNSAVGPCLTYARGGGAGPSAACCNGVRSLKSAARTTADRRTACNCLKNAARGIKGLNAGNAASIPSKCGVSVPYTISASIDCSRVR

SEQ ID NO: 23186 - protein, 101 aa, Arabidopsis thaliana
  misc_feature (6)..(6): Xaa can be any naturally occurring amino acid
  misc_feature (33)..(33): Xaa can be any naturally occurring amino acid
  misc_feature (41)..(42): Xaa can be any naturally occurring amino acid
  misc_feature (45)..(45): Xaa can be any naturally occurring amino acid
  misc_feature (53)..(53): Xaa can be any naturally occurring amino acid
  misc_feature (59)..(59): Xaa can be any naturally occurring amino acid
  misc_feature (61)..(61): Xaa can be any naturally occurring amino acid
  misc_feature (69)..(69): Xaa can be any naturally occurring amino acid
  misc_feature (78)..(78): Xaa can be any naturally occurring amino acid
MASSMXSSTAVVTSPAQATMVAPFTGLKSSASXPVNRKGNXXITXITSNGGKXSCMKVXWXPIGKKEVXTLSYLPDLXSDVEFAKEVLPFSEFPSFLKVGT

SEQ ID NO: 23187 - protein, 196 aa, Wolbachia endosymbiont of Protocalliphora sialia
GTGTGAAPVIAKAAREARAAVKDRAPKEKKILTVGVVTKPFGFEGVRRMRIAELGLEELQKYVDTLIVIPNQNLFRIANEKTTFSDAFKLADNVLHIGIRGVTDLMVMPGLINLDFADIETVMSEMGKAMIGTGEAEGEDRAISAAEAAISNPLLDNVSMKGAQGILINITGGGDMTLFEVDAAANRVREEVDENA

SEQ ID NO: 23188 - protein, 394 aa, Aspergillus oryzae
MEPQSNTAQSISADEIALYDRQIRLWGVKAQEKLRSANILLITFKALANEVAKNLVLAGIGTLTIVDHETVKEEDLGAQFFVTEEHKGQNRAQAAASSIHAMNPRVQLRIDTDDIHTKQPDFFAQFDVIIATELDFAMYTTINAACRIANRPFYAAGLHGFYGFVFADLISHDFVIERSKSNVPSATQETPTRSIVNITTKKENEKVIEMVTKRETYSPLILANTSPLPEDFTRLPRKRRQVTPLLTCLRALWEFQKLSGGCMPTFSRQDLELFTKLARDGHQELKLDISTLDSEFLRTFLQNLGSELSPVAAVVGGKLAQDVINVLSVREQPIQNLLLFDGEKSIAPIYPLHPFFPPEVENAMPVIHPAANSIPLNGDLTLQQPIIPPSGASV

SEQ ID NO: 23189 - protein, 129 aa, Brassica oleracea
VSCSAGPVGDDMFHWQATIMGPTDSPFSGGVFLVSIHFPPDYPFKPPKVSFAPRFTTDINSNGSICLDILKEQWSPALTISKVLLSICSLLTDPNPDDPLVPEIAHTYKTDRVKYESTARSWTQKYAMG

SEQ ID NO: 23190 - protein, 392 aa, Oryza sativa (japonica cultivar-group)
MLAAAASVKLSTAGTATAPKMALFKPLHLPPLFAAAAAAAGPRPLSLSARPLYRQQDPLFLASRVASPAPPPPSATADGARPVEAAPAGAAPEEAARRAKIGVYFATWWALNVIFNIYNKKVLNAFPYPWLTSTLSLAAGSAIMLASWATRIAEAPATDLDFWKALSPVAIAHTIGHVAATVSMAKVAVSFTHIIKSGEPAFSVLVSRFFLGEHFPAPVYFSLLPIIGGCALAAITELNFNMIGFMGAMISNLAFVFRNIFSKKGMKGKSVSGMNYYACLSMLSLVILLPFAFAMEGPKVWAAGWQKAVAEIGPNFVWWVAAQSVFYHLYNQVSYMSLDEISPLTFSIGNTMKRISVIVASIIIFHTPVQPINALGAAIAILGTFIYSQAKQ

SEQ ID NO: 23191 - protein, 224 aa, Candida glabrata CBS 138
MSKGPSFVTVRSEAISRESKTESLLGKYSTYAQAASSDATSQEKHLDEQIEKLLGERQDIIDNLTKIAEDTPNISASKQSQLQRHREILQEHWKNFRGIRSSIQQERNRLNLLFSVKNDIAQQQQATDNELFNDEEAYNQNESRRIDQSHNILDRLIVQAWETRENFNAQSSTLNSAGNKALQTLQRIPGVNLLIGKIGTRRRKNAIILASVTTICILFLFFTW

SEQ ID NO: 23192 - protein, 224 aa, Triticum aestivum
  misc_feature (222)..(222): Xaa can be any naturally occurring amino acid
MEDTTFPAGITGMEVGGVVFGASATPPHSSKILFLGGAGERIGPRHGTLKLVTVIGVYLEQSAVPFLTSRWQGKPAEELAGSADFFRDIVAGPFDKFTQVTLVDTLTGQEYSDKVTENCVNIWKSSEHYSVDEGHGSAATSELKAIFYPASFPTGSTIFFTHSADGVLQVAFSDDTKVPEQESARVDSRALSEAVLESIIGDNGVSPSARRSLAFRLCDLIXHK

SEQ ID NO: 23193 - protein, 458 aa, Prochlorococcus marinus subsp. pastoris str. CCMP1986
METKVKEDNVENLVIIGSGPAGYTAAIYAARANLQPLLVTGFNSGGIPGGQLMTTTFVENYPGFPDGVLGPELMDLMKAQAERWGTNLYESDVISIDTSKSPFELKTLEGSIKSNSIIIATGASANRLGVINEDKFWSKGISACAICDGATPQFRNEELAVIGGGDSACEEAAYLTKYGSKVHLLVRSEKLRASAAMIDRVKANSKIEIHWNTKVEKANGTDWLENVETINSHKGNVEIKVKGLFYAIGHTPNTKFLNNKIELDKKGYIACNSGRPETSIEGIFAAGDVVDSEWRQGVTAAGTGCMAALAAERWLAEKNLSKIIVRETSEPEKTLSSSSFNEEVTNEDTFNLNSEWQKGSYALRKLYHESNKPILVIFSSPSCGPCHVLKPQLKRVIKEFDGAVQGIEIDIDKDQEIAKQAGINGTPTIQLFKDKLLKKQWQGVKQRSEFKEAIQNII

SEQ ID NO: 23194 - protein, 78 aa, Anabaena variabilis ATCC 29413
MTDTQAKDIQDQIQEEVEQARAVCDISGSNSAECAAAWDAVEELQAEASHQRQDKKKNSLEQYCDDNPDAAECRVYDE

SEQ ID NO: 23195 - protein, 313 aa, Bacillus licheniformis ATCC 14580
MRNIIVGSRRSKLAMTQTKWVIKKLEELNPDFTFEIKEIVTKGDRILDVTLSKVGGKGLFVKEIEQAMLSGEIDMAVHSMKDMPSVLPEGLMVGCIPKREDARDVLISKGRQKLADLKQGAVVGTSSLRRSAQLLQMRPDLEIKWIRGNIDTRLKKLETEDYDAIILAAAGLSRMGWKDDVVTEFLDPESCLPAVGQGALAIECRGSDEELLSLFSRLNDRYTQLTVTAERAFLHAMEGGCQVPIAGFAKMDEDGVIELTGLVASPDGKTVYRETVKGKDPEAVGRECAAVMSEKGAKALIDRVKQELEDHEA

SEQ ID NO: 23196 - protein, 191 aa, Triticum aestivum
  misc_feature (132)..(132): Xaa can be any naturally occurring amino acid
ELHSFVVGLEGSPDLKAAREVADYLGTIHHEFHFTVQDGIDAIEEVIYHDETYDVTTIRASTPMFLMARKIKSLGVKMVLSGEGSDELLGGYLYFHFAPNKEEFHRETCRKVKALHQYDCLRANKATSAWGXEVRVPFTRSHNVRWHGPEWKCPQELGRSRMGQRKGPHDSTYCQDISTGEEIMTGKWLPI

SEQ ID NO: 23197 - protein, 273 aa, Staphylococcus aureus subsp. aureus MRSA252
MKFKIPENFNDLSLRDIFQQLKVPKKDLHHLNMSKDITINDKPARLMDKVHTGDDVFVPTIDEKSNYVPSYRYAQIKYEDDDMAIVMKPKGVKTHPNDLKESNTLMNHVIYTVDSDYVEPIHRLDQETVGLLIVAKNPLMKKILDRMLEDNDITRIYKANVKALLPLKPQTIDMPIGKDKFHSNKRRVSPTGQRAITHILTSKMIKETVCQLEIKLDTGRTHQIRVHLAEIGHPVIGDPLYGDSTLRQLELESYKIEFVHPLTKEVISVSLDD

SEQ ID NO: 23198 - protein, 293 aa, Helicobacter pylori J99
MPFVEEEFEILKPTKALFLVRDVLKCSLKEAQRHLDKQRLKQNQQTVRKSQIIQGVVRLIYFKPNEKQEKLVFEAKDFGVFDKPAQIYTHPKGYFYHESLLDCIQSHFGKNAHPAHRLDYETSGLVLAGKTLQSTKDLKALFMQKKVKKTYLALAHGLVDKSIIINKPILTPQNIQKDLRIRSQISPLGKPSITLVEPLSYNPFLDISLLKITPLTGRTHQIRLHLSSVDHRIVGEGLYGVADENAREYLQLKRENNAPTLMLHAASLEFEFKGAHYKIASPMPERFMPFLKD

SEQ ID NO: 23199 - protein, 482 aa, Oryza sativa
MECVRSGSGVLDPRCSPRFLGKKGGSLTSCGKATSTNLAICTKHEQNLHGNVKPSQLAASGSSYSVHRSPVLKQRQNLSARSTSADVYTTFDENVRAVSSHAAEEKVGVLLLNLGGPETLDDVQPFLFNLFADPDIIRLPRLFRFLQRPLAKLISTFRAPKSKEGYASIGGGSPLRKITDEQANALKVALKKKNLNANIYVGMRYWYPFTEEAIDQIKKDKITKLVVLPLYPQYSISTSGSSIRVLQNIVKEDSYFAGLPISIIESWYQRDGYVKSMADLIEKELSIFSNPEEVMIFFSAHGVPLTYVTDAGDPYRDQMEDCIALIMGELKSRGILNSHTLAYQSRVGPVQWLKPYTDEVLVELGQQGVKSLLAVPVSFVSEHIETLEEIDMEYKELALESGIENWGRVPALGCTSSFISDLADAVVEALPSASALVTKKVDESDSDMDLMHYLSKMFFGSILAFVLLLSPRLISAFRNTLL

SEQ ID NO: 23200 - protein, 288 aa, Escherichia coli W3110
MAAKIIDGKTIAQQVRSEVAQKVQARIAAGLRAPGLAVVLVGSNPASQIYVASKRKACEEVGFVSRSYDLPETTSEAELLELIDTLNADNTIDGILVQLPLPAGIDNVKVLERIHPDKDVDGFHPYNVGRLCQRAPRLRPCTPRGIVTLLERYNIDTFGLNAVVIGASNIVGRPMSMELLLAGCTTTVTHRFTKNLRHHLENADLLIVAVGKPGFIPGDWIKEGAIVIDVGINRLENGKVVGDVVFEDAAKRASYITPVPGGVGPMTVATLIENTLQACVEYHDPQDE

SEQ ID NO: 23201 - protein, 196 aa, Wolbachia endosymbiont of Drosophila innubila
  misc_feature (24)..(24): Xaa can be any naturally occurring amino acid
  misc_feature (29)..(29): Xaa can be any naturally occurring amino acid
  misc_feature (60)..(60): Xaa can be any naturally occurring amino acid
  misc_feature (64)..(64): Xaa can be any naturally occurring amino acid
GTGTGAAPAIAKAAREARAVVKDXGAKEXKILTVGVVTKPFGFEGVRRMRIAELGLEELXKYVXTLIVIPNQNLFRIANEKTTFADAFQLADNVLHIGIRGVTDLMIMPGLINLDFADIETVMSEMGKAMIGTGEAEGEDRAISAAEAAISNPLLDNVSMKGAQGILINITGGGDMTLFEVDAAANRVREEVDENA

SEQ ID NO: 23202 - protein, 160 aa, Solanum tuberosum
MSDEEHHFESKADAGASKTYPQQAGTIRKSGYIVIKGRPCKVVEVSTSKTGKHGHAKCHFVAIDIFNGKKLEDIVPSSHNCDVPHVNRTDYQLIDISEDGFVSLLTENGNTKDDLRLPTDDALLNQVKGGFEEGKDLVLSVMSAMGEEQICAVKDIGTKS

SEQ ID NO: 23203 - protein, 123 aa, Brassica napus
MMVVEEERSMEEGLLKLKNQNDTSHCRITACVILSTFVAVCGSFSFGVAVGYTSGAEIGIMQDMGLSIAEFSAFGSFSTLGAAVGALFSGKMAIMLGRRGVYIFLPFHNLPVLCLVEFDNIVF

SEQ ID NO: 23204 - protein, 196 aa, Wolbachia endosymbiont of Protocalliphora sialia
GTGTGAAPVIAKAAREARAVVKDKGAKEKKILTVGVVTKPFGFEGVRRMRIAELGLEELQKYVDTLIVIPNQNLFRIANEKTTFADAFQLADNVLHIGIRGVTDLMVMPGLINLDFADIETVMSEMGKAMIGTGEAEGEDRAISAAEAAISNPLLDNVSMKGAQGILINITGGGDMTLFEVDSAANRVREEVDENA

SEQ ID NO: 23205 - protein, 196 aa, Wolbachia endosymbiont of Drosophila simulans
GTGTGAAPVIAKAAREARAVVKDKGAKEKKILTVGVVTKPFGFEGVRRMRIAELGLEELQKYVDTLIVIPNQNLFRIANEKTTFADAFQLADNVLHIGIRGVTDLMIMPGLINLDFADIETVMSEMGKAMIGTGEAEGEDRAISAAEAAISNPLLDNVSMKGAQGILINITGGGDMTLFEVDSAANRVREEVDENA

SEQ ID NO: 23206 - protein, 989 aa, Staphylococcus aureus subsp. aureus N315
MNMKKKEKHAIRKKSIGVASVLVGTLIGFGLLSSKEADASENSVTQSDSASNESKSNDSSSVSAAPKTDDTNVSDTKTSSNTNNGETSVAQNPAQQETTQSSSTNATTEETPVTGEATTTTTNQANTPATTQSSNTNAEELVNQTSNETTSNDTNTVSSVNSPQNSTNAENVSTTQDTSTEATPSNNESAPQNTDASNKDVVSQAVNPSTPRMRAFSLAAVAADAPAAGTDITNQLTDVKVTIDSGTTVYPHQAGYVKLNYGFSVPNSAVKGDTFKITVPKELNLNGVTSTAKVPPIMAGDQVLANGVIDSDGNVIYTFTDYVDNKENVTANITMPAYIDPENVTKTGNVTLTTGIGTNTASKTVLIDYEKYGQFHNLSIKGTIDQIDKTNNTYRQTIYVNPSGDNVVLPALTGNLIPNTKSNALIDAKNTDIKVYRVDNANDLSESYYVNPSDFEDVTNQVRISFPNANQYKVEFPTDDDQITTPYIVVVNGHIDPASTGDLALRSTFYGYDSNFIWRSMSWDNEVAFNNGSGSGDGIDKPVVPEQPDEPGEIEPIPEDSDSDPGSDSGSDSNSDSGSDSGSDSTSDSGSDSASDSDSASDSDSASDSDSASDSDSASDSDSASDSDSASDSDSASDSDSASDSDSASDSDSASDSDSASDSDSASDSDSDSDSDSDSDSDSDSDSDSDSDSDSDSDSDSDSDSDSDSDSDSDSDSDSDSDSDSDSDSDSDSDSDSDSDSDSDSDSDSDSDSDSDSDSDSDSDSDSDSDSDSDSDSDSDSDSDSDSDSDSDSDSDSDSDSDSDSDSDSDSDSDSDSDSDSASDSDSDSDSESDSDSDSDSDSDSDSDSDSDSDSESDSDSDSDSDSESDSDSDSDSDSDSASDSDSGSDSDSSSDSDSDSTSDTGSDNDSDSDSNSDSESGSNNNVVPPNSPKNGTNASNKNEAKDSKEPLPDTGSEDEANTSLIWGLLASLGSLLLFRRKKENKDKK

SEQ ID NO: 23207 - protein, 306 aa, Glycine max
GSRFSLGQKKGWCFTCEFEYLIQKAKEGISPLSPIGILSKIHKIGSHLGRGKEEDAHEFLRCVVDTMQSICLKEVGVSSPLAEETTLVSYTFGGYLRSKIKCLRCLGKSERYERMMDLTVEIDGDIGTLEEALGQFTAPEILDKDNKYNCSRCKTYVKARKKLTVLEAPNILTIVLKRFQSGNFEKLNKSVQFPEVLNMAPYMSGTKDKSPLYSLYAVVVHLDLDIMNAAFSGHYVCYVKNIQGEWFRTDDSRVEPVELSRVLSERAYMLLYARHSPKPLGLVSSNVISSAGKFKRREPGSHSCYF

SEQ ID NO: 23208 - protein, 189 aa, Allium cepa
WMNDPDGPMYYNGWYHFFYQYNPDGAVWGNIAWGHAVSKDLLNWLHLPLALVPDRPYDVDGVFTGSATVLPDGRIFMIYTGPFNTSTQVQNVAVPANPSDPLLINWVKLDSINPAIIAPPGILPADFRDPTSAWFEPIDSTWRISIGSKDENNSGIALIYSTIDFERYTLLPGTLHAVDDVGMWECVDL

SEQ ID NO: 23209 - protein, 754 aa, Haloarcula marismortui ATCC 43049
MSDDELAKDLGLVSAMTIGIGTMIGAGIFVLPGVAANAAGPVVVVSFVVGGLIAMVNALSVSELGTAMPKAGGGYYYINKSLGPLFGSIAGMGDWMGLAFASAFYCIGFGQYLAVFVPLPEVAFLNPIQIGALIAGAIFVAVNYIGAKETGGVQTVIVFILLSILTVFAVAGFFAFDYATLAGADGLAPFGTGAILPATALVFVSFLGYAKIATVAEELKNPGRNLPIAIIGSVGIVTVIYAILVSMMLGVVPWPELSQDAPVAQAAQLAFPESIGPIGGVAAGAAAVMTVGALLATASSANASILASARINFAMGRDKIVTNWLNEIHPNYATPYRSILVTGGLIIVFIAFLGRDIEVLAKAASVLHLIVYALLNVGLIVFRETDAPEYDPDFTVPLYPITPILGAVLSLGLVAFMDSIEIALSAGFVLVAVVWYFVYARGKTTQKGVLSDYISDREEQLPDQVVNAADAVAPNGAGGPTIMVALANPRTESALITLASALAQHEDGRVLATHIATVPDQTALETAAANRDRIDATSESLLDTAKADAEAFDVPIETKTILSHRGIEEVFDAARTNHADTVVMGYGGTQFAGGRAEGTLDELAHDLPCDFLVLDGQDLDLSDVLVPTAGGLSSDLSAAVAKALEETFGVAVSLLHVVDPGEEESGRQFMYEWAAEHGLSDAELRIETGDIEATIERLGRDYSLVIVGATERGLLSRIVRGSLVFDVIETLDTPVLLAERPSSRSLRERLFGRE

SEQ ID NO: 23210 - protein, 208 aa, Zea mays
GFPSLKAATASAAPSVHPQCVLSVRRRPFLLRSFAAAMVKYSQEPGNPTKSAKAMGRDLRVHFKNTRETAFALRKLPLTKAKRYLEDVIAHKQAIPFRRYCGGVGRTAQAKSRHSNGQGRWPVKSARFILDLLKNAESNADVKGLDVDNLYVSHIQVNQAQKQRRRTYRAHGRINPYMSSPCHIELILSEKEEPVKKEADNIVAARKQ

SEQ ID NO: 23211 - protein, 430 aa, Desulfitobacterium hafniense DCB-2
MSDDRFDAIVVGGGIAGTVTAYLLAKEGLEVMLVERGNYSGSKNVTGGRIYSHSLEKIMPNFAQEAPVERKITREKISLMTEESNVTLDFSSTKLGEQGRDSYSVLRGVFDQWLATKAEEAGVQIIPGIRVDDLILREGKVCGIIAGEDELEANVTILADGVNSLLAQKLGFRDELQPNQVAVGAKEIIELPAQTIEDRFNCKKGEGTSWLFAGTPSAGKVGGGFIYTNKESISLGVVSTLSELIKANKTLPQMLEDFKAHPSIEPLIKGGKMVEYSGHLVPEGGLTMVPKIIGHGVLVVGDAAGFCINLGYAVRGMDFAVGSAECAAKAVLKAKEAQDFSESSLQCYQLFLDESFVMKDLKQYRNFPHFLEETPRIFDGYPRLAADIMKDLFVVTDNPPQPLMKMMMKNIREIGLLNIAKDCWKGVRSL

SEQ ID NO: 23212 - protein, 133 aa, Solanum tuberosum
MAVPLLNKKVVKKRVKRFIRPQSDRRITVKESWRRPKGIDSRVRRKFKGCVLMPNIGYGSDKKTRHYLPNGFKKFVVHNASELEILMMHNRTYCAEIAHNVSTRKRKEIVERAAQLDVVITNKLARLHSQEDE

SEQ ID NO: 23213 - protein, 432 aa, Zea mays
MDEDAGGASPPPVPLAHVPPLQQPTTAAPSHRDMAASPTSSRSVTETVNGSHRFVIQGYSLAKGMGVGKHIASETFSVGGYQWAVYFYPDGKNPEDNSVYVSVFIALASDGTDVRALFELTLLDQSGKGKHKVHSHFDRSMESGPYTLKYRGSMWGYKRFFRRTALELSDYLKDDCLKINCTVGVVVSTIDYSIPHSIHVPDSDIGYDFGSLLDSQEGADVILNVGGERFHAHKLVLAARSHVFGSQFFDDESDGEKSEVNETDELKEFSIDDMEPNVFKAMLHFIYRDTLVDDDELGASSSDGSIFDTPAAKLLAAADKYHLARLKSLCESYLCKGISVASVASTLALADRHHAMELKAVCLKFAAENLSAVMRSEGFIYLKDNCPSLQSEILKTVAGCEDQCSSVGKSQSVCGQLSDGGDSSCRRVRQRT

SEQ ID NO: 23214 - protein, 834 aa, Pseudomonas sp. G-179
MTAELTRRDVLKAQAAAIAASTAGIAMPAAAQSVPGGVAALEIKWSKAPCRFCGTGCGVMVGVKENHVVATHGDMEAEVNRGLNCVKGYFLSKIMYGKDRLTTPLLRKRNGVFDKEGEFEPVTWEEAFDIMAEKAKKTLKEKGPTALGMFGSGQWTIFEGYAATKLMRAGFRSNNLDPNARHCMASAAYGFMRTFGMDEPMGCYDDFEHADAFVLWGSNMAEMHPILWTRLADRRLGHEHVKVSVLSTFTHRSMDLADIPLVFKPGTDLAILNYIANHIIQTGRVNQEFIDKNTKFMQATTDIGYGLRAEHPLEVKATGAAKAAEMTPIDFEAFKKHVSEYTLEKVAELAGVDKGFLEQLAELYADPKVKVMSLWTMGFNQHVRGVWANQMVYNIHLLTGKISEPGNSPFSLTGQPSACGTAREVGTFAHRLPADMTVTNPEHRKHAEELWNIPHGIIPEKPGYHAVQQDRMLHDGKLNFYWVQVNNNMQAAANNSNEAYIGYRNPDNFIVVSDAYPTVTAMTADLILPAAMWVEKEGAYGNAERRTHVWHQLVNAPGEARSDLWQLVEFSKRFTTDEVWPQDILDQNPEYKGKTLYDVLFQNGNVDKFPVSEISSDYENREAKAFGFYLQKGLFEEYASFGRGHGHDLGPYDLYHQVRGLRWPVVNNQETKWRYREGYDPYVKEGEGVKFYGQNDGRAVILAAPYEPPAESPDDEFGFWLVTGRVLEHWHSGSMTMRVPELYKAFPGARCFMNGDDARRLGINQGGQVKIQSRRGEIISRVDIRGRNRMPHGVIFVPWFDASQLINKVTLDATDPISKQTDFKKCAVKILPVA

SEQ ID NO: 23215 - protein, 615 aa, Schizosaccharomyces pombe
MAGSVDKPSYELFSKDTRAFVYGMQTKAVQGMLDFDYMCGRTVPSVAAIIYTFGSQSISKLYWGTKEILLPVYRTIEEACTKHPEVDVVVNFASSRSAYASTMELMEFPQIRCIAIIAEGVPERRAREILVTSKEKNVVIIGPATVGGIKPGCFKIGNTGGMMDNIVASKLYRPGSVAYVSKSGGMSNELNNIISHTTDGVYEGIAIGGDRYPGTTFIDHLIRFEADPACKLMVLLGEVGGVEEYRVIEAVKNGTIKKPIVAWAIGTCSSMFKTEVQFGHAGSFANSELETAVAKNQAMREAGIYVPETFEKLPALLQEVYEGLVKKGVIVPQPEVAPPNIPLDYAWAKELGLVRKPSSFICTISNDRGSELTYNNVPISKVFEEELGIGGVISLLWLRRRLPSYATKFLEMVLQLTADHGPCVSGAMNTIITTRAGKDLISSLVAGLLTIGTRFGGALDGAAQEFSKAYDAGLSPRAFVDSCRKANKLIPGIGHRIKSRNNPDLRVELVKGYVKKNFPSTKLLDYALAVENVTTSKKDNLILNVDGCIAVCFVDLLRNCGAFTLEEANEYINLGILNGMFVLGRSIGLIGHHLDQKRLRAPLYRHPWDDFLYLS

SEQ ID NO: 23216 - protein, 113 aa, Erwinia carotovora subsp. atroseptica SCRI1043
MTINITSKQMDITPAIRQHVEDRLSKLDKWQTQLINPHIILSKEPQGFVADATISTPNGPLVASAKHDDMYAAINELITKLERQLDKLQHKGEARRAVAGVKEANLQPTQEEE

SEQ ID NO: 23217 - protein, 335 aa, Bacillus licheniformis ATCC 14580
MAVKVGINGFGRIGRNVFRAALNNPEVEVVAVNDLTDANMLAHLLQYDSVHGKLDAEVSVDGSNLVVNGQTIQVTAERDPSKLSWGEQGVEIVVESTGFFTKRADAAKHLEAGAKKVIISAPASEEDITIVMGVNEDKYDAANHHVISNASCTTNCLAPFAKVLNDKFGIKRGMMTTVHSYTNDQQILDLPHKDYRRARAAAESIIPTTTGAAKAVSLVLPELKGKLNGGAMRVPTPNVSLVDLVAELDKEVTAEEVNAALKEAAEGELQGVLGYSEEPLVSKDYNGNTNSSTIDALSTMVMEGSMVKVISWYDNESGYSHRVVDLAAYIAKQGL

SEQ ID NO: 23218 - protein, 545 aa, Rubrivivax gelatinosus PM1
MSASWVRGDRTAAWADLSAHFAASAANFDLRTAFAGDARRFERFGVEAPHLFADLSKNWLDAPALALLLRLAREVGLEGRRDAMLAGAPLNNTEGRAVLHTALRAPRDAAPHGSEVHATLDAMLAFAERVRDTAHSGITDVVNIGIGGSDLGPQMAVPALQAYTQAGLRSHFVSNLDGHELAPLLTQLDPQSTLFIIASKTFTTQETMANAETAKAWFLARGGRDIARHFVATTTNVDAAVAFGIDTAFGFWDWVGGRYSLWSAIGLPVAIALGATHFRALLGGAHAMDRHFATAPLERNLPVLLGLLDVWYRNFHGLTSRSVAPYHQGLRRLPAYLQQLEMESNGKCVDRDGEPLPFATSPVVWGEPGTNAQHAYFQMLHQGSDVIPVEFIAVRDTSHAHLDLPPALQPLLAEQQRKLLANCLAQSQALMAGKSEAQALAERAPTAAADMPRDVLARHRSFPGNRPSTTLLLERLDPATLGALIAMYEHRVFTSGAVWGINSFDQWGVELGKAMCSELLPRLTTGDASGLDGSTVGLLRKLGTP

SEQ ID NO: 23219 - protein, 455 aa, Bacillus licheniformis ATCC 14580
MEKDMQKLERTMTSRHIMMMALGGAIGAGLFKGSSKAIDLAGPSVMIPYLIGGVILLFIMQGLAEMAVRNSEARTFRDLVQSILGPYAAYFLDWIYWKMWVLNIAAEAVVAAMFLQYWLPGLPIWVLALFVSLVITSVNLLSVKSFAETEYWLALIKITVIVVFIISGFILLFFSFGQHSAVGFTHLTDHGGFFPNGAGGLITAMLVVIYSYGGTEIIGVTLAETKNPEKVVPKAVRGTLTRIIAFYLLPFFVIVSLIPWNQVNGVSESPFVMVFKMIGVPGADHLMNAVILLAVISSMNSGLYGASRILYTQASDGRMPKIFSRLSARKVPVYSILLCTSFLYLGVLFSLFAGSQTFEYLMGSLGYTVLVIWMLIAAAHLKSRKRNQTAGNGYYVKWFPYTTWVAIISLTAILIGVILTTSIVITLVTAGIYLLISAAYFFKGRNQTAGQTAAS

SEQ ID NO: 23220 - protein, 352 aa, Clostridium pasteurianum
MAVVMDGVKKNIIDRTIPNLVKKFQNFNNDDIAYFLKLLHETGIDLFEINRDSMDKIKKFPLNLDYIYRIENIEDYNYLNNYNFKYIILNYKTIYRFLLEDEKIQKNLKEHNIILEIDIEDLDELYLSEDNKIFCIFNIVCLRINNLSKLDFIDEDFRIKDLKSKFNVLVDFCASNKYNMATAIIINAFLNGSDIITTEFNSNDYAAMEEVIIALKSIRNIEIRGDLKLISKLTRIYEKITSERVYSMKPILGEDIFKYESGIHADGIAKNPKNYEPFNPELIGTNRKLYIGKHSGKAALVVKFKELNLNCNNIDMNLFLQDIREKSIQEKRNVLDNEIIEMYKEYNKSYQR

SEQ ID NO: 23221 - protein, 120 aa, Photorhabdus luminescens subsp. laumondii TTO1
MIVNITSKQMEITPAIRNHVEKRLNKLNKWRVNLINPHIILSKGPQIFRADATISTPNGMLVAGAKHEDMYIAINELLTKLERQLNKVQHKGEARRTDNSVKESNLNLETPLETEPEISQ

SEQ ID NO: 23222 - protein, 269 aa, Clostridium pasteurianum
MGINIVDTTLRDGEQKAGIALSVQDKVEIAKIISEMGVHQIEAGIPAMGGDEKISVSKIAALGLPSKIAAWNRMSTKDIDTSIECGVDIVHISSPVSDLQIKTKLEKDRKWVAENLKRTVIYALEKDCEVTVGLEDSSRADLNFLIQLCEMIFALGVKRVRYADTVGIMEPKELYSQIKKIRDKVPIDIEIHVHNDFGMAISNSFAAFKAGAKFADCTITGMGERAGNCDFLKFVKVIQELTGEKIYTGDFEDIIEKENEIKKILRLNW

SEQ ID NO: 23223 - protein, 392 aa, Neisseria meningitidis Z2491
MEFVYDVAESAVSPAVIKVIGLGGGGCNAINNMVANNVRGVEFISANTDAQSLAKNHAAKRIQLGTNLTRGLGAGANPDIGRAAAQEDREAIEEAIRGANMLFITTGMGGGTGTGSAPVVAEIAKSLGILTVAVVTRPFAYEGKRVHVAQAGLEQLKEHVDSLIIIPNDKLMTALGEDVTMREAFRAADNVLRDAVAGISEVVTCPSEIINLDFADVKTVMSNRGIAMMGSGYAQGIDRARMATDQAISSPLLDDVTLDGARGVLVNITTAPGCLKMSELSEVMKIVNQSAHPDLECKFGAAEDETMSEDAIRITIIATGLKEKGAVDFVPAREVEAVAPSKQEQSHNVEGMIRTNRGIRTMNLTAADFDNQSVLDDFEIPAILRRQHNSDK

SEQ ID NO: 23224 - protein, 400 aa, Rubrivivax gelatinosus PM1
MVWMMAAGALVFFMQAGFALLESGMSRAKNAINVIMKNYCDTCFGAVAYWAVGFGLMFGANASGWIGTDRFLPHAMPEADYGLLFFQMMFAATAATIVSGAIAERARFWAYIVSSVLITGLIYPVFGSWAWGSLFSGQGWLREMGFIDFAGSTVVHSVGGWSALAAILVIGPRLGRFGPNGEARPMLGHNLTSVALGGFILWLGWFGFNGGSTAAATVGIGKIVLNTHLAGAAGAIGALAVLALGRQPVLMTAAVNGSIAGLVGITAGCHVMEPAYALLTGFVAGGLSVLAGWLLEAGRIDDVVGAVSVHAVGGVWGTLAAGLFKHDAMFDLRQLGVQAIGCGVAFAWSFGTALLMYWLLARGVGLRASTLDEQRGLDFTEHYEIGYPEFQQDAVHRGKR

SEQ ID NO: 23225 - protein, 437 aa, Xanthobacter autotrophicus Py2
MKLAEWLSATGTKRSAFAKQVGMSPASVTALCNDDRAWISRETAEKIAQATGHEVTPNDFLGLPAPSIRGLAVTDNTQARVQSAIEAFARGEIVVVTDDDDRENEGDLILAASLATPEKMAFVIRNTSGIVCTPLPPSEAKRLRLDPMVSNNDAPMGTAFTISIDVKHGTTTGISAEERTNTVRALANPNMGAADFVRPGHVFPLIAKEGGVLMRSGHTEAAVDLCRLAGVPPVGVIAELVNDDGTVQRGPQVTAFSEKHGLTRISVADLISYRQAREKLVTRAAEFPVPTCVGELQGFSYVTPFDPVNHLALVKGRIGDGEKVLVRLHRADPIADAFGGGKTIQRALERIEAEGRGVLVYLRDGTAGVPAVAMGHGGEKSSSEIERDRHWREVGLGAQILRDLGIVSIRLLASKSRTYVGLAGFGIEIVDTEPLDA

SEQ ID NO: 23226 - protein, 258 aa, Psychrobacter arcticus 273-4
MEEQIIICEQQENGVSVIRLNRPKVRNALNTELREQMAEIFNKLNDDVNTKAIVLTGGNKVFAAGADINDFLTAKTVDVYLRHSERYWDAITNCCKPIIAAVNGYALGGGCELAMHADIIVAGKSAKFGQPEIKIGLMPGAGGTQRLFRVIGKHKAMKLILTGDMISADEADQMGLVSEVVEDEATIKRAIEIAEQLAGYSPIALTQIKEVANLGVDMPLQAALALERKAFQILFDTEDQKEGAKAFLEKRSAEYKGR

SEQ ID NO: 23227 - protein, 771 aa, Coccidioides immitis RS
MASRTQNDTVIDDDDEICPLCIEEFDLSDKNFKPCPCGYQICQFCYNNIKTHSEEGRCPNCRRVYDENTIQYRVPDADELKADLALKHRKAAAAKKKEQEKREIEASSRKNLAGVRVVQKNLVYVIGLNPTIRDENQLLQTLRGDQYFGQYGEIEKIVVSKAKPGGNPNQGIGVYVTFAKKSDAASCIAAVDGSANGDRVLRAQYGTTKYCSSFLRNEQCNNRNCTFLHETGEDSDSFSRQDLSSMNTISSQRPHPNYPNVSANQSRAYTPGSQSGPSSSLSMQRHTNKDEGTRMPANDSPALPSSASWANKDALAHRTRRPSVAASCGTPSPKPATATIATKPEESRAATEKRTHQNVEESRQHTPTPGPSSRLEQRDSVSPRRPLSVSQDRGMVLYNLVKAINSPEFRFQFSAAGLSADELAFIENHPSLIDPYGGVKRRAMREKAEQERAKQEVEAKMLLHANQPEEETLEGGSSQLGGEPEESHSGPGPAGRSGREQQAIQPPSQQATASSSAVGSPVSAGHQFQSLNVNGRALTPLQQQQLMLLKSTTGQQSGLLDQLQTSSINGYDHNPLSRPSAFQNQMPPVGAISGHARQSSRFSFANESNAKNPNHRLLSQQAAVMQASTTNPMATANAQQHGLSSHFFTSGVQGPPPGLKTAGTPPVSGGGMFAQGHGFTSTMNNNLGLNVKQDGNADLMRELMRARSGTSGGGVQTLEATKLDLADPSILQARMHQSNATAVAGQGLYGSQGQGGYNHSNMVFNGGFARW

SEQ ID NO: 23228 - protein, 189 aa, Allium cepa
WMNDPDGPMYYNGWYHFFYQYNPDGAVWGNIAWGHAVSKDLLNWLHLPLALVPDRPYDIDGVFTGSATVLPDGRIFMIYTGLFNTSTQVQNVAVPANLSDPLLINWVKLDSINPAIIAPPGILPADFRDPTSAWFEPIDSTWRISIGSKDENNSGIALIYSTTDFERYTLLPGTLHAVDDVGMWECVDL

SEQ ID NO: 23229 - protein, 499 aa, Bdellovibrio bacteriovorus HD100
MADTAITPTRSQNYPEWYQQVIVAADMAENSPVRGCMVIKPWGYAVWENMQGVLDRMFKDTGHVNAYFPLLIPLSFLEKEAAHVEGFAKECAVVTHHRLKGDGNGKLIPDGELEEPLIIRPTSETIIGHQFAKWVKSYRDLPILVNQWCNVMRWEMRTRMFLRTAEFLWQEGHTVHATAKEAQEETLQMLNVYSEFAEQYMAMPVIKGMKTPDERFPGAVDTYTIEALMQDKKALQAGTSHFLGQNFAKASEIKYLSAEGKEEFAWTTSWGVSTRLIGGLIMTHSDDNGFVVPPRLAPLHVVIIPIYRNDEERAQVLDYVKALEKDLKAQNYVGSSVRVKIDDRDMRGGEKAWQYIKQGVPVRVEVGPRDMAKGEVFVGRRDRGPKEKASMERNAFVANITNLLQEMQDGLFERAKQMRDESIKTITNLQDFEKYFSGGENTAPGFAKVPWCEAGMGHELLAQLKVTPRCMPLDQEPVQGNCIFSGKPATKWVLFAKSY

SEQ ID NO: 23230 - protein, 189 aa, Allium cepa
WMNDPDGPMYYNGWYHFFYQYNPDGAVWGNIAWGHAVSKDLLNWLHLPLALVPDRPYDIDGVFTGSATVLPDGRIFMIYTGLFNTSTQVQSVAVPANLSDPLLIDWAKLDSINPAIIAPPGILPADFRDPTSAWFEPIDSTWRISIGSKDENNSGIALIYSTTDFERYTLLPGTLHAVDDVGMWECVDL

SEQ ID NO: 23231 - protein, 412 aa, Sulfitobacter sp. EE-36
MPVLVMKFGGTSVATLDRIRRAAKRVGVEVAKGYDVIVIVSAMSGKTNELVGWVNETSPLYDAREYDAVVSSGENVTAGLMALTLQEMDVPARSWQGWQVPVKTTSAHSSARIEEIPPANIMAKFGEGMRVAVVAGFQGVSPEGRITTLGRGGSDTTAVAFAAAFDAERCDIYTDVDGVYTTDPRVSAKARKLDKIAFEEMLELASLGAKVLQTRSVELAMRYKVKLRVLSSFEEQSDEAGTLVCAEEEIMESNVVSGIAFSRDEAKMTLVSVADRPGIAAAIFTALSDGGVNVDMIVQNISEEGRTDMTWSCPVDQIKRAEVAIDAAKKSGELNFDDLIADTDVAKVSVVGIGMRSHTGVAAKMFQVLSNEGVNIKVITTSEIKISVLIDRKYMELAVQALHDAFELDKRA

SEQ ID NO: 23232 - protein, 349 aa, Legionella pneumophila subsp. pneumophila str. Philadelphia 1
MFSRMLFCHRYFNVFIFVIIFAILTQKIRKAETMSISNHHRLIILGSGPAGYTAAVYAARANLNPVLITGMQPGGQLTTTTDVDNWPGDIEGLQGPALMERMQKHAERFDTQVIFDHIVKADLAQAPFTLQGDSTTYTCDALIIATGASARYLGLPSETAYQGRGVSACATCDGFFYRNKSVCVIGGGNTAVEEALYLSNLASSVTLIHRRDSLRAEKILQDKLFEKAHSGNIKIIWNSTLDEVLGDGKKVTGAMIRNLKTGETDQLAMDGIFIAIGHTPNTAIFQDQLAMRDGYILIKSGLDGMATSTSVPGVFACGDVADHVYRQAITSAGFGCMAALDAEKYLDSI

SEQ ID NO: 23233 - protein, 410 aa, Bartonella quintana str. Toulouse
MTTGIRVPTLGESVTEATIGKWFKKLGEAVAVDEPLVELETDKVTVEVPSPVMGKLTEIIAKEGDIVEVNAVLGFVESGAAGISQSFSPSATSIPEAPSELEQSPSSSATPSGTMPPAPSAAKLMAENNIAKSDISGSGKRGQILKEDVLGALAQGTKASTSVATLTASSSSAAPIQEMREERVRMTKLRQTIARRLKDAQNTAAMLTTFNEVDMSAVMDLRKRYKDLFEKKHGVKLGFMGFFTKAVCHALKEFPTVNAEIDGTDIVYKNYVNAGIAVGTDKGLVVPVVRDADQMSLAEIEKEISRLGRLARDGKLAVSDMQGGTFTITNGGVYGSLMSTPILNAPQSGILGMHAIKERAMVVGGQIIICPMMYLALSYDHRIVDGQEAVTFLVRVKESLEDPERLVLDL

SEQ ID NO: 23234 - protein, 544 aa, Oceanospirillum sp. MED92
MPANESVAWNDLQSHAYYMSQSHISTLFREETDRFSLYTFEQNKFLLDLSKQRITEETLALLIKLAEEKGLQQWIQKLFDGDHVNDSEDRPALHTALRTPADRILSINDKNIIDEVHSNLSRMEEIVERIHSGQWRGFTGHSIDTVVNIGVGGSDLGPFMACKALAENQADTAKSLKIHFVSSMDGSQLAELLSELNPARTLFVISSKSFTTIDTLANAQTAKEWLKKSSYAASEETLISRHFIGVSANPDKVCEWGIPKSNQLEFWDWTGGRYSMWSTIGLPIALKLGMSGFREFLNGAHEMDEHFRNAAFSENLPVLLAMAGIWNINFLNINAHAILPYDGRLSHIPAYLEQLEMESNGKSVDRQGNNVDYKTCPILWGEVGTNAQHAFYQLLHQGTEAVMCDFIVAARRYHDTNNPELQHQHQLNLANCLAQSRILALGDSVLEGAESAPAFKRYKGNQPCTTIMLDELNPFSFGQLIALYEHKVFVQSVIWDINPFDQWGVELGKKVATSLLDALGTERKQPDFDSSTNGLINRITERGE

SEQ ID NO: 23235 - protein, 189 aa, Allium cepa
WMNDPNGPMYYNGWYHFFYQYNPDGAVWGNIAWGHAVSKDLLNWLHLPLALVPDRPYDVDGVFTGSATVLPDGRIFMIYTGLFNTSTQVQNVAVPANLSDPLLINWVKLDSINPAIIAPPGILPADFRDPTSAWFEPIDSTWRISIGSKDENNSGIALIYSTIDFERYTLLPGTLHAVDDVGMWECVDL

SEQ ID NO: 23236 - protein, 584 aa, Schizosaccharomyces pombe
MKSTFEAAGRVAKGMLKDPSKKYKPFKGIQLPNRQWPNKVLTKAPRWLSTDLRDGNQALPDPMNGQEKLRYFKLLCSIGFKEIEVGFPSASQTDFAFVRHLIETPGLIPDDVTISALTPSREPLILRTIEALRGAKNATVHLYNACSPLFREVVFRNSKQETLDLAIKGSKIVTAATKNALESKETNWGFEYSPETFSDTEPDFALEVCEAVKGMWKPSAAQPIIFNLPATVEMSTPNTYADLIEYFSTNISEREKVCVSLHPHNDRGTAVAAAELGQLAGGDRIEGCLFGNGERTGNVDLVTLAFNLYTQGVSPNLDFSKLDEIIRITEDCNKINVHPRHPYAGNLVFTAFSGSHQDAISKGLKAYDERKAVDPVWKVPYLPLDPHDVNSEYAAIIRVNSQSGKGGVAYLLKTNCGLDLPRALQVEFGSIVKDYSDTKGKELSIGEISDLFYTTYYLEFPGRFSVNDYTLSSNGPQSKCIKCVVDIKGEKKDTPSRVVIEGVGNGPLSALVDALRRQFNISFDIGQYSEHAIGSGNGVKAASYVEIIFNNTSFWGVGIDADVTSAGLKAVMSGVSRASRAFAK

SEQ ID NO: 23237 - protein, 300 aa, Bartonella quintana str. Toulouse
MSILIHQNTKVLVQGLTGKTGTFHTEQALAYYGTKMVGGIHPKKGGEVWEGSRGESLPIFASVAEGKERTGADASVIYVPPSGAADAIIEAIEAEIGLIVCITEGIPVMDMVRVKVKLEQSKSRLIGPNCPGILTPHACKIGIMPGSIFRKGSVGVVSRSGTLTYEAVFQTSQEGLGQTTAIGIGGDPVKGTEFIDVLELFLADDETESIVMIGEIGGSAEEEAAQFLKDEAKKGRKKPIVGFIAGRTAPPGRTMGHAGAVISGGKGGAEDKIAAMESAGIHVSPSPSQIGKTLMVLLRG

SEQ ID NO: 23238 - protein, 645 aa, Lolium perenne
MESSAVVAQGTTSPLLPYAYAPLPSSADDARENQSSGGGVRWRACAASALVVLLVVVGFFAGGRVDLGQDGEVSATSSVPGSSRGKDSGVSEKESPADGGFPWSNAMLQWQHTGFHFQPLKHYMNDPNGPVYYGGWYHLFYQHNPYGDSWGNVSWGHAVSKDLVNWRHLPVALVPDQWYDINGVLTGSITVLPDGRVILLYTGNTDTFSQVQCLAVPADPFDPLLRSWIKHPANPILFPPPGIGLKDFRDPLTAWFEHSDNTWRTIIGSKDDDGHAGIVLSYKTTDFVNYELMPGNMHRGPDGTGMYECLDIFPVGGNSSEMLGGDSSPEVLFVLKESANDEWHDYYALGWFDAAANTWTPQDPEADLGIGLRYDWGKYYASKSFYDPIKNRRVVWAFVGETDSEQADKAKGWASLMSIPRTVELDKKTRTNLIQWPVEEIETLRRNVTDLGGITVEAGSVIHLPLQQGGQLDIEASFRLNSSDIDALNEADVGFNCSSSDGAAVRGALGPFGLLVFADGRHEQTAAYFYVSKGLDGSLLTHYCHDESRSTRAKDVVSRVVGGTVPVLDGETFSVRVLVDHSIVQSFVMGGRTTVTSRAYPTEAIYAAAGVYLFNNATSATITAEGLVVYEMASAESRAFLADDM

SEQ ID NO: 23239 - protein, 891 aa, Schizosaccharomyces pombe
MEYRTNNVPVGNETKSAALNALPKIKISDSPNRHHNLVDAFMQSPSYSTQPKSAVEPLGLSFSPGYISPSSQSPHHGPVRSPSSRKPLPASPSRTRDHSLRVPVSGHSYSADEKPRERRKVIGNYVLGKTIGAGSMGKVKVAHHLKTGEQFAIKIVTRLHPDITKAKAAASAEATKAAQSEKNKEIRTVREAALSTLLRHPYICEARDVYITNSHYYMVFEFVDGGQMLDYIISHGKLKEKQARKFVRQIGSALSYLHQNSVVHRDLKIENILISKTGDIKIIDFGLSNLYRRQSRLRTFCGSLYFAAPELLNAQPYIGPEVDVWSFGIVLYVLVCGKVPFDDQNMSALHAKIKKGTVEYPSYLSSDCKGLLSRMLVTDPLKRATLEEVLNHPWMIRNYEGPPASFAPERSPITLPLDPEIIREMNGFDFGPPEKIVRELTKVISSEAYQSLAKTGFYSGPNSADKKKSFFEFRIRHAAHDIENPILPSLSMNTDIYDAFHPLISIYYLVSERRVYEKGGNWNRIAKTPVSSVPSSPVQPTSYNRTLPPMPEVVAYKGDEESPRVSRNTSLARRKPLPDTESHSPSPSATSSIKKNPSSIFRRFSSRRKQNKSSTSTLQISAPLETSQSPPTPRTKPSHKPPVSYKNKLVTQSAIGRSTSVREGRYAGISSQMDSLNMDSTGPSASNMANAPPSVRNNRVLNPRGASLGHGRMSTSTTNRQKQILNETMGNPVDKNSTSPSKSTDKLDPIKPVFLKGLFSVSTTSTKSTESIQRDLIRVMGMLDIEYKEIKGGYACLYKPQGIRTPTKSTSVHTRRKPSYGSNSTTDSYGSVPDTVPLDDNGESPASNLAFEIYIVKVPILSLRGVSFHRISGNSWQYKTLASRILNELKL

SEQ ID NO: 23240 - protein, 188 aa, Allium cepa
WMNDPDGPLFYKGWYHLFYQYNPDSAVWGNITWGHAVSRDMINWRYLPLSLVPDHWYDSNGVWTGSATILPNDHVIILYTGSTNTLTQVQNLAVPADPTDPLLVDWIKSDANPVLVPPRGIGQKDFRDPTSAWYVESTSSWRVAIGSKTPDHAGIVLVYETKDFLNYNLLPGVLHEVPGTGMWECVEL

SEQ ID NO: 23241 - protein, 188 aa, Allium cepa
WMNDPDGPLYYKGWYHFFYQYNPEGAVWGNIAWGHAVSRDLVHWTHLPLAMVPDQWYDINGVWTGSATILPDGQIVMLYTGATSESVQVQNLAVPADQSDTLLLRWKKSEANPILVPPPGIGDKDFRDPTTAWYEPSDDTWRIVIGSKDSSHSGIAIVYSTKDFINYKLIPGILHAVERVGMWECVDL

SEQ ID NO: 23242 - protein, 421 aa, Ehrlichia chaffeensis str. Arkansas
MSLNICLPDQSLLRPRITVFGVGGAGGNAVNNMIQSNLHGVNFVVANTDAQALELSLSEKKIQLGIGLTKGLGAGSLPEVGRGAAEESINEIIEEISDSNMLFITAGMGGGTGTGAAPVIARVAKENKILTIGVVTKPFHFEGAHRMRTAEFGLEELQRYVDTLIVIPNQNLFRIANEKTTFADAFKLADTVLHTGVRGITDLMVMPGLINLDFADIRAIMSEMGKAMMGTGEAEGENRAIAAAEAAISNPLLDNISMKGAKGILINITGGLDMTLFEVDAAANRIREEVDSHANIIFGSTFNKESEGKIRVSVLATGIDNEEVVIQNKSALKDKEAHNDKLSETSSKPFNPLDNEIAYYKPSNPGEDMIHSINHTKKQDHNIENQKSNNKIPESAYKMQFNKNEYWDEESFNIPTFLRKK

SEQ ID NO: 23243 - protein, 469 aa, Solanum tuberosum
MEFVSMLCLFTFISFTLLLIHSIFKFLAFASKKLPLPPGTLGLPYIGETLQLYSQNPNVFFASKVKKYGSIFKTYILGCPCVMISSPEAAKQVLVTRANLFKPTFPASKERMLGKQAIFFHQGDYHAKLRKLVLQAFKPDSIRNIIPDIESIAITSLESFEGRLINTYQEMKTYTFNVALISIFGKDEFLYREELKKCYYILEKGYNSMPINLPGTLFNKAMKARKELAKIVAKIISTRREMKIDHSDLLGSFMGDKEGLTDEQIADNVIGVIFAARDTTASVLTWILKYLGENPSVLQAVTEEQENIMRTKEVNDEEKVLNWQDTRQMPMTTRVIQETLRVASILSFTFREAVEDVEFEGYLIPKGWKVLPLFRNIHHSPDNFPEPEKFDPSRFEVSPKPNTFMPFGNGVHSCPGNELAKLEILILVHHLTTKYRWSMVGPQNGIQYGPFALPQNGLPIKLSLKTSST

SEQ ID NO: 23244 - protein, 370 aa, Bacillus licheniformis ATCC 14580
MKKRIALLPGDGIGPEVLDAAVDVLKSVAEHYQHEFEFEYGLIGGAAIDEAGAPLPEETVAACKAADAILLGAVGGPKWDQNPSELRPEKGLLAIRKQLDLFANLRPVKVFESLAGASPLKTEYIEGVDFVIVRELTGGLYFGKPSEQYVNQNGEEEAVDTLFYKKSEMERVIREAFQMAQSRKGKVTSVDKANVLESSKLWRKTAEEVAKEFPDVKLEHMLVDNAAMQLIYAPGQFDIIVTENMFGDILSDEASMLTGSLGMLPSASLSSSGLHLYEPVHGSAPDIAGQNIANPLAAILSAAMMLRTSFGLEAEAQAVEHAVDQVLRAGKRTKDLAKGSEHCTTQSITGEVKAALADDNAISNIMTAYV

SEQ ID NO: 23245 - protein, 396 aa, Salmonella typhimurium LT2
MLDAQTIATVKATIPLLVETGPKLTAHFYDRMFTHNPELKEIFNMSNQRNGDQREALFNAIAAYASNIENLPALLPAVEKIAQKHTSFQIKPEQYNIVGTHLLATLDEMFNPGQEVLDAWGKAYGVLANVFIHREAEIYHENASKDGGWEGTRPFRIVAKTPRSALITSFEFEPVDGGTVAEYRPGQYLGVWLKPEGFAHQEIRQYSLTRKPDGKGYRIAVKREDGGQVSNWLHHHASVGDGVHLAAPAGDFFMNVAADTPVSLISAGVGQTPMLAMLDTLAKEQHTAQVNWFHAAENGDVHAFADEVSELGRTLPRFTAHTWYREPTESDRAQRLFDSEGLMDLSKLEAAISDPAMQFYLCGPVGFMQFAAKQLVSLGVNNENIHYECFGPHKVL

SEQ ID NO: 23246 - protein, 148 aa, Solanum tuberosum
MASKRILKELKDLQKDPPTSCSAGPVAEDMFHWQATIMGPADSPYSGGVFLVTIHFPPDYPFKPPKVAFRTKVFHPNINSNGSICLDILKEQWSPALTISKVLLSICSLLTDPNPDDPLVPEIAHMYKTDRSKYETTARSWTQKFAMG

SEQ ID NO: 23247 - protein, 518 aa, Bacillus licheniformis ATCC 14580
MRKINFFDTTLRDGEQSPGVNLNTQEKLAIAQQLEKLGVNIMEAGFPASSPGDFNAVKEIARTIKNCSVTGLARSVKGDIDSAWEALKDGAEPRLHIFIATSDIHLKYKLKKTREQVLEQAVAMVKYAKERFPIVQWSAEDACRTDLPFLAEIVSEVIAAGADVVNLPDTVGYLAPAEYGNIFRYIKENARNADKVQLSAHCHDDLGMAVANSLAAIENGADQVESVINGIGERAGNASLEEIAVALHIRKDFYQAESTIQLNEIKRTSDLVSKLTGMAVPRNKAVVGDNAFAHESGIHQDGFLKEKTTYEIISPELVGVKTDALVLGKHSGRHAFKDKLQNLGFQLGEEEINKFFNIFKELTGKKKEFTDEDLISLILEEKTADRKIGYDFISLQVHYGTSQVPTATVSLKDQETDQVIQEAATGAGSVEAVYNTLKRCMDKEVQLLDYRIQSNRKGQDAFAQVYVRVMIDGKESGGRGVAQDVLEASAKAYLNAVNRYLVLKTNTEGLSKQAAVGS

SEQ ID NO: 23248 - protein, 48 aa, Bursera tecomaca
YFHETIWKGVPRFLRRVDTALKNIGINKRVPYNAPLIQFSSWMGGDRD

SEQ ID NO: 23249 - protein, 418 aa, Haloarcula marismortui ATCC 43049
MSPEVNPFESLQEQIDDASDYLEYSTDVLERLKHPERVLETNLSVEMDDGSVEVFRAYRSQFNGDRGPYKGGIRYHPQVTRDEVKALSGWMVYKCAAVNIPYGGGKGGIEIDPRQYSASEIERITRSFAKELRLIIGEDRDIPAPDVNTGQREMNWIKDTYETLENTTEPGVITGKAPESGGSAGRVEATGRSVMLTAREAFDYLGKDIEDATVAVQGYGNAGSVAAKLIEDLGANIVAVSDSSGAVYNPDGLGARDAKAFKSETGSLAGYEGATEELTNEELLTMDVDLLVPAALENAIDGDLARDVQADIVVEAANGPLTPNADDVFTERDVAVFPDILANAGGVTVSYFEWVQNRQRFYWSEERVNDELETIITNAFDDLVETYEETGAPNFRTAMYVVAIQRVVAAAEEGGIWP

SEQ ID NO: 23250 - protein, 456 aa, Vibrio angustum S14
MDKATTHSESLTVAKFGGTSVADYAAMSRSAAIVTANPETKIVLISACSGVTNILVELANGVSDSTTRQQRIQTLTQTHQDVLDQLQHPENVQDAIYGLLDNIATLAEHAAFATSAQLTDQIVSHGELLSTHLFSQILVELNAPAVRVDIRPIMRTDDQFGKAIPQPDTIKQLATEQLLPLLDNNIVVSQGFIGSNSQGVTTTLGRGGSDYSAALIAEAVNASTLEIWTDVPGLYTTDPRITSAAKPIKEISFSEASEMANFGAKILHPSTLVPAVRQQIPVFVGSSKAPEQGGTWIRQSVEEAPLFRALALRANQTMVTLTSLNMFHAYGFLAEVFRILAEHKISVDLITTSEVSVSLTLDQTDTGGGAPTLPLQVVEELSQLCVVDVEQGLSLVALIGNQMSDTKGSAKDIFGALEDHNLRMICYGASPHNLCFLINEDEAKDVVRTLHASLLE

SEQ ID NO: 23251 - protein, 231 aa, Brassica napus
  misc_feature (173)..(173): Xaa can be any naturally occurring amino acid
MNDGEVSRQIQQMVRFIRQEAEEKANEISVSAEEEFNIEKLQLVEAEKKKIRQDYEKNEKQADVRKKIDYSMQLNASRIKVLQAQDDIVNAMKDQAAKDLLNVSGDEYAYKQLLNDLIVQCLLRLKEPSVLLRCREEDLGLVEYILDDAKEEYAGKANVHAPEVAVDTTIFLXPPPPTSSDPHGLHCSGGVVLASRDGKIVCENTLDARLDVAFRMKLPVIRRSLFGQVAA

SEQ ID NO: 23252 - protein, 135 aa, Zea mays
  misc_feature (34)..(34): Xaa can be any naturally occurring amino acid
  misc_feature (49)..(49): Xaa can be any naturally occurring amino acid
ARPSESEGEAWLLRSSRRWALAVLLAATVVAPPXRCARAMSCSTVYSTXLMPCPAVRPDGRGPCRPQPCCGGIRSLLQQANNTPDRRTICGCLKNVANGANGSGTYISRAAALPSKCGVALPYKISTNVNCNTIN

SEQ ID NO: 23253 - protein, 946 aa, Candida albicans SC5314
MVAELIDGKAIALDLRTKIHDDIAQFQLKHPEFKPHLSIIQVGDRPDSNTYVKMKLKAAEEASIGCELIKLPEDISQFELLSKIEKLNNSLDVDGILVQLPLPEHIDETKITDAVLANKDVDGFGPFNVGELAKKGGEPLFLPCTPKGIMHLFEKSKIDLEGKDVVVLGRSDIVGKPIARLLTKANANVTVVHSKTPLDKLKNYLGDADIVVAAIGQPQFVKGEWLKDGVVVIDVGTNFIPDASKKSGQRMVGDVDFESAKTKASFITPVPGGVGPMTVACLLDNVVIGAKKHYKANNETPKFTNPLKLHLQKPVPSDFEISRAQQPKRITQVAEEAGILDAELEPFGFYKAKVSLDILKRLNNKVNGKYVLVTGITPTPLGEGKSTTTVGLAQALGAHLKKNVFANVRQPSMGPTFGIKGGAAGGGYSQVIPMDEFNMHVTGDIHAITMANNLLAAAIDTRMFHESTQKDGPLYRRLVPEKKGVRKFTPSMLRRLEKLGINKTDPNELTPEEITQFARLDIDPESITWRRVVDCNDRFLRGITVGQAPTEKGFTRATGFDITVASECMAILALANSLEDMRERLGKMVIGSSKAGIPITCEDIGCAGALTALLKDAIKPNIMQTLEGTPVFVHAGPFANISIGASSILADKMALKLAGTSSELSEEERKEQEGYVVTEAGFDFTMGGERFINIKCRSSGLVPDVIVIVATVRALKVHGGGPEVKAGAPLAPEYTQENVELLRKGCSNLAKHIANAKSYGLPVVVAINKMSSDSDKEHEVIREEALKAGAVDAIVSNHWEEGGKGAVDLAQGVINAANSPDKNFNFLYGLEPSVEEKISTIAKEMYGAGEVEFLPEAQKKIDLYTKQGFGKLPICIAKTQYSLSHDANLKGVPTGFKFPIRDVRASIGAGYLYALAAEIQTIPGLPTHCGFMNVEVNEDGEIDGLF

SEQ ID NO: 23254 - protein, 543 aa, Malus x domestica
MGCYSSKENAPKPGSKGFGSSQPYQQPQTAAQPQKVSSQQPHNPPPPPRPQPQQRAQPAPQPRAQYQQPSPPPAKPAPQPNSILGKPFDDIKQYYTLGKELGRGQFGITYLCTENSTGHSYACKSILKRKLVSKNDRDDIKREIQIMQHLSGQPNIVEIKGAYEDRYSVHLVMELCAGGELFDRIIAQGQYSERAAAAILRDIVNVVHICHFMGVLHRDLKPENFLLSSKDEKAMLKATDFGLSVFIEEGKVYRDIVGSAYYVAPEVLRRSYGKEIDIWSAGVILYILLSGVPPFWAETERGIFDAILEGVIDFDSQPWPSISDSAKDLVRKMLTQDPRKRITSAEVLEHPWLRVGGVASDKPLDSAVLSRMKQSRAMNKLKQLALKVIAENLSEEEIKGLKTMFTNMDTDKSGTITYEELKTGLARIGSRLSEAEVRQLMDAADVDGNGSIDYIEFISATMHRQRLERDEHLYKAFQYFDKDSSGYITRDELEAAMKEHGMGDDNTIREIISEVDADNDGRINYSEFCAMMRSGAQQPAKLF

SEQ ID NO: 23255 - protein, 486 aa, Bacillus cereus G9241
MGSYYIRSYGNEKTGGESKVKSLLRKKALSTESPKQLDRTLTALDLTFLGIGAVIGTGIFVLTGIVAAKHSGPGIMLSFLIAAFTCACVAFCYAEFASSIPVSGSVYTYAYMTVGEVVAFIVGWCLMLEYLLAVAAVAVGWSGYLQSLLQGFNVHLPAIIASAPGVGKGGLIDLPAVCILLIITGLLSFGIRESARINNIMVLIKLAVIIAFIVAGAKYVKPENWTPFIPFGYDGIITGAATVFFAFLGFDAIATAAEETKKPQRDLPIGIIGSLLICTVLYMIVSFVLTGMVPYTQLDVSDPVAFALHFVGEDTIAGLLAVGAMTGMTTVLLVVMYGQVRVSYAMSRDGLLPKALARVNKRVKIPLLNTWITGVVAALLAGLLDLHVLANLVNIGTLTAFTFVCCAVLILRKTHPDLKRGFRTPFVPVLPVVAILCCLYLMINLSKTTWISFAVWLIVGLCFYFFYSRKHSHLATEKTNDEKKKA

SEQ ID NO: 23256 - protein, 390 aa, Saccharophagus degradans 2-40
MFELVDNIPQNAVIKVVGVGGGGGNAVKHMIDNSVEGVEFICANTDAQALKDVDARTVLQLGNAITKGLGAGANPEIGRQAAMEDRERIAEVLSGADMVFITAGMGGGTGTGGAPVVAEVARELGILTVAIVTKPFPFEGKKRLAIAEEGIKQLQDRVDSLITIPNEKLLSVLGKATSLLDAFKAANNVLLGAVQGIADLIIRPGMINVDFADVRTVMSEMGMAMMGSGYAKGENRAREAAEAAIRSPLLEDVNLHGAKGILVNITAGMDLSLGEFTEVGDTIEEFASGDATVVVGTVIDPEMSEEIRVTVVATGLGAVGAKLETKPAETKVVIDNTRGADGKPNYAALDKPTVMRSNPTRQATAAAALDAQDKDMEYLDIPAFLRKQAD

SEQ ID NO: 23257 - protein, 278 aa, Glycine max
  misc_feature (239)..(239): Xaa can be any naturally occurring amino acid
ETIQSGGDEIEKWLLNSDSLEFVEQIAPNSYKGTYMGKRVGIEKLRGCEKGNSYEFELRKDLLALMTCGHRNIMQFCGVCVDDNHGLCAVTKFVEGGSVHDLMLKNKKLSSKDVVRIAADVAEGIKFMNDHGVAYGDLNTQRILLDKHGNACLGDMGIVTACKSVREAIDYETDGYRWLAPEIIAGDPESVTETWMSNVYSFGMVIWEMVTGEAAYSAFSPVQAAVGIAACGLRPEIPXDCPQTLKSLMTKCWNNTPSKRPHFSEILAILLRPSNYNR

SEQ ID NO: 23258 - protein, 460 aa, Bacillus licheniformis ATCC 14580
MHTLEKMEQTNFQTARDYVTQAYETVQKRNFYESEFLQAVKEIFDSLVPVLARHPKYIEHRILERIAEPERMITFRVPWVDDEGNIRVNRGFRVQFNSAIGPYKGGIRFHPSVNASIIKFLGFEQIFKNSLTGLPIGGGKGGADFDPKGKSDREIMSFTQSFMNELYRHIGPDTDIPAGDIGVGAREVGFMFGQYKKIRGRYDAGVLTGKGLEYGGSLTRKEATGYGLVYFVEEMLKDQGMRFENSTVVVSGSGNVALYAMEKAAQFGAKVVACSDSDGYVYDEKGICLETVKRLKEDGNGRIREYVSEHPEAHYFEGCTGIWSIPCDIALPCATQNEIDEEAAEVLISNGVKAVGEGANMPSEEGAVKRFLDAGVLFGPAKAANAGGVAVSALEMAQNSARLHWTAEETDAKLRAIMADIHKRSVEAASEYGRPGNLLDGCNIAGFIKVADAMIAQGVV

SEQ ID NO: 23259 - protein, 194 aa, Arabidopsis thaliana
  misc_feature (149)..(149): Xaa can be any naturally occurring amino acid
  misc_feature (155)..(155): Xaa can be any naturally occurring amino acid
  misc_feature (158)..(158): Xaa can be any naturally occurring amino acid
  misc_feature (163)..(163): Xaa can be any naturally occurring amino acid
  misc_feature (165)..(167): Xaa can be any naturally occurring amino acid
  misc_feature (180)..(180): Xaa can be any naturally occurring amino acid
  misc_feature (182)..(183): Xaa can be any naturally occurring amino acid
  misc_feature (188)..(188): Xaa can be any naturally occurring amino acid
  misc_feature (192)..(192): Xaa can be any naturally occurring amino acid
MAMSAIGFEGYEKRLEVTFFEPGLFLDTQGKGLRALAKSQIDEILQAAECTIVSSLSNDQLDSYVLSESSLFVFPYKVVIKTCGTTKLLLSIPPLLRLAGELSLGVKAVRYTRGSFLCPGGQPFPHRSFSEEVSVLDGHFAQLGLNSVXYLMGNXDEXKKWHXYXXXAQGSRTGTTIFTXWXXKTGFXQGKXFF

SEQ ID NO: 23260 - protein, 516 aa, Buchnera aphidicola
MSSKVIIFDTTLRDGEQALQASLSVKEKLQIALSLEKCGIDIIEVGFPISSPGDFKSVQTISKKIKNSRICSLARCVEKDIEVAGDAMSSSDFFRIHIFLATSTLHMESKLRKNFDEIIDMAVSSVKKALRYTDDVEFSCEDASRTTMDNLCRIVEKLIKAGVKTINIPDTVGYTIPNELSNIIKNLFERVPNIHKSIISVHCHNDLGMAVGNSISAIQAGARQIEGTINGIGERAGNTALEEIIMAIKVREDILGVSTNIVHKEIYRTSQIISQICNMPIPANKAIVGSNAFAHSSGIHQDGVLKNRKNYEIMEPNTIGVKEVKLNLTSRSGRAAVKYYMDKMGYKDDDYDIDELYSAFLKLADKKGQVFDYDLEALAIFSKKQENAEYFYLKFFSVQSISNGLSTASVKLKCGKKVYTESSTTSNGPVDATYQALNKIINFPITLQKFQLVAKGKGKDALGQVDILVKYENRQFHGIGLATDIIESSAQAMINVLNNIWKSQQVNKKLKNLKKY

SEQ ID NO: 23261 - protein, 363 aa, Buchnera aphidicola
MHKQYHIAVLPGDGIGPEVMQEAYKILQVLREHFSLFIKTKEFDIGGIAIDNHGIALPKKTLIGCENSDAILLGSIGGKKWDTLPINERPERASLLPLRKHFNFFCNLRPSNLYKELNFLSPLRNDIVKHGFDILCVRELTGGIYFGKPRGRVTKKKLMYAFDTEIYYKFEIVRIAHLAFKLARSRKHKLCSIDKANVLESSILWREVVEEVSKEYPDVILSHLYIDNVCMQIIKDPNQFDVLLCSNLFGDIISDECAMITGSIGMLPSASLNEKNFGLYEPAGGSAPDIQGKNIANPIAQILSLSMLIRYSMNLNKIANKIDNAVINVLKKGYKTMDISKDQNYLKTNEMGDVIADFLKRDK

SEQ ID NO: 23262 - protein, 437 aa, Thiomicrospira crunogena XCL-2
MATQQINIPDIGDFDSVEVIEVLVAEGDEVAVDDSLLTLESDKATMEIPAPYAGKITKVTVSVGDKVAEGDAVFEIEVSEAAASEEKPADKPAPEKTPEAPKEAPKPAAETAPAPATPSPTAQALTKPVNAQSMGAASHASPSVRAFARKLGVDISSVSGSGPKGRIQQSDIEAMIKSVMQGGAGAGQAQGGMGIPSVPEIDFSQFGETETVELGRIKKISGKFLQTSWLNVPHVTQFDECDITEMDAFRKSMKAKAEKEGVKLTPLVFVMKAVVKALQDFPSFNSSLSPDGQSLIKKQYYNIGVAVDTPNGLVVPVLRDVDKKGIYELSRELMEISGKARDGKLSPKDMSGGTFTISSLGGIGGTQFTPIVNAPEVAIMGLSKAKMQPVWNGSEFEPRLVMPFSVSYDHRVVDGAEGVRFTTTVGQYLTDLRQLIL

SEQ ID NO: 23263 - protein, 537 aa, Pseudomonas putida KT2440
MSGKFKKQLSLLDLTFIGLGAIFGSGWLFAASHVSAIAGPAGILSWFLGGFAVLLLGIVYCELGAALPRAGGVVRYPVYSHGPLLGYLMGFITLIAFSSLIAIEVVASRQYAAAWFPGLTKAGSSDPTVLGWLVQFALLGLFFFLNYRSVKTFAKANNLVSVFKFIVPLLVIGVLFTFFKPENFEVQGFAPFGLSGVEMAVSAGGIIFAYLGLTPIISVASEVKNPQRTIPIALILSVLLSTAIYALLQLAFLGSVPTEMLANGWASVTKELALPYRDIALALGVGWLAYLVVADAVISPSGCGNIYMNATPRVIYGWAQTGTFFKYFTRIDAESGIPRPALWLTFGLSVFWTLPFPSWEALINVVSAALVLSYAVAPVSVAALRRNAPHMPRPFRVKGMTVLGPLSFIIAALIVYWSGWNTVSWLLALQIVMFVLYLLCSRFVPTQHLSLGQQVRSSAWLIGFYALTILLSWLGSFGGLGVIGHPFDTVVVAACALGIYYWGAATGVPAHLVRLEGDDESEACAETSNGRPVAVAS

SEQ ID NO: 23264 - protein, 542 aa, Rhizobium tropici
MIKTVPTTPYADQKPGTSGLRKKVPVFQQPNYAENFIQSIFDSLEGYQGKCLVIGGDGRYYNREVIQKAIKMAAANGFGKVMVGKGGILSTPAASNIIRKYKAFGGIILSASHNPGGPTEDFGIKYNISNGGPAPEKITDAIYERSKVIDSYKIADFPDINLDRIAREDVGGMIVSVIDPVEDYAALMEELFDFGAIRNLISLGFRICFDAMSAVTGPYAKEIFEIRLGAPDGSVRNFLPLPDFGGHHPDPNLVYCKELYDDMMSDDAPDFGAASDGDGDRNLIIGKGIYVTPSDSLAILAANANLAPGYSHGIAGIARSMPTSGAADRVAEKRGVGIYETPTGWKFFGNLLDAGMATICGEESSGTGSNHVREKDGLWAVLLWLNILAVRGESVIDIVTQHWATYGRNYYSRHDYEGVDTDAANGLIAALREKLPTLPGTKIGDLTVSAADDFAYHDPVDKSVSQHQGIRILFEGGSRVVFRLSGTGTTGATLRVYIERYEPDPTRHNIETQEALADLITAAQDIADIKGRTGRDAPTVIT

SEQ ID NO: 23265 - protein, 492 aa, Zea mays
MTTSPERGEAPPAPPRDSPCEDAAPAAAVVASSSSGSEREEDGGSRQPKASVLSGVFAPPLAIFEGQQQVSSTPCDASSTKPPSGSYAWSRILRRFVGSGSMWRLLGCARVLTSGDVWFLGKCYRVSPEEEESGGSDSDSGHAAFLEDFSSRIWITYRKGFDAIPGSKLTSDVNWGCMVRSSQMLVAQALIFHHLGRSWRKPSEKPYDPDYIRVLHLFGDSEACAFSIHNLLQAGRNYGLAAGSWVGPYAMCRAWQTLIRTNREQADAVDGKENFPMALYVVSGDEDGERGGAPVFCIDVAAQLCSNFNKGQCTWSPILLLIPLVLGLDKINPRYIPLLKETFKFPQSLGILGGKPGTSTYIAGVQEDRALYLDPHDVQMAVDIAPDNLEADTSSYHCSVVRDLALEQIDPSLAIGFYCRDKDDFDDFCSRASELAEKANGAPLFTVMQSVQPSKQMYKQDDGLCCCSGSSMANEDYDLDASGEAGEEWQIL

SEQ ID NO: 23266 - protein, 509 aa, delta proteobacterium MLMS-1
MSNDDIMHFSQLPLAPAVSQAVAEIGYETPTPIQAAAIGPLLAGRDLLGQAQTGTGKTAAFALPLLSRLDTSRKYPQLLVLAPTRELALQVADEIQAYSRHLPGFQVLPLYGGQNMAQQLRALQRGVQAVVGTPGRIQDHLRRGTLKLDRLTAVVIDEADEMLKMGFVDEVEKILAQTPPQRQVALFSATMTQEIMRIARRHLKDPEEIRLKTRTTTVETISQHYWLVQGLQKLDALTRILEAEAVEAMLIFVRTKVATVELAEKLAARGFASAALNGDMTQGLREKTVEQLKDGTLDIVVATDVAARGLDVQRISHVVNYDIPYDTESYVHRIGRTGRAGRQGQAIIFVAPREMRMLHAIEKATRQQIARLQLPSRREVNQRRIDQFKEKIIAASRQPGLEFFEELIAQATAEAEIDSQQLAAGLAYLLQQARPLLPEEGGPPPAEEQQQRPRPQGPRKPAPTGRLRGQYPGRRESPSRKGKAQGKAQGKRTPQGRTGGGPTTHREKP

SEQ ID NO: 23267 - protein, 572 aa, Gloeobacter violaceus PCC 7421
MATGFHSVPEILDELRAGRAVVVVDDENRENEGDLICAAQFASPEMINFMATHARGLICLAMTAERLDQLQLPLMVSENTDRNQTAFTVSIDAGPHLGVSTGISAADRAKTIQAAIDSRTRAGDLTRPGHIFPIRAREGGVLKRAGHTEAAVDLARMAGLYPAGVICEIQNPDGSMSRLPELLQYARTFNLKIVTIAEIIAYRLQNERFIKRETVAMLPTAFGKFEIFAYRDTLDGKEHVALVRRPPAGSGLFDGAPPFAGSEEPVLVRVHSECLTGDTFGSLRCDCRQQLQAALKMIDHHGQGVVVYLRQEGRGIGLINKLKAYALQDMGLDTVEANERLGFAADLRSYGVGAQILNDLGVHRMKLITNNPRKIAGLSGYNLEVVDRVPLIIEETDYNSTYLNTKAQKLGHLLPGVRLLTLGVLWRRATMQPYDPERSNQVELLRELFGQQDLLIQEERRPVASAVFGPDAVVVHIGLPSAGNKSPNAWYTDPTSACRRAILAALEELVQNNPPQVLQFLVSSGADPLNHLSERLQHREEDLASLPDAIKGPLSPETVYIFKADATQPPTS

SEQ ID NO: 23268 - protein, 376 aa, Bdellovibrio bacteriovorus HD100
MEFNTIPEIIDDVRNGKMVILVDDEDRENEGDLILAAEFATPQNINFMVKEARGLVCLCLTAQQVERLQLPLMVRDDLNFAPNKTAFMVSIEASEGISTGISAADRALTCRVAANPHAKPSDIHMPGHIFPIRAQQGGVLKRAGHTEASVDLARLAGLNPAAVICEVMNDDGTMARVGDLREFAKKHDIKIGTIVDLIAYRLANETLVEELHSVPLPASFGENMQARVFRSTVDGLEHLVIQKGEIKKDHPTLVRVHVDNFTRDFMAVVQRGASSVLESIKAISQEESGAFVLLRGNNRTSGLTQELNVLVGLEDIRPTTPLMDERDYGIGAQILREIGANKIRLLTNKPEKKVGLKAFDIEIVEIVAMENLKGPK

SEQ ID NO: 23269 - protein, 511 aa, Arabidopsis thaliana
MEGLRDSSSQTISSTTSSSSSPSCDVDVDNRGKQLTPSTRRSRAGFSDSFSSHDLSSFCRDEEVKTFCPIKSESDDELLRSIEAETSSSVVSTSDSSETHHHHHHHHSSGGPNNGHWRRGFFRLLKKGSSAMPFNTFTPLKGVPKLTRRKSKRIRDNMVPVIPALDTDHLFYFKPSWRNFSLRDIQTATNDYSRENLIGEGGYAEVYKGQMADGQIVAIKKLTRGSAEEMTMDYLSELGIIVHVDHPNIAKLIGYCVEGGMHLVLELSPNGSLASLLYEAKEKLNWSMRYKVAMGTAEGLYYLHEGCQRRIIHKDIKASNILLTQNFEAQISDFGLAKWLPDQWTHHTVSKVEGTFGYLPPEFFMHGIVDEKTDVYAYGVLLLELITGRQALDSSQHSIVMWAKPLIKENKIKQLVDPILEDDYDVEELDRLVFIASLCIHQTSMNRPQMSQVVEILRGDKCSLDKLRERENSKLQRTYSEELLDNEEYNSTRYLNDINRHMETVLGTSKD

SEQ ID NO: 23270 - protein, 106 aa, Glycine max
MEGRQYYPPRETVDGNRTTMGGPHSPWHSPVPYLFGGLAAMLGLIAFALLILGCSYWRLSGYFDGEENQSRDSDLEAGDMKPDTAVKAVALPEKFLVIMAGDVNPT

SEQ ID NO: 23271 - protein, 553 aa, Pichia stipitis
MSSQDIPSGVQTPSNASFLEKDEDKIEEVPQNHDATLVALESKGISEYLLICFFCLLVAFGGFVFGFDTGTISGFVNMSDFLERFGQTRADGTHYLSNVRVGLLVSIFNIGCAIGGIFLSKIGDVYGRRVGIMASMVIYVVGIIVQIASQHAWYQVMIGRAITGLAVGTVSVLSPLFIGESSPKHLRGTLVYCFQLCITLGIFIGYCVTYGTKRLSDSRQWRVPLGLCFLWAIFLVVGMLAMPESPRYLVEKKRIEDAKKSVARSNKLSPEDPSVYTEIQLIQAGIDREAIAGSASWTELITGKPAIFRRVVMGIIMQSLQQLTGVNYFFYYGTTIFQAVGLKDSFQTSIILGVVNFAATFIGIWAIERFGRRSCLLVGSAGMFVCFIIYSTIGSFHLYKDGEYNNDNTYKPSGNALIFITCLFIVFFASTWAGGVYTIISESYPLRIRSKAMAIATAANWVFGFLISFFTPFIVSAIHFKFGYVFSGCLLFSFFYVYFFVVETKGLSLEDVDELYASNVVPWKSSKWVPPSTAAMATEAGYAADEKPVDEHV

SEQ ID NO: 23272 - protein, 553 aa, Chlamydia muridarum Nigg
MSSSKHSSLCQKTPPLCRELQKAPALLLTEDTRFSALLNDRVETVAQLFPCTYESPYRKFIPKSDLPLDIAPLKVGVMLSGGPAPGGHNVILGLLHSIKKLHPHSKLLGFIRNGHGLLNNNTVEITEEFMKEFRNSGGFNCIGTGRTNIITEENKARCLQTANQLDLDGLVIIGGDGSNTATAILAEYFAKHRAKTVLIGVPKTIDGDLQHLFLDLTFGFDTATKFYSSIISNISRDALSCKGHYHFIKLMGRSSSHITLECALQTHPNMALIGEEIAEKGTSLSALIQGICEMISDRAAMGKYHGVILIPEGVIEFIPEIQTLVKEIESFPEQTDLSQALSPSSQQLLHQFPEDIRHQLLYNRDAHGNVYVSQISVDKLLIHLVQNHLETHFKHVPFNAISHFLGYEGRSGTPTHFDNVYSYNLGYGAGILVFNRCNGYLTTIEGLTNPIEKWRLRALPIVRMLTTKTNKDGTLYPLIKKGLVDISSPVFNKFSLYRKIWALEDSYRFVGPLQIHSPEDSHSDDFPPLILFLNHNEWQKRCSICLEIPDQDY

SEQ ID NO: 23273 - protein, 122 aa, Glycine max
  misc_feature (15)..(15): Xaa can be any naturally occurring amino acid
  misc_feature (96)..(96): Xaa can be any naturally occurring amino acid
HELNLETRSPIYELXPLVLFFILFTLVEALGALGYRGQFIDDPPTALQKTAFPPVKGARSALSLKQQGPLFEYTNENELFVRILAQLGIPFSLIGXEIITGNAALAQLNVETVIPSRDIEPL

SEQ ID NO: 23274 - protein, 235 aa, Arabidopsis thaliana
MLRSSIRLLYIRRTSPLLRSLSSSSSSSSSSSSKRFDSAKPLFNSHRIISLPISTTGAKLSRSEHSMAASSEPKSLYDFTVKDAKGNDVDLSIYKGKVLLIVNVASQCGLTNSNYTELAQLYEKYKGHGFEILAFPCNQFGNQEPGTNEEIVQFACTRFKAEYPIFDKVDVNGDKAAPVYKFLKSSKGGLFGDGIKWNFAKFLVDKDGNVVDRFAPTTSPLSIEKDVKKLLGVTA

SEQ ID NO: 23275 - protein, 548 aa, Chlamydia muridarum Nigg
MELLSVNKSYFELQRLHYRPVTLALLDNLCSLHIKESASSEPNPGLLAKHIPHLCALPNLTIQKGDRSSSEPLRIGVLLSGGQAPGGHNVVIGLFEGLRAFNKETKLFGFIKGPLGLIRGLYKDLDISVIYDYYNAGGFDMLSSSKEKIKTKEQKSAILSTVKKMKLHGLLIVGGDNSNTDTAMLAEYFIEHNCPTAVIGVPKTIDGDLKNSWIETPLGFHTSCRTYSEMIGNLEKDILSTRKYHHFVKLMGEQASHSTLECGLQALPNITLIGEEVAIHHTSLRSLSHHIARGLIKRFRKDKNYSTILIPEGLIKQIPDTKLLIHELNALIAEGQFSVNHFDQQLSPMALQTFSSLPENIREQLLLDRDSYGNVRVSKIAIEELLASLVSDEIAKLEPTMPFAPVTHFLGYESRASFPSNFDSNYGLALGIAASLFLVRGKTGYMVTIGNLAEEYAHWTIAATPLYKMMHLEKRFNEETPVIKTDSVSPHSPMVQYLHKIKEACLLEDLYRFPGPLQYFEEQALIDQRPLTLLWEKGALSENNANRL

SEQ ID NO: 23276 - protein, 710 aa, Oryza sativa
MSAAAGRNALLDELRALMAAHSPPLHALVVPSDDAHQSEYVAERDKRLQFISGFTGIARSAVLFTTSLPIDIRHKSFVWLFMPLPIGETTFTIWGGLALITMKEALLWTDGRYFLQAEKQLSDHWELMCMGEDPPVEVWIADNLSDEAVIGINPWCISVDTAQRYEHAFSKKHQTLFQLSSDLVDEVWKDRPLANTQPVVHPVEFAGCSVTGKLKELRKKLLHEKARGIIIAALDEVAWLYNIRGNDVHYSPVVHSYSIVTLHSAFFYVDNRKVSVENRSHDFEGHVVNCDSYLVKVQSYMSENGIDIRDYNMVQSDGNGMNDNSKILIDNSCCLALYSKLDEDQVLILQSPVALSKAVKNPVELDGLRKAHIRDGVAVVQYLAWLDNQMQENYGASGYFSGAKGSQKKEHVEVKLTEVSVSDKLEGFRAAKEYLDGTTDITRTVHFGKPSEHEKSCYTAVLKGHIALDTAVFPNGTTGHALDILARTPLWKSGLDYRHGTGHGVGSYLTVHEGPHQISFRPSARNVPLQASMTVTDEPGYYQDGSFGIRLENVLIVQDANTKFNFGDKGYLAFEHITWAPYQTKLIDATLLAPAEIEWVNTYHSDCRRILQPYLNEQEKEWLRKATEPITLGAGEEDGLDEEAEVVEDDEEEAVLGGEDAVNGGAGCVDPTADLGHQGFPLKAHSSPTTRMIISMSSRWLRAMVARGNG

SEQ ID NO: 23277 - protein, 475 aa, Solanum tuberosum
MVNYFEIFFYISIFLLGILSYYFCFSKKYNSSSKKNAYKLPPGSMGWPYIGETLQLYSQDPNAFFINRQRRFGEIFKTKILGCPCVMLASPEAARFVLVNQANLFKPTYPKSKENLIGQSALFFHQGDYHNHLRKLVQASLNPESIRNQIPYIEELSISALNSWVGGHVVNTYHEMKKFSFEVGILAIFGHLDGHVKEELKKNYSIVDKGYNSFPINLPGSLYRKSLQARKRLGKILSEIIRERKEKKVLEKGLLSCFLNAKEEKGLLVLNEDQIADNIIGVLFAAQDTTASVLTWILKYLHDNPKLLECVKAEQKVILQSNEQENHGLTWTQTRKMPITNKVVLETLRMASIISFAFREAVADVEYKGYLIPKGWKVMPLFRNIHHNPEFFPDPQKFDPSRFENAPKPNTFMPFGSGVHACPGNELAKLEILIMTHHLVTKFRWEVVGSGSGIQYGPFPVPLGGLAARFWKEST

SEQ ID NO: 23278 - protein, 594 aa, Aspergillus nidulans FGSC A4
MASQAPADNASVPQELPDRTQNPAGEAPQAEVSKNAAKKAAKQAEMAAKKAEKAAKAGKSEKGQKPAGKGPKANPDKALIGIDVGKDVDFPGWYQQVLTKGDMLDYYDVSGCYILKPASYSIWEEIQQWFNQRIKKIGVKNCSFPLFVSEDVLQREKDHIEGFAAEVAWVTHAGSTPLEKKIAIRPTSETVMYPYYAKWIRSHRDLPLKLNQWNSVVRWEFKHPQPFLRTREFLWQEGHTAHLTKEAAHEEVMYILDLYAQIYEELLAVPVVKGQKTEKEKFAGGLYTTTVEGYIPATGRGIQGGTSHGLGQNFSKMFNITVEDPSAKGDEKKPPLHVWQNSWGLSTRTLGVMVMIHSDDNGLVLPPRVAENQVVVVPVGITAKLTEEDRAKLYAEVDKITETLTAAGVRAISDKREGYSPGWKFNEWELRGVPLRIEFGPGESAGNFVSTARRDIPGKDGKGTIPIPELSTAVPALLDTIHKDMFKRADDQYRTHRKLITNWDDFTPALNDKNICIIPHCLTEECEDQIKEMSARKAEEDSGVAQDSRAPSMGAKSLCIPFDQPEGIVPGETKCTNPKCTRFAEKWCMFGRSY

SEQ ID NO: 23279 - protein, 111 aa, Lactobacillus delbrueckii subsp. lactis
MKRIGILTSGGDAPGMNAAVRAVTRVAIANGLEVFGIRYGFAGLVAGDIFPLESEDVAHLINVSGTFLYSARYPEFAEEEGQLAGIEQLKKHGIDAVVVIGGDGSYHGALQ

SEQ ID NO: 23280 - protein, 412 aa, Rickettsia sibirica 246
MKENFNVSKLKNGLTILTYNMPYVNSVAINLIAKVGARYENAEEDGISHFLEHMAFKGTKTRTAKQIAEAFDSIGGHFNAYTGHENTVYYARVLSENCDKALNILADIIQNSIFSDEEIAKEYQVIMQEIAHHQDNPDDLVYEKFYNKVYREQPLGKSILGTAKTLATFTKEHFFNFIDKHYNAENLYLSIAGNIDHDKIVIIAEQLFSSLKQGVKSSFIPAKYIGGNGFINKELEQTSLVLGFEGTSYINLEKLYQTHLLSIIFGGGMSSRLFQSIREKLGLAYAVGSYNSAYFDSGVFTIYASTAHDKLELLYREIKNEIIKMTEQVSTEEILRAKTQIRSNLQMAQEKNTYKSEEIGKNYSVFGQYISPEEIMEIIMSIKADDIINTANKIFSGTTTSAIIGPNDLQGF

SEQ ID NO: 23281 - protein, 476 aa, Arabidopsis thaliana
MPYVSSIIEDRKLVICLDCTDLIVIYLNRRFIFPALGGLLFGYDIGATSGATLSLQSPALSGTTWFNFSPVQLGLVVSGSLYGALLGSISVYGVADFLGRRRELIIAAVLYLLGSLITGCAPDLNILLVGRLLYGFGIGLTCPSQIRGTLISLKELFIVLGILLGFSVGSFQIDVVGGWRYMYGFGTPVALLMGLGMWSLPASPRWLLLRAVQGKGQLQEYKEKAMLALSKLRGRPPGDKISEKLVDDAYLSVKTAYEDEKSGGNFLEVFQGPNLKALTIGGGLVLFQQITGQPSVLYYAGSILQTAGFSAAADATRVSVIIGVFKLLMTWVAVAKVDDLGRRPLLIGGVSGIALSLFLLSAYYKFLGGFPLVAVGALLLYVGCYQISFGPISWLMVSEIFPLRTRGRGISLAVLTNFGSNAIVTFAFSPLKEFLGAENLFLLFGGIALVSLLFVILVVPETKGLSLEEIESKILK

SEQ ID NO: 23282 - protein, 386 aa, Ipomoea purpurea
MVDGNHPLPAPKVCVTGAAGFIGSWLVKTLLQRGYHVHATVRDPGNTKKVKHLVELPKADTNLTVWKGVMEEEGSFDEAIAGCEGVFHVATPMDFDSKDPENEVIKPTINGVLNIINSCVKAKTVKRLVFTSSAGTLNVQPQQKPVYDETCWSDLDFIYAKKMTGWMYFASKILAEKEAWKATKEKKIDFISIIPPLVVGPFITPTFPPSLITALSLITGNEAHYSIIKQGQYVHLDDLCEAHIFLYEHPKAEGRFICSSHHTTIHGLAEMITQNWPEYYIPSQFKGIEKELAVVYFSSKKLQDMGFQFKYSLEDMYRGAIETLRKKGLLPYSTKEAAAIEEEQETVPLKVEEPTAIEQKQETVPLKLEEEPIAIEKKQEVVPLKA

SEQ ID NO: 23283 - protein, 345 aa, Streptococcus pneumoniae R6
MAKKIVALVGDGIGPEIMEAGLEVLEALAEKTGFDYEIDRRPFGGADIDAAGPPLPDETLKASREADAILLVAIGSPQYDGVAVRPEQGLMALRKELNLYANIRPVKIFDSLKYLSPLKPERISGVDFVVVRELTGEIYFGDHILEERKARDINDYSYEEVERIIRKAFEIARNRRKIVTSIDKQNVLATSKLWRKVAEEVAQDFPDVTLEHQLVDSAAMLMITNPAKFDVIVTENLFGDILSDESSVLSGTLGVMPSASHSENGPSLYEPIHGSAPDIAGQGIANPISMILSVVMMLRDSFGRYEDTERIKRAVETSLAAGILTRDIGGQASTKEMMEAIIARL

SEQ ID NO: 23284 - protein, 585 aa, Arabidopsis thaliana
MASQLDLIGGDYIAGISINPPTNSRVTSVYSEVQASRIDHTLPLPSVFKTPFKIIDGPPSSSAGHPEEIEKLFPNLFGQPSALLVPNQSNEVSSDQKLKIGVVLSGGQAPGGHNVICGIFGFKNLICDCIFVVGLIDYLQEYARGSSLFGFRGGPAGIMKGKYIELTSEFVYPYRNQGGFDMICSGRDKIETPEQFKQAEETVTKMDLDGLVVIGGDDSNTNACLLAEHFRAKNMKTLVIGCPKTIDGDLKSKEVPTSFGFDTACKIYSEMIGNVMIDARSTGKYYHFVRLMGRAASHITLECALQTHPNITIIGEEVFEKKLTLKNVTDNIVDVIYKRAENGYNYGVILVPEGLIDFIPEVQQLISELNEVLAEGNVDEEGQWKKNLKKETLEIFEFLPQTIQEQLMLERDPHGNVQVAKIETEKMLIQMVETELEKKKTEGTYEREFMGKSHFFGYEGRCGLPTNFDATYCYALGYGAGSLLQSGKTGLISSVGNLAAPVEEWTVGGTALTSLMDVERRHGKFKPVIKKAMVELEGAPFKKFASQREEWALKNRYISPGPIQFKGPGSDARNHTLMLELGAQA

SEQ ID NO: 23285 - protein, 371 aa, Ipomoea purpurea
MLSTITATVPSRVERLAGSGIQRIPKEYIRPEEERRSIRDIFEEEKIAGGPQVPTVDLKGINSEDLEVREKCREELRKAAVDWGVMHLVNHGIPEELTGRVKAAGEGFFGQPIEEKEKYANDQAAGNVQGYGSKLANNASGQLEWEDYFFHCIFPEDKTDLSIWPKNASDYIDATREYAKQLRALATKVLAVLSLGLGLEEGRLEKEVGGMEELLLQMKINYYPKCPQPELALGVEAHTDVSALTFILHNMVPGLQLFYGGKWVTAKCVPNSIIMHVGDTVEILSNGKYKSILHRGVVNREKVRVSWAVFCEPPKDKILLQPLPETVSEAEPPRFPPRTFARHIKHNLFRQSDQEAAHTPKPDNDDDHQSN

SEQ ID NO: 23286 - protein, 210 aa, Streptococcus pneumoniae R6
MNFQLAKYSLLKKFSENIGFTTPEECGAIFKYLIENVKTDRQIIYSPHCHDDLGMAVANSLAAVKNGAGRVEGTINGIRERAENAALEEIAVALNIRQDYYQVETSIVLNETINTSEMVSRFSGIPVPKNKAVVGGNTFSHESGIHQDGVLKNPLTYEIITPELVGVKIPLGKLSGRHAFVEKLRELALDFTEEDIKPLFAKFKALADKK

SEQ ID NO: 23287 - protein, 179 aa, Triticum aestivum
MAAFACTTRPPISLRSEMRIASSTKVSLSTRQMFSVGGLRTRVSLSSVSKNSSASRLRRRGGFIICEAQDTATGIPMVNDSTWESLVLKADEPVVVDFWAPWCGPCKMIDPIVNELAQQYTGKIKFFKLNTDDSPATPGKYGVRSIPTIMIFVKGEKKDTIIGAVPKTTLATSIDKFLQ

SEQ ID NO: 23288 - protein, 242 aa, Parvularcula bermudensis HTCC2503
MTDLAGKSTILATDLDGTFLGGDDEQRRTLYDFVEANRDWLGLVFVTGRDLEFIKEITAADVPTPDLIIGDVGTTVVQGDGHAPVTAVEDWIDEKWTGADEIAALAKAQPFLRLQDVFGGRRLSYFYDDGDRAEELAEAIRGKGFDVIISDGIYFDVLPKGIQKGPTLERTLAHYDLPRDAVLVAGDTLNDLSLFHTGLDGVVVGNAEAKLKEAVQGLQNVYHSPHHGAGGVHDALHRKINA

SEQ ID NO: 23289 - protein, 834 aa, Pseudomonas stutzeri A15
MSLTRRQFAKANAAAIAATVAGMPIASTASNLVTEADATNLKWDKAPCRFCGTGCGVMVATRENRVVATHGDVKADVNRGINCVKGYFLSKIMYGTDRLTQPLLRMKDGKFDKQGEFQPVTWDQAFDIMEEKYKAALKAGGPEAIGMFGSGQWTIWEGYAANKLMKAGFRSNNIDPNARHCMASAAFGFMRTFGMDEPMGCYEDIEAADAFVLWGSNMAEMHPVLWTRLTDRRLSAPHVKVAVMSTFEHRSFELADIPMIFNPQTDLVILNYIANHIIQSGAVNKEFIDKHTRFAKGATNIGYGLRPTDPLELKAENAAVANTWTDIGYEDYVEFLKPYTLEHAAKESGVPAERLKALAELYADPKVKVMSFWTMGFNQHTRGVWANNMIYNIHLLTGKISEPGNSPFSLTGQPSACGTAREVGTFSHRLPADMAVTNPKHRAITEKIWKLPEGTIQEKPGFHAVDQSRKLKDGVLKVYWTQVTNNMQAGPNVMQEILPGWRNPETFVIVSDVYPTVSAQAADLILPSAMWVEKEGAYGNAERRTQFWHQLVTAPGEARSDLWQLVEFSKRFRVDEVWPAELLSKAPEFKDKTLFDVLFKNGQVDRFSNDEIAEGYANYEAEAFGFYLQKGLFEEYAEFGRGHAHDLAAFDVYHRERGLRWPVVDEKETQWRYREGYDPYVEAGSGVQFYGNADKKAIIFALPYEVPAEVPDEEYPFWLSTGRVLEHWHTGSMTQRVDELHKAVPDALVYMHPEDARKLNVRRGSVVKIVSRRGEMQGRVETRGRNKPPMGLVYVPFFDANKLINKVTLDATDPISKQTDFKKCAVKIEVVSIA

SEQ ID NO: 23290 - protein, 111 aa, Arabidopsis thaliana
  misc_feature (94)..(94): Xaa can be any naturally occurring amino acid
SCATIGACTAQATMGAPFGGRKSYGGFPATRKANNDITSITSNGGRVNCMQVWPPIGKKKFETLSYLPDLTDSELAKEGDYLIRNKWIPCVEFXLEHGFGTLSTGTHSDTM

SEQ ID NO: 23291 - protein, 271 aa, Methylococcus capsulatus str. Bath
MSDSPFDFDRDVIETSFTIPVLVDFWAPWCAPCRALTPVLEAVAGRLAGRFELVKVNTEEHPEIARRYGVRGIPNVKLFVDGTVADEFTGTLPESALEDWLQRALPSPYQARLEQAEALISAGRVAEAEPVLRQILAAEPAYDPAAVLLARVLLDTDPDQALETLKPIGPDSDQSEAAEALRTLARLFGLLEHPERLAEAPAKSAYLDAIRKIREERYEPALAQLIELVRKARDYDEGGARKACVAIFRLLGNGHELTRRYRGQLSNALYV

SEQ ID NO: 23292 - protein, 195 aa, Oryza sativa
  misc_feature (42)..(42): Xaa can be any naturally occurring amino acid
MAAATMALSSSFAAVAAAAGGAPWRAAVRFPPRRRVALVVRXSSFDLQPEVEPTKEETATSSSPTPSPAAAAPRAKPAASTGLWDVLAFSGPAPERINGRLAMVGFVSALAVEASRGGGLLEQAGSGDGLAWFAATATVLSAASLVPLLRGESAEARSGGVMSADAELWNGRFAMLGLVALAFTEFLTGSPFVNV

SEQ ID NO: 23293 - protein, 313 aa, Escherichia coli
  misc_feature (28)..(28): Xaa can be any naturally occurring amino acid
  misc_feature (41)..(41): Xaa can be any naturally occurring amino acid
  misc_feature (82)..(82): Xaa can be any naturally occurring amino acid
  misc_feature (234)..(234): Xaa can be any naturally occurring amino acid
  misc_feature (286)..(286): Xaa can be any naturally occurring amino acid
MLDNVLRIATRQSPLALWQAHYVKDKLXASHPGLVVELVPXVTRGDVILDTPLAKVGGKGLFVKELEVALLENRADIAVHSXKDVPVEFPQGLGLVTICEREDPRDAFVSNNYDSLDALPAGSIVGTSSLRRQCQLAERRPDLIIRSLRGNVGTRLSKLDNGEYDAIILAVAGLKRLGLESRIRAALPPEISLPAVGQGAVGIECRLDDSRTRELLAALNHHETALRVTAERAXNTRLEGGCQVPIGSYAELIDGEIWLRALVGAPDGSQIIRGERRGAPQDAEQXGISLAEELLNNGAREILAEVYNGDAPA

SEQ ID NO: 23294 - protein, 158 aa, Staphylococcus aureus subsp. aureus MRSA252
METIYDFVVETNKGVTYKLDAYKGDVMLIVNTASECGFTSQFEGLQSLYEKYKDQGFVILGFPCNQFGGQEPGSGEEAAQNCKLNYGVTFPMHQKIDVKGEHQLPLFRYLTAAQHGFFNEKIKWNFTKFLVDREGNVVKRFAPQKKPVQIEREIEKLL

SEQ ID NO: 23295 - protein, 474 aa, Silicibacter sp. TM1040
MADTRPVIWWIRRDLRLRDNPALRAAQEAGGPIIPLYIHDAQEEALGAAPKFRLGLGLERFAKTLEEKGSRLIVRRGDALEVLREVIAESGAGHVIWSRLYDPAATKRDAKIKEALKASDIKAKSTGGRLLFEPWTVDTKDGGMYRVYTPFWKAVRTRDVAELTAAPSRLAAPESWPSGEALADLGMDAAMRRGGAIVAQHCRVGEDAALAQLDDFLTERVSNYKAHRDFPARAATSELSENLAWGEISPHRMWHLGAQAMQDGQPGAEHFLKEVVWREFAYHLMHRSPRILTRNWREEWDGFPWQDDPGDALQRWQQGQTGYDFVDAAMRELYVTGKMHNRARMIVASFLTKHLMIHWKYGLQWFEDCLVDWDPASNAMGWQWVAGSGPDAAPFFRIFNPDGQLEKFDPKGDYARRWLPEGQANPPETAMAYFEAIPRRWSLHPDQSRVSPIIGLKEGRERALSAYKESRNQS

SEQ ID NO: 23296 - protein, 450 aa, Laccaria bicolor
MVLPVEPEYEQALSELPNSLKPFLAANPDYGKALEIVPIPERVLQFRVIWEDDQGKAQVNRGFRVQYNSALGPYKGGLRLHPSVNLSILKFLGFEQTFKNALTGLSMGGGKGGSDFDPKGKSDGEIRRFCTSFMSELFRHIGQDTDVPAGDIGTGAREIGYLFGAYKKLQNEFVGMLTGKGLAWGGSFIRPEATGYGLIYYVEHMIAKAAPEYSLSKPETLVAISGSGNVGQFTALKVIELGATVLSLSDSKGSLIAEKGYTKEFIKEIGQLKLKGGALESLAQREGYTYHAGKRPWSLLPVVHVALPGATQNEVSKTEAEDLIKAGVRIVAEGSNMGCTEDAIAVFEESRKAGAGGVWYAPGKASNCGGVAVSGLEMAQNSQRLAWTTDQVDQKLKKIMAECYEICLSAGTKWSGEEIKDGVLPSLLSGANVAGFIKVADAMREHGDWW

SEQ ID NO: 23297 - protein, 339 aa, Pseudomonas aeruginosa UCBPP-PA14
MARKISYQQAINEALAQEMRRDPSVFIMGEDNAGGAGAPGEDDAWGGVLGVTKGLYHQFPGRVLDTPLSEIGYVGAAVGAATRGMRPVCELMFVDFAGCCLDQILNQAAKFRYMFGGKAVTPLVIRTMVGAGLRAAAQHSQMLTSLWTHIPGLKVVCPSSPYDAKGLLVQAIRDNDPVIFCEHKLLYSMQGEVPEELYSVPFGEANFLRDGDDVTLVTYGRMVHLALDAAASLARQGISCEVLDLRSTSPLDEDSILESVEKTGRLVVVDEANPRCSMATDIAALVAERAFSALHAPIRRVTAPHTPVPFSDALEDLYIPDAAKIEAAVRQALEGRDAA

SEQ ID NO: 23298 - protein, 336 aa, Methylococcus capsulatus str. Bath
MTIKIAINGYGRIGRNILRAIYETGRKDVEIVAINDLGDAQINAHLTRHDTVHGPFRGTVEVGEGEIIVNGDRIRVFSEKDPSKLPWGALGVDVVHECTGVFRTKAKCQPHLDAGAKKVIISAPADKNECDATIVYGVNEHTLKAAHTVISNASCTTNCLAPLVKPLLGKIGIVSGLMTTVHSYTNDQVLTDVYHKDLYRARAAALNMIPTKTGAAQAVGLVLPELDGKLSGFAIRVPTANVSVVDLTFIAARETDKDEINAILKAASESELKGILGYNDQPLVSSDFNHTTTSSNFDSTQTKVVGNLVKVLSWYDNEWGFSNRMLDTTVALMNAR

SEQ ID NO: 23299 - protein, 143 aa, Zea mays
MSSMMETLQIRKPASLPVSQRLSPSSSSKDEHGVIRRRLSSLSLNLLNQPSEIASRFPKSKSVSDMGKQVGSSVKEWWEWGWSWILSRKPIFIRDLELNREEAKTIGSQNRGSIMHVFIKLRSQIRSLMGSSSDTLPKYKRQQ

SEQ ID NO: 23300 - protein, 961 aa, Saccharum hybrid cultivar
MASERHHSIDAQLRALAPGKVSEELIQYDALLADRFLDILQDLHGPSLREFVQECYEVSADYEGKKDTSKLGELGTKLTGLAPADAILVASSILHMLNLANLAEEVELAHRRRNSKLKHGDFSDEGSATTESDIEETLKRLVSLGKTPEEVFEALKNQSVDLVFTAHPTQSARRSLLQKNARIRNCLTQLSAKDVTVEDKKELDEALQREIQAAFRTDEIRRAQPTPQDEMRYGMSYIHETVWKGVPKFLRRVDTALKNIGINQRLPYNVPLIKFCSWMGGDRDGNPRVTPEVTRDVCLLSRMTAANLYIDQVEDLMFELSMWRCNDELRARAEEVQSTPASKKVTKYYIEFWKQIPPNEPYRVILGAVRDKLYNTRERARHLLATGFSEISVDSVFTNIEEFLEPLELCYKSLCDCGDKAIADGSLLDLLRQVFTFGLSLVKLDIRQESERHTDVIDAITTYLGIGSYRSWPEDKRMEWLVSELKGKRPLLPPDLPMTEEIADVIGAMHVLAELPSDSFGPYIISMCTAPSDVLAVELLQRECGIRQTLPVVPLLERLADLQAAPASVERLFSTDWYFDHIKGKQQVMVGYSDSGKDAGRLSAAWQLYVAQEEMAKVAKKYGVKLTLFHGRGGTVGRGGGPTHLAVLSQPPDTINGSIRVTVQGEVIEFMFGEDHLCFQSLQRFTAATLEHGMHPPVSPKPEWRKLMEEMAVVATEEYRSVVVKEPRFVEYFRSATPETEYGKMNIGSRPAKKKPGGGITTLRAIPWIFSWTQTRFHLPVWLGVGAAFKWAIDKDIKNFQKLKEMYNEWPFFRVTLDLLEMVFAKGDPGIAGLYDLLLVADDLKPFGKQLRDKYVETEKLLLQIAGHKDILEGDPYLKQGLRLRNPYITTLNVLQAYTLKRIRDPSFKVTPQPPLSKEFADENKPAGLVKLNPASEYPPGLEDTLILTMKGIAAGMQNTG

SEQ ID NO: 23301 - protein, 306 aa, Triticum aestivum
ARGPIEWEEHYVGTEVDPRTQSFLTWESLESVRRNKVGLKGPMATPIGKGHRSLNLTLRKELGLYANVRPCNSLPGYKTRYDDVNLVTIRENTEGEYSGLEHQVVKGVVESLKIITRQASLRVAEYAFHYAKANGRERVSAIHKANIMRKTDGLFLQCCREVAAKYPEIKYEEVVIDNCCMELVKDPGTYDVLVMPNLYGDIISDLSAGLIGGLGLTPSCNIGEGGICLAEAVHGSAPDISGKNLANPTALMLSAVMMLRHLRFNDQADRIHNAILRTIADGKYRTADLGGKSSTSDYTKAVCGHI

SEQ ID NO: 23302 - protein, 115 aa, Triticum aestivum
MARSAVAQVVLVAVVAAMLLAVTEAAVSCGQVSSALSPCISYARGNGASPSAACCSGVRSLASSARSTADKQAACKCIKSAAAGLNAGKAAGIPTKCGVSVPYAISSSVDCSKIR

SEQ ID NO: 23303 - protein, 439 aa, Bacillus cereus E33L
MAVENITMPQLGESVTEGTISKWLVNVGDHVNKYDPLAEVMTDKVNAEVPSSFTGIVKELIAGEGDTLAVGEVVCVIQVEGADEVAATAVEEKTKEEPKAEVATPEKAPKAKQPTDGKPRFSPAVLKLAGEHNVDLDLVEGTGANGRITRKDILKLVESGNIPQAGAAKNEEAVAAVVEARPEAPKAAPVAQKVEAAKPVSVPTMPGDIEIPVTGVRKAIAANMLRSKHEAPHAWMMIEVDVTNLVSYRNSIKGDFKKREGFNLTFFAFFVKAVAQALKEYPQINSMWAGDKIVQKKDINLSIAVATEDELFVPVIKHADEKTIKGIAREITELAGKVRTKSLKADEMQGGTFTINNTGSFGSVQSMGIINYPQAAILQVESIVKRPVIMENGMFGARDMVNLCLSLDHRVLDGLICGKFLGRVKEILENTSENNTSVY

SEQ ID NO: 23304 - protein, 114 aa, Vibrio cholerae O1 biovar eltor str. N16961
MNMKKIEAIIKPFKLDDVREALAEVGITGMTVSEVKGFGRQKGHTELYRGAEYMVDFLPKVKLEIVVTDDVADRCVDTIIETAQTGKIGDGKIFITNVERVVRIRTGEEDEDAI

SEQ ID NO: 23305 - protein, 492 aa, Agrobacterium tumefaciens str. C58
MKGIASAALKNLHRRDLIEDRAFVNGAWVERDQMFAIVDPAGGDHLADVASCTLNDVDFAIDAASKAFAGWRDMLPVDRGDILRNWSARMRENAHDLATIISAEQGKPLAESRGEIAYAANFLDWFASEGERSYGETIPTHLKGSNLSVRMQPIGVTVAITPWNFPSAMIARKAGAALAAGCTMIVKPAPETPLSALALARLAEESGVPPGVLQVLPGEAAPLARRLLENTEVRAFSFTGSTEVGRILLTQSAATVKKASLELGGHAPFIVFADADLTEAVKGCLGAKFATSGQDCLAANRIYVQRSLYPRFVERFAEATSRLTVGHGLETGVDIGPMTRPSVAEKCRQQVAQALSAGARLVCGGQDSPLGGNFVTPTVLADVTDDMLIAREETFGPVAAILPFDDEAEVIRRANATEMGLAAYLYTNDLGRAMRLTDQLEYGMVAVNTPKFTGAPIPFGGWKQSGLGREGSRHGLMEYLEPKYVCFGNLAA

SEQ ID NO: 23306 - protein, 503 aa, Zea mays
MEGAGRDANPLSGYRIGKTLGIGSFGKVKIAEHILTGHKVAIKILNRKKIRSMDMEEKVKREIKILRLFMHPHIIRLYEVIDTPADIYVVMEYVKSGELFDYIVEKGRLHEEEARHFFQQIISGVEYCHRNMVAHRDLKPENLLLDSKYNIKIADFGLSNVMRDGHFLKTSCGSPNYAAPEVISGKLYAGPEVDVWSCGVILYALLCGTLPFDDENIPNLFKKIKGGIYTLPSHLSPSARDLIPRMLVVDPMKRITIREIREHVWFKIRLPRYLAVPPPDTAQQVKKVDEETLNDVIKMGFDKNQLIESLQNRLQNEATVAYYLLLDNRLRTTSGYLGSEFQESMDSSFSQVIAETPTSATELRQHGFSESPGSGLRQHFAAERKWALGLQSRAHPREIISEVLKALQELNVYWKKIGHYNMKCRWSPGCLESMMHNSDSFSAESAIIETDVFMEKSTPTVKFEIQLYKTRDEKYLLDLQRVSGSHLLFLDLCSAFLTQLRVL

SEQ ID NO: 23307 - protein, 48 aa, Bursera longipes
YFHATIWKGVPKFLRRVDTALKNIGINERFPYNAPLIQFSSWMGGDRD

SEQ ID NO: 23308 - protein, 605 aa, Vibrio parahaemolyticus RIMD 2210633
MSQPVLSQINVFPVKSVGGVSLSSAWVEKQGLSFDRRFMIAKADGSMITARKYPQMVTVKSALLADGVVFSSLGMEPLKIRYQDFKMQETPATVWKDAFTAYTTTDDADDWFSQVLGQRVELLFSGEQSNRVRESLGQNVSFADGYPVLVISQASLEELNKRSSEQHSMDQFRTNLVVSDTKPFEEDSWKRIRIGEVEFESLKPCERCILTTINTQRGTFRESKEPLKTLQQFRANERGGVFFGQNLVARNEGIIRQGDKVEVLEYKEPEFYPDNSPVRMTLTCVEREEIAQDFVTLWLEPSNCSLPNYLPGQHLPIEVDINGKKIGRRYTLSSSPSRPGRYAISVKRIAGGRVSNALLDNLQVGDVLEAENPDGQFHLKTHDAQPLLLLSAGSGVTPMLSMVRYLADHNQLNDVVFYHQCRTEHDIPCRSELEQLKREHSGLEVKICLTQPAVDWFGLKGRLSLSHIKQIKDVEQRQVFVCGPDGFMQKAKNLLLKKGLPEAHYHQEAFGVSAVEARPEKEVEIEFNGLKIQGNNQKTLLDQIEDAGKVVSNSCRAGLCGACKVQLTSGQVHHPDVPALTDEERAMGTVLACCAIPETDVTVTE

SEQ ID NO: 23309 - protein, 207 aa, Streptococcus pneumoniae TIGR4
MGDKKYTVEKANRFIAENKHLVNTQYKPEEHFSAEIGWINDPNGFVYFRGEYHLFYQFYPYDSVWGPMHWGHAKSKDLVTWEHLPVALAPDQDYDRNGCFSGSAIVKDDRLWLMYTGHIEEETGVRQVQNMVFSDDGIHFEKISQNPVATGSDLPDELIAADFRDPKLFEKDGRYYSVVAAKHKDNVGCIVLLGSDNLVEWQFESIF

SEQ ID NO: 23310 - protein, 554 aa, Shewanella oneidensis MR-1
MCSIFSILDIQSDAKELRQVALEMSKLMRHRGPDWSGIYASDKAILAHERLAIVDIEHGAQPLLTEDGSLILAVNGEIYNHKELKAQLGDKYSYQTNSDCEVILALYQEYGTEFLDKLNGIFAFVLYDKAKDAYLIGRDHMGIIPLYTGRDAAGNLYVASEMKALMPVCKTVEEFQPGQYLYSSDAAAVKYYTRDWQQYDAVKDNGASQEELREALEAAVKRQLMSDVPYGVLLSGGLDSSVISAITQTFAKRRIEDDGETGAWWPQLHSFAVGLKGAPDLIAAKKVADAIGTIHHEINFTFQEGLDAIKEVIYHLETYDVTTIRAATPMYLMARKIKAMGIKMVLSGEGADELFGGYLYFHKAPNAQAFHEELVRKLDKLHLFDCLRANKAMAAWGLEARVPFLDKEFMDVAMRINPEAKMSKDGRIEKHILRQAFEHKLPKEVAWRQKEQFSDGVGYSWIDGLKAHAAEQVDDLQLANAKFRFPYNTPETKEAYFYRCFFEEHYPLPSAAETVPGGKSVACSTPEALAWDESLRGIIDPSGRAVRSVHAASY

SEQ ID NO: 23311 - protein, 48 aa, Bursera odorata
YFHETIWKGVPRFLRRVDTALKNIGINERVPYNAPLLQFSSWMGGDRD

SEQ ID NO: 23312 - protein, 411 aa, Zea mays
MNALAATSRNFKQAAKLVGLDSKLEKSLLIPFREIKVECTIPKDDGTLASYVGFRVQHDNARGPMKGGIRYHHEVDPDEVNALAQLMTWKTAVANIPYGGAKGGIGCSPGDLSISELERLTRVFTQKIHDLIGIHTDVPAPDMGTNSQTMAWILDEYSKFHGYSPAVVTGKPVDLGGSLGRDAATGRGVLFATEALLAEHGKGIAGQRFVIQGFGNVGSWAAQLISEAGGKVIAISDVTGAVKNVDGLDIAQLVKHSAENKGIKGFKGGDAIAPDSLLTEECDVLIPAALGGVINKDNANDIKAKYIIEAANHPTDPEADEILSKKGVLILPDILANSGGVTVSYFEWVQNIQGFMWDEEKVNAELRTYMTRAFGDVKQMCRSHSCDLRMGAFTLGVNRVARATVLRGWEA

SEQ ID NO: 23313 - protein, 509 aa, Bacteroides fragilis YCH46
MGKGVKIEIMDTTLRDGEQTSGVSFVPHEKLMIARLLLEELKVDRVEVASARVSDGEFDAVKMICDWAARRNLLQKVEVLGFVDGHTSLDWIHATGCRVINLLCKGSLKHCTCQLKKTPEKHIEDILAVVDYANELDIEVNVYLEDWSNGMKDSPEYVFRIVDALKETTIKRFMLPDTLGILNPLQVIEFMRKMKKRYPDTHFDFHAHNDYDLAVSNVLAAVLSGVKGLHTTINGLGERAGNAPLASVQAILKDHFNAITNIDESRLNDVSRVVESYSGIVIPANKPIVGENVFTQVAGVHADGDNKSNLYCNDLLPERFGRVREYALGKTSGKANIRKNLESLGLELDEESMKKVTERIIELGDKKELVTQEDLPYIISDVLKHDGMSNKVKLKSYFVTLAHGLKPMATLSIEIDGQVYEESSSGDGQYDAFVRALRKIYKVTLGRKFPMLINYAVSIPPGGRTDAFVQTVITWSFGEKVFRTRGLDADQTEAAIKATIKMLNIIEEY

SEQ ID NO: 23314 - protein, 244 aa, Gibberella zeae PH-1
MPKSRRAKVVHLTQVDKKTRENKDKLFQNIRDTVPEYQNCFVFSVDNMRNNHLKDVRRELSDCRVFFGKTKLMAKALGQTPEEAIAPGIEHLSKYFTGTVGLILTNRPAEEILTYFENLAPVDFARAGAVATRDFSIPTGVVYATAGEVPAEHDVPLAHTIEPELRRLGVPTRMVKGRVVLGDESGQGEEYTVCKEGDVLDSRQTRLLKLFDMCMSEFKVKVLAYWNAGSSEVTEVNTNAMDEN

SEQ ID NO: 23315 - protein, 309 aa, Mycoplasma synoviae
MKLKKLLHLNFRKENMQVKSTPIARALAAKLGVDISQVKGSGFDGKVLYEDVKNFSPAAAATQPVAASASATAAPQVGAYSEAVKPIRKAIAKAMTNSWSNVAYTNLVHRVNMTKLWDLRSSIKDSLLKSEDVKITFLPFILKAVSVALKEFPLFSAKYNEAKSTLDFPGVINLGFAVDTEAGLMVPVIKNANALSVLDLAREVSRLASAARNKTIKPDDMKNAGFTVTNYGSVGSLWGVPVINYPELAILGVGAIQDEAFVEKGTLVAGKVMYLTVAADHRWIDGADVGRFASRVKQLLESPELLGVY

SEQ ID NO: 23316 - protein, 117 aa, Zea mays
  misc_feature (110)..(110): Xaa can be any naturally occurring amino acid
MATVDLEKLRMSGAGKAIGVLTSGGDAQGMNAAVRAVTRMGIYVGAKVFLIYEGYEGLVEGGENIKPANWLSGSDIMQLGGTIIGSARCKAFTTREGRLAAGYTLLRRGXTNLCVIG

SEQ ID NO: 23317 - protein, 260 aa, Magnaporthe grisea 70-15
MPSRGEPAALVSHIPRADGSAIYSHAGYTVTASANGPIEAQRRDEDPYEALVDVIVRPAAGVGGTRERHLESLLQATLRQIILVKNFPRGLIQVVLQVKSSPENDYASTKLVQANLNLPIIPALLQAAVLALLSAAIPLRATATCTVIAVVAGSDGEAESNLILDPSPREAEGARSVHALAFTSGDRLILAESEGHFTMQEWADVHAKALKICCEPVRDPGNNDMDMGDDNSTDVEGPNMRHFIRETMAAKVSADLHWKG

SEQ ID NO: 23318 - protein, 525 aa, Aspergillus oryzae
MESRLPSKLEPLSTSNSDLVGPSNGNWVVQKFGGTSVGKFALNIIDQVVLPSLLDHSVAIVCSARSSSTKAEGTTNRLLRAARDAENAESKNYVSLVEAVRLEHIEVVESQINSKGLRLQLVTEINDECEKVLKVLEAAQTLGEISVRCVDKVMSTGEKLSCRLMAAFLQDRGVDSEYVDLAEIVDFTISSQGLDQEFYNNLASTLGKKIRACEGRVPVVTGFFGTIPGGLLDQIGRGYTDLCAALVAVGIRAKELQVWKEVDGIFTADPRKVPTARILPAITPAEAAELTFYGSEVIHPFTMEQVIRARIPIRIKNVMNPKGNGTIIFPDSSYKLEKAAIGHDPRLFRTRSPSLVQTPKRPTAVTIKHKILVINVHSNKRSLSHGFFAGIFSVLDRWRLSIDLISTSEVHVSMALHSESPLLNGVGRDEYQIIDEDLKGALRDLQKYGTVDIIPEMAILSLVGKQMKNMIGVAGRMFTTLGENNVNIEMISQGASEINISCVIEERDADRALNIIHTSMFTFLD

SEQ ID NO: 23319 - protein, 514 aa, Glycine max
MDRSTGRGGGGSVDMFLRNYKLGKTLGIGSFGKVKIAEHVRTGHKVAIKILNRHKIKNMEMEEKVRREIKILRLFMHHHIIRLYEVVETPTDIYVVMEYVKSGELFDYIVEKGRLQEDEARHFFQQIISGVEYCHRNMVVHRDLKPENLLLDSKFNIKIADFGLSNIMRDGHFLKTSCGSPNYAAPEVISGKLYAGPEVDVWSCGVILYALLCGTLPFDDENIPNLFKKIKGGIYTLPSHLSPGARDLIPRMLVVDPMKRMTIPEIRQHPWFQVHLPRYLAVPPPDTLQQAKKIDEEILQEVVNMGFDRNQLVESLSNRIQNEGTVTYYLLLDNRFRVSSGYLGAEFQETMDSGFNRMHSGEVASPVVGHHSTGYMDYQGVGMRQQFPVERKWALGLQSRAQPREIMTEVLKALQELNVCLEEDWTLYHECRWVAGTAGHHEMINNSLHSNHYFGNDSGIIENEAVSKSNVVKFEVQLYKTREEKYLLDLQRVQGPQFLFLDLCAAFLSQLRVL

SEQ ID NO: 23320 - protein, 370 aa, Methanocaldococcus jannaschii DSM 2661
MRDIKDNPIRRGIAEQSEAMHPGYTNRAKPYGCKRDPKDIVLKESEDIEGIAIEGPWLEDDISLEEIIKKYYLKIGFQASHIGKAIKIWKHIEEKRKKGDEITVFFGYTSNIVSSGLREIIAYLVKHKKIDIIVTTAGGVEEDFIKCLKPFILGDWEVDGKMLREKGINRIGNIFVPNDRYIAFEEYMMEFFEEILNLQRETGKIITASEFCYKLGEFMDKKLKSKEKEKSILYWAYKNNIPIFCPAITDGSIGDMLYFFKKYNKDEELKIDVANDIVKLNDIAINSKETACIVLGGSLPKHSIINANLFREGTDYAIYVTTALPWDGSLSGAPPEEGVSWGKIGAKADYVEIWGDATIIFPLLVYCVMK

SEQ ID NO: 23321 - protein, 263 aa, Bacillus cereus E33L
MKNERLVICSKKGSSAVITIQNPPVNTLSLEVVQQLINVLEEIEMDDDVAVVIITGIGEKAFVAGGDIKEFPGWIGKGEKYAEMKSIELQKPLNQLENLSKPTIAAINGLALGGGCELALACDLRVIEEQALIGLPEITLGLFPGAGGTQRLPRLIGEGKAKEMMFTGKPITAKEAKEINLVNYITSRGEALNKAKEIAKDISEFSLPALSYMKLAIREGLAVPLQEGLQIEARYFGKVFQTEDVKEGVKAFIEKRVPRFTNK

SEQ ID NO: 23322 - protein, 205 aa, Brassica napus
  misc_feature (94)..(94): Xaa can be any naturally occurring amino acid
  misc_feature (160)..(160): Xaa can be any naturally occurring amino acid
  misc_feature (162)..(164): Xaa can be any naturally occurring amino acid
  misc_feature (166)..(166): Xaa can be any naturally occurring amino acid
  misc_feature (170)..(170): Xaa can be any naturally occurring amino acid
  misc_feature (173)..(173): Xaa can be any naturally occurring amino acid
  misc_feature (175)..(175): Xaa can be any naturally occurring amino acid
  misc_feature (177)..(178): Xaa can be any naturally occurring amino acid
  misc_feature (180)..(182): Xaa can be any naturally occurring amino acid
  misc_feature (184)..(184): Xaa can be any naturally occurring amino acid
  misc_feature (186)..(186): Xaa can be any naturally occurring amino acid
  misc_feature (189)..(190): Xaa can be any naturally occurring amino acid
  misc_feature (192)..(194): Xaa can be any naturally occurring amino acid
  misc_feature (196)..(197): Xaa can be any naturally occurring amino acid
  misc_feature (199)..(203): Xaa can be any naturally occurring amino acid
MWGILRRSAVDGGGFSASSLRRTRFALVSARSYASGSKEMTVRDALNSAIDEEMSADPKVFVMGEEVGQYQGAYKITKGLLEKYGPERVYDTPXITEAGVTEIGVGASDAGLKPVVECMSHNFSRQAIVHVCWSAAWSHRLSAGQINVPIVFRGPNGAAXLXXXAXHSQXYAXWXAXXPXXXRXWXPYXXEXXXGXXKXXXXXLL

SEQ ID NO: 23323 - protein, 352 aa, Zea mays
TRPYEPTRDCSQGLCSMYCPQWCYFVFPPPPPAFDIAGPGGGGGDDDSSGPTFSPLVIAIIGLLASAFLLVSYYTVISKYCGTFSSLRNMVFGSRRGRGRGRGGGGGGGGGGDSGAQVPWGAMPPDGLDETLINKITICKYKRGDGFVDSTDCSVCLGEFRDGESLRLLPKCSHAFHLPCIDTWLKSHSSCPLCRCNIAFVTVGVGAVSPEPEPERRAPREDRDWRRDNPELVLTVGGPSSDPVRGAPQSQSQNAVSGSGGDDGQDALARKDCPERSEEGSGNAEIKEDCALPAVRAASSLSDTHREGRMSIADVLQASLEDELTMARESGLLAGSSGRCPCHGEHSKDGGR

SEQ ID NO: 23324 - protein, 431 aa, Agrobacterium tumefaciens str. C58
MVLVKAMARIVMKFGGTSVANLERIHNVARHVKREVDAGHEVAVVVSAMSGKTNELVDWVQNAAKVAGTNAASFYDAREYDAVVASGEQVTSGLLAITLQSMGINARSWQGWQIPIRTDNAHGAARILEIDGSDIVHRMGEGQVAVVAGFQGIGPDNRIATLGRGGSDTSAVAIAAAVKADRCDIYTDVDGVYTTDPRIEPKARRMKKIAFEEMLEMASLGAKVLQVRSVELAMVHKVRTFVRSSFEDPDAPGMGDLINPPGTLICDEDEIVEQEVVTGIAYAKDEAQISLRRVADRPGVSAAIFGPLAEAHINVDMIVQNISEDGSRTDMTFTVPSGDVAKALRVLDENKGQIGFDVAQNETGLAKVSVIGIGMRSHAGVAASAFKALAEKNINIKAITTSEIKISILIDGAYAELAVRTLHSAYGLDKA

SEQ ID NO: 23325 - protein, 412 aa, Shewanella oneidensis MR-1
MSKRRVVVTGLGLVTPVGNTVDTTWKALLSGKSGIAPITKFDASEFTTRFSGSVKDFDVEQYLTKKDARKMDLFIQYGMAAGIQAIQDSGLDMSKVNPGRVGTAIGAGMGGMWLIEQNHSALMNGGPRKISPFFVPSTIINMIAGHLSIMYGMTGPNFAVTTACTTGVHNIGFAARTIAYGDADVMVAGGAEDVTCPLGVGGFGAAKALSTRNDDPTAASRPWDKDRDGFVIGDGAGVMVMEEYEHAKARGATIYGELVGFGMSGDAFHMTSPPSDGAGAAAAMVNAVNDAKLPLEKIGYINAHGTSTPAGDKAEAAAVKSVFGDHAYNLLVSSTKSMTGHLLGAAGAVEAIFTLLALRDQAVPPTINLDNPDEGCDLDFVAHTARDVKLDYALCNSFGFGGTNGSLLFKKV

SEQ ID NO: 23326 - protein, 556 aa, Arabidopsis thaliana
MSGSVSGCGSGGCSIVWFRRDLRVEDNPALAAAVRAGPVIALFVWAPEEEGHYHPGRVSRWWLKNSLAQLDSSLRSLGTCLITKRSTDSVASLLDVVKSTGASQIFFNHLYDPLSLVRDHRAKDVLTAQGIAVRSFNADLLYEPWEVTDELGRPFSMFAAFWERCLSMPYDPESPLLPPKKIISGDVSKCVADPLVFEDDSEKGSNALLARAWSPGWSNGDKALTTFINGPLLEYSKNRRKADSATTSFLSPHLHFGEVSVRKVFHLVRIKQVAWANEGNEAGEESVNLFLKSIGLREYSRYISFNHPYSHERPLLGHLKFFPWAVDENYFKAWRQGRTGYPLVDAGMRELWATGWLHDRIRVVVSSFFVKVLQLPWRWGMKYFWDTLLDADLESDALGWQYITGTLPDSREFDRIDNPQFEGYKFDPNGEYVRRWLPELSRLPTDWIHHPWNAPESVLQAAGIELGSNYPLPIVGLDEAKARLHEALSQMWQLEAASRAAIENGSEEGLGDSAEVEEAPIEFPRDITMEETEPTRLNPNRRYEDGSKHYFFFDQT

SEQ ID NO: 23327 - protein, 48 aa, Bursera schlechtendalii
YFHETIWKGVPRFLRRVDTALKNIGINERVPYNAPLIQFSSWMGGDRD

SEQ ID NO: 23328 - protein, 396 aa, Novosphingobium aromaticivorans DSM 12444
MAKAKFERNKPHCNIGTIGHVDHGKTTLTAAITKVLAEQGGAEFTDYANIDKAPEERERGITISTAHVEYETANRHYAHVDCPGHADYVKNMITGAAQMDGAILVVNAADGPMPQTREHILLARQVGVPALVVYMNKVDQVDDEEILELVELEVRELLSSYDFPGDDIPIVKGSALAALEGRDDNIGKDSINALMAAVDAYIPQPPRPTDKPFLMPVEDVFSISGRGTVVTGRIETGIIKVGEEVEIIGLKDTQKTTVTGVEMFRKLLDQGEAGDNIGALIRGIKREEVERGQVLAKPGSVTPHTEFSAEVYVLSKDEGGRHTPFFANYRPQFYFRTTDVTGEVVLPEGTEMVMPGDNVTLAVKLIAPIAMDEGLRFAIREGGRTVGSGVVSKITK

SEQ ID NO: 23329 - protein, 358 aa, Streptococcus pneumoniae TIGR4
MMTFGSPEEIIFEGVADFFTNIRRGVRPQDHEIQTLYDNYVRIGGTPLQKITRQEVALVEARLGSEYSVYFANKFSSPFIPDVIGQMEADGIEQCICLILEPHYSFYSVMGYEKFLESKQIQFLVIKDWYQEEALLNYWADEIAKILKEEVKQDSFKVIFSAHSVPIFALDFGDPYIDQIFENSKLVAEKLGLSSEQYTNTWQSESDIGIPWIKPDVLEYLREQTEHPDHYIFVPISFISEHIEVLFDNDVECYDLCQEFGVNYHRPPMPNTDSRLIDALVNTVRVNENQEFKEFLPEEETFDELVPSDETKNILAESQDLQMPEFVKKLIEKKGRENVKMPYLIKKMLEKAGKLPKE

SEQ ID NO: 23330 - protein, 494 aa, Aspergillus niger
MQSNDYRPSYHFTPDQYWMNEPNGLIKIGSTWHLFFQHNPTANVWGNICWGHATSTDLMHWAHKPTAIADENGVEAFTGTAYYDPNNASGLGDSANPPYLAWFTGYTVSSQTQDQRLAFSVDNGATWTKFQGNPIISTSQEAPHDITGGLESRDPKVFFHRQSGNWIMVLAHGGQDKLSFWTSADTINWTWQSDLKSTSINGLSSDITGWEVPDMFELPVEGTEETTWVVMMTPAEGSPAGGNGVLAITGSFDGKSFTADPVDASTMWLNNGRDFDGALSWVNVPASDGRRIIAAVMNSYGSNPPTTTWKGMLSFPRTLSLKKVGTQQHFVQQPITELDTISTSLQTLENQTITPGQTLLSSIRGTVLDVRVAFYPDAGSVLSLAVRKGRSEQTVIKDTQSDATLSVDRTESGDTSYDPAAGGVHTAKLEEDDTGLVSIRVLVDTCSVDLFGGQGEAVISDLIFPSDSSDGLALEVTGGNAVLQSVDVRSLSLE

SEQ ID NO: 23331 - protein, 358 aa, Prunus armeniaca
MARVTLVLSAALVLVAISCGAAASSFDESNPIRLVSDGLRELEQQVVQVLGNSRRALHFARFAHRYGKKYESVEEMKLRYEIFSENKKLIRSTNKKGLPYTLAVNRFADWSWEEFRRQRLGAAQNCSATTKGSHELTDAVLPESKNWREEGIVTPVKDQGHCGSCWTFSTTGALEAAYVQAFRKQISLSEQQLVDCAGAFNNFGCHGGLPSQAFEYIKYNGGLDTEAAYPYVGTDGACKFSAENVGVQVLDSVNITLGDEQELKHAVAFVRPVSVAFQVVKSFRIYKSGVYTSDTCGSSPMDVNHAVLAVGYGEEGGVPFWLIKNSWGESWGDNGYFKMEFGKNMCGVATCASYPIVA

SEQ ID NO: 23332 - protein, 124 aa, Magnetospirillum magnetotacticum MS-1
MDITPLIPTGKQIVKGYGDGGFTIAGLRWEGSVLVLPDRTQSWSVTDLGGVTEDSLSPLLALTEKPRVLLLGCGKRMAPVPASLRAALRAAGITLELMDTGGACRTFNVLVSEDRSVAAALIAV

SEQ ID NO: 23333 - protein, 554 aa, Mycobacterium avium subsp. paratuberculosis
MTSVHTLPDITATPAWDALRKHHDRIGDTHLRQFFEEDPDRGRELTVTVGDLYIDYSKHRVTRETLRLLVDLARTAKLEERRDQMFAGVHINTSEDRAVLHTALRLPRDAELIVDGRNVVADVHEVLDAMGEFTDRLRSGEWTGATGKRISTVVNIGIGGSDLGPVMVYQALRHYADAGISARFVSNVDPADLIATLADLDPATTLFIVASKTFSTLETLTNATAARRWITDALGDAAVAHHFVAVSTNKRLVDDFGINTDNMFGFWDWVGGRYSVDSAIGLSVMAVIGREAFADFLSGFHIVDRHFQTAPLESNAPVLLGLIGLWYSNFMGAQSRAVLPYSNDLARFAAYLQQLTMESNGKSTRADGSPVTTDTGEIFWGEPGTNGQHAFYQLLHQGTRLVPADFIGFSQPIDDLPTAEGSGSMHDLLMSNFFAQTQVLAFGKTAEEIAAEGTPADIVPHKVMPGNRPSTSILANRLTPSVLGQLIALYEHQVFTEGVIWGIDSFDQWGVELGKTQAKALLPVITANNSPAPQSDSSTDALVRRYRSERGRTS

SEQ ID NO: 23334 - protein, 352 aa, Bacillus licheniformis ATCC 14580
MKVFNIASIPGDGVGKEVVPAAQRVLKAVSDVHGGLSFRFTEFPYSCEYYLEHGEMMPDDGLEQLKEFDSIFLGAVGNSKLVPDHISLWGLLIKIRREFEQVINIRPAKYLQGIKSPLANPKDFDLLVVRENSEGEYSSIGGRIFRDEDEIAIQNAVFSRKGAERAMRFAFELAAKRKKHVTSATKSNGIVYSMPFWDEVFENTAKDYPDITADSQHIDALSAFFVTRPEKLDVIVASNLFGDILTDIGAAIMGSIGVAPAANINVNGKYPSMFEPVHGSAPDIIGKGIANPIGQIWTAKMMLDHFGEEELGARLLDVIEDVLKSGYLTPDIGGSSTTDDVTEEIIKRVRTI

SEQ ID NO: 23335 - protein, 662 aa, Asparagus officinalis
MASSRDVESPPTSYAPLPSDDEQRPGSAPPRSRLRLIAIAMPPILLLALAAALFLSGSGAVTDLVAGPSPDTMPEIVRTDRGVEEGVSSKSSGAGPGLLTSVSHGQYPWTNKMLSWQRTGFHFQPEKNWMNDPNGPLYYKGWYHFFYQYNPNAAVWGDIAWGHAVSKDLLSWRHLPLAMVPDRWYDINGVWTGSATILPDGRIIMLYTGATNESVQVQNLAVPADLSDPLLLEWTKVDDANPILVPPPGVGATDFRDPTTAWFEPSDSTWRIAIGTKDADHSGVALVYSTKDFLNYTLLPGTLHTVKHVGMWECIDFYPIATSGAGANRGLDPSVRPSKLVKHVLKESSDDDRQDWYAIGTYDPDTNKWTPDDESLDVGIGLRYDLGKFYASKTFYDQEKKRRVLWGWIGESDSESADILKGWASLQGIPRTVLYDLRTGSNLITWPIEEVESLRSNLHDFSGITIDKGSTFHLDVHGAAQLDIEAEFKINEESLSAEAENGTGVMYNCSGGGGAAERGLLGPFGLLVLANSDLTEQTAAYFYVSRGVDGELQTHFCQDEMRSSKANDIVKSVVGGTVPVLKGETLSLRILVDHSIVESFAQGGRASATSRVYPTEAIYSSAKVFLFNNATGASITAQSLKIWHMNSTLSRPFDFNDGAQAQ

SEQ ID NO: 23336 - protein, 457 aa, Schizosaccharomyces pombe
MLRLQNLPKLVRRFATTALPKTETTTLKNGLTVATEHHPYAQTATVLVGVDAGSRAETAKNNGAAHFLEHLAFKGTKNRSQKALELEFENTGAHLNAYTSREQTVYYAHAFKNAVPNAVAVLADILTNSSISASAVERERQVILREQEEVDKMADEVVFDHLHATAYQGHPLGRTILGPKENIESLTREDLLQYIKDNYRSDRMIISSAGSISHEELVKLAEKYFGHLEPSAEQLSLGAPRGLKPRFVGSEIRARDDDSPTANIAIAVEGMSWKHPDYFTALVMQAIIGNWDRAMGASPHLSSRLSTIVQQHQLANSFMSFSTSYSDTGLWGIYLVTENLGRIDDLVHFTLQNWARLTVATRAEVERAKAQLRASLLLSLDSTTAIAEDIGRQLLTTGRRMSPQEVDLRIGQITEKDVARVASEMIWDKDIAVSAVGSIEGLLDYNRIRSSISMNRW

SEQ ID NO: 23337 - protein, 375 aa, Hordeum vulgare
VELVILPRSIISDNPQEQQNQPPPPPPPPPPQNQDNAEDQDEKEEDEEKDEEEKEDDDEENEKQDDQIPEEFIFDAEGGLVDDKLLFFAQQAQRKKGKAGRAKNVIFSEDRGRYIKPMLPKGPVRRLAVDATLRAAAPYQKLRREKSLDKTRKVFVEKTDMRAKRMARKAGALVIFVVDASGSMALNRMQNAKGAALKLLAESYTSRDQVAIIPFRGDYAEVLLPPSRSIAMARKRLEKLPCGGGSPLAHGLSTAVRVGLNAEKSGDVGRIMIVAITDGRANVSLKKSNDPEAAAASDAPRPSTQELKDEILDVSAKIFKAGMSLLVIDTENKFVSTGFAKEIARVAQGKYYYLPNASDAVISAATKTALADLKS

SEQ ID NO: 23338 - protein, 396 aa, Pseudomonas syringae pv. syringae B728a
MTTQMLRKRICVLPGDGIGIEVMEAALPVIAALNLPFDLVPADIGWQCWRAEGETVPARTWEIMASCDATLLGAITSKPLAEAEAELPLTLQGQNRRYVSPVIQLRQNLDLYANVRPVTDMTGENRFRFVVIRENTEGLYAGLDFGCIPDALVPLLEEREALGAAWQREGQDDATVTLRLQTRSGLMRIFEYAFEYARKNHFTRVTFVDKPMVLRHSSAFARGIFEATAQRYPDVSGVIENVDAVALWMVQRPERFGVIVAENMFGDILSDLGAGVMGGLGFAPSGNFGNSGAYFEPVHGSAPAHAGLNKANPGAMFMAIALMLEHLGFPTESACISQAVSLVSRTSTRTYDLGGSHTTAQVGEAIVQQCIELQSRTFGYRNEQASAPGERHVSAL

SEQ ID NO: 23339 - protein, 319 aa, Geobacillus stearothermophilus
MKRIGVLTSGGDSPGMNAAIRSVVRKAIYHGVEVYGVYHGYAGLIAGNIKKLEVGDVGDIIHRGGTILYTARCPEFKTEEGQKKGIEQLKKHGIEGLVVIGGDGSYQGAKKLTEHGFPCVGVPGTIDNDIPGTDFTIGFDTALNTVIDAIDKIRDTATSHERTYVIEVMGRHAGDIALWSGLAGGAETILIPEADYDMNDVIARLKRGHERGKKHSIIIVAEGVGSGVDFGRQIQEATGFETRVTVLGHVQRGGSPTAFDRVLASRLGARAVELLLEGKGGRCVGIQNNQLVDHDIAEALANKHTIDQRMYALSKELSI

SEQ ID NO: 23340 - protein, 117 aa, Glycine max
KALGMKLLRKKDVPDYKYTIAMLGYADEDKTTVLELTYNYGVTEYSKGNAYAQVAIGTNDVYKSAEAVDLATKELGGKILRQPGPLPGINTKIASFVDPDGWKVVLVDNTDFLKELH

SEQ ID NO: 23341 - protein, 409 aa, Sulfitobacter sp. EE-36
MRRVVVTGLGIVSSIGNNAEEVLASLKDGTSGIVASPEMTEHGFRSRVAGTLKIDVADHIDKRALRFMGGGAAYAYIAMQQAIADAGLSEDQISNPRTGLVAGSGGPSTSALFTAHNVVRDTGATKRIGPFAVPKCMSSTVSANLSTAFKIKGINYSITSACSTSLHCIGNAAEQIMLGKQDVMFAGGGEELDWTLSCLFDAMGAMSSKYNDAPETASRAFDANRDGFVISGGGGMLVLEELEHAKARGATIYAEVTGYAATSDGHDMVAPSGEGGERAMRLALETLPEGRKVGYINAHGTSTPVGDVGEIEAVRRVFGQGSTPPVSSTKSMTGHAQGAAGALEAIFCLLMLKNDFIAKSINVVDLDPKLDPSEIALERVDNAGLDSVMTNSFGFGGTNGSMILSKFQE

SEQ ID NO: 23342 - protein, 659 aa, Oryza sativa
MAISGALFLPGIFQSLSILAVLGVLVTKSGAADFQEQPACVPFSCGHLEGIRYPFRLQGDPLGCGDEAYELVCRDGRAIIHINTGKYFVKDISYNESRFWVVDANLDNSSCPLPLWNNLPYFNDMGTKLYTSAVRWATFLNCSRAINNGMYMPVACLSGNTSFVYVLTTSSSYYVQNIEPSCGYLAVIPVDDRTKNVPDYASYADVVKFMRNGFPVSFPRVESPSHSPVIKACARDTFQNFKEQMYSRNIQNWTSAIIGTELQFLGCVINYYSSATQVWVTLVLVFAVEIVKCIIVLCRFILAPLTVLTFLGYKYRKTRISIDAVEKFLRMQQAHGPKRYAYTEITAITGHFREKLGQGGYGSVYKGFLPGDGHVAIKMLSNSMCNGEEFISEVSTISRIHHVNVVRLVGFCSEELRRALVYEYMPCGSLDKYIFSPEKSLSWDKLNEIALGIARGIDYLHHGCDMQIMHFDIKPHNILLDSNFTPKVADFGLAKLYPRDDSLVPVSAARGTIGYIAPEMISRSFGTISCKADVYSFGMLLLDIAGGRRNREQHTSNSAHLYYPALVYDCLTQQEVSEISEDIGIHWVERKLCIVGFWCIQMKPAERPSMSEVVEMLESDDPDNLQVPPRPFFGVDDHISEMDDCCNSSSKSSAISEDD

SEQ ID NO: 23343 - protein, 501 aa, Centaurium erythraea
MEITDFSTFLLAFLLLSYLLVTGRRLISKKSTGKLPPGPKKFPIVGNLPQLALAGTLPHRAMRDLAKTYGPLMHLRLGEVSQLVVSSPEMAKEVLKTLDPMFASRPDLILADIMLYDNAGLTFAKYGDYWRQLKKIFATELLSAKRVKSFRSLREEETLNTIRWISSNEGKPINMTNTLLNLVFGVLSRATFGKKSPEQDKLVYIVNKAAELATGGNISDLFPSIKFFRLISVVNYKLKSMFAESNRLLDMIMKEHKKGNGSGESKDLVDVLLGYQRENAEFSLTDENIKAVLLDIFIGGTDGSFTTLDWAMSELMRAPTVLKRAQEEVRQAFETDGYIDEEKFEDLKYVTSIIKETLRLHPPAPLLVPRSNDETAHILGYEVPAKSKILVNVWAINRDPRYWEDAESFKPERFLGSSVGYKGTDFHFLTFGAGRRMCPGMVYGYANIVHPLVKLLYYFDWNLPSGIKPEELDMTEEHGLSVKRKADLYLIPSVRNSISHL

SEQ ID NO: 23344 - protein, 293 aa, Cytophaga hutchinsonii
MSVLVNKNSKIIVQGFTGTEGTFHAQQMIEYGTNVVGGVTPGKGGSSHLDRPIFNTVAEAVAKTGADVSIIFVPPAFAADAIMEAADGGIKVIICITEGIPVRDMIDAKAYVTKRKVTLIGPNCPGVITPEEAKVGIMPGFIFKKGRIGIVSKSGTLTYEAADQVVKAGYGISTAIGIGGDPIIGTTTKEAVELLMNDPETDGIIMIGEIGGQLEGDAAKWIKANGTKPVVGFIAGQTAPPGRRMGHAGAIVGGADDTAAAKMKIMAECGIHVVQSPADIGETMAKAMKKQLA

SEQ ID NO: 23345 - protein, 48 aa, Bursera simaruba
YFHQTIWKGVPKFLRRVDTALKNIGINERVPYNAPLIQFSSWMGGDRD

SEQ ID NO: 23346 - protein, 859 aa, Legionella pneumophila subsp. pneumophila str. Philadelphia 1
MSGILIMQQVVIKFGGTSVSTRATWNNIAAITQKHLNTGVQPVIVCSALTQISNKLEKAIEAALLDEHHSLFNDIQSSHLNLAEQLEVNHQLIANDLHQLQQWLTGISLLKQAPAKTHAQILSLGELMMTRLGHAFLEKQGIKVKWYDARELLTSTPTLGGETMNYLSARCESEYDSALVEKFLSSGAQAIITQGFFAANPHGETVLLGRGGSDTSAALLAGKLQAASCEIWTDVPGIYTANPHQLPHARLLKQLNYDEAQEIASMGAKVLHPNCIPPVRKANIPMVVKYTHLPEHSGTLITKDIDESAPLIKSIQVKHSILLISIDTLNMWQQVGFLADVFAAFKKHGFSVDLLSSSEFNVTLSLDVNAKIHDRPAINALLDDLNQFGRAKLIEPCSAVSLVGHHIRTVLPHLGPALEVFEAKQVYLMSLASNDLNLTFVVDESHADKLCQRLHHLLIESNPQIFYYSKSWHEEFGKPNVRPTPWWEIERDRLLTTSAIHSPCYVYHSPTQATRARQLSALESIDSLFYAIKANPFPTILKTLEKEGIGFECVSIQELELVLKLFPNIKKERILFTPNFAPKSEYEFALQTGCYVTIDSLYPLENWPDLFKDREVIVRIDPGTGAGHHKHVSTGGNESKFGITQNDISKILSLTKVNHIKVIGLHAHSGSGILSTDLWQQTAVMLASLTDQFPEVRSINLGGGLGIVEKPGQHPIDFAALDAQLMAVKSQYPGLAIWLEPGRFFVAESGVILAKVTQCKEKGKVKFIGIETGMNSLIRPSLYGAYHEIVNLTRLHEEKAGFAHIVGPICESGDTLGYDRLLPVTREGDVILIANTGAYGHCMSSHYNLRPPAQEIVLE

SEQ ID NO: 23347 - protein, 498 aa, Hypericum androsaemum
MEFLLITQCSLLFVATYLLVNHVILRGRSKNNGSTKLPPGPRPLPIIGNLLALRDKPHKSLAKLARVHGPLVTLKLGQVTTVVVSSPATAREILQKHDATLSNRYIIDAIRAQGHHEAGLAWVPVGPTWRKFRKVCYSHIFTNQKLNSSQHVRQRTIQQLLAEARESCRVGEAMDVGKAAFRAALSSLSISVMSLDLADAASDTAREFKELARCIMNDVGEPNLADYFPVLKRFDPQGVRGRVEISFGRILDLFGSIIADRMEKRGADEDILDTLLTTHDENPELVEINDIKHLLLDLFVAGTETTSSTLEWAMAELLHKPTTMAKAKAELEQIIGKGNSIDQESEVSRLPYLQAVIQETLRLHPAVPLLLPRRAGEEVHVSGFTIPKDAQVLVNVWAMGRDPEVWEDPCSFTPERFLGSSIDVIGTCFELIPFGAGRRICPGLPLAMRMLQMMLGNLLLSFDWKLPDGVTPECMDMEDRFGITLQKAQPLLAIPLSL

SEQ ID NO: 23348 - protein, 173 aa, Zea mays
MASRLAVAVAVAAPASSPSPVATVAPPRVALRRGLPPTWHALRALPRSRGAAVVCQAQGGQDTAIQVPDVSKSTWQSLVVESELPVLVQFWASWCGPCKMIDPIVGKLSKEYEGKLKCYKLNTDENPDIATQFGIRSIPTMMIFKNGEKKDAVIGAVPESTLVTCIDKYVGGR

SEQ ID NO: 23349 - protein, 331 aa, Xenorhabdus nematophila
MSQSTLKVNELYDDADLDENSMEADDFDEALLKNGDDVTNLDEDLDLLQGVNQRMLDATQLYLGEIGFSPLLTAEEEVLFARRALRGDIAARQRMIESNLRLVVKISRRYSNRGLALLDLIEEGNLGLIRAVEKFDPERGFRFSTYATWWIRQTIERAIMNQTRTIRLPIHIVKELNVYLRTARELAHKLDHEPTVEEIAERLDKPVEDISRMMRLNERITSVDTPISGDSDKALLDILSDENDSGPETTIQDDDMKQSIVKWLFELNAKQREVLARRFGLLGYEAETLEDVGREIGLTRERVRQIQVEGLRRLRDILHTQGLNLESLFRT

SEQ ID NO: 23350 - protein, 401 aa, Rhodopseudomonas palustris CGA009
MSDSSAIYDVVVVGGGPAGATAACDLARAGKRVVLLDRAGRIKPCGGAIPPRAIRDFAIPDSMLVAKINAARMVSPSNVEVDMPIDGGFVGMVDREHFDEWLRQRAATVGAERRTGLFKRFSRDESGVNTVHYEGRGPDGSMIDQTVRCRAIIGADGAVSGVARQFLKDADRVPFVFAYHEIIKAPTAEQKAAYESRRCDVYYQGHVSPDFYGWVFPHGNTVSVGTGSMHKGFSLRDSVAELRKQTGLDEVETIRKEGAPIPLHPLPRWDDGHSVLLAGDAAGVVAPASGEGIYYALLGGRLAAEAVEEFLQTADAKALKLARKRFMRGNGSVFRILGLMQWYWYANDKRREQFVSICRDRDVQKLTWDAYMNKKLVRAKPIAHVRIFFKNLAHMTGLASV

SEQ ID NO: 23351 - protein, 409 aa, Bacillus licheniformis ATCC 14580
MGLIVQKFGGTSVGSVEKILNVAYRVIEEKQRGHDVVVVVSAMGKSTDSLVALAKEITEQPSSREMDMLLTTGEQVTISLLTMALQNKGYDAVSYTGWQAGIETENIHGNARITNIDTAKLKERLNEGKIAVVAGFQGVTAEGEITTLGRGGSDTTAVALAAALKADKCDIYTDVPGVFTTDPRYVKTARKLAGISYDEMLELANLGAGVLHPRAVEFAKNYQVPLEVRSSTEKEAGTLIEEESSMEQNLIVRGIAFEDQITRVTVCGLASGLTTLSTIFTTLAKQNINVDIIIQSVTGTSKTSISFSVKTEDLKRTVEVLEEYKDALDYEQIETENRLAKVSIVGSGMISNPGVAAEMFAVLAEKNIQVKMVSTSEIKVSTVVNEGDMVKAVEALHDAFELSKQTAVI

SEQ ID NO: 23352 - protein, 401 aa, Solanum tuberosum
MAFSAGKSYAFSTNFDPLQQNLWGSKPPISSLSIKDIDFKQCDKHNILSKKPLYISAVLSGFGHADESKEFKSRDPLVQCNAYEASQPQSIPIDIEFGQEAQAAATQKLKIGLYFATWWALNVVFNIYNKKVLNAFPFPWLTSTLSLAAGSLMMLVSWATKIAETPKTDFDFWKALFPVAVAHTIGHVAATVSMSKVAVSFTHIIKSGEPAFSVLVSRLLGETFPLPVYLSLLPIIGGCGLAAITELNFNLIGFMGAMISNLAFVFRNIFSKKGMKGKSVGGMNYYACLSMMSLLILIPFAIAVEGPQVWALGWQNAVSQIGPNFIWWVVAQSVFYHLYNQVSYMSLNEISPLTFSIGNTMKRISVIVSSIIIFQIPIQPINALGAAIAILGTFLYSQAKQ

SEQ ID NO: 23353 - protein, 130 aa, Brassica napus
IESYYDSVRNPAFLDWEVNEELRKMKVQIAELAKNPMGLLTEAVHSAGYSGALANPLYAHESALDTLNGELLEEFMTENFTAARMVLAASGVEHEELLQVVEPLTSDLPNVPLQGEPISQYTGGDFPQHT

SEQ ID NO: 23354 - protein, 281 aa, Desulfitobacterium hafniense DCB-2
MTQILNAKPVVQAMKENLRQEVAALQAEGKAPTLGIIRVGSRPDDVYYENNIIKNCETVGIATKTYPLDLNISMEEFTAVMTQVNDDPSVHGIMLFRPLPPQLDEEVIKHLISADKDIDCMSPLNLEKVFEGDMSGLLPCTPAAVMAILRHYDIELKGANAVVMGRSLVVGKPLSMMLLQDNATVTICHSRTRNLPEVAKNADIVIAAMGRARMIDDNYVAENSIVIDVGINDAGDGKICGDVDYDAVVDKVKGITPVPGGVGSVTTTILLNNLVRACKSQ

SEQ ID NO: 23355 - protein, 171 aa, Brassica napus
KPLKLKHPIKQTFDTNKNKKPGMCLLFLTVSMAVMSTVSAQSICTHVLISMAPCLGYITGNSSSPSQQCCSQLAHVIRSSGECLCEVLKGGGPHLGINFNKTQALALPKACNVQTPPVSHCNGPSNTSEHGNGSKTVPGHRSSSRGSSIKVSFSLLAVLSAVSYIINYSRY

SEQ ID NO: 23356 - protein, 104 aa, Bacillus licheniformis ATCC 14580
MAIVKATDQTFSSETSEGVVLADFWAPWCGPCKMIAPVLEELDQEMGDKLKIVKIDVDENQETAGKYGVMSIPTLLVLKDGEVVETSVGFKPKEALEELVNKHL

SEQ ID NO: 23357 - protein, 302 aa, Staphylococcus epidermidis ATCC 12228
MSVFIDKNTKVMVQGITGSTALFHTKQMLDYGTQIVAGVTPGKGGQVVEGVPVYNTVEEAKNETGANVSVVYVPAPFAADSIIEAADADLDMVICITEHIPVVDMVKVKRYLQGRKTRLVGPNCPGVITADECKIGIMPGYIHKKGHVGVVSRSGTLTYEAVHQLTEEGIGQTTAVGIGGDPVNGTNFIDVLKAFNEDSETKAVVMIGEIGGTAEEEAAQWIKENMNKPVIGFIGGQTAPPGKRMGHAGAIISGGKGTASEKIKTLNDCGVETADTPSEIGTTLIDAAKKAGIYEELLTIKK

SEQ ID NO: 23358 - protein, 446 aa, Burkholderia vietnamiensis G4
MQASSTHEPLQLKRTLGLPSVLLFGLAYMAPLIVYGTYGVLAKASGDTAALAYLLALVAIAFTALSYGKLARLYPTAGSAYTYTRKTFNPHLGFMIGWATLLDYFFLPMVIWLIGAAYLNAAFPHVPTWIWIVAFIVLTSGLNIVGIELAARFNIVLMVVQLAIVAMFVVLCWHYASAAAGAGGIAMAEPFFKPHVPFGATMAGAAIAAYSYLGFDAVSTLTEETIDPKRNMPRAILLIALIGGAIFVIAAYAMQLAHPGVEFKDTDSAAFEVAKMIGGDLFVTVFLAGLILAQFASGISAQASVGRLLYAMGRDEILPKRIFGVIHPRFKTPAVNIALAGIVGLIALKLDVATSTSFINFGAFLAFTAVNLCVIRLYLSGRHGERRIGVFGGLVFPAIGAVADLWLLASLEKTAIVLGLVWFGLGLVYLCWITRLFRQAPPEVAI

SEQ ID NO: 23359 - protein, 159 aa, Bacillus licheniformis ATCC 14580
MSIYDISVKTIKGEDTTLRPYKGKVLLIVNTASKCGFTPQYQQLQDLYETYKDRGLEILGFPSNQFMNQEPGDEKSIEEFCSVNYGVTFPMFSKVNVKGDQIHPLFRHLTNKAKGMLGTKAVKWNFTKFLVDQTGENVVRFSPQTNPKEMEETIQKWLG

SEQ ID NO: 23360 - protein, 451 aa, Spinacia oleracea
MASHAALAPSRIPASTRLASKASQQYSFLTQCSFKRLDVADFSGLRSSNSVTFTREASFHDVIAAQLTTKPTGAAPVRGETVAKLKVAINGFGRIGRNFLRCWHGRKDSPLDVVVVNDSGGVKSATHLLKYDSILGTFKADVKIIDNETFSIDGKPIKVVSNRDPLKLPWAELGIDIVIEGTGVFVDGPGAGKHIQAGAKKVIITAPAKGSDIPTYVVGVNEKDYGHDVANIISNASCTTNCLAPFVKVLDEELGIVKGTMTTTHSYTGDQRLLDASHRDLRRARAAALNIVPTSTGAAKAVSLVLPQLKGKLNGIALRVPTPNVSVVDLVVNIEKVGVTAEDVNNAFRKAAAGPLKGVLDVCDIPLVSVDFRCSDFSSTIDSSLTMVMGGDMVKVVAWYDNEWGYSQRVVDLADLVANKWPGLEGSVASGDPLEDFCKDNPADEECKLYE

SEQ ID NO: 23361 - protein, 479 aa, Bacillus cereus G9241
MTTSNTYKFYLNGEWRESSSGETIEIPSPYLHEVIGQVQAITRGEVDEAIASAKEAQKSWAEASLQDRAKYLYKWADELVNMQDEIADIIMKEVGKGYKDAKKEVVRTADFIRYTIEEALHMHGESMMGDSFPGGTKSKLAIIQRAPLGVVLAIAPFNYPVNLSAAKLAPALIMGNAVIFKPATQGAISGIKMVEALHKAGLPKGLVNVATGRGSVIGDYLVEHEGINMVSFTGGTNTGKHLAKKASMIPLVLELGGKDPGIVREDADLQDAANHIVSGAFSYSGQRCTAIKRVLVHENVADELVGLLKAQVAELSVGSPEQDSTIVPLIDDKSADFVQGLVDDAVEKGATIVIGNKRERNLIYPTLIDHVTEEMKVAWEEPFGPILPIIRVSSDEQAIEIANKSEFGLQASVFTKDINKAFAIANKIETGSVQINGRTERGPDHFPFIGVKGSGMGAQGIRKSLESMTREKVTVLNLV

SEQ ID NO: 23362 - protein, 334 aa, delta proteobacterium MLMS-1
MGIKVAINGFGRIGRSIFRAIELDPTFKEIEIVAINDLTPPATLAHLLKYDSVMGIYPHEVKAGDGEIRVDDHPVRVYNQRDPKELPWGELGVEYVIEATGLFTDSDKAQAHLDAGAKKVVISAPAKGQVKTIVMGVNEEDYDPATDHIVSNASCTTNCLAPVAKVIVERFGIKSGLMTTVHAYTGDQRLLDFPHNDLRRARAAAMSMIPNKTGAAAAVALVLPELKGKFDGLAVRVPTPNVSLVDVVMELEQETTVTEVNEALKQATNRYLGYSEEPLVSIDYQGDPRSSVVDAISTKVLGSTVKILSWYDNEWGYSNRVLDLILHMEENRTL

SEQ ID NO: 23363 - protein, 362 aa, Lolium perenne
MTIAEVVAAGDTAAAVVQPAGNGQTVCVTGAAGYIASWLVKLLLEKGYTVKGTVRNPDDPKNAHLRALDGAADRLVLCKADLLDYDAIRRAIDGCHGVFHTASPVTDDPEQMVEPAVRGTQYVIDAAAEAGTVRRMVLTSSIGAVTMDPNRGPDVVVDESCWSDLDFCKKTRNWYCYGKAVAEQAASELARQRGVDLVVVNPVLVIGPLLQPTVNASIGHILKYLDGSASKFANAVQAYVDVRDVADAHLRVFECAAASGRHLCAERVLHREDVVRILAKLFPEYPVPTRCSDETNPRKQPYKMSNQKLQDLGLEFRPVSQSLYETVKSLQEKGHLPVLSEQAEADKETLAAELQAGVTIRA

SEQ ID NO: 23364 - protein, 1315 aa, Botryotinia fuckeliana
MEDSTIAHTTAILQTLALSSIDLPLTNVYGNKGIRLPGADTAEKLALERELAALVSRVQRLEARAITVNNQTLPDTPNELGAPSAFADVLTGAPSRASKSTTSRQQLVNSLLAAREAPTGGERPPKFTKLSDEELEALREHVDHQSKQLDSQKSELAGVHAQLFEQKQRQEQALNVLEVERVAALERELKKHQQANEAFQKALREIGEIVTAVARGDLSKKVQIHSVEMDPEITTFKRVINTMMDQLQIFSSEVSRVAREVGTEGILGGQAKISGVDGTWKELTDNVNVMAQNLTDQVREIASVTTAVAHGDLTQKIERPAQGEILQLQQTINTMVDQLRTFAAEVTRVARDVGTEGILGGQAEIEGVQGMWNTLIVNVNAMANNLTTQVRDIAIVTTAVAKGDLTQKVQAECKGEIKQLKETINSMVDQLQQFAREVTKIAREVGTEGRLGGQATVHDVEGTWRDLTENVNGMAMNLTTQVREIAKVTTAVARGDLTKKIEVEVQGEIASLKDTINTMVDRLSTFAFEVSKVAREVGTDGTLGGQAQVDNVEGKWKDLTENVNTMARNLTTQVRGISTVTQAIANGDMSQKIEVAAAGEILILKETINNMVDRLSIFSNEVQRVAKDVGVDGKMGGQADVAGIGGRWKEITTDVNTMANNLTTQVRAFGDITNAATDGDFTKLITVEASGEMDELKRKINQMVYNLRDSIQRNTLAREAAEFANRTKSEFLANMSHEIRTPMNGIIGMTQLTLDTDLTQYQREMLNIVHNLANSLLTIIDDILDLSKIEANRMIMEEIPYTLRGTVFNALKTLAVKANEKFLDLTYRVDSSVPDHVVGDSFRLRQVILNLVGNAIKFTEHGEVSLTIQKAEQDHCAPNEYAVEFCVSDTGIGIQADKLNLIFDTFQQADGSMTRKFGGTGLGLSISKRLVNLMRGDVWVKSQYGKGSSFYFTCTVRLATSDISFIQKQLKPYQGHNVLFIDKGQTGHGKEIITMLTQLGLVPVVVDSEQHTILLGNGRTKEKIASTYDVIVVDSIESARKLRSIDEFKYIPIVLLAPVIHVSLKSALDLGITSYMTTPCLTIDLGNGMIPALENRAAPSLADNTKSFDILLAEDNIVNQRLAVKILEKYHHVVTVVGNGQEALDAIKEKRYDVILMDVQMPIMGGFEATAKIREYERSLGTQRTPIIALTAHAMLGDREKCIQAQMDEYLSKPLKQNHLIQTILKCATLGGALLEKGREVRQSANEESPNSQNGPRGAQHPASSPTPAHMRPAIEPRAYTTTGPINHGSAESPSLVTADAEDPLARLLMRAHSS

SEQ ID NO: 23365 - protein, 299 aa, Triticum aestivum
  misc_feature (204)..(204): Xaa can be any naturally occurring amino acid
  misc_feature (282)..(282): Xaa can be any naturally occurring amino acid
ARPSSSSAPPPAPRRPRATSFSSNDEAFTWAKKDNRRLLHVVYRVGDIDRTIKFYTECLGMKLLRKRDIPEEKYTNAFLGYGPEETNFAIELTYNYGVDSYDIGAGFGHFGIATDDVAKTVELIRAKGGKVTREPGPVKGGKTVIAFIEDPDGYKFEILERPGTPEPLCQVMLRVGDLDRAISFYEKACGMKLLRKRDNPEYKXTIAMMGYGPEDQNAVLELTYNYGVTEYDKGNAYAQIAIGTDDVYKTAEVVKLSGGKVVREAGPLPGLGTKITAILDPXGWKSVFVDNIDFAKELE

SEQ ID NO: 23366 - protein, 295 aa, Xanthobacter autotrophicus Py2
MGDVVIETRPIDGKAFAAGLRARIAEEVARLGAAHGLKPGLAVVLVGEDPASQVYVRNKAAQTLEAGMTSFEHKLAVDTPETELLALIARLNADPAVNGILVQLPLPAQIDAMKVLSTIDPAKDVDGFHVVNAGRLAVGLDALVPCTPLGCVMLLKHHLGNLSGLKAVVVGRSNIVGKPAAQLLLKEDCTVTIAHSRTRDLPGECRTADILVAAVGRPEMVRGDWIKPGATVIDVGINRIPKPDGKTRLVGDVAYQEAQGIAGLITPVPGGVGPMTIACLLQNTLTAAKRQAGLE

SEQ ID NO: 23367 - protein, 506 aa, Sesamum indicum
MEAEMLYSALALTFAIFMVYRILSNSQDKRSLTKLPPSPPGWLPVIGHAHLMKNLLHRTLYDFSQKLGPIFSIRFGSRLVVVVSSSSLVEECFTKYDIVLANRPQASVDRRSLGFSTTSVIGAPYGDHWRNLRKLCDLEVFAPTRLASFLSIRLDERDRMISALYKISSAGFAKVNLEAKIVELTFNNIMRMVAAKRYYGEEAEDDEEAKRFRDLTKEALELTSASNPGEIFPILRWLGCNGLEKKLAVHSRKTDEFMQGLLDEHRRGERQNTMVDHLLSLQESQPEYYTDEIITGLIVALIIAGTDASVVTTEWAMSLLLNHPKVLEKARKELDTLVGHERMVDEHDLPKLRYLHCIVLETLRLFPSVPTLVPHEPSEDCKIGGYNVPKGTMVLVNAWAIHRDPKVWDDPLSFKPDRFEIMEVETHKLLPFGMGRRACPGAGLAQKFVGLALGSLIQCFDWERTSPEKIDLNEGSGITLPKAKTLEAMCKPRHVMEKVLRQVSNV

SEQ ID NO: 23368 - protein, 551 aa, Prochlorococcus marinus str. MIT 9313
MSRHFDRGSFRAVSDVHQLMSFPDFSASDAHVQWQRFNNLLWHHNDLGIWLDISRMHINAEDFERLGPRFDQAFKAMQALEQGAIANTDEQRMVGHYWLRQPQLAPDQEVCDHIAKEIDLIETFGSNVINGLIKAPNGKKFTDVLWIGIGGSGLGPLLMIRALQNAEQGLRFHFFDNVDPDGMSRVLGNLGDALSTTLVVTVSKSGATPEPHLGMEQARQRLEAMGGHWAGQAVAVTMLNSQLDQLAQKESWLKRFDMFDWVGGRTSITSAVGLLPAALIGCDIRAFLAGAAQMDEATRVSDLHSNPASLMAAAWFVAGDGLGRRDMVVLPYRDRLEVFSRYLQQLVMESLGKRLDRDGNVVHQGLAVYGNKGSTDQHAYVQQLRDGVDNFFATFIEVLEDVENIPAINNEHPGDFLDGFLQGTRAALSQGGRQSLTISMRRFDPRRLGALVALFERAVGLYGELVNINAYHQPGVESGKKAAAAILNLQSRVEDLLADGVERSAGEIHQVIGDGSEEAIFWIMRHLTANKRGYVAEGDWGIPTSLRFSKG

SEQ ID NO: 23369 - protein, 533 aa, Prochlorococcus marinus
MNFPDFNNNNKDDQWERFSQLLFYDEEIGFWLDISRMKFSSEDIGSLQDNFKEACKSMKALEKGSIANIDESRQVGHYWLRNASLAPSKQTSNSIRNEINDIKTFGENILNGKITTAQGKPFTDVLWIGIGGSGLGPLLIVNSLQDNNKGLNFSFLDNVDPNGINKTLNSFRDKLSTTLFVVVSKSGGTPEPQIAMDQTRFFLDKNGLDWSSRAVAITMEGSSLDQIAENEKWLKRFDLPDWVGGRTSITASVGLLPLVLIGEDIDSFLDGASQMDQITRRIDIYKNPSALLAASWYFSGAGKGKRDMVVLPYQDRLQVFSKYLQQLVMESLGKEEDRNANKVNQGLAVYGNKGSTDQHAYVQQLRDGIDNFFVTFVEILEDCTEIPKINKKSPGDYLSGFLQGTRLALSENDRQSITITIKKFNSYTLGSLIALFERAVGIYAELIDINAYHQPGVEAGKKAASNILKLQSEIELLLEDGKLYSIEGIMNTIPGSSQESIYIILRHLSNNDHTYKFVGNLSDPRELQIKKAV

SEQ ID NO: 23370 - protein, 376 aa, Solanum dulcamara
MAIDCMITNGKSPMLDEKKTLIFDASHMKRESNIPTQFIWPDHEKPCAVAQQLAVPLIDLRGFLSGDSDAAQQASKLVGEACRSHGFFLVVNHGVEANLISNAHRYMDTFFDLPLSEKQKAQRKIGEHCGYASSFTGRFSSKLPWKETLSFRYSAEENSSHIVEEYFQRTLGESFNHLGNVYQEYCNSMNTLSLGIMELLGMSLGVEKSHFKEFFEENDSIMRLNYYPPCQKPELTLGTGPHCDPTSLTILHQDCVGGLQVFVDDEWRSITPTFNAFVVNIGDTFMALSNGRYKSCLHRAVVNNKTPRKSLAFFLCPNKDKVVSPPNELVDSNNPRIYPDFTWPTLLEFTQKHYRADMNTLQTFSNWLQHNTTAQL

SEQ ID NO: 23371 - protein, 225 aa, Coccidioides immitis RS
MSLLRPGRININAGCARAARLAYPVNARFVSSSAPRQLDEKAPKTSPEDAPTDVSRGGSMIRRESPSEAMARHQPDYNATVDQATSLFSPVPKRVMDGSEPGDIVAAAVLSGAPTDLQARTVRIYRPAKPATQSGTWHDHHWRMDWDVLSKGHRWENPLMGWQSSADAMQGTHINFKSKEDAIRFAEKQGYEYYVQEPNERAFHPKAYANNFLHVPKKLKHIRTK

SEQ ID NO: 23372 - protein, 328 aa, Chlamydia muridarum Nigg
MPNFVTLEIREAIRQAIDEEMTRDPNVCILGEEVAEYNGAYKVTKNLLDKWGPTRVIDTPISEAAFSGIGIGAALTGLRPIIEFMSWNFSLVAADQIISHAAKMHYMTGGKFSVPIVFRGANGAAAQVSCQHSHCVEALYANIPGLIIIAPSTPADAKGLLKAAIRDNNPVLFLENELDYNLKGEVPTEEYLVPIGKAHIVQEGLDLTIISHSRMVTIVELAAKIAKQRWGFSIEILDLRTIKPLDIAAILTSVKKTGNCLVVEEGHYFCGISAEIIATITEHIFDHLDHPPLRVCQKETPMPYSKTLETATLPNVNRILDAIEKIMR

SEQ ID NO: 23373 - protein, 143 aa, Cytophaga hutchinsonii
MNIFVGSLPFSLEENELREFFEEYGEVSSVKIISDKFTGRSKGFGFVEMPDDAAAQKAIDELNGAEVNGRTIVVNKSEEKKDGPRRSGFSGGGNRGGGGGYSGGGNGGGGYGGNRSGGGGYGGGGNSRGFGGSGTGRNSRGDR

SEQ ID NO: 23374 - protein, 430 aa, Arabidopsis thaliana
MITDLPKDLIEEILSRVSMTSMRVVRLTCKSWNTLSNSESFKKMHIGKVTSTREGESRVIMLIDYNLFLMSAVLMDDVDPSIEFKGKLSCLKEQVKISQVFHCEGLLLCILKDDTRIVVWNPYRQETRWIIPRYSHRPYVMNNIRYALGYENNKSGRSLKLLRFIDYCYTEKHICWHEIYDFDSDLWTTLDVTPHWYILSNWSCVQGVSLKGNTYWCAREENSDGYNHIICFDFTRERFGPLLPLPVNVIDNEYEYVTSSCVREGKIAALFQHNDSYPYELEIWITTKIEAEMVSWNKFLRIDIEPNNNIMVPFIYGGFFIDEEKKKVALGFDEEFGRKTFNIIGEDGYFREFDRITFNIIEEAGERAGVNCGSYVCSYVPSLVRIKKPAQGKRKRQSSLEKLRFDQNTWIFDSIYQATASQIRRRRPTR

SEQ ID NO: 23375 - protein, 338 aa, Hordeum vulgare subsp. vulgare
MAKVMNLTPVHASSIPDSFLLPADRLHPATTDVSLPIIDMSRGRDEVRQAILDSGKEYGFIQVVNHGISEPMLHEMYAVCHEFFDMPAEDKAEFFSEDRSERNKLFCGSAFETLGEKYWIDVLELLYPLPSGDTKDWPHKPQMLREVVGNYTSLARGVAMEILRLLCEGLGLRPDFFVGDISGGRVVVDINYYPPSPNPSRTLGLPPHCDRDLMTVLLPGAVPGLEIAYKGGWIKVQPVPNSLVINFGLQLEVVTNGYLKAVEHRAATNFAEPRLSVASFIVPADDCVVGPAEEFVSEDNPPRYRTLTVGEFKRKHNVVNLDSSINQIININNNQKGI

SEQ ID NO: 23376 - protein, 151 aa, Brassica napus
  misc_feature (109)..(109): Xaa can be any naturally occurring amino acid
VDHASGPVFICSSDSIKPPCKFPSHSEDCPASYKPNSSQDGPVYVIVIENDKMSVQEFPASSTVSDLLSGAGPGSSRWSMYGIPAKEELRPRLNQRPVSDLKWKLKMGXDVVELTPPIPDESLPEYREEIQRMYDRGLAFSRPGTMVGWGS

SEQ ID NO: 23377 - protein, 352 aa, Cytophaga hutchinsonii
MTHINKEKPVLVTGATGYVAGWIVKKLLDEGFTVHASVRNPTDNDKLKYLNTLAQQASGTIKYFKADLLEAGSYDEAMEGCELVFHTASPFINKVADPQRDLVDPALIGTKNVLASVNKTASVKRVVLTSSVAAIIGDAIDCSKMPDGAGTEAHWNTTSTLNHQPYNYSKTVAERAAWEINKKQNRWDLVVINPSLVIGPGLNPFATSESFNIVRQVGDGSMRFGIPDFTIGVVDVRDLAEAHVIAGLKPDAEGRNIISAQNTGLLELAGMLRKKFGTAYHFPTRLLPKSLVWLLAPLAGFKRDMINRNVGYPWRVDNTKSIQKLGIHYRPIEESIVELFQQMIDNGIVKKK

SEQ ID NO: 23378 - protein, 231 aa, Arabidopsis thaliana
MPKSKRDRPVTLSKTKKKGREHKECIVNGIREAVEKYSSVYVFSFENMRNIKFKEFRQQFRHNGKFFLGSNKVMQVALGRSAEDELRSGIYKVSKLLRGDTGLLVTDMPKEEVESLFNAYEDSDFSRTGSIAVETEGPLEQFTHEMEPLLRKLEMPVRLNKGTVELVADFVVCEEGKQLSPKSAHILRLLRMKMATFKLNLLCRWSPSDFELYREDLSELYREDLSDVETS

SEQ ID NO: 23379 - protein, 285 aa, Clostridium acetobutylicum ATCC 824
MERYDIAIIGSGPAGLASAINAKTRNKSVIVFGSSDLSKKLTLAPVINNYLGFYGIRGAELQEKFKEHIDNMGIQIENVKVNNIYAMGEYFSIMTSKDTYEASKVILAMGMEHTKPLKGEDKFLGRGVGYCATCDAPLYKGKIVTIVGYNKEAESEANYLAELASKVYYVPRYKDEYQLVSAVEIVKDVPVEIVGDKKVEKLKLKSRELETDGVFVLKDSAPPEQLVPGLYVEDGHIKVNRKMETNIDGCYAAGDCTGKPYQYMKAVGEGQVAALNAVEKLYTKA

SEQ ID NO: 23380 - protein, 105 aa, Clostridium acetobutylicum ATCC 824
MVKEINESIFDEEIKTSGEPVIVDFWAPWCGPCKMLGPIIDELSEDLDGKAKFTKVNVDENPGIASKFGIASIPTVMIFKDGNPVETLVGFRPKQSITASIEKHM

SEQ ID NO: 23381 - protein, 460 aa, Onion yellows phytoplasma OY-M
MEFDNIIKTLNEQAGSEQKLTSQLIMSFLQNQNIKIPYQQIAQSLKEQGIQIISCETQAAPSLNENPNQNDTQPQTNTTNDDFTDLDSELTNANLENTDDNKDEDNTQDSEEDIQDFDISEEDLISDEKLIELEEDEDEKISKIHSDIKMDDSVRMYLKEIGQIPLLSLAEEQKKSILVFLGKQAKQKLAKHKTKEIELSEEQLQEAHDQIEQARRAKDILVESNYRLVVSIAKRYIGRGILFLDLIQEGNMGLMRAVDKFDYQKGFKFSTYATWWIRQAITRAIADQARTIRIPVHIVETINKMALCTRKLTQKLKKKPTVEELADKMNISAEKIRSIQYIEKKPISLEAPARENEEDETSLGDFISDPNILSPHEYMMKEVTQKLLDEVLENTLTDREEKVLKMRYGLLDGKTHTLEEVGTLFGVTRERIRQIESKALRRLRTPAKQSKLKSLYHNHK

SEQ ID NO: 23382 - protein, 218 aa, Actinidia deliciosa
ETGRHVRMLTHEIRSTLDRHTILKTTLVELGRTLALEECALWMPTRTGLELQLSYTLRHQKPVGFTVPIQLPVINQVFSTNRAAKISPNCPVARLRPLAGKYMPGEVVAVRVPLLHLSNFQINDWPELSTKRYALMVLMLPSDSARQWHVHELELVEVVADQVAVALSHAAILEESMRARDLLMEQNVALDLARREAETAIRARNDFLAVMNHEMRTP

SEQ ID NO: 23383 - protein, 283 aa, Ralstonia eutropha JMP134
MSAQLIDGNALAKQIRSEAAVRAARLTERGHQPGLAVVLVGEDPASQVYVRNKVKACEDNGFHSSLDRYPADLSEAELLARIDALNNDPKIHGILVQLPLPKHIDSHKVLEAIAPEKDVDGFHVANAGALMTGAPLFRPCTPYGCMKMLESISYPLRGARAVVVGASNIVGKPMAMLLLQAGATVTICNSKTRDIGAHTRDADVIVAAVGKRNLITADMVKPGAVVIDVGMNRDDNGKLCGDVDFAGVREVAGYITPVPGGVGPMTITMLLINTLEAAERAAG

SEQ ID NO: 23384 - protein, 163 aa, Pseudomonas fluorescens Pf-5
MNHYLTPDLCDAYPDLVQVVEPMFSNFGGRDSFGGEIVTIKCFEDNSLVKEQVELKGQGKVLVVDGGGSLRRALLGDMLAEKAAKNGWEGLVIYGCIRDVDVIAQTDLGVQALASHPMKTDKRGIGDLNVAVTFAGVTFRPGEYVYADNNGVIVSPSPLKMPE

SEQ ID NO: 23385 - protein, 409 aa, Streptococcus pneumoniae TIGR4
MHAEPSWLADLRQKAFDKIETLELPVIECVKFHRWNLGDGTITENEPSANVPDFTALDHHLKLVQVGTQTVFEQTPVELAEQGVVFTDFHSALEEIPELIEEFFMSSVKYDDDKLAAYHTAYFNSGAVLYIPDNVEITEPIEGIFYQDSDSNVPFNKHIMIIVGKNSKISYLERLESRGEGSDKATANITVEVIARSGAQVKFAAIDRLGENVTAYISRRGKLGNDASIDWAIGVMNEGNVVADFDSDLIGNGSHADLKVVALSSGRQVQGIDTRVTNYGCNSIGNILQHGVILEKATLTFNGIGHIIKGAKGADAQQESRVLMLSDQARSDANPILLIDENDVTAGHAASIGQVDPEDMYYLMSRGLDKATAERLVVRGFLGSVIVEIPVKEVRDEMIATIEEKLSKR

SEQ ID NO: 23386 - protein, 165 aa, Ralstonia eutropha JMP134
MKHVTTDLCDANEPRLADGTLRVMAPVFRAFGKQQAFAGPAATLKIFEDNSLVREALESPGQGRVLVVDGGGSLRCALVGGNLGLLAEKNGWVGIIVNGCVRDTGELDVCDIGIRALAAHPQKSQKRGAGERDVAVQMPGAVVRPGNWIYVDADGVLVSEEKLGA

SEQ ID NO: 23387 - protein, 343 aa, Neisseria meningitidis MC58
MGIKVAINGYGRIGRQVLRAIYDYQIQDQLQIVAVNASGSLETNAHLTKFDTVHGRFEADVSHDGGNLIVNGDKIPFFSTRNPAELPWKELGVDLVMECTGAFTSKEKAKIHLESGAKKVLISAPGGDDVDATVVYGVNDSVLTADMTVVSNASCTTNCLSPVAKVLSESVGIVKGAMTTIHALTNDQTVTDVRHKDLRRARSGVENMIPTKTGAAKAVGLVLPELKGRLDGLAIRVPTVNVSLVDLSFQAARDTTVEEINALMKAASEAGPLKGVLGYNTLPLVSMDFNHTTEASHFDATLTKVVDGNMVKVFAWYDNEWGFSCQMLNTARRMFGLEVRPLK

SEQ ID NO: 23388 - protein, 465 aa, Haloarcula marismortui ATCC 43049
MRLHWHRRDLRATDNAGLAAATPSDPVVPVFIFDTAVLDHAGPPRVAFMLDALDSLREWYRDKGSDLVVAEGDPTSVLPELAAQHGAEKVTWGKDYSGLARERDAAVRQALDDADVAREAVQNAVLHEPGEITTNDGDPYSVFTYFGRKWHDREKAAPYDPPSADTLADVDGDALPTLADLGFEEPEADVPAAGTEEARALLDDFLDENVYEYEERRDFPADECTSRLSAHLKFGTIGIREVYDRTQAAKEGTGGDRRDSVREFQSQLAWREFYTQVLFAHPHVVSSNYKSYENPIEWENDEELLQAWKDGDTGYPIVDAGMRQLRDEAYMHNRVRMIVASFLTKDLLIDWRHGYEWFREKLVDHDTANDNGGWQWAASTGTDAQPYFRIFNPMTQGEDYDPNAEYIKEYVPELRDAAPEIIHDWNDCSLTQRRSAAPEYPDPVVDHSERREEALAMFERARGDD

SEQ ID NO: 23389 - protein, 233 aa, Rhodopseudomonas palustris CGA009
MALGSYIERRGELETYFDRTAADTWAKLTSDAPVSGIRATVRAGRDEMRNTLLSWLPADMTGTRLLDAGCGTGALSIEAARRGAKIVAIDLSPTLVAVARERLPDDIDPAAIDFRSGDMLDPELGEFDFVVAMDSLIHYLPHDICRMLATLASRTRQSMAVTFAPKTPLLTLMHFVGGFFPRADRAPAIEPISEKTLRGLVAEDPLLAQWQPGRTHRVSSGFYTSQALEMVRR

SEQ ID NO: 23390 - protein, 702 aa, Penicillium sp. TN-88
MKSISMLWEVLLLGAFLSQVDAAPTKESYTELYRPQYHFTPAQNWMNDPNGLLYADGTYHMYYQYNPGGNTWGAMSWGHATSEDLTHWKEQPVALLARGYPNNITEMFFSGSAVIDEHNTSGFGKKGKAPWIAMYTSYYPTAQVLPSGKQVRDNQQAQSIAYSLDHGTTWTTYDEANPVILDPPAPYQDQFLDFRDPNIFWHQPIRKWVAVVSLAKLHKLLIYTSTNLKQWDLESEFGPFNAVGGNWECPNIFPLPVDGDKSKVKWVAIVGINPGGPPGTVGSGVQYFLGDFNGTTFTADSNSIHGGGPPDGSFIFEDFEGNHSFSDRGWIATGDFIGTSPVAGTLPGQNPVTGYLGNQLVNTFLNGDATTGTLTSPSFTISYKYINFLIGGGDNINQTAIQLKIDGNVVYAATGSNSEQLTWQHWDVSAFQNQTAVIEIIDLATGGWGHINVDEISFANTPATNNNANWLDWGPDFYATQGYNGLPQYQRTIISWMNNWQYGGVIPTSPWRSAMSIPRQLSLKTIDESIAVVQEPEECWKAITQTQIASTFPSITGTHSLGDIGNAAEIELTFSSGDGTNGSSEFGIIVRASKDFSQQTRIGYDFTTQQVFVDRTKSGDVSFDSTFASVYYAPLSPASDKTVTLRIFVDWSSVEVFGGQGQTTMTTQIFPDENATNAQLFSTGGSTKNVQLRISKVRSTWV

SEQ ID NO: 23391 - protein, 258 aa, Burkholderia vietnamiensis G4
MSYENILVETRGRVGLITLNRPKALNALNDALMDELGAALKAFDADDEIGAIVVTGSEKAFAAGADIGMMATYSYMDVYRGDYITRNWETVREIRKPIIAAVAGFALGGGCELAMMCDIIFAADTAKFGQPEIKLGVMPGAGGTQRLPRAVSKAKAMDMCLTARFMDAAEAERAGLVSRVLPADKLLDEAVAAATTIAEFSLPAVMMVKESVNRAYETTLAEGVHFERRLFHSLFATEDQKEGMAAFVEKRKPVFKNR

SEQ ID NO: 23392 - protein, 403 aa, Oceanicola granulosus HTCC2516
MAHFVVIGAGQAGASLVAKLRAEGFEGDVTLIGAEPVPPYQRPPLSKAYLLGEMEESRLYLRPRGWYDAHDVTLRTATRAVGIDPEAKVVTLQGEEPLPYDELALTTGSNPRVLPADIGGDLERVYCMRDLQDADALAPELVAGRRVLVIGGGYIGLEAAAVAARKGLHVTLVEMAPRILQRVAADVTSDFFRALHAGHGVDVREGVGLDRLLGTDAVTGARLTDGTELDVDFVVVGVGIAPASILAESAGIACDNGIRTDEFGRTSAPHVWAAGDCASFPYRGGRIRLESVGNAIDMAETVARNMLGQQVPYDARPWFWSDQYDCKLQIGGLNMGFDNVHVKQGEGGAVSHWYYRGAELIAVDAMNDARNYMIGKKLIEMGKSPPPEVVVDPATDMKALLKA

SEQ ID NO: 23393 - protein, 341 aa, Linum album
MPADSSSLPGHGQTVCVTGAGGFIASWIVKLLLDRGYSVKGTVRNPDDPKNAHLRALEGADERLTLCKADLLDYQSLREAISGCQGVFHTASPVTDDPEQMVEPAVEGTKNVINAAAEAKVRRVVFTSSIGAVYMDPNRSPDTVVDESCWSDLEFCKNTKNWYCYGKTVAEQAAWEMAKEKEVDVVVVNPVLVLGPLLQSTINASIIHILKYLTGSAKTYANSVQAYIHVKDVALSHILVFENPSAAGRYLCAESVLHRGEVVEILAKLFPDYPVPTKCSDEKNPRAKAYKFSCQKLKDLGLEFTPAKQCLYETVTSLQEKGHLALPASKQQEEPIKIQSS

SEQ ID NO: 23394 - protein, 95 aa, Vibrio angustum S14
MQINITGHHVDVTDSLREYVTTKFEKLERFFDKINNVQVILNVEKLQQIAEATLHINAGEIHAKADSENMYAAIDELTDKLVRQLNKHKDKLNSH

SEQ ID NO: 23395 - protein, 250 aa, Burkholderia thailandensis E264
MYKLVLIRHGESTWNKENRFTGWVDVDLTEQGNSEARQAGLLLKEAGYTFDIAYTSVLKRAIRTLWHVQDQMDLMYVPVVHSWRLNERHYGALSGLNKAETAAKYGDEQVLVWRRSYDTPPPALEPTDERAPYGDPRYAKVPREQLPLTECLKDTVARVLPLWNESIAPAVKAGKQVLIAAHGNSIRALVKYLDGISDADIVGLNIPNGVPLVYELDANLTPIRHYYLGDPEAIAKAQAAVAQQGKASAA

SEQ ID NO: 23396 - protein, 815 aa, Parvularcula bermudensis HTCC2503
MARNRLVIIGNGMAPGRVLDHLFERAPGAYDVTIFNAEPRVNYDRIMLSPVLSGEKAFEDIIIHDDAWYEQNGVTLHRGKRVTEIDRQRKTVTAADGTQAEYDKLLIATGSTPFIIPVPGHDLDGVLGYRDLDDVEKMLAAAEQGGRAVVIGGGLLGLEAAVGLKKRGMDVTVLHLAPTLMERQLDEPAGHLLQAAIERRGIEVLTKANTKEILGTERVEGVRLDNGRVIEADLVCMAAGIRPSTELAKDAGLEIGRGIVVGDDLRTSDPDIFAVGECVEHRGICYGLVAPLYEMAKVIAAQLCEDCEAEYLGSEVSTKLKVTGVDLFSAGDFQTGEGREEVVFRDAAKGIYKRLVLEGDRIVGAVFYGDTKDSAWFFQHIKDRTDVSEYRDTLIFGPAFAGSGAPDPMAAVAALPGDAEICGCNGVCKSKIEGAITGEGLTTIDEVRAHTKASASCGSCTGLVEQLLALTLGDEFDPDAVKPVCGCTDLSHDEVRRLIVAGELKSIPSVMQQLEWKTSCGCAKCRPAINYYLVCAWPGEYVDDGQSRFINERVHANIQKDGTYSVVPRMWGGMTSPSELRAIADVADKFAIPTVKVTGGQRIDLLGVQKEDLPAVWADLNAAGLVSGHAYAKGLRTVKTCVGTDWCRFGTQDSTGLGVKLERFLWGSWAPHKVKLAVSGCPRNCAEATCKDIGVVCVDSGYEIHYAGAAGMHVKGTELLCTVPTEKDAIQYIGALMQMYREQGWYLDRIYKWAAKVGTDYVRDTLDDPAERQAYYDRFVYSQQFMQDDPWAARVAGKDAHEFEPITISRELEAV

SEQ ID NO: 23397 - protein, 396 aa, Magnetospirillum gryphiswaldense
MAKAKFERNKPHCNIGTIGHVDHGKTSLTAAITKVLAETGGATFTAYDQIDKAPEEKARGITISTAHVEYETANRHYAHVDCPGHADYVKNMITGAAQMDGGILVVSAADGPMPQTREHILLARQVGVPALVVFMNKCDMVDDPELLDLVELEVRELLSSYDFPGDDIPIVRGSALCALEDKQPEIGRDAILALMAEVDKYIPQPERPKDKPFLMPIEDVFSISGRGTVVTGRVERGVVKVGEEVEIVGIKPTVKTTCTGVEMFRKLLDQGEAGDNIGALLRGVKREDVERGQVLAAPGSITPHTKFTAEAYILNKEEGGRHTPFFTNYRPQFYFRTTDVTGMVYLPEGTEMVMPGDNVSMTVQLIAPIAMDEGLRFAIREGGRTVGAGVVAKIIE

SEQ ID NO: 23398 - protein, 849 aa, Brassica oleracea var. acephala
MKGARNIYHHSYMSFLLVFVVMILIHPALSIYINTLSSTESLTISSNKTLVSPGSIFEVGFFRTNSRWYLGMWYKKVSDRTYVWVANRDNPLSNAIGTLKISGNNLVLLDHSNKPVWWTNLTRGNERSPVVAELLANGNFVMRDSSNNDASEYLWQSFDYPTDTLLPEMKLGYNLKTGLNRFLTSWRSSDDPSSGNFSYKLETQSLPEFYLSRENFPMHRSGPWNGIRFSGIPEDQKLSYMVYNFIENNEEVAYTFRMTNNSFYSRLTLISEGYFQRLTWYPSIRIWNRFWSSPVDPQCDTYIMCGPYAYCDVNTSPVCNCIQGFNPRNIQQWDQRVWAGGCIRRTQLSCSGDGFTRMKKMKLPETTMATVDRSIGVKECKKRCISDCNCTAFANADIRNGGSGCVIWTERLEDIRNYATDAIDGQDLYVRLAAADIAKKRNASGKIISLTVGVSVLLLLIMFCLWKRKQKRAKASAISIANTQRNQNLPMNEMVLSSKREFSGEYKFEELELPLIEMETVVKATENFSSCNKLGQGGFGIVYKGRLLDGKEIAVKRLSKTSVQGTDEFMNEVTLIARLQHINLVQVLGCCIEGDEKMLIYEYLENLSLDSYLFGKTRRSKLNWNERFDITNGVARGLLYLHQDSRFRIIHRDLKVSNILLDKNMIPKISDFGMARIFERDETEANTMKVVGTYGYMSPEYAMYGIFSEKSDVFSFGVIVLEIVSGKKNRGFYNLDYENDLLSYVWSRWKEGRALEIVDPVIVDSLSSQPSIFQPQEVLKCIQIGLLCVQELAEHRPAMSSVVWMFGSEATEIPQPKPPGYCVRRSPYELDPSSSWQCDENESWTVNQY

SEQ ID NO: 23399 - protein, 809 aa, Arabidopsis thaliana
MAATSPRPPPSTSLTSQQPPSPPSQLPLRTMPGSAEKYKSTVFRTNIPPTFPFFGNVNPNIVAVLDVKSFSHLFDMDLVDKRDVLIGDFRPSLGFYGGVRVGVYLDTTEPKHAKIKGFAMETLKRSSKVWLQELRSNLNIFWGTIESEISKNGAASYIFPLQRCIFSFLCASLAGVDASVSPDIAENGWKTINTWLALQVIPTAKLGVVPQPLEEILLHTWPYPSLLIAGNYKKLYNFIDENAGDCLRLGQEEFGLTRDEAIQNLLFVLGFNAYGGFSVFLPSLIGRITGDNSGLQERIRTEVRRVCGSGSDLNFKTVNEMELVKSVVYETLRFSPPVPLQFARARKDFQISSHDAVFEVKKGELLCGYQPLVMRDANVFDEPEEFKPDRYVGETGSELLNYLYWSNGPQTGTPSASNKQCAAKDIVTLTASLLVADLFLRSKTSKTETQQPSSYGQQQDAMYSSYGTVSDEVLLQIHGCRAHLINGSEAVELAAGDFELVQVLDSNVALAMVVRIGNDLQWPVIKDEPVVKLDSRDYLFTLPVKDGEPLSYGITFFPIDENDIVFVNSIELLDDFLRENSCFSSSPSSSSSSSSSSSSSVNNGIDWKEFAPKIEDYNNVVAKAIAGGTGHIIRGMFKCSNAYTNQVHKGGEIMITKAEKKNGASSKRNATTNKNQINKNLQRATEKLSKTMLNGVGVVSGSVMGPVVKSKPGKAFFSMVPGEVLLASLDALNKLLDAAEAAERQTLSATSKALQEWLVRGESAGEATKDVLGTVGHAAGTAWNVFNIRKAFSPSSSVTSGILKNASRK

SEQ ID NO: 23400 - protein, 370 aa, Senecio vulgaris
MAESNKEAIDSARSNVFKESESLEGTCAKIGGYDFNNGIDHSKLLKSMVSTGFQASNLGDAMIITNQMLEWRLSHDEVPENCSEEEKKNRESVKCKIFLGFTSNLISSGVRETICYLTQHRMVDVLVTTTGGIEEDFIKCLASTYKGKFSLPGADLRSKGLNRIGNLIVPNDNYIKFEDWIIPIFDQMLIEQKTQNVLWTPSRMIARLGKEINNETSYLYWAYKNNIPVFCPSITDGSIGDMLYFHSVSNPGPGLVVDIVQDVIAMDNEAVHASPQKTGIIILGGGLPKHHICNANMMRNGADFAVFINTAQEYDGSDSGARPDEAVSWGKISSTGKAVKVHCDATIAFPLLVAETFAVKKEKASKVNGF

SEQ ID NO: 23401 - protein, 594 aa, Psychrobacter arcticus 273-4
MSDQATRPVVTPAAKSTPKKAAFDFRKYRPFAFAPLLPDRTWPSKTLEKSPIWASVDLRDGNQALIDPMTIEQKMRFFETLVDVGFKEIEIGFPSAAQVEFDFARKLIEENHVPDDVTLQVLVQAREHLIARTFESLKGATRAIVHIYNSTCRIQREKVYGKDKDEIKEIAITGAKLLVKYAAKYPETEWIFQYSPESFSQTETEYAVEVCDAVCDVWQPENGQEVILNLPATVEASMPNVFADQVEYFCRNLAKREHVTISLHTHNDRGCAVAAAELGVLAGADRIEGTLLGNGERTGNMDIMVMAMNLFSQGIDPELDFSNMSEIVQVVSECNNLPLHPRHPYVGELVFTAFSGSHQDAIKKCLDYNEKHVEQTENIWDVAYLPIDPAHIGRSYQDVVRINSQSGKGGVAYILQRNYGFNLPRWMQIDFSGVVQKQAETAARELQNDEILQTFEDTYLQQGSFELLDYTVNNKSGEVYFDGQVQMNGDTITIEGKGNGPLSSFIDGLAQHTGKAIHVINYAEHVINPQHNSGNGIDDDNNSDNKTNANAAAYIQLNVDGEVYSGIGTCSSTVSAMLKGALSAFAQAVSTAAA

SEQ ID NO: 23402 - protein, 727 aa, Debaryomyces hansenii CBS767
MTRNIEKEPLLLINKRDTVSPSEFSTTTCPSFTLLLSKSFMMLPYLTKMSLMATEEIDSESDSDDDTNLPNLPYVANPALLCGSIMSAGEKLRQLRILMKEHGIGVYIIPSEDEHQSEYTAEADMRRQYISGFTGSSGLCVVTLDDDRKLTGKAALSTDGRYFLQAEKQLDLEHWMLLKQGIASYPTWKQFAIQEAIGNKFSNVISCDPRLISVSVGEYFERIRVLQYENKFDFNLLLEVNLVDEVWGKDKPTRSLDPIYVLPLQYSGETTENKLNKIRKILQSKNNTHLVISALDEVAWLFNLRADSDIPFSPVFFSYALVTLESVILYIDKAKIDNGTVELHLHFAHIKGLTIKPYDDFYSDLSQLKSTTSQSDLLIVLPERAATNYALYSYIPQSFAKQSVKFESIISNLKLTKNKSELFNAKIAQFKDSLAFILLISWLNHQIIDKHRAISEYDAACKIYSIRSKLPNFKGLSYETISSSGPNAAVIHYAPTREENSIIDPTQVYLLDSGAHYLEGTTDITRTILFGNPKDKNLEEYKKYYTLVLKGHLAVAMAKFPPNSSSTGTILDAYSRQPLWNEGLDFNHGTGHGVGSFGNVHEGPLYILTTAGGANSLDIFKKGAILTDEPGYYVDGEYGFRIESELEIIESNERVGKTRNGDSFLCFGYLTKVPFCRKLISTKHLSSSEVSWINEYHKSVREDFCNKLLEIGNKRAYNWLLNETKPL

SEQ ID NO: 23403 - protein, 453 aa, Arabidopsis lyrata subsp. petraea
MESSISQTLSKVSDPTTALLIVVSLFIFIGFITRRRRPPYPPGPRGWPIIGNMLMMDQLTHRGLANLAKKYGGLCHLRMGFLHMYAVSSPDVARQVLQVQDSVFSNRPATIAISYLTYDRADMAFAHYGPFWRQMRKVCVMKVFSRKRAESWASVRDEVDKMVRSVSCNVGKPINVGEHIFALTRNITYRAAFGSACEKGQDEFIRILQEFSKLFGAFNVADFIPYFGWIDPQGINKRLVKARNDLDGFIDDIIDEHMKKKENQNAVDDGDVVDTDMVDDLLAFYSEEAKLVSEAADLQNSIKLTRDNIKAIIMDVMFGGTETVASAIEWALTELLRSPEDLKRVQQELAEVVGLDRRVEEADIEKLTYLKCTLKETLRMHPPIPLLLHETAEDTSIDGFFIPKKSRVMINAFAIGRDPTSWADPDTFRPSRFLEPGVPDFKGSNFEFIPFGS

SEQ ID NO: 23404 - protein, 1200 aa, Medicago truncatula
MDLTDQQLKPCRCGYEICVWCWHHIMDMAEKDDTDGRCPACRSPYDKEKIVGTAAKCERLLNEMNLEKKVKNQKAKSKSSDGRKQLSSVRVIQRNLVYIVGLPLDLADEDLLQKREYFGQYGKVLKVSMSRTAAGVIQQFPNETCSVYITYSSEEESIRCIQNVHGFILEGRPLRACFGTTKYCHAWLRNAPCINPDCLYLHEVGSQEDSFTKDEIISAYTRSRVQQITGVTNSMQRRSGNVLPPPLDDWTNNSTEKPIVKSAPTLNTKKLMCFILMMDQNSVCAVRSSPPNGINGRHVSLPTSAAWGTQTTSCHPPVGGLSHPSVLSKPKPDTVNSMHPSVLSKPKPDTVNSALAFSTAVTGTIQASAAQCDGSRRPLLNDESRNTIPRVKSEMPKSVKQYISMDSLASASEKTSACDVSPVPVNLKNELSSRPLSRDSDRGNCTIANTLNATNITGHSFSTGPEEAVSATNEVIRNLSSEFSSINIDRSTSNELCRITKPSSLPTENALTKSPQIQEGSHYDVDRFKDPITTNTAGKTSTSVNGVFSPKEQCGGILDSQSQVVSDAADIEDDVTSFDNQRLKDPEVCLSYLPKATNFLNISKLSSPCLMQYGEPCTAGNDGSLSSNDRVRDESILHSSSMLCNGYPEKLISGSSNGLLRDERNRQSIGRLVGDAVDAGCDAAIDKGESSIISNILSLDFDPWDDSLTSPHNIVKLLGDNTDSQPCPLKTSSSRNVQSNNQSRFSFARQEESKIQSFDVHPSYTVSQQQPKSHILNQNLAERDFYMEKLGIANGFPTSNFEEAGVHSIASSNKLSANSRSQVSAPPGFSIPSRLPPPGFSLHERSDQIFDSLSGNSLLDHSSYLRNSPQTLSAGNIGGTGEIEFMDPAILAVGKGRLQGAQNSQSLDVRSNFMPQLNYFDNEARLQLLMQRSLAQQQNLRFSEIGNTFSQLGDSYGVSSRLDQSQVSNLAPYPQLSMQQSTNAILSNGQWNGWNEVQSGNGLGVAELLRNERLGFNKFYPGYDDSKYRMPNSGDIYNRTFGINGLIFCAAMDGTYDWYIGLPNDDPKKCNLWLQLVISKHPMFSWLNWINMALLILHAHRSVLNYLVPKRERKKCYIFKIVFILGFGCFKSDIAVCFYVVLHSFAPLSFLVLDLQGHDSVSGLVSSFRDAAGNLGLYMEHTITKYDFSCLFGGPSEIGN

SEQ ID NO: 23405 - protein, 556 aa, Cicer arietinum
MGCQGSKEKNKPTPDFTARHHGSSATAASASGVATNNHQYHSVQPSSTHVQTPPPKPDSNPKPTVTTQNVKTVHKTDTTILGKPFDDIKKHYTLGQELGRGQFGITYFCTENSTGNTYACKSILKRKLVSKSDREDIKREIQILQHLSGQPNIVEFKGAYEDRFSVHLVMELCAGGELFDRIIAQGHYSERAAASICRAVVNVVHICHFMGVLHRDLKPENFLLSSKDEGATLKATDFGLSVFIEEGKVYRDMVGSAYYVAPEVLRRSYGKEIDIWSAGIILYILLSGVPPFWAETEKGIFNAILEGELDFASEPWPSISDSAKDLVRKMLNHDPKKRITSAQVLEHPWMREGGEASDKPIDSAVLSRMKQFRAMNKLKKLALKIIAENLSEEEIKGLKAMFANMDTDNSGTITYEELKTGLARIGSRLSETEVKQLMELADVDGNGSIDYLEFISATMHRHRLERDEHLYKAFQYFDKDNSGHITREELETAMTQHGMGDEATIKDIISEVDTDHDGRINYEEFCAMMRSGMPPPGTTIINLQSEFDFICSCNSL

SEQ ID NO: 23406 - protein, 540 aa, Cicer arietinum
MGNCCATPPVTGEETNNNKKKNNKKPKKENPFAIDYNFNANNTNSKLTVLKDPTGREIEVRYELGRELGRGEFGITYLCTDKENGEELACKSISKKKLRTLVDIEDVRREVEIMKHMPKHPNIVTLKDTYEDDNAVHLVMELCEGGELFDRIVARGHYTERAAAAVTKTIVEVVQMCHKHGVMHRDLKPENFLFANKKETAALKAIDFGLSVFFTPGEKFNEIVGSPYYMAPEVLKRNYGPEVDIWSAGVILYILLCGVPPFWAETEQGVAQAIIRSVVDFKRDPWPKVSDNAKDLVKRMLNPDPKRRLTAQEVLDHPWLQNAKKAPNVSLGETVRARLKQFSVMNKLKKRALRVIAEHLSVEEAAGLKEGFKLMDTSNKGKINIDELRIGLHKLGHQIPDADVQILMEAGDVDRDGHLDYGEYVAISVHLRKMGNDEHLHKAFDFFDQNQTGYIEIEELRNALSDEIETNSEEVISAIMHDVDTDKDGKISYEEFASMMKLGTDWRKASRQYSRERFNSLSLKLMRDGSLQLTNENQCQ

SEQ ID NO: 23407 - protein, 249 aa, Mycobacterium tuberculosis CDC1551
MANTGSLVLLRHGESDWNALNLFTGWVDVGLTDKGQAEAVRSGELIAEHDLLPDVLYTSLLRRAITTAHLALDSADRLWIPVRRSWRLNERHYGALQGLDKAETKARYGEEQFMAWRRSYDTPPPPIERGSQFSQDADPRYADIGGGPLTECLADVVARFLPYFTDVIVGDLRVGKTVLIVAHGNSLRALVKHLDQMSDDEIVGLNIPTGIPLRYDLDSAMRPLVRGGTYLDPEAAAAGAAAVAGQGRG

SEQ ID NO: 23408 - protein, 266 aa, Oceanospirillum sp. MED92
MELSSLYVTVIEPSKVQRHIIIGHLNSFGIENIEEFEEAKPALEHMLVTPPDVVLSSMHLPDMTGTDLVTQMRGLEALEKITFLLVSSETHYRYLEPIRQAGAIAILPKPFSREEMAMALKSTLDYVSDFESDSDSDEYDALRVLVVDDSTMSRNYIKQMLDSLSIHSIDTAADGSDALQMIDDGARYDLIITDYNMPNVDGKELIEHIRSHSEQPTVPILMVTSEQNESRLAAVQSAGVSAICSKPLSYDTVKQLIEQLVTDYDM

SEQ ID NO: 23409 - protein, 352 aa, Brucella melitensis biovar Abortus
MSGTDKVRVNVSQTAQTPLHTSAKLPKVGVLLVNLGTPDGTSYGPMRRYLAEFLSDRRVIEWSRLIWYPILYGIVLNTRPRRSGRLYDRIWNHENNESPLRTYTRAQGEKLAKALSDQPNVVVDWAMRYGQPSIESITDRLLQQGCERIVIFPLYPQYSATTTATVNDKFFEALMKKRFMPAIRTVPSYEAEPVYIDALARSVEKHLVTLSFKPEVILTSYHGIPKSYSDKGDPYRQQCLETTRLLRERLGLGEDEMRATFQSRFGPEEWLQPYTDETVKELAKNGVKLVAVLNPGFVADCLETVDEIGNEAAEEFLENGGENFSHIPCLNDSEEGMKVIETLVRRELLGWV

SEQ ID NO: 23410 - protein, 554 aa, Ralstonia eutropha JMP134
MSQAIEIKVPDIGDYDAVPVIEVHVKPGDSINAEDALVTLESDKATMDVPSPQAGVVKEVRIKVGDNVSEGSVLVMLEAAGAAAPAPAPAVAAPAPAPAQAAAPAPAPAAAPAPAAAPAAGGTIEVKVPDIGDYDAVPVIEVHVKPGDTINPEDAVVTLESDKATMDVPSPQGGVVKEVKVKVGDNVSEGTLLILLEGAAGAAAPAPAAAAPAPAPAAAPAQAAAPAPVAAAPAPAAAASAPVGVTGKAAHASPSVRKFARELGVDVSRVPGTGPKNRITQEDVQRYVKGVMTGQAAAPAQAAAAGGGGGELGLLPWPKVDFTRFGEVESKALSRIKKISGANLHRNWVMIPHVTNHDEADITDLEAFRVQLNKENEKSGVKVTMLAFMIKATVAALKKFPNFNASLDGDNLVLKKYFNIGFAADTPNGLVVPVIKDADKKGVLEISQEMSELAKLARDGKLKPDQMQGGCFSISSLGGIGGTYFTPIINAPEVAIMGVCKSYMKPVWDGKQFAPRLTLPLSLSWDHRVIDGAEAARFNTYFGQLLADFRRILL

SEQ ID NO: 23411 - protein, 394 aa, Exiguobacterium sibiricum 255-15
MNGFDLVEEAVEDLKHGRPIIVCDDENRENEGDLILLAEHATPEQINFMITYGKGLVCVPVSPQLAARLELNPMTDVNTDPHGTAFTISIDHEDAMTGISAAERALTIQRMLTDGPKQFKRPGHIFPLIAKEGGVRERRGHTEAGVDLARLAGSAEATVICEIILEDGTMARVDDLLTYKEVHGLKMITIDALVAYLERPVRREADVLLPAVHGAFRMLGYTTPDQKEHVTVLSGEPEDGMLVRLHSECLTGDVFGSKRCDCGPQLDAALERIGQEGGAVLYLRQEGRGIGLMAKLKAYELQEQGLDTVEANHALGYATDLRNYSVAAAMLHDLGVTKIRLMTNNPEKQQALENEGITVLERVPLEIAAVPENKQYLQTKQTKLGHLLDIQGGN

SEQ ID NO: 23412 - protein, 220 aa, Capsicum annuum
MSAFGKLVVIMVMAMLAISLDKAYAGDPDMLQDVCVADLNSSLTVNGYLCKKNFSEIDFSSMAIAKAGSTNTTFGSLVTGANVMKVPGLNTLGVSMARIDHAPGGINPPHTHPRAAEMIFVLVGELDVGFITTSNVLVSKHIVKGEVFAFPRGLVHFQQNNGDVPAAVVAGFNSQLPGTQSIATTLFASSPTVPDSVLTKTFQIGTKEVEKIKSRLAPKK

SEQ ID NO: 23413 - protein, 451 aa, Novosphingobium aromaticivorans DSM 12444
MAVSDHVDLPTFMEGVKKRNPYQPEFVQAVQEVAEDIFDFIEDKEEYHAQQILRRIAEPDRVVSFRVCWEDDNGNVRVQRGWRVQNNNAIGPYKGGIRFHPSVNESVLKFLAFEQTFKNALTGLPMGGGKGGSNFNPKGKSVREIMRFCQSFMTELYRHIGADVDVPAGDIGVGGREIGYMFGQYKRITNHFTGVLTGKGLEWGGSLIRTEATGYGAVYFLANMLATKGEDLRGKTAVISGSGNVATHAAEKIVQLGGKVLTLSDSGGFIHDPDGIDQEKIDWVKTHKTHRRGRIEEYVDAFPGASFHAGKTPWGVPCDVALPCATQNELLGEDARTLIANGCKGVAEGANMPTDLEGVHVFKAARILYAPGKASNAGGVAVSGLEMSQNSERRSWKEHELQQMLKDIMAGIHKSCLTYGDQGGGYIDYVKGANIAGFKKVADAMLAFGVV

SEQ ID NO: 23414 - protein, 597 aa, Synechococcus elongatus PCC 6301
MALIVQKYGGTSVGSVERITAVAQRIAQTVAAGNQVVVVVSAMGHSTDELLKLANGISANPSRRELDMLLATGEQVSIALLSMALHEQGCDAISMTGAQVGIITEAHHSRARILEIDPQRLQSQLDAGRVVVVAGFQGIASSDRTALTEITTLGRGGSDTSAVALAAALNADRCEIYTDVPGILTTDPRLVPEAHLLEEITCDEMLELASLGASVLHPRAVKIARNYGVRLVVRSSWTQEPGTGVVAPPRRSDRSLQGLEIGRPVDGLALDTDQAKVALLHVPDRPGIAASLFGEMAQRGVNVDLIIQSIHEGNSNDISFTVSQADLEKAEAGTTQLLADLGGEQQSEAAVAKVSISGVGIVGRPGIAAQMFSALAQGGINIQMISTSEVKVSCVIAAADQQRAIAALQESFELEEAIAATATDACTTDLPAVRGVALDRDQARLAILNVPDLPGMAATIFQILADRQISVDMIIQSQRGRIHNGQPCRDIACTLPPADAELAAAALQAFADQHGCSLEIQTEIAKVSIVGSGMVQQPGVAAQMFAALANHGINIHMIATSEIKVSCIVDASQAVEALQTVHAAFGLASDRRIEVPA

SEQ ID NO: 23415 - protein, 583 aa, Agrobacterium tumefaciens
MTIQLQKPDITELKPRITVFGVGGGGGNAVNNMITVGLQGVDFVVANTDAQALTMTKADRVIQLGVNVTEGLGAGSQPEVGRAAAEECIDEIIDHLNGTHMCFVTAGMGGGTGTGAAPVVAQAARNKGILTVGVVTKPFHFEGGRRMRLAEQGIEELQKSVDTLIVIPNQNLFRIANDKTTFADAFAMADQVLYSGVACITDLMVKEGLINLDFADVRSVMREMARPMMGTGEASGPARAMQAAEAAIANPLLDETSMKGAQGLLISITGGRDLTLFEVDEAATRIREEVDPDANIILGATFDEALEGLIRVSVVATGIDRVAGIGEQNIAEMRAAAAKPLIRPSAAVAPAPAAVQPAHAVSQAPKTVDQIAQTIRSAEAEMERELGFAAHQQPSQDFRPQSKLFASSPAEAPAALRPAQPVQQAAPAPVAQAPVYHAPEQVAVPAPRMQQAQAPVYQEPAPVGRQPEPVRMPKVEDFPPVVKAEMDHRDRATPVAQEERGPMGLLKRITNSLGRREEEEVPSDMMDAPSMAPQRRAPLSPEASLYAPRRGQLDDHGRATPSSSSHHDDDQLEIPAFLRRQSN

SEQ ID NO: 23416 - protein, 966 aa, Flaveria trinervia
MANRNVEKLASIDAQLRLLVPGKVSEDDKLVEYDALLLDKFLDILQDLHGEDLKEAVQQCYELSAEYEGKHDPKKLEELGSLLTSLDTGDSIVIAKAFSHMLNLANLAEELQIAYRRRIKLKSGDFADEANATTESDIEETFKRLVHKLNKSPEEVFDALKNQTVELVLTAHPTQSVRRSLLQKHGRIRNCLAQLYAKDITPDDKQELDEALHREIQAAFRTDEIRRTPPTPQDEMRAGMSYFHETIWKGVPKFLRRVDTALKNIGINERFPYNAPLIQFSSWMGGDRDGNPRVTPEVTRDVCLLARMMTSNMYFSQIEDLMIEMSMWRCNSELRVRAEELYRTARKDVKHYIEFWKRIPPNQPYRVILGDVRDKLYNTRERSRHLLVDGKSDIPDEAVYTNVEQLLEPLELCYRSLCDCGDHVIADGSLLDFLRQVSTFGLSLVKLDIRQESDRHTEVLDAITQHLGIGSYREWSEEKRQEWLLAELSGKRPLIGPDLPKTEEVKDCLDTFKVLAELPSDCFGAYIISMATSTSDVLAVELLQREYHIKHPLRVVPLFEKLADLEAAPAAMTRLFSMDWYRNRIDGKQEVMIGYSDSGKDAGRFSAAWQLYKTQEQIVKIAKEFGVKLVIFHGRGGTVGRGGGPTHLALLSQPPDTINGSLRVTVQGEVIEQSFGEEHLCFRTLQRFCAATLEHGMNPPISPRPEWRELMDQMAVVATEEYRSVVFKEPRFVEYFRLATPELEFGRMNIGSRPSKRKPSGGIESLRAIPWIFSWTQTRFHLPVWLGFGAAFKHAIQKDSKNLQMLQEMYKTWPFFRVTIDLVEMVFAKGNPGIAALNDKLLVSEDLRPFGESLRANYEETKNYLLKIAGHKDLLEGDPYLKQGIRLRDPYITTLNVCQAYTLKRIRDPNYHVTLRPHISKEYAAEPSKPADELIHLNPTSEYAPGLEDTLILTMKGIAAGMQNTG

SEQ ID NO: 23417 - protein, 488 aa, Pisum sativum
  misc_feature (312)..(312): Xaa can be any naturally occurring amino acid
MALSSTAATTSSKLKLSNPPSLSHTFTASASASVSNSTSFRPKLTLTRLSSSFLNPSTILHLTPSQRTNRPSSSPFTVRAARGKFERKKPHLNIGTIGHVDHGKTTLTAALTMALACLGNSAPKKYDEIDAAPEERARGITINTATVEYETETRHYAHVDCPGHADYVKNMITGAAQMDGAILVVSGADGPMPQTKEHILLAKQVGVPSVVVFLNKQDQVDDEELLELVELEVRELLSSYEFPGDDIPIVSGSALLALEALMANPTLKRGNNQWVDKIYQLMDEVDKYIPIPQRQTELPFLLAIEDVFSITXRGTVATGRIERGLVKVGDVVDLVGLRETRNTTVTGVEMFQKILDDAMAGDNVGLLLRGIQKIDIQRGMVLAKPGTITPHSKFSAIVYVLKKEEGGRHSPFFAGYRPQFYMRTTDVTGKVTSIMNDKDEESKMVMPGDRVKIVVELIVPVAIEQGMRFAIREGGKTVGAGVIGAIIE

SEQ ID NO: 23418 - protein, 101 aa, Arabidopsis thaliana
SRRTTRPKEALVEMCKDEFVQKMTFIGFLSKRVGRVGPLEDLKWVGNTMGGLVGVIALRKEMDKLYGLISNYCGFSALFNLLSSFFLSVNINFTLYVWFLL

SEQ ID NO: 23419 - protein, 903 aa, Rhodopseudomonas palustris CGA009
MNDFKDAKRKFEGAPVPAPRRPVRRGGRALIRLFGVAVIVSLSVMAGRIASQHTRAWEPPGVGHGLDVPWWIFVISLAVGLSIAGLIELQLSRYERRNAHKLRQAHLAAIVEGSSYAIVGQSIDGTVLSWNKTAERLFGYTAEQAIGQNATELMVPDDLRDEEQQMLSGISDGTAFAYLWTKRKRANGTLVDVAVSISPIRADDGRLIGMAASMRDITDLVQAEREVHDLNAALERQVAERTCQLEKTLTLQTAILERAAYAVIATDVTGTITLFNPAAERMLGYKAEDLIGRASAMLFHDSDELAARAEAMRKEGISVSSNLGVLQARLARNDPDTAMWTYIDAMGNRIPTRLTLSRLRTKTGVNLGVLGIAVDLTEQLKYEDELKAARASAEQASAAKADFLANMSHEIRTPLNGIIGYADLVLEDETLAPDTRRQVMRIFEASDSLRVIIDDILDFSKIEACGLTLESKPLYINELIANCASIIEPKADEKGLKLIATAQATPPVLIGDAGRLRQVLLNLMNNAVKFTTAGSVELIVSCIGRVDHLVRLRISVADTGIGISPEAQKGLFKRFSQADETISRKFGGTGLGLAISQRIVQAMHGELKIDSQPGVGSTFYFEVELPVAERLDIERLDAQVHCSRSVKILVVDDVEMNRDLCKTMLTRAGHDVDLADSGATAIAMVASRTYDLVFMDVQMGEMDGLEATRRIRALGHAYRDVPIIALTANVLPEQVERYKAAGVDGHLGKPINRAELLACVARWIDGDIAHVPSEPLAPVELGSEPEHPVRDQAALEDLRMFASEHDIAGFAEQLRDTITRIRAQWPHHIDAMKLDHEARTALGAAAHKTVSLAGQLGFKQLAAACRRMEAACAPHRDIHDAFAALHAALDNAEPVLDAPHELT

SEQ ID NO: 23420 - protein, 404 aa, Spinacia oleracea
MESRVLSRTTAIAALPKLFRPSREAASFGFATGVKTPVGLVKDGGSLTWGRQLRPVLLLEPVQTGPVCSRREKTAVQPCRAASGSSGEAKTGFLEKYPALVTGSFFFMWYFLNVIFNILNKKIYNYFPYPYFVSVIHLFVGVVYCLASWSVGLPKRAPMDSKLLKLLIPVAVCHAIGHVTSNVSFAAVAVSFTHTIKALEPFFNAAASQFVLGQSIPITLWLSLAPVVIGVSMASLTELSFNWLGFISAMISNVSFTYRSLYSKKAMTDMDSTNIYAYISIIALFVCLPPAIIVEGPQLMKHGFNDAIAKVGLTKFISDLFWVGMFYHLYNQLATNTLERVAPLTHAVGNVLKRVFVIGFSIIAFGNKISTQTAIGTSIAIAGVALYSLIKAKMEEEKRQMKST

SEQ ID NO: 23421 - protein, 254 aa, Lactobacillus casei
MDGAILVVAATDGPMPQTREHILLARQVGVDYIVVFLNKTDLVDDPELIDLVEMEVRELLSEYDYPGDDIPVLRGSALKALEGDKEQEKVIMELMDTIDEYIPTPVRETDKPFLMPVEDVFTITGRGTVASGRIDRGTVKVGDEVEIIGLKPDVLKSTVTGLEMFRKTLDLGEAGDNVGVLLRGINRDQVERGQVLAKPGSIQLHNKFKGEVYILTKEEGGRHTPFFSNYRPQFYFHTTDVTGVIELPEGVEMV

SEQ ID NO: 23422 - protein, 853 aa, Pseudomonas syringae pv. syringae B728a
MNTTVFPLNDVKTLIVVGNGMVGHHCVEQLIAGGALERYRIHVFGEETQRAYDRVHLSEYFTGRDAESLAMSEMSVYEQPGLTLHLGVPVLEIDRDRHEIITAEGCFSYDKLILATGSYPFVPPIEGARGNSRLVYRTLEDLDSIRYAATKARRGVVVGGGLLGLEAANALKSLGLEAHVVEFAPRLMPVQLDDLGGAALKARIEALGVGVHLSRATQSISDGKQYRYRMNFANDEFLETDLIVFSAGIRPQDALARQCELALGPRGGIAIDEHCRTSDADIYAIGECAAWNGSVFGLVAPGYQMARGVAAQLCEQDTDAFFGADMSTKLKLLGVDVGSIGDAHGALAGAVSYRFIDEATASYRRLVVSADGKQVLGAVLVGDNSYYDTLLQYAQNGIPLPADPSSLILPRGEGAPTLGADALPATATICSCHNVSKGAVCSAIDNGCTDLAAIKSCTKAATGCGGCTALLKQVFEHELIARGVAVDKSLCEHFAYTRQELYSMVRVEGIETFDELLTRHGKGTHGCDICKPAVGSILASCWNRPITEPSLVPLQDTNDTFMANMQKNGTYSVVPRIPGGEITPDGLIAIGAVAKKYDLYTKITGGQRIDLFGAQLHELPDIWSELIEAGFETGHAYGKSTRTVKSCVGSTWCRYGVQDSVAMALRIEDRYKGLRSPHKLKFAVSGCTRECAEAQSKDVGVIATENGWNLYLCGNGGMRPRHAELFATDLDDQTLIRYIDRFLMLYIRTADKLQRTSVWRETLEGGLDYLKAVIVDDSLGLAAELESQMQLVVDRYECEWANALKDPEKLKRFRTFVNDGRADPDVQFVKERAQRRPARPEELALIPLFKEVV

SEQ ID NO: 23423 - protein, 324 aa, Methylococcus capsulatus str. Bath
MTSITYGGNTYPLDKDQSVLDCLVGHGAPVPFSCRSGVCQTCLMRAVRGVPPEDSQRGLKDSLKLQNYFLACVCHPTNDLEAALPQEVVRSLPATVTALEPLNSEIMHVSLECHAPLEYRAGQFINLFREPTLGRSYSLASVPQHDEHLHLHVRRLPQGKVSGWIHEHLRIGQTVEIRGPSGDCFYVPGRPEQELVLIGTGSGLAPLYGILRDALQRGHSGPIRLFHGSRNRAGLYLTDRLRELAREYPNFDYVPCVSGEEPAPGLAAGRAHEIAFMEIPDFKDKRLFLCGHPEMVSAAKRRAFLAGAAMKDIYADPFNVNAAP

SEQ ID NO: 23424 - protein, 489 aa, Caulobacter crescentus CB15
MAAVKETVETVAALEKYEHGFTTDIDQEFAPKGLSEDIVRFISAKKDEPEWMLEWRLEAYRRWLAMDEPDWAKVSYPPIDYQDTYYYAAPKTKEGPKSLDEVDPELLAVYEKLGIPLKEQAVLAGVEGAPRYAVDAVFDSVSVVTTFKKELAQAGVIFCSMSEAVREHPELVRQYLGSVVPTSDNYFACLNSAVFSDGSFVYVPPGVRCPMELSTYFRINAKDSGQFERTLIIADKGAYVSYLEGCTAPMRDENQLHAAVVELVLLDDAEIKYSTVQNWYPGDPETGKGGIYNFVTKRADCRGDRSKVSWTQVETGSAITWKYPSCVLRGEGSSGEFYSIAVTNGHQQADTGTKMIHLGANTRSRIVAKGISAGKSTSTYRGLVSAHPKAKGARNFTQCDSLLIGKDCAAHTVPYIEARNGQSVFEHEATTTRLSDDQLFYCQQRGLSEEESVALLVNGFVKDVLQQLPMEFAVEAQKLVAISLEGSVG

SEQ ID NO: 23425 - protein, 397 aa, Bacillus cereus E33L
MFHRIEEALEDLKQGKVVIVCDDENRENEGDFIALAEYITPETINFMITHGRGLVCVPITEGYAERLQLEPMVSHNTDSHHTAFTVSIDHVSTTTGISAHERATTIQQLLNPASKGADFNRPGHIFPLIAKEGGVLRRAGHTEAAVDLAQLCGAEPAGVICEIINEDGAMARVPDLLQCAKQFDIKMITIEDLIAYRRHHETLVTREVEITLPTDFGTFQAIGYSNSLDTKEHIALVKGDISTGEPVLVRVHSECLTGDVFGSCRCDCGPQLHAALAQIEREGKGVLLYMRQEGRGIGLLNKLRAYKLQEEGFDTVEANEKLGFPADLRDYGIGAQILKDLGLQHLRLLTNNPRKIAGLQGYDLTVTERVPLQMPAKEENKTYLQTKVNKLGHLLNL

SEQ ID NO: 23426 - protein, 308 aa, Escherichia coli
INGFGRIGRIVFRAAQKRSDIEIVAINDLLDADYMAIMLKYDSTHGRFDGTVEVKDGHLIVNGKKIRVTAERDPANLKWDEVGVDVVAEATGLFLTDETARKHITAGAKKVVMTGPSKDNTPMFVKGANFDKYAGQDIVSNASCTTNCLAPLAKVINDNFGIIEGLMTTVHATTATQKTVDGPSHKDWRGGRGASQNIIPSSTGAAKAVGKVLPELNGKLTGMAFRVPTPNVSVVDLTVRLEKAATYEQIKAAVKAAAEGEMKGVLGYTEDDVVSTDFNGEVCTSVFDAKAGIALNDNFVKLVSWYDN

SEQ ID NO: 23427 - protein, 1037 aa, Arabidopsis thaliana
  misc_feature (617)..(617): Xaa can be any naturally occurring amino acid
  misc_feature (645)..(645): Xaa can be any naturally occurring amino acid
MERARRLAYRGIVKRLVNDTKRHRNAETPHLVPHAPARYVSSLSPFISTPRSVNHTAAFGRHQQTRSISVDAVKPSDTFPRRHNSATPDEQTHMAKFCGFDHIDSLIDATVPKSIRLDSMKFSKFDAGLTESQMIQHMVDLASKNKVFKSFIGMGYYNTHVPTVILRNIMENPAWYTQYTPYQAEISQGRLESLLNFQTVITDLTGLPMSNASLLDEGTAAAEAMAMCNNILKGKKKTFVIASNCHPQTIDVCKTRADGFDLKVVTSDLKDIDYSSGDVCGVLVQYPGTEGEVLDYAEFVKNAHANGVKVVMATDLLALTVLKPPGEFGADIVVGSAQRFGVPMGYGGPHAAFLATSQEYKRMMPGRIIGISVDSSGKQALRMAMQTREQHIRRDKATSNICTAQALLANMAAMYAVYHGPAGLKSIAQRVHGLAGIFSLGLNKLGVAEVQELPFFDTVKIKCSDAHAIADAASKSEINLRVVDSTTITASFDETTTLDDVDKLFKVFASGKPVPFTAESLAPEVQNSIPSSLTRESPYLTHPIFNMYHTEHELLRYIHKLQSKDLSLCHSMIPLGSCTMKLNATTEMMPVTWSSFTDIHPFAPVDPLLQVLAHYRXVDNVYGDRNLVCTLQPANEEQAAAAVSXLNEATMKRFALAPKPTMGRFGLIPDPETYLYWLLLLFPASSSLSLSLPVQCTYVVLSSSLIYLIKYISLLMVTYPSTHGVYEEGIDEICNIIHENGGQVYMDGANMNAQVGLTSPGFIGADVCHLNLHKTFCIPHGGGGPGMGPIGVKNHLAPFLPSHPVIPTGGIPQPEKTAPLGAISAAPWGSALILPISYTYIAMMGSGGLTDASKIAILNANYMAKRLEKHYPVLFRGVNGTVAHEFIIDLRGFKNTAGIEPEDVAKRLMDYGFHGPTMSWPVPGTLMIEPTESESKAELDRFCDALISIREEIAQIEKGNADVQNNVLKGAPHPPSLLMADTWKKPYSREYAAFPAPWLRSSKFWPTTGRVDNVYGDRKLVCTLLPEEEQVAAAVSA

SEQ ID NO: 23428 - protein, 308 aa, Escherichia coli
INGFGRIGRIVFRAAQKRSDIEIVAINDLLDADYMAYMLKYDSTHGRFDGTVEVKDGHLIVNGKKIRVTAERDPANLKWDEVGVDVVAEATGLFLTDETARKHITAGAKKVVMTGPSKDNTPMFVKGANFDKYAGQDIVSNASCTTNCLAPLAKVINDNFGIIEGLMTTVHATTATQKTVDGPSHKDWRGGRGASQNIIPSSTGAAKAVGKVLPELNGKLTGMAFRVPTPNVSVVDLTVRLEKAATYEQIKAAVKAAAEGAMKGVLGYTEDDVVSTDFNGEVCTSVFDAKAGIALNDNFVKLVSWYDN

SEQ ID NO: 23429 - protein, 411 aa, Sorghum bicolor
MFLADRRGPCRRRDGDAIGHREQEAASLPLVLLLVVLQALPRRPAPAVPAQAACRAASATPRREVEEEEGARPAVDEDGSVGQVRAREKAMVINLEFIRAIVTADEVLLLEPLAQEVIPFIDKLRRHFPLKSVEVDVGATQVGNVDGKHAKTGAECGLPFEFQVLELALEAVCLSFHSSLSDLNKHAIFVLDELTENVSTRNLERVRSLKRNLTSLLAGVHKVRDEVEHLLDHNENRAQLHLSRKQIKSPQDEALLVSSALNCNFPSKTNLDIRNSVINQGTGIAVVAPLDDTVGDLEMLLESYFMQLDGIRNRITMVRGYIVDTEDYINIQLDNLRNGLIQLHLILIIVSFGISTNTLIAASFAINMPNNGDYKKFVGDFWQFVGGTSSFCLLVIVVLLGYAWRNRLLGS

SEQ ID NO: 23430 - protein, 308 aa, Escherichia coli
INGFGRIGRIVFRAAQKRSDIEIVAINDLLDADYMAYMLKYDSTHGRFDGTVEVKDGHLIVNGKKIRVTAERDPANLKWDEVGVDVVAEATGLFLTDETARKHITAGAKKVVMTGPSKDNTPMFVKGANFDKYAGQDIVSNASCTTNCLAPLAKVINDNFGIIEGLMTTVHATTATQKTVDGPSHKDWRGGRGASQNIIPSSTGAAKAVGKVLPELNGKLTGMAFRVPTPNVSVVDLTVRLEKAATYEQIKAAVKAAAEDEMKGVLGYTEDDVVSTDFNGEVCTSVFDAKAGIALNDNFVKLVSWYDN

SEQ ID NO: 23431 - protein, 415 aa, Neisseria meningitidis MC58
MSQRRVVITGLGQVSPVGNTVAEAWDTLLTGKSGIGAITRFDTSDINSRVAGEVRGFDIGQYISAKEARRMDVFIHYGIAAALQAIADSGLDDVENLDKDRIGVNIGSGIGGLPGIEVTGKAVIEGGARKINPFFIPGSLINLISGHVTILKGYRGPSYGMVSACTTGAHAIGDSLRMIKYGDADIMVAGGAEGAISTLGVGGFAAMKALSTRNDDPATASRPWDKGRDGFVIGEGAGILVLEELEHAKKRGAKIYAEIVGFGMSSDAYHITAPNEEGPALAVTRALKDAGINPEDVDYVNAHGTSTPLGDANETKALKRAFGEHAYKTVVSSTKSMTGHLLGAAGGVEAVYSILAIHDGKIPPTINIFEQDVEAGCDLDYCANEARDAEIDVAISNSFGFGGTNGTLVFKRFKG

SEQ ID NO: 23432 - protein, 233 aa, Triticum aestivum
  misc_feature (26)..(26): Xaa can be any naturally occurring amino acid
  misc_feature (48)..(48): Xaa can be any naturally occurring amino acid
  misc_feature (51)..(52): Xaa can be any naturally occurring amino acid
  misc_feature (65)..(65): Xaa can be any naturally occurring amino acid
  misc_feature (107)..(107): Xaa can be any naturally occurring amino acid
MACSKMEVKGFFFPRFAPPRGFEKAXHFFPGKGFSGIEIGGKFIKFTXALXXNLQAETTVPAVVXNWPAKPPANLASEVAFFRRVVTGEFEKFTRVTMILPLTGAQXSDKVTEKCVAYWKATGVYTDAEAAPVDKFKEAFGPHSFAPGASIFFTQSPAGVLTVAFSKELSVPESGGVAIDNARLWEAVLESIIGEHGVLPAAKFSLATRVAELLKGASHAGGEPAADPPPPPV

SEQ ID NO: 23433 - protein, 299 aa, Humulus lupulus
ELTGGHRILSYLDPSEPKHAKLKSLIFFMLKARRDMVIPEFHATYTELFENLESDLAAKGKTSFGEANDQAAFKFLGRALYGVSPTDTKLGTDGPKLVQKWVLFNLHPILVLGLPKLVEELAIHSFRLPSFLVKSDYRRLYDYFYEAGGYVLDEAEQMGISREEACHNLIFATCFNTFGGMKILFPNMLKSIGRVRVKLHTQLAEEIRGAVRSNGGKVTMAAMEQMPLMKSVVYEAFRFEPPVPLQYGRAKKDLVIESHDAVFEVKEGEMLFGFQPFATKDPKIFDRAEEFVPDRFVGE

SEQ ID NO: 23434 - protein, 765 aa, Xanthomonas oryzae pv. oryzae KACC10331
MPGEPGISTRPFSHCERGTTTRCGEGDAHVTVVISHLLVPATVSTVVTSSSFDRLQALLQRPAVASISPALREALARAWQELPPAQTDNVPWALLGDTLDALALLAADEATLIAALLFDLPALRGAVTDLPWQPAERRVAVEGLLDGLDAADQVWALHAGREAGRNSEGLRRLLLSIIHDLRVVPILLARQLSRMRVADRLSKEQRHALAQLTRDIHAPLANRLGIWQVKWELEDLAFRHLEPDTYRRIAREVDETRVARERYLEAVKRTLSAALAQQGLRADVSGRPKHIYSIWRKMQKKRLSFDQLYDIRAVRVMVDDVAACYAALGAVHSLWAPVPSEFDDYIARPKANDYRSLHTAVVGPEGRTIEIQIRTHEMHAQAELGVAAHWKYKEGGKGGEKAFDRKILWMRQLLEQVQEGEHGELAGALDAELIEDRVYALTPKGEVIDLPQGATPLDFAYHVHTMVGHRCRGARVNDRIVPLTYRLRSGDRVEIMTAKEADPRRDWLLASNGFLASGRSRDKVRAWFHKLDRARNVQAGKDLLDRELKRLGLQHADLSVATRKFHADTIDDLYIQVALGDTGPNQVSRALLEAERAASQPAVPAPPRPTARREGLGKSKFTVEGVGNLLVQLARCCQPVAGEPIAGYLTRGRGITVHRTDCAALARLAAAHPQRVLPVEWGKAGTGYEVDVQVRAVDRRWLLKDITNLIAQEDAHVLEINSDNVRDTGRAQLRLRLKVSDYDQLSGLLGKLDALPGVSEVRRLG

SEQ ID NO: 23435 - protein, 430 aa, Desulfitobacterium hafniense DCB-2
MSEDKFDAIVVGGGIAGTVAAYLLAKEGLEVILVERGNYAGSKNMTGGRIYSHSLGKIMPDFAREAPVERRITREKISLMTDESNVTLDFYSSKLGVQGSDSYSILRGVFDQWLAEKAEEAGVQIIPGIRVDDLIIREGKVCGVVAGEDELEANITILADGVNSLLAQKLGFRGELAAHHVAVGAKEIIELPPQVIEDRFNCNGNEGTAWLFAGYPSDGRVGGGFLYTNKSSISLGVVTTLSDVIKGSKTVPQMLEDFKQHPAVQPLIKDGKMIEYSGHLVPEAGLAMIPKIVGNGVLVVGDAAGFCINLGYMVRGMDFAVASAECAAKAVLKAKEAQDFSEGYLHCYQGLLEQSFVMQDLKRYKDFPHFLEETPRIFNEYPKMAADLLADMFVVKGEPAQPLRKTIMQHVNKIGLLNIIKDGWKGVRSL

SEQ ID NO: 23436 - protein, 374 aa, Carboxydothermus hydrogenoformans Z-2901
MKIVIVGGGIAGVSAAAAAREVSDTAEITLISAEKYYPYYRLKLSEYLSGELKEESLLLHPPSWYEERKIKVILGKKVTGARLESRELTLHDGTVVPFDRLILTTGSYAFKPPVSGGDLPGVYTLRNLDDLKAIRDRAEKARRAVVIGGGVLGLEVAYYLGKRGVWVGVVEHNDRLLPRQVDEEGSKILSRAAQEAGVELYLARDVDRIEGIEQVEKVVFKDGSSVATDIVVFSTGVRPYLEVANMLTLGINRGIIVDKYMATSRENIYAAGDVAEFEGQMPGIWPVAMEQGKVAGANAAGASKIYTPIPPQNVLKVFGKTVFSIGTVMGEGVTSRREDRGDNFLKYYYKDEKLVGALLIGDVKLVNEVRKLFS

SEQ ID NO: 23437 - protein, 270 aa, Glycine max
MSQDLKRDYVVSEEIGRGRFGTVFRCSSADSGHSYAVKSIDKVAITAAGDSLDAQCLLTEPKIVQLLSPHPHIVNLHDLYEDETNLHMVLDLCYESQFHHRVMSEPEAASVMWQLMQAVAHCHRLGVAHRDVKPDNILFDEENRLKLADFGSADTFKEGEPMSGVVGTPHYVAPEVLAGRDYNEKVDVWSAGVVLYQMLAGFLPFRGDSPVEIFEAVLRANLRFPTRVFCSVSPAAKDLLRRMLCKEVSRRFSAEQVLRHPWFSVAEQSE

SEQ ID NO: 23438 - protein, 468 aa, Idiomarina loihiensis L2TR
MREAIWFRSDLRILDNPAVFSACHGDEPPLAIFFVCHETWKSHDWAPIKVDFIWRNLECLQQDLAEKGIELQVQLVPKFSQVPGALRSFCRENKIARVHINAEYALDEKRRDAATNAVLSNDDIELVSHHGNLLVSPGEVRTQQGDYYKKFTPFNRRWRQVLSEKTYSEPLQIKSYSRVTAKGLPECPLGRKDSSDWSAGEQQVLGKLGQFVGHSVDDYQQARDLPAENGTSQLSAYLAQGVIGPQTAVRALHKFSPEFPFGLASGADTWLTELAWREFYQHLMYFVPRLSKGESFQSETDSIQWLEDDDAFQRWCDGRTGYPIVDAGMRQLTSTGWMHNRLRMITANFLVKDLLVDWRKGEAFFMQHLIDGSFPANNGGWQWSASVGTDAVPYFRVFNPVKQSEKFDPDGQYIRKWVEELKEVPTKYIHWPHSWLQQQSSNNYCDPMVEHKFARERFLTTFKQVKNG

SEQ ID NO: 23439 - protein, 407 aa, Saccharophagus degradans 2-40
MAKEKFERNKPHVNVGTIGHVDHGKTTLTAALTRVCSEVWGGAAVAFDGIDNAPEERERGITIATSHVEYDSPIRHYAHVDCPGHADYVKNMITGAAQMDGAILVCGSTDGPMPQTREHILLSRQVGVPYIVVFLNKADLLAEDCGGVDSEEYAEMMELVEMELRELLDTYEFPGDDTPIIAGSALMALNGEDENELGTTAVKKLVEALDSYIPEPERAIDQPFLMPVEDVFSISGRGTVVTGRVERGIVKVGEELEIVGIRDTTKTTCTGVEMFRKLLDEGRAGENVGVLLRGTKRDDVERGQVLSKPGSVTPHTTFQSEIYVLSKDEGGRHTPFFKGYRPQFYFRTTDVTGACELPEGVEMVMPGDNVQMTVTLIAPIAMEEGLRFAIREGGRTVGAGVVAKIIA

SEQ ID NO: 23440 - protein, 548 aa, Mycobacterium bovis AF2122/97
MSDARVPRIPAALSAPSLNRGVGFTHAQRRRLGLTGRLPSAVLTLDQQAERVWHQLQSLATDLGRNLLLEQLHYRHEVLYFKVLADHLPELMPVVYTPTVGEAIQRFSDEYRGQRGLFLSIDEPDEIEEAFNTLGLGPEDVDLIVCTDAEAILGIGDWGVGGIQIAVGKLALYTAGGGVDPRRCLAVSLDVGTDNEQLLADPFYLGNRHARRRGREYDEFVSRYIETAQRLFPRAILHFEDFGPANARKILDTYGTDYCVFNDDMQGTGAVVLAAVYSGLKVTGIPLRDQTIVVFGAGTAGMGIADQIRDAMVADGATLEQAVSQIWPLDRPGLLFDDMDDLRDFQVPYAKNRHQLGVAVGDRVGLSDAIKIASPTILLGCSTVYGAFTKEVVEAMTASCKHPMIFPLSNPTSRMEAIPADVLAWSNGRALLATGSPVAPVEFDETTYVIGQANNVLAFPGIGLGVIVAGARLITRRMLHAAAKAIAHQANPTNPGDSLLPDVQNLRAISTTVAEAVYRAAVQDGVASRTHDDVRQAIVDTMWLPAYD

SEQ ID NO: 23441 - protein, 371 aa, Saccharomyces cerevisiae
MFRSVATRLSACRGLASNAARKSLTIGLIPGDGIGKEVIPAGKQVLENLNSKHGLSFNFIDLYAGFQTFQETGKALPDETVKVLKEQCQGALFGAVQSPTTKVEGYSSPIVALRREMGLFANVRPVKSVEGEKGKPIDMVIVRENTEDLYIKIEKTYIDKATGTRVADATKRISEIATRRIATIALDIALKRLQTRGQATLTVTHKSNVLSQSDGLFREICKEVYESNKDKYGQIKYNEQIVDSMVYRLFREPQCFDVIVAPNLYGDILSDGAAALVGSLGVVPSANVGPEIVIGEPCHGSAPDIAGKGIANPIATIRSTALMLEFLGHNEAAQDIYKAVDANLREGSIKTPDLGGKASTQQVVDDVLSRL

SEQ ID NO: 23442 - protein, 495 aa, Nocardia farcinica IFM 10152
MAISSPRRRSSLLRTKSVEQSIRDTDEPDSKLRKDLTAWDLTIFGVAVVVGAGIFTLTARTAGNVAGPSVSLAFVFAAIACGLTALCYAEFASTVPVAGSAYTFSYATFGELAAWIIGWDLFLEFALAVSVVSKGWSQYLGEVLNITPIVDLGGLDFDWGAVLLIAVLCVLLAMGTKLSSRVSAIAVAIKLAVIALVIAVGLAYFDTDNLSPYIPPSEAGQGGEGIHQSLFSYLTGAGNSTFGWYGLLAAASLVFFAFIGFDVVATTAEETKNPQRNVPRGILGSLAVVTVLYVAVSLVLTGMVSYTELSGENATLATAFGLHGVTWAEKIIAVGALAGLTTVVMVLYLGQTRVLFAMSRDGLLPRPLAHTGRHGTPVRLTIIVGVACAVLAGFVDMGALEEMVNIGTLFAFVLVAIGVIILRRTRPDLPRGFRVPLVPLVPILAVLACLWLMVNLTVETWIRFIIWMALGLIIYFAYSRRNSLLGKEEVSLRKE

SEQ ID NO: 23443 - protein, 875 aa, Thermobifida fusca YX
MTRDSARQEMPDQLRRDVRLLGEMLGTVLAESGGQDLLDDVERLRRAVIGAREGTVEGKEITELVASWPLERAKQVARAFTVYFHLVNLAEEHHRMRALRERDDAATPQRESLAAAVHSIREDAGPERLRELIAGMEFHPVLTAHPTEARRRAVSTAIQRISAQLERLHAAHPGSGAEAEARRRLLEEIDLLWRTSQLRYTKMDPLDEVRTAMAAFDETIFTVIPEVYRSLDRALDPEGCGRRPALAKAFVRYGSWIGGDRDGNPFVTHEVTREAITIQSEHVLRALENACERIGRTHTEYTGLTPPSAELRAALSSARAAYPRLMQEIIKRSPNEPHRQLLLLAAERLRATRLRNADLGYPNPEAFLADLRTVQESLAAAGAVRQAYGELQNLIWQAETFGFHLAELEIRQHSAVHAAALKEIRAGGELSERTEEVLATLRVVAWIQERFGVEACRRYIVSFTQSADDIAAVYELAEHAMPPGKAPILDVIPLFETGADLDAAPQVLDGMLRLPAVQRRLEQTGRRMEVMLGYSDSAKDVGPVSATLRLYDAQARLAEWAREHDIKLTLFHGRGGALGRGGGPANRAVLAQAPGSVDGRFKVTEQGEVIFARYGQRAIAHRHIEQVGHAVLMASTESVQRRAAEAAARFRGMADRIAEAAHAAYRALVDTEGFAEWFSRVSPLEELSELRLGSRPARRSAARGLDDLRAIPWVFAWTQTRVNLPGWYGLGSGLAAVDDLEALHTAYKEWPLFASLLDNAEMSLAKTDRVIAERYLALGGRPELTEQVLAEYDRTRELVLKVTRHTRLLENRRVLSRAVDLRNPYVDALSHLQLRALEALRTGEADRLSEEDRNHLERLLLLSVNGVAAGLQNTG

SEQ ID NO: 23444 - protein, 402 aa, Legionella pneumophila subsp. pneumophila str. Philadelphia 1
MKHSLATIEEAVATLKAGKMIILMDDEDRENEGDLVIAAEHATPEAINFMSRLGCGLICLPMAEELIDKLQLPMMARHNKSPYGTAFTVSIEAANGVSTGISARDRARTIQVAIDPKSGPSDIISPGHVFPLRARKRGVLERPGQTEGSVDLVKLAGLTPAAVICEIINEDGTMSRRDELALFSKKHQIPLVTIKDLIQYRVRHENLIHPVATTQIPLEENGVFTMTVFENQIDSCEHFVLVKPPLYGNQVPLVRIHSECITGDVFGSRKCDCGKQLELSLSQIGAEGGILIYLRQEGRGIGLANKLKAYALQEQGFDTVDANLELGLPADDRDYAVAYQILKYLGVEALRLLTNNPLKIASLERYGMKITQRIPLEIEPSRENHSYLKTKKIKLGHLLAID

SEQ ID NO: 23445 - protein, 148 aa, Agrobacterium tumefaciens str. C58
MKPTMATTPPSITLLKPRIAVISVGGGGGNAVNNMIMQYLEGAEFILANTDAQALSMSKAPRLVQLGPTVTEGLGAGSLADIGQAAADESIDEIMDHLDGMHMCFVTAGMGGGTGTGAAHVIARAGSPLSCNRNGWFAALIFENAEPT

SEQ ID NO: 23446 - protein, 159 aa, Corynebacterium glutamicum ATCC 13032
MTSIHDISVTLNDGTETTMADWAGHLLLIVNVASKCGLTPQYEGLQKLYEEYQDRGFFVIGVPCNQFNGQEPGTDAEVCAFAQNQYDVTFPLLSKTEVNGEGAHPLYKVLKEATDGSEIEWNFEKFLVDAEGNTIKRFAPRTEPSAAEVVEAIEENLPI

SEQ ID NO: 23447 - protein, 377 aa, Rheum australe
MADVAMQNPAPVAGQIPDFPTVSTYGGQFIQYNIFGNMFEVTAKYRPPILPIGRGAYGIVCSVLNTETNEMMAMKKIANAFDNYMDAKRTLREIKLLRHFDHENIIGLRDVIPPPLRREFTDVYIATELIDTDLHQIIRSNQSLSEEPSQYFLYQKLRGLKYIHSAHAIHRDLKPSNLLINSNCDLKICDFGLARPTFENEHMTEYVVTRWYRAPELLLNSSDYTSAIDVWSVGCIYMELMNRKPLFPGRDHVPQMRLVTELLGSPLESDLNFSEGGCGEIFSPNAPTTSSAVARVFPHINPMAIDFIERMLTFDPTRRITVEESLAHPYLARLHDAEDEPICPETFSFEFERHTMGEEEMKEMIYQESIALNPELA

SEQ ID NO: 23448 - protein, 432 aa, Agrobacterium tumefaciens str. C58
MRRIVVTGMGAVSPLGANVDISWSRLLAGQSGIRRLTDDVVGDLPAKVGGVVPSLAEDPERGFDPDRIIAPKDQRKVDRFIIFALAAAEEALVQANWKPVSNEDRLRTATIIASGIGGFPAITEAVRTVDQRGVRRLSPFTIPSFLVNLAAGQVSIRHGFKGPLGAPVTACAAGVQAIGDAARLIRSNEADIAVCGGTEACMNIVSLGGFAAARSLSTGFNETPTKASRPFDTARDGFVMGEGAGVLVIEALSHALARGATPIAELVGYGTTADAHHITSGPEDGSGARRAMEIAIAQAGIAPHEIGHLNAHATSTPVGDLGEIRAIKSVFGQRKSVAVSGTKSATGHLLGAAGGLEAIFTILALKNRIAPPTLNLNAPDTESDGIDFVANLARSLDAEYAISNGFGFGGVNASVLFRRWPKASNSGISSVR

SEQ ID NO: 23449 - protein, 206 aa, Triticum aestivum
MASRRRTLLKVIILGDSGVGKTSLMNQYVNKKFSNQYKATIGADFLTKEVQYEDRLFTLQIWDTAGQERFQSLGVAFYRGADCCVLVYDVNSMKSFDNLNNWREEFLIQASPSDPDNFPFVLLGNKVDIDGGNSRVVSEKKAKAWCASKGNIPYFETSAKEGTNVEDAFQCIVKDALKNEPEEELYIPDTVDVVGGNRTQRSSGCC

SEQ ID NO: 23450 - protein, 571 aa, Symbiobacterium thermophilum IAM 14863
MEMQAARALMRALEAEGVEVIFGYPGGASLYIYDALYDSPIHHVLTRHEQGAIHAAEGYARATGKVGVVLATSGPGATNLVTGLCDAMMDSTPIVAITGQVTRSLIGRDAFQEADVTGITMPVTKHNYLVTDPNDLLRVVREAFYIARTGRPGPVLIDIPKDVTNAQVRWEYPPRIHLPGYRVPREASPEAVAAAAEAIRSARQPVLICGGGVVSSPDATGPFRTLAERMDAPVVETLMGLGGFPMDHPLCLGLVGMHGTFAANRAVANSDLVIACGMRFDDRVTGMASRFAPKARIIHIDIDPAEMSKNLTAHIPLVGDCGLVLAQLNEALGDWSQTLPEWRAQVQGWQEQFPLWGVRRGEEIATDPDGVPKPQQVIQAVQAAFGPEAVVATDVGQHQMWAAHYCTRTEPRTWLSSSGLGTMGFGLPAAIGAAIGRPDRDVVLITGDGSFQMCIQELATVVQERVPVKIVLLNNGYLGMVRQWQEMFYKGRYKEVDLRPGMPDFVKLAEAYGIKGLRVRRLGELEGAVAEARAHQGPVLLEVVVEEEENVFPIVPPGGANTEALLPGAGR

SEQ ID NO: 23451 - protein, 604 aa, Burkholderia vietnamiensis G4
MNARLPEVSSVPARLALLRGAMVREDLAAYLVPSADPHLSEYLPERWQARRWLSGFTGSVGTLVVTADFAGLWVDSRYWVQAEAELAGTGVQLMKMTSGQQSAPHVDWLAQNVPAGATVGVDGAVLGIAAARALTAALDARGIALRTDLDLLDAIWPERPGLPGAAVFEHTAPQADTTRASKLAEVRRAMHAQGAQWHFVSTLDDLAWLFNLRGADVNFNPVFVAHALIGAERATLFVADGKVPPALAASLAQDGVEVRAYDAARAALGALPDGASLLIDPRRVTFGTLEAVPAGVKLIEAVNPSTFAKSRKTSAEIEHVRVTMEHDGAALAEFFAWFEQAVNREPITELTIEEQLTAARARRPGYVSPSFATIAGFNANGAMPHYHATPASHATIAGDGLLLIDSGGQYTGGTTDITRVVPVGTVGDLQRRDFTIVLKSMMALSRARFPRGIRSPMLDAIARAPMWAAGLDYGHGTGHGVGYFLNVHEGPQVISHYAPAEPHTAMEEGMITSIEPGVYRPGKWGIRIENLVVNRAAGQTEFGDFLAFETLTLCPIDTRCVLIEMLHEEERAWLNAYHASVRERVGRHVSGDAKAWLDVRTQPI

SEQ ID NO: 23452 - protein, 523 aa, Symbiobacterium thermophilum IAM 14863
MTRRIRIFDTTLRDGEQAPGFGMTAEAKLEVARQLSKLGVDVIEAGFPAASPGDFEAVRTIAETITGPTIAGLARANEDDIRRCYEAVKGAQKPRIHTFIATSPIHMEYKLRKKPEEVVRAAREAVALARSLGPEVEFSAEDATRSDWNFLVQIFTVAARAGATILNVPDTVGYTTPKEYYDLIRYLIEHVDAPEGVQFSVHCHNDLGLAVANTLAAIEAGATQVECTINGIGERAGNAALEEIVMALRVRRDQWGATTAINTREIYRTSRLLQSVTGIQVQPNKAIVGANAFAHESGIHQDGMLKHRDTYEIMKPEDVGVPESSLVLGKHSGRAAFRARLEHLGYQLTDAEIDSAFRRFKELADRKRTITDHDLMAIVGDEQAHRTVTEVCRLESFQVVAGNERIATASVRLVREGEVVQEAASGDGPISALYHAIDRAARFEGQLLDYRLNAVTEGEDALGEVTVRVRAGDRVASGRGTSTDVIEASARAYMNAMNKILSGAALAVSDDPAPGWQMRAYGD

SEQ ID NO: 23453 - protein, 211 aa, Buchnera aphidicola str. Bp (Baizongia pistaciae)
MTQNLLDQFGTPKTRVKNAISALRYGHGIIVLDNEDRENEGDLIFSGETMTTEQMALTIRYGSGIVCLCITESKRKQLKLPMMVQNNTSKFGTNFTVTIEAAEGISTGVSAKDRLTTIRAAINDNAKPSDLNRPGHIFPLQAHKNGILGRIGHTEAAIEFVTLAGFKPAGIICELTNRNGTMSKVPDIIKFSKLKKMTIVTIRDLIQYISR

SEQ ID NO: 23454 - protein, 411 aa, Streptococcus pneumoniae TIGR4
MDFSRKDNQSMEYRKIQEALEALQKGRLVLVIDDKDRENEGDLICSAQAATTENVNFMATYAKGLICMPMSESLANQLMLSPMVENNTDNHKTAFTVSIDYKETTTGISAEERGLTARMCVAEDITPSDFRRPGHMFPLIAKKGGVLERNGHTEATVDLLKLAGLKECGLCCEIMNHDGKMMRTDDLIQFSKKHNIPLITIKELQEYRKVYDQLVERVSTVNMPTRYGNFKAISYIDKLNGEHHLALIMGNIEDEANVLCRVHSECLTGDVLGSLRCDCGQQFDKAMKMIVENGSGVLLYLRQEGRGIGLINKLKAYHLQDQGMDTLDANLALGFEGDLREYHIGAKMLKDLGLQSLHLLTNNPDKVEQLEKYGITISSRISIEIEANPYDSFYLETKKNRMGHILNMEEK

SEQ ID NO: 23455 - protein, 442 aa, Arabidopsis thaliana
MATSNLRRHLSASRLRLNRFISTSSSYHSHRRVVVTGLGMVTPLGRGVETTWRRLIDGECGIRGLTLDDLKMKSFDEETKLYTFDQLSSKVAAFAVANFIGYAVCAADEALRDAEWLPTEEEEKERTGVSIGGGIGSICDIVEAAQLICEKRLRRLSPFFIPKILVNMASGHVSMKYGFQGPNHAAVTACATGAHSIGDATRMIQFGDADVMVAGGTESSIDALSVAGFSRSRALSTKFNSSPQEASRPFDCDRDGFVIGEGSGVIVLEEYEHAKRRGAKIYAELCGYGMSGDAHHITQPPEDGKGAVLAMTRALRQSGLCPNQIDYVNAHATSTPIGDAVEARAIKTVFSEHATSGTLAFSSTKGATGHLLGAAGAVEAIFSILAIHHGVAPMTLNVKNPDPIFDKRFMPLTTSKKMLVRTAMSNSFGFGGTNASLLFASI

SEQ ID NO: 23456 - protein, 548 aa, Vibrio vulnificus YJ016
MTGAELVVAALKQQGIKTVFGYPGGAIMPIYDALYDGGVEHILCRHEQGAAMAAIGMARATQDVAVCMATSGPGATNLVTGLADAFLDSVPLVAITGQVASSHIGTDAFQEMDVIGMSLSCTKHSYLVTDINELAPTLAEAFEVAKTGRPGPVIVDIAKDVQLAKAPVELLPPFTPPALPQVSQVDVARAQALLDQSTRPVLYVGGGVQLAKATHTVREFLRLNPMPAVSTLKGLGTIERHDPHYLGMLGMHGTKAANLVVQEADLLLVVGARFDDRVTGKLETFAPHAKVIHIDIDAAEINKLRHANAPLRGDINVILPQLELTRDISPWVHHCESLRSGFKWRYDHPGELIYAPGLLKQLSDLMPDNTIVSTDVGQHQMWAAQHIQPREPQNFITSAGLGTMGFGLPAAMGAAVARPDAQSVLISGDGSIMMNIQELGTLKRRQIPVKIVLLNNQRLGMVRQWQSLFFDGRHSETILDDNPDFVMLAKAFDIPGKTITKKEEVEPALKEMLASKTSYLLHVLIDEEENVWPLVPPGASNSDMLENT

SEQ ID NO: 23457 - protein, 376 aa, Pisum sativum
MADAEDIQPLVCDNGTGMVKAGFAGDDARAVFPSIVGRPRHTGVMVGMGQKDAYVGDEAQSKRGILTLKYPIEHGIVSNWDDMEKIWHHTFYNELRVAPEEHPVLLTEAPLNPKANREKMTQIMFETFNVPAMYVAIQAVLSLYASGRTTGIVLESGDGVSHTVPIYEGYALPHAILRLDLAGRDLTESLMKILTERGYMFTTSAEREIVRDIKEKLAYVALDYEQELETAKSSSSIEKNYELPDGQVITIGAERFRCPEVLFQPSMIGMEAAGIHETTYNSIMKCDVDIRKDLYGNIVLSGGTTMFPGIADRMSKEITALAPSSMKIKVVAPPERRYSVWIGGSILASLSTFQQMWISKAEYDERGPSIVHRKCF

SEQ ID NO: 23458 - protein, 124 aa, Triticum aestivum
MHPTRWELSHMVDLQAAALVISVVAAEVAPPSLRLRCSSRLLLPAAEMTKRTKKAGIVGKYGTRYGASLRKQIKKMEVSQHSKYFCEFCGKFAVKRKAVGIWGCKDCGKVKAGGAYTMIALLLS

SEQ ID NO: 23459 - protein, 571 aa, Nicotiana tabacum
MLTYERFWKKKVPLNRTMFGDYEVMHIIYPGLPSSPPSGIDSGNGPTGSAVNQQFPITADFVNKSQRMSPRVIFLIASSALVLLVVCCGALVVLLKCRRTGRPSNAVGPVFTPSMHKRSGKGIGSTISSSPTSSTSISLISAMPASILSVKTFTLAELERATDKFSLKRVLGEGGFGRVYHGILEDRTEVAVKVLTRDNQNGDREFIAEVEMLSRLHHRNLVKLIGICSEERTRSLVYELVRNGSVESHLHGRDGRKEPLDWDVRLKIALGAARGLAYLHEDSNPRVIHRDFKASNVLLEDDFTPKVADFGLAREATEGSHHISTRVMGTFGYVAPEYAMTGHLLVKSDVYSYGVVLLELLSGRKPVDMSQPPGEENLVTWARPLLTTREGLEQLVDPSLAGSYDFDDMAKVAAIASMCVHPEVTQRPFMGEVVQALKLIYNDNDETCADGCSQKESSLPDSDFKGVPSDSSWWNAGGVTPRLTYGQASTFMTMDYSSGPLEEFENRPFSASSFNLGGGAGLTISHGNRSGPLRTVRSKPALYRLRGSMSEHGALLPRHDWRDGTNYDASF

SEQ ID NO: 23460 - protein, 376 aa, Pisum sativum
MADAEDIQPLVCDNGTGMVKAGFAGDDARAVFPSIVGRPRHTGVMVGMGQKDAYVGDEAQSKRGILTLKYPIEHGIVSNWDDMEKIWHHTFYNELRVAPEEHPVLLTEAPLNPKANREKMTQIMFETFNVPAMYVAIQAVLSLYASGRTTGIVLDSGDGVSHTVPIYEGYALPHAILRLDLAGRDLTESLMKILTERGYMFTTSAEREIVRDIKEKLAYVALDYEQELETAKSSSSIEKNYELPDGQVITIGAERFRCPEVLFQPSMIGMEAAGIHETTYNSIMKCDVDIRKDLYGNIVLSGGTTMFPGIADRMSKEITALAPSSMKIKVVAPPERKYSVWIGGSILASLSTFQQMWISKAEYDERGPSIVHRKCF

SEQ ID NO: 23461 - protein, 91 aa, Spinacia oleracea
GITCGMVSSKLAPCIGYLKGGPLGGGSSGGIKALNAAAATTPDRKTACNCLKSAANAIKGINYGKAAGLPGMCGVHIPYAISPSTNCNAVH

SEQ ID NO: 23462 - protein, 254 aa, Lactobacillus paracasei subsp. paracasei
MDGAILVVAATDGPMPQTREHILLARQVGVDYIVVFLNKTDLVDDPELIDLVEMEVRELLSEYDYPGDDIPVIRGSALKALEGDPEQEKVIMELMDTIDEYIPTPVRETDKPFLMPVEDVFTITGRGTVASGRIDRGTVKIGDEVEIIGLKPDVIKSTVTGLEMFRKTLDLGEAGDNVGVLLRGVNREQVERGQVLAKPGSIQLHNKFKGEVYILTKEEGGRHTPFFSNYRPQFYFHTTDVTGVIELPDGVEMV

SEQ ID NO: 23463 - protein, 254 aa, Lactobacillus paraplantarum
MDGAILVVAATDGPMPQTREHILLARQVGVDYIVVFLNKTDLVDDDELVDLVEMEVRELLSEYDFPGDDIPVIRGSALKALEGDPEQEKVIMHLMDVVDEYIPTPVRDTEKPFLMPVEDVFSITGRGTVASGRIDRGTVKVGDEVEIVGLHEDVLKSTVTGLEMFRKTLDLGEAGDNIGALLRGVNREQVVRGQVLAKPGSIQTHKKFKGEVYILSKEEGGRHTPFFSNYRPQFYFHTTDITGVIELPDGVEMV

SEQ ID NO: 23464 - protein, 429 aa, Saccharophagus degradans 2-40
MSFPLSSSSFSDKKNAFYAQSGGAAAVLNASAAGVVAGVMAHKDKIENLYIGRNGILGALHEDMVVVNTHDDNLIDDLLHAPAGAFGSCRYKLKSIEESEREYARILEVFKAHNIGYFFYNGGGNSQDTSCKLAKYAAKKNYPLQCIGIPKTIDNDLSGTDCSPGYGSVAKYVAVSILEASMDLASMHQTSTKVFVMEVMGRDSGWIAAAAGLAADERNLGPDLIIFPEVPYEEYKFYAELNRIVARKGFCVVVVAEGVRGPDGNHLTSTANKDAFGHTQLGGAASIIAGRIREVTGHKTHFAVCDYLQRAARHIASKTDVDQSFLVGKKAVEFAANGYSNVMMAIVRESEQPYRWSVGTVPLVEAANSRNALPAGFISKCGFHITDACRRYLAPLIAGESYPSYQNGLPAYRVFNSVAVPKKLEEFTL

SEQ ID NO: 23465 - protein, 65 aa, Brassica napus
  misc_feature (17)..(17): Xaa can be any naturally occurring amino acid
  misc_feature (25)..(25): Xaa can be any naturally occurring amino acid
  misc_feature (29)..(29): Xaa can be any naturally occurring amino acid
  misc_feature (32)..(32): Xaa can be any naturally occurring amino acid
  misc_feature (58)..(60): Xaa can be any naturally occurring amino acid
  misc_feature (63)..(63): Xaa can be any naturally occurring amino acid
MSTFLMRILLALLVLAXTVSQQLEXESEXWCXADEQTPDDELQAALDWACSKGGADCXXXQQXNQ

SEQ ID NO: 23466 - protein, 246 aa, Triticum aestivum
  misc_feature (148)..(148): Xaa can be any naturally occurring amino acid
MSMETGDLGSVPCSYAQLPDDAEAGRTRPGRTGPLCAAILLTSAALLLVVAALAGVRLVGQLPAAGVVVSGHPSTVDVAPRSTSSRGPESGVSEKTSGAATVDIHGGMLGADAGGNAFPWSNAMLQWQRTGFHFQPEKNWMNDPNGPXVYYKGWYHLFYQYNPDGAIWGNKIAWGHAASRDLLRWRHLPVAMSPDEWYDINGVWSGSATILPDGRIVMLYTGSTNASVQVQCLAFPTDPSDPLLIN

SEQ ID NO: 23467 - protein, 356 aa, Porphyra purpurea
MNLSIKENKETVRPVFPFTAIVGQEEMKLALMLNVIDPKIGGVMIMGDRGTGKSTTIRAIADLLPKIEIVKDDLFNSHPSDVDLMSDENKHALQNGINIDKAYIKVPMVDLPLGATEDRVCGTIDIEKALTEGVKTFEPGLLAKANRGILYVDEVNLLDDHLVDILLDSAASGWNTVEREGISVRHPARFVLVGSGNPEEGELRPQLLDRFGMHAEIRTVKDPELRVQIVEQRTNFDQDPKKCIENCAKDQIKLKQQIADAQLLLSTITIDYDLRVKISQVCGELDVDGLRGDIVTNRAAKAYAAFNGQQTVNSSDISKVITLCLRHRLRKDPLESMDSGEKVEKVFNKVFNLEEI

SEQ ID NO: 23468 - protein, 652 aa, Debaryomyces hansenii CBS767
MMVPSDDSFISDEEEEFCPLCVEEMDISDKNFKPCPCGYQICQFCYNNIRQNPELNGRCPGCRRLYDDDSVEYKTITSDEYRMQQLKREKREREKKQREKEKKETEMANKKHLAGLRVVQKNLVYVTGLNPPCNPDDLHSVLRSDKYFGQYGKILKIVINKKTPNPQSAHHHHQNPGLVVYVTFVKKEDALKCINELDGSLCDGRVLRAAHGTTKYCSSYLRGHPCPNPNCMFLHEPGEEADSYTRKDLSTQQGIKMGMMGLSGSSVEGNTNITNAGFNNQNTSSNNSQHSNSAEEDNDGSDDDSDHHTSSPNPMPNSASSSNGAVLPATAHWAKGLSSASGSPSVNSTALANAAAFPTLGEIFRDQKQQQRKEGKINKGKVGRSSKDNSILLPDDIDIDNDSAIHFMEETSEMLRNLSERREKLQVYFKKLTENADNKVLPLFAFNKSTKLSNNSNLEEEKLIARQVIERFILKPIKNYHLAYQNHPITQQQTLLQQQAQLQQQRQQTPSIQAAQIQQLQIEQQKRLLEQQSQQTGNGTPVSTNAPLQQQQQLLLLQQLQQQQQQQQQHTPSQAQAQINMIRARERSANTSTPPPPGLFAAANGSKSTPNPPQMPAQPQQQPQGQQYAQQPAAGNQSSSSQLLTQLMSGKR

SEQ ID NO: 23469 - protein, 386 aa, Glycine max
  misc_feature (181)..(181): Xaa can be any naturally occurring amino acid
MHRSKYTDREDDRRGMTSRKKFGIPWPECNDGLSYDDVVRASDAGATLIEFYSTKYKSSAPLQGWLQRIKSGQITVDGGVVTDSNTVLRVGSKLIYHRLPWKEPDAPHMIDVLYEDDDMIALNKPSGLQVLPGGLYQQRTILTQLQWEANNQGTCEMHKRLHPVPVHRLGRGTSGILLCAXTKLARARLASHFADGTSHVGGKRDTKQELGKIAKMYRALVSGIVENDKVTINQPIGIVKYPGVAKGLYVASESGKPALSVVDILETNIQENSTLVQVKIQSGRPHQIRIHLSFIGHPLLGDPLYGVGGQPKCLDCDFVDESFAEDGGYQRPTKPVPGDCGYYLHAHKLVLSHPTTNELIEIIAPLPSALHTAEEAKEIAIMQQTA

SEQ ID NO: 23470 - protein, 537 aa, Isatis tinctoria
MGNCCGTAGSLAQNDNNKPKKGRKKQNPFSIDYGLHHGGGGGGALKLIVLSDPTGREIEQKYKLGRELGRGEFGVTYLCTDKETDEVLACKSILKKKLRTAVDIEDVRREVEIMRHMPVHPNVVTLKETYEDEHAVHLVMELCEGGELFDRIVARGHYTERAAAAVTKTIMEVVQVCHNNGVMHRDLKPENFLFANKKETAPLKAIDFGLSVFFKPGERFNEIVGSPYYMAPEVLKRNYGPEVDIWSAGVILYILLCGVPPFWAETEQGVAQAIIRSQLDFRRDPWPKVSENAKDLIRKMLDPDQKRRLTAQQVLDHPWLQNAKTAPNVSLGETVRARLKQFTVMNKLKKRALRVIAEHLSDEEASGIREGFQIMDTSQRGKINIDELKIGLQKLGHAIPQDDLQILMDAGDIDKDGYLDCDEFIAISVHLRKMGNDEHLKKAFAFFDQNDNGYIEIEELREALSDEVGTSEEVVDAIIRDVDTDKDGRISYEEFATMMKTGTDWRKASRQYSRERFNSISLKLMQDASLQVNGDAR

SEQ ID NO: 23471 - protein, 939 aa, Gloeobacter violaceus PCC 7421
MNWDTPIDLAAAGSPSALSHQSLRDNIELVEQLLRQVAAQEGGGDLVELLDRLWASHQDRTGEGLALIRELSLEKSVLAIRAFSIYFQLINIVEQHHERKRLRLQASFSADTAQPGSFCWLFDEMKSLGVSTPEIERVLQQLDVRLVFTAHPTEIVRRTIRTKHRRIVHLLDDLDNALSEWQQQQVHTTMLEEIRIWWRTDELHQVRPTVLDEVAHTVHYFEEVLFEAMPRVRSELVRCLDMFHPSLTRSLGTFCRFGSWVGSDRDGNPSVNALVTWKTACHQRSRVLAKYIKSVERLRDLLSLAEGNPPQDLLLALEQDQRDLGEVYERYSVVYLQEPYRLKLSYILERLEHTRERNAWLEVHGPQRLSQPDEPGWLHYYRHAHELLAELHLLRQCLRTTGIGCRPLETLIDQVEVFGFHLAGLDVRQDSTRHEDTLTEVSAKLRLTATPYAELDEQARLEWLVRELQTLRPLIPAELPFSARTEETIQTFRMIRRLQKEFGSEICHTYIISMSKQASDLLEVLLLAEEAGLFDPATGTGTLMVVPLFETVEDLRNAPHVLEQLFSLPLYRCYLTCHQNLQEVMLGYSDSNKDSGFLSSSWEIFLAQQHIQQVARRHGVQLRIFHGRGGTVGRGGGPSYQAILAQPDGTVSGRIKITEQGEVLASKYSLFELAAFNIETVTAAVIQASVLPTSPPGSRNWELRLQELSDVARRTYRQLVYEQEGFIDFFCHVTPIDEISQLQISSRPSRREGRRDLASLRAIPWVFSWTQSRFLLQAWYGLGTALDGFIRCNRERNLAELRSMYRQWPFFRTLISKVEMTLAKVDLQVAANYVQELLPKEHEHTGECIFALIAAELERTRECVLAITEHRQLLEDNPPLQRSIALRNATIAPLGYLQATLLKYLRYENRQPRSYSRNELLRGALLTINGIAAGMRNTG

SEQ ID NO: 23472 - protein, 496 aa, Bacillus clausii KSM-K16
MNQVHGNKSHRERVTQATKTVQANQNERAAYRLRYHLMAPSGWMNDPNGLIYFNGQYHAFYQHYPYGETWGPMHWGHGISDDLIHWHHLPVALAPGEAYDRDGCFSGSAVDDQGTLTLIYTGHNVIDPEKDVIVQNQNIARSRDGIHFYKANANPVIHQQPAGMGQDFRDPKVWRENGVWFMVVGATKHDQGQVLLYESANLEEWTYRGVLAQNDGGNEGYMWECPDFFKLGDKYVLLASPQGVEPEGDRYLNHHQTVYMVGDYVNGQFIRSSFTELDYGHDFYAVQTLLDGKGRRIAIGWMDMWESPKPSQKHGWAGAMTLPRELVLTEEGKIAMKPIEELTLLRQQSTPIGPLHVKHVHPILSSGNLVELEAQFALVDSDASAFGIRFCCAADGSEETVLRFDLLKHTVTLDRSRSGEGPGGARTVSIKSAATIDVRLFIDRSSVEVFINDGETVITSRIYPQETSTGMTVFAEGGSIVMPTCTVHKLKSIWSE

SEQ ID NO: 23473 - protein, 983 aa, Nostoc sp. PCC 7120
MVSYASIPQSSDEAHSTVGASLQLDERKQDLNNFIQRHIGPSSADIQQMLDVLGFSSLDDLIEKTVPSAIRLHEQLQLPEAQTEYAALAKLKQIASKNQVFRSYIGMGYYDTITPSVIGRNILENPGWYTAYTPYQPEIAQGRLEALLNFQTMIIDLTGLEIANASLLDEATAAAEAMSMSYGVSKNKANAYFVSHDCHPQIIDVLQTRAKPLGIEIIIGDHQTFDFDKPIFGAVLQYPASDGTIYDYRAFIETSHAQGALVTVAADPLSLTLLTPPGEFGADIAVGSTQRFGIPLGFGGPHAAYFATKEEYKRQVPGRIVGVSKDVHGKTALRLALQTREQHIRREKATSNICTAQVLLAVMASMYAVYHGPEGLKQIAERIHHLTLVLGVWLQRLGYTITSQSFFDTLQIKLGEKPLQEILEAAEAYRINLRIVDTSTVGISLDETTTLEDVKDICRIFAGTDELPFVLNVQEFDWIIQQSSLKDEPFSRQSSYLTHPVFNRYHSETELLRYLHRLETKDLSLTTSMIPLGSCTMKLNATSEMIPVTWEEFGRIHPFAPLTQTRGYQILFQQLEAWLGEITGFAGVSLQPNAGSQGEYTGLLVIRQYHQSRGETHRNVCLIPNSAHGTNPASAVMCGMKVVAVACDAGGNIDIDDLKAKAEKHSHELAALMVTYPSTHGVFEAGIQEICAVIHSHGGQVYMDGANMNAQVGICRPGDIGADVCHLNLHKTFCIPHGGGGPGMGPIGVASHLVPFLPGHPVLESGKNPQNIGAVAAAPWGSASILVISWMYIVMMGADGLTQATKVAILNANYIAKKLAAYYPVLYKGQNGLVAHECILDLRALKKSANIEIDDIAKRLIDYGFHAPTVSWPVAGTIMVEPTESESQAELDRFCEALIAIRQEIADIEAGKVDIQDNSLKNAPHTVESLIVGEWPHPYSREQAAYPAPWTREHKFWPSVGRIDAAFGDRNFVCSCLPMDAYN

SEQ ID NO: 23474 - protein, 457 aa, Bacteroides fragilis NCTC 9343
MNRENKPLFLYTFITVFGGLIVGLNMAGISGAVPFLQEQFMLDDMALGLVVSILTVGCLCGALLGGGFSDRYGRQKVMFSSAVFFIVSSLGCALSGNLVSLLVFRLICGLGIGVISAVAPIYISEISPARLRGTLVSYNQLAIVIGILIAYIVDYILLDYERNWRLMLGFPFFFSVAYLLLLGILPESPRWLSARGKAGRARQVASKLNLEAGEMTVSDTNTQEGRDRIKVTELFKGNLAKVVFIGSILAALQQITGINVIINYAPSIFEMTGVAGDIALVQSILVGVVNLLFTLIAVWLVDKVGRKILLLCGSLGMGISLLYLVYTFVVPAANGIGALIAVLCYIGFFAASLAPLMWVVTSEIYPSRIRGTAMSLSTGISWLCTFLTVQFFPWILNNLGGSVAFGIFAIFSIAAFAFILFCVPETKGKSLEAIEKELGVDKEAEENVKEEHAFSKI

SEQ ID NO: 23475 - protein, 582 aa, Bacillus clausii KSM-K16
MASLREDASYYTERYRPQYHFSTPVGNLADPNGLVFYKGEYHLFHQKNGTWAHAVSKDLLHWEHLPIALERDHLGQALSGSVVVDEKDTSGLFGGKPGLVAIYTNTEGGEAQSIAYSKDDGRTWERYVGNPVIPNTGMKDFRDPKVFWHEETAKWVMVVSTNQTVSFYHSDNLIDWAFASQFGAEEGLHAAVWECPDLFRLPVDGDEDNQKWVLHVSVGDNDETNGSTAQYFVGEFDGTAFTNDNDAAEVLITDIGQDFYAAQTFANLDGRTVWLGWMANWRYPYQSPTDPWMGAMSIPRELGLYTNSNGQVRLRQKPISELDTIYAKQQDFAPFDVANEATPLDFKGTTYRFTAEVSWEDLREFGLRLRHGNGVESLLGFDGEYQKVFLDRTNAGLETIIDRNGQPFPFGQRYEADYDAKRGFMKLDVLVDESSIEWFINDGELTFTSLIYTDPTNAGIEWYADGGSIHVQHAQAIHLHNVWRARVTEGQLERIVTNEETVRLEIGETRELIADLKPDYNVGEEVIEWGSSDEDIVTIIDETERGVMIAAVGQGSAEVVAREQKNRLEKRIRVYSTGEGEQ

SEQ ID NO: 23476 - protein, 548 aa, Bacteroides fragilis NCTC 9343
MHLTTKLFFTATLLAGNLFASFAGDVTLKITKKYINLPVSHQVDRKKMTFEVKGTPERNFVIRLADEKPDYWVFCDVSSWKGKTLRISYEGESAGLEKIYQDDVIAGQDSLYAEKNRPQFHFTTRRGWINDPNGLVFYEGEYHLFYQHNPYEREWENMHWGHAVSRDLVHWEELPDALHPDELGTIFSGSAVIDYDNTAGFNKKNEPALVAAYTVDNPEKQRQCIAYSLDKGRTFTKYEGNPVIDSKAKWNSKDTRDPKVFWYAPGKHWVMVLNERDGHSIYNSADLKNWEYKSHVTGFWECPELFELPVDGDKNHTKWVMYGASGTYMLGSFDGQTFTPEAGKYYYYTGSMYAAQTYSNIPAGDGRRIQIGWGRISHDGMPFNGMMLLPNELTLRTTSKGVRLFSVPVRETEQLFQPVGNWTSLSSDAANQRLQAFSGKDCLRIRTTIKLSHATSAGLNLYGQPLVDYDMNSNLINGVFYSPDDRTSMELTADIYIDRTSIEVFIDGGAYSYSMKRSPREGNREGLHFWGNNIEVKNLEVFSVKSIW

SEQ ID NO: 23477 - protein, 312 aa, Mycobacterium tuberculosis CDC1551
MAHVIRIGTRGSLLATTQAATVRDALIAGGHSAELVTISTEGDRSMAPIASLGVGVFTTALREAMEAGLVDAAVHSYKDLPTAADPRFTVAAIPPRNDPRDAVVARDGLTLGELPVGSLVGTSSPRRAAQLRALGLGLEIRPLRGNLDTRLNKVSSGDLDAIVVARAGLARLGRLDDVTETLEPVQMLPAPAQGALAVECRAGDSRLVAVLAELDDADTRAAVTAERALLADLEAGCSAPVGAIAEVVESIDEDGRVFEELSLRGCVAALDGSDVIRASGIGSCGRARELGLSVAAELFELGARELMWGVRH

SEQ ID NO: 23478 - protein, 336 aa, uncultured archaeon GZfos1D1
  misc_feature (112)..(112): Xaa can be any naturally occurring amino acid
MMKLAINGWGRIGRLVFRAALQDHSALDFVAINSRSAGASWIEHLLTYDSVHGKQEGEIRAEKDTLFVNGKEIKILSESDPENLPWRDLGVDVVVESTGQFRDRKGASKHLXAGCKKVIITAPGKEPDVTLVPGVNDAMYNPATHNIISLASCTTNCLAPVAKVLEDEFGINRGFMTTVHAYTGDQKLLDGRHNDLRRARAAAMSIVPTTTGAAAALGVVLPSLAGKMDGISLRVPTTNVSVVDLVAELGSEVTREAVNSAFEEASKTSLAGILSVSHLPLVSIDYNGSSFSAIVDAEYTNVVGGRLVKVLAWYDNEWGYSCRVVDMIKRLEAEGV

SEQ ID NO: 23479 - protein, 240 aa, Sorghum bicolor
MDGCAMSLAAAAANCRCSRVVYVGNIPFHASEKEVHDACELIGPVRSLRLAADPGTGKRRGYAFVEYPDDETARSACRNLHGHALRGRELRVGLAGRAGRRGVGARGEHEPVGLEDAVHAASLVAGTPPPDSVTRFLAARSARELREIVGQLEGHGPDALRLLQEQVPGLAAAVDLARHLIDMVAADAATEEARNKKRTGVEGSGSDDGDHRAKLRKVDLEEGGGFKDHGAVSAARVMCF

SEQ ID NO: 23480 - protein, 279 aa, Oceanospirillum sp. MED92
MTQSTTLPKLADSSLTLENRIATLTFQRDDVRNALTGTELIDDILAVCEWVNRCPEVSVLILTGEGSAFSAGGNIKEMTERDGEHREGAFAGDVYTVQNKYRQGIQRIPLALAQVDVPVIAAVNGAAIGAGFDLTCMCDIRIASSKAKMGETFVNLGIIPGDGGAWFLQRLIGYQKAAELTLTGRVFGAEEAKDLGIVLDVTAPEELMAKVNELASDIAAKPPQALRMGKRLLKTAQKMELPEFLEHCALMQGICHNTEDHMEAVTAFVEKRNPEFKGR

SEQ ID NO: 23481 - protein, 409 aa, Zea mays
MAAALQATPIKTLATSRWRVEGAEARPRPRPIAVSFRCSAAARSYNITLLPGDGIGPEVVAVAKDVLSFAGALEGVELRFQEKLVGGSALDATGVPLPDETLDEAKGSDAVLLGAIGGYKWDTNEKHLKPETGLLQLRAGLGVFANLRPAAVLPQLVDASTLKKEVAEGVDIMVVRELTGGIYFGKPRGFGTNDKGDDIGFNTEVYSASEIDRIARVAFEVARKRRGKLCSVDKANVLEASMLWRKKVTALASEFPDIELSHMYVDNAAMQLVRNPKQFDTIVTNNIFGDILSDEASMITGSIGMLPSASVGESGPGLFEPIHGSAPDIAGQDKANPLATILSAAMLLRYGLGEENAARRIEAAVTETLNHGFRTGDIYSPGTTLVGCKRMGEEVLKTVESLKEVAAVN

SEQ ID NO: 23482 - protein, 207 aa, Sorghum arundinaceum
LAEKAALAYAAEHGMELVTIITTLVVGPFLSTGMPPSMITALALVTGNEAHYSILKQVQFVHLDDLCDAHIFLFEHPAAAGRYVCSSCDTTIHDLAAMLRDRYPEYDIPERFPAGIEDDLQMVHMSAKKLQDLGFTFRYTRMEDMYDDAIRTCREKGLIPLAAAGRDDGSASVRAPGERDVTATAGGDVVSAPVRAPGGETDVTIGA

SEQ ID NO: 23483 - protein, 348 aa, Corynebacterium efficiens YS-314
MVRKESRKMKLAVIGGDGIGPEVTDEALKVLRALRADIETTDLDLGARRYLRNGELLTDEDLALLREHDAILLGAIGAPGSVPPGVLERGLLLKLRFALDHHVNLRPSKLYEGVESPLKNPGEIDFVVVREGTEGAYTGNGGAIRVGTPHETANETSVNTRYGAERVIRYAFELAQSRRRHLTLVHKTNVLVHGGGLWQRTVDEVAREYPEVTVDYNHIDAATIYLVTDPSRFDVIVTDNLFGDILTDEAGAISGGIGLAASGNIDATGTNPSMFEPVHGSAPDIMGKGIADPTAAILSAAMMLRHLGDEANAVRIEEAVARDVAGRDPEAPISTTEVGDRIAAAVVA

SEQ ID NO: 23484 - protein, 480 aa, Candidatus Pelagibacter ubique HTCC1002
MYEKFGQFIDGSWSPSSNKETYEVINPATEEVLGHASKATPEDVDRALKSAEKGLAVWKKITPWERSYILRRIADKLREKKDVLAKWMTLENGKPLAEGVGETNGAADIFEWNAEETKRIFGQTIESRFEDTRVHVYYQPVGVVAALSPWNFPLILAARKISTALAAGCSVIIKPDTITPGVVMELVDICRECGVPPGAVNLLSGDPPAIASQLIQSDIIKKISITGSLRVGKLILKQAADKVQRATMELSGHSPFIVFDDADVKKAADMAIAAKFRNNGQVCISPNRFYIHENKKEEFINLFIEKTKKLKIGNGMDPDTQLGPLTTQKRLNETEELVEKTKQEGAKVLLGGKRPAGFNKGFYYEPTIFDDVKDDFTIMKQEPFGPLVPMLSFKSFDEVIERANDNDLGLCSYVCTNSMETAHLASEKLETGSVAVNTGVVAIAEAPFGGIKQSGYGREGGSMAIKDYLNVKYTHMGIKG

SEQ ID NO: 23485 - protein, 139 aa, Aeropyrum pernix
MSVNYATLGDLKKGSYIVIDGEPCRIVEMSRAKTGKHGSAKAHVVAICVFSGQKKSLVAPVDTRVQIPVIEKRLGQVLADMGDMVQIMDLETYDTFEVEKPGGNEEEEQLAAKLQPGVTVEYWLIMGKPKIIRIRSSSS

SEQ ID NO: 23486 - protein, 532 aa, Burkholderia vietnamiensis G4
MKSSIQRNIGPFALMLTGLGSIIGSGWLFGAWKAAKIAGPAAICAWIIGAVVILAIALTYAELGAMFPESGGMVRYARYSHGSLVGFISAWANWIAIVSVIPIEAEASIQYMSTWPYPWAHALFVNGELSTPGLLLSAVLVVIYFLLNYWGVKAFARANTAITIFKFLIPGLTILGLMLSSFHSENLGTASNASFAPYGWSAVLTAVATSGIVFAFNGFQSPVNLAGEARNPSRSVPFAVITSILLALVIYVLLQMAYIGSVNPADVAKGWAHFNFSSPFAELAIALNLNWLAILLYVDAFISPSGTGTTYMATTTRMIYAMERNNTMPKMFGNVHPIYGVPRQAMWFNLLVSFVFLFFFRGWSSLAAVISVATVISYLTGPISLMALRRAATDIERPLSIPLMKLIAPFAFVCASLILYWAKWPLTGEIILLMVVALPVYFFFQAKAGWGGWGADLKAAWWLVAYLPTMAVLSLIGSKEFGGHGVLPYGWDMLVVAVISLGFYFWGVNTGYRTQYLDERESHDEILEGIGA

SEQ ID NO: 23487 - protein, 370 aa, Arabidopsis thaliana
MRSEITRETKLLFDLPQDVIEEIFSKVPVTCLRRIRSTCKRLYALLKDRGFIRKHFAKSARQYHALMLKNFRFYSVSFNPNGTEMDVASLFNGERSLIDPYSSSEAIISQAFHCDGLLLCTTKENRLVVLNPFSGQTKWLQPQNRCKIDEAYVLGYDNSDFSNSWRRNLGVTPHGGLGLKIYDFSSNSWKKLDVITPEGCLKSYGVSLKGNAYWVYMSKRRGVNDYSLLSFDFSTESFQHLCVPFHQEADCFGTMALSVVREEHLSLLYQSCETLKVEIWMTKEIDTTFVSWKKFLTVDLEPHLPHLLMFSCRMSFFIDEEKKVAVCCDRDNKVHVVGEDEYRVSSGFYFLDFEGITCCLTVFGYVPRLV

SEQ ID NO: 23488 - protein, 587 aa, Cryptococcus neoformans var. neoformans
MLSADQRQRAPFAHKSSCANLTATQPSALRSPFPPQSHWPTPPSAEGHQLQLTSDRSKWAQYPSPRKISNETCQAGFSDHPYAFGGIGATYSLDTPTSRRHSLPSLFNPNTHRRAFTFPSMSLPNPATVRFISLCFLWYACSAISNNTGKVILNHFKYPVTLTIVQFFFVAFYCAISSQKMLGWTGRLRQPTKNILKGTLPLAAFQVGGHIFGSMAISRVPVSTVHTIKALSPLFTVMAYALLFGVSYSPATYLSLLPLTLGVMLACSFDISFSNIFGLVCALGSTIVFVSQNIFFKKIMPTTSTNEVNSSSKLDKINLLYFSSSMAFILMIPLWIYSDARRLIDLWINPAASESGTSVLFYFFLNGTVHFAQSIIAFALLASTSPVTYSIASLVKRIAVICLAIIWFKQPVHTVQALGIVLTGAGLWMYNNAKRDVDRGEIKMRHVEALREGVLPSTKMDQCILEGSGIELSYKSAHNSPKPTYPNNYIDLPSSTTTAVNKTTFQVPPILDHTSHIEAPYPSPPASISSSPPADITYLGISKGRQHWLSGEGERFRPPVLNSIRSSVMEEARETGVNEGMAAVVTT

SEQ ID NO: 23489 - protein, 94 aa, Lupinus luteus
ASAHAGKVFKLVYEAAIQLQVTGVVVTDATLKNLGSVHVSKGVADAHFPVVKEAILKTIKEVVGAKWSEELNSAWTIAYDELAIVIKKEMNDAA

SEQ ID NO: 23490 - protein, 300 aa, Synechococcus elongatus PCC 6301
MQTHWVQGELQRLYPDRQFDVQTMSTQGDIILDVALAKIGDKGLFTKELEVAMLAGEVDFAVHSLKDLPTRLPEGLILGCVTEREDPADALVVHDRFKDHQLETLPEGTVIGTSSLRRLAQLRHHYPHLQFKDVRGNLNTRLAKLDAGEYDALILAAAGLQRLSMADRIHQLIPAAVSLHAVGQGALGIECRAEDPEILELLKALEHEPTSQRCLAERAFLRELEGGCQVPIGVNTAIADGTLTLTGMVASLDGQRLLRDQVSGPTSDPEALGLALAAQLKAQGAKEILDEIFATVRPEA

SEQ ID NO: 23491 - protein, 543 aa, Arabidopsis thaliana
MDFLDNEMLDIEIHDIGSLHHLLHVDCCFRFAFFKLIGLEDKLKLASSLSIFRSIEFIPGEGDDSVLIENDEDDVTGPSRLWNKTILHDIMTSCIIMHNMIIEDERDIDAPIEERVEVPIEEVEMTVLWLEMPLEEILSRLPLKSTRAVRSTCKKWDSLFKNRSFISKAAAAREGESQMVVLMDHNLHLVSFFFGSDTSVEIKGKRICLNDDSDSEQVKISQVFHCEGLLLCILKDDNFSLVVWNPYWGQTRWIKPRCSFEIPQGCDMYRYAIGYDNKRRNHKILRFIDYEFHYPRDNVVLWYEIYDFESDLWTTLDVTTPHWLINCGNRGVTLKGNTYWCAKKRNSDLFLNADHIICFDFTSERFGPLLLLPFSDLDGVVTLACVREEKLAALVCHEDVVEVWITIKIEANEVLWSKFLTVNVDLGDEIPSSLTYGSFFIDEEKKVAMIFDKTLDRGDTVHIMGEAGYGGQVDLGEPVNKRRCPLVCSYVPSLVQIKKPAGFQRKQQSKLEKRQYVRNISKLRALKTQSSWTLSMSLECHQQ

SEQ ID NO: 23492 - protein, 260 aa, Carboxydothermus hydrogenoformans Z-2901
MEYKTILFEKKDQVGIITINRPQVLNALNSEVLEELDSLLDKIAEDESITVVILTGAGEKSFVAGADISQMRNFTPRQARYFAKLGQKVLSKLERIPQPVIAAVNGFALGGGCEIAMACDFRIASTKAKFGQPEVGLGVTAGFGGTQRLPRLVGKGMAAELLYTGEMIDAQEALRIGLVNRVVEPEELMPTALEIAQKIAAKAKLAVFYSKAALNEGLNMDLERALAYEAEMFALCFTTSDQKEGMDAFLNKRKPEFKGE

SEQ ID NO: 23493 - protein, 997 aa, Synechococcus sp. CC9605
MPESTTPVSEQETARMSGGGSGAGQLLQHRLDLIEDLWKSVLRSECPPEQSERLLRLKQLSDPVSLEGRDGNSTSEAIVELIKAMDLSEAISAARAFSLYFQLINILEQRIEEDSYLDSLRPNPSADAAHRDAFDPFAPPLANQTDPATFGEVFERLRRMNVPPAQVEHLLRELDIRLVFTAHPTEIVRHTVRHKIRRVANLLQQLQSDAPLAHQMREECRGQLEEEIRLWWRTDELHQFKPTVIDEVDSTLHYFQQVLFDAMPTLRRRLITALHRHYPDVQVPQASFCTFGSWVGSDRDGNPSVTPEITWRTACYQRQLMLELYISSVQSLRQQLSISMQWSQVAPSLLESLEMDRLRFPEIYERRAARYRLEPYRLKLCYVLEKLERTLARNNQLSEAGWQMPCEALADPQAGLSGAEVLHYTSVDQFRSDLELVRNSLVSTELSCEQLDTLLHQVHIFGFSLASLDIRQESTRHSDAIDELTRNLDLPQAYGDMDEAERMAWLLQELQTRRPLIPPAASWSAATAETLAVFRMLQRLQEEFGPRICNSYVISMSHTASDLLEVLLLAKEAGLVDPPNKRASLLVVPLFETVEDLQRAPEVMEGLFKTPLYRELLPVVGQQKQPLQELMLGYSDSNKDSGFLSSNWEIHQAQIALQELASRQDVALRLFHGRGGSVSRGGGPAYQAILAQPSGTLQGRIKITEQGEVLASKYSLPELALYNLETVTTAVVQNSLVTNQLDATPSWNQLMSRLATRSRDHYRALVHDNPDLVAFFQQVTPIEEISKLQISSRPARRKTGAKDLSSLRAIPWVFGWTQSRFLLPSWFGFGTALTEEVGGDSEQLDLLRRLHQRWPFFRMLISKVEMTLSKVDLDLAHHYMNSLGHPEQREAFEAIFQVIAKEYELTRKLVLEITGQNRLLGADQGLQLSVDLRNRTIVPLGFLQVALLKRLRDQNRQPPMSETPGAPEDTRTYSRSELLRGALLTLNGIAAGMRNTG

SEQ ID NO: 23494 - protein, 254 aa, Lactobacillus rhamnosus
MDGAILVVAATDGPMPQTREHILLARQVGVDYIVVFLNKTDLVDDPELIDLVEMEVRELLSEYDYPGDDIPVLRGSALKALEGDPEQEKVIMELMDTIDEYIPTPVRETDKPFLMPVEDVFTITGRGTVASGRIDRGTVKVGDEVEIIGLKPDVLKSTVTGLEMFRKTLDLGEAGDNVGVLLRGINRDQVERGQVLAKPGSIQLHNKFKGEVYILTKEEGGRHTPFFSNYRPQFYFHTTDVTGVIELPDGVEMV

SEQ ID NO: 23495 - protein, 224 aa, Methanosarcina mazei Go1
MTKEYVKGDLPEKAAILQRDGETYAIAPHIPGGIVYPETLRKLADIAEKYGAAALKVTSAQRIAVVGLKEEDLDSAWGELGMKPGAAIGLCVRSVKICPGTTFCKRGKQDSVGLGLKLDEKYHGMQLPSKFKMGVSGCQNSCSETIIKDVGIVGTAKGFNVSVGGNAGPRPRLGEVVAKDLSEEQVLDLVERIINFYKGYGKSKRIGAMIDEIGIEKFKEGVGL

SEQ ID NO: 23496 - protein, 440 aa, Saccharomyces cerevisiae
MSENNEFQSVTESTTAPTTSNPYGPNPADYLSNVKNFQLIDSTLREGEQFANAFFDTEKKIEIARALDDFGVDYIELTSPVASEQSRKDCEAICKLGLKAKILTHIRCHMDDARVAVETGVDGVDVVIGTSKFLRQYSHGKDMNYIAKSAVEVIEFVKSKGIEIRFSSEDSFRSDLVDLLNIYKTVDKIGVNRVGIADAVGCANPRQVYELIRTLKSVVSCDIECHFHNDTGCAIANAYTALEGGARLIDVSVLGIGERNGITPLGGLMARMIVAAPDYVRSKYKLHKIRDIENLVADAVEVNIPFNNPITGFCAFTHKAGIHAKAILANPSTYEILDPHDFGMKRYIHFANRLTGWNAIKSRVDQLNLNLTDDQIKEVTAKIKKLGDVRPLNIDDVDSIIKDFHAELSTPLLKPVNKGTDDDNIDISNGHVSKKAKVTK

SEQ ID NO: 23497 - protein, 959 aa, Synechococcus sp. WH 8102
MTSPFLQRHVGPSDSEQQQMLSALGYADMAAFLADVVPEDILDEFPPQGLLPPGCGEAEALVHLREIAAANNSRRSLIGLGYYGTSTPALIQRHVFENPAWYTAYTPYQAEIAQGRLEALLNFQTLISELTGLPIANASLLDEATAAAEAMSLSYGICRRTEANRFLVDANVLPQTWAVLQTRAEPLGIDLERVTPEQASFDASVFGVLLQLPGADGQIWDPTAVIARAHEAGALVTVAIDPLAQALIAPVASFGADIAVGSAQRFGVPMGFGGPHAAFFATKDTYKRQIPGRLVGQSRDSAGNPALRLALQTREQHIRRDKATSNICTAQVLLAVMASFYAVHHGPEGLMSIARRIVGQRRQLERALQSLGFVVPDGERFDTVTVTSALAPAVHQAVGEAGFNLRVLPDGANPAESTGFGIALDECTTADELSRLVAALATAAGQTSPSLPLAPVEELCGVPERVDPWLSQSVFHDHLSETELMRYIQRLVSRDLSLVHGMIPLGSCTMKLNAAAELLPVSWPAFAGLHPFAPMAQAAGYQRLAEQLEAWLAALTGFAAVSLQPNAGSQGEYAGLLVIRAWHRSRGDDHRDVCLIPTSAHGTNPASAVMAGLKVVAVACDADGNIDQQDLAARAAEHADRLAALMVTYPSTHGVFETGIRGICELVHRHGGQVYLDGANLNAQVGLCRPGAFGADVCHLNLHKTFCIPHGGGGPGVGPIGVADHLAPFLPGHPMQASPDQAIGPVSAAALGSASILPISWMYLRMMGAEALRQATAVALLSANYLALRLDPHYPVLFRGATGRVAHECILDLRPLKRDAGIDVDDIAKRLMDYGFHAPTVSWPVAGTVMVEPTESESLAELDRFADAMIAIRNEIRDIESGAMDASNNPLKQAPHTMAAVIAEDWDRPYSRQQAAFPLPDQQQNKVWPAVARIDNAYGDRNLICTCPSVEEIAVAVAA

SEQ ID NO: 23498 - protein, 707 aa, Triticum aestivum
GDSFWHPSDTMLSGMRISVNAEVRAQVRGPPERMLFTSWASDTDPSPGRFALGLDPANPSQAFIWRDGNVPFWRSGQWTGLNFVGIPYRPLYVYGYKQGNDPILGMYFTYTATNTSLQRFVVAPDGRDVCYMVKKSTQEWETVWVQPSNECERYGACGSNAICTVVQDGKANVFPSKGFKPKLADEWNAGNRSQGCVRNPPLDCQVNKTGDGFLSIPNVKWPDFSYWVSGVTDEYGCMNTCQQNCSCGAYVYMTQLTGCLHWGSELMDVYQFQAGGYALNLKLPASELGSHIAVWKIAAIASAVVLFVLLACLFLWWKRGRNIKDAVHRSWRRSRRSSTRSQQSAGMLDISHSIPFDDETEDGKSHELKVLSLDRIKAATGSFSESNKLGEGGFGPVYMGTLPGGEEVAVKRLCKNSGQGHEEFKNEVILIAKLQHRNLVRLLACCIQGEEKILVYEYMPNKSLDAFIFNPEKRGLLDWRTRFDIIEGIARGLLYLHRDSRLRIVHRDLKASNILLDTDMNPKISDFGMARIFGGDENQFNTNRVVRTFGYMSPEYAVEGIFSVKSDVYSFGVLILEIITRPPTRPGKRAVSFHGQQESLNIAGYAWQQWNEDKGEEMIDPLIKPSCSIRQVLRCIHIALLCVQDHAQERPDVPAVILMLSSDSSSLPMPRAPTLMLRGRALESSKSSENERSHSIGTVSMTQLHGR

SEQ ID NO: 23499 - protein, 482 aa, Oceanobacter sp. RED65
MSEEINQYIKSEYEAGFVTDIESDTLPPGLNEDVIRFISGKKNEPEWLLEWRLKAFAAWQEMQEPNWAHVTYPKPDFQALSYYSSPKSMDDGPKSLDEVDPELLRTYEKLGIPLHEQEMLAGVKNNVAMDVVFDSVSVATTFKEKLKEAGVIFMSISEAVHHHPEIVKKYLGSVVPQKDNFYAALNSAVFSDGSFVYIPKGVRCPMELSTYFRINEQNTGQFERTLIVADEGSHVSYLEGCTAPMRDENQLHAAVVELVALDNAEIKYSTVQNWYPGDSEGKGGIYNFVTKRAVAHTNAKVSWTQVETGSAVTWKYPSCVLKGDNSIGEFYSVALTNNYQQADTGTKMIHLGKNTKSTIISKGISAGKSQNAYRGLVRMNPTAEGARNFTQCDSLLIGDKCGAHTFPYIESKHPSAVIEHEATTSTVSDDQMFLCQQRGIDPEKAVSMIVNGFCKEVFKELPMEFAVEAGKLLEVSLEGSVG

SEQ ID NO: 23500 - protein, 482 aa, Idiomarina loihiensis L2TR
MNNEQVLQPDNVELIKNSRVGTSTKSSIAVDDPATGHVIGHVPDLTPRQILRAIESAETAFYKWRDVPLRERCEKLFRWYQLMHEKEEELAGILTSEQGKPLSESRGEIRYAASYIQWYAQPSLQDQGSVLPYSSIDESMIVITEPVGVCAAITPWNFPAAMITRKVAPALAAGCTMLVKPALETPLTAIAIAELAIQAGIPEGVLSIVTGDGEAIGKIFSESAVVRKLSFTGSTRVGRLLMASSASTIKRLSLELGGNAPFIVCETADVERAVQGAIQSKFRNAGQTCVCANAFYIHTKVYDEFTEKFIACVNQLMLGNGKNESVDIGPLINENALEKVEQIVADAVKKGAVIACGGERWVNSERWYYPTVLLNADSSMRCVNEEIFGPVAPIVRYNDETALLEELRQQQTGLAAYFYSQNLGQVNRLSRALEVGMIGVNSGVISDAAVPFGGVKSSGIGREGGRHGIEEYLETKYIKLSY
